United States Patent Application Publication US 2026/0103690 A1 - sequence listing, part 30

SEQ ID NO: 136725 - protein, 338 aa, unidentified
MGTYAGIDLHSSNNYIGIMDQDHKRLFGRRLPNNLEKILMVLEPYKSDLKGVVVESTYNWYWLVDGLQEHGYSVHLANPSAVKQYEGIKHTDDKWDSFWLAHMKHLNILPEGYIYPKEQRAVRDLLRRRLFFVKHRTANILSLQSTITRNLGIKMSSNAIKKLDMDDACDLFDCSNLVFMAQNNISTIKHLAKIIKGIEKQVKPQVKLRKEFEMLTTTPGIGLILGLTIMLEVGDIGRFLKVGNYSSYCRCVDSKRLSNGKKKGENNKKNGNKYLAWAYVEAAHFAQMHIAKAQRFYQHKMAKANGAVATKALANKLARASYFVMRDQVPFDEDMLFR

SEQ ID NO: 136726 - protein, 398 aa, unidentified
MTRKNTLKSLPTDTEFRVVGLDLAKSDVSVAAIPVDDNTPSLVDRMTYADLLDWAGKISPTLFAMEPCNGYSLLCLQLENLGHEIKVISGSTVSMWINTHLSGQKTDLNDAIALARLAVSDAELTPIRHKSITEIRIQTVQAVRQQLMSQRSKSIVSFKALAQQWGIPCAAGHRNLKKLRESIEAKVDLITRPVANAMLFLLDAVKSLDRQIGQLNQTLQELVMSDERGRLLQSVLGVGTQISARVITVVGNIERFNSPRSLVAYVGVAPRNFITGHKNLTKKKHGNCPDLSHKGQGKISRRGDKLLRSLFIQGAACLYMQFCKDQLPECQLKRWILKQLARQKTYGKLIVSLAAKLIRIVWAVLTYREKFNIQKAGMTRSMWSEMALETPLNKEVPA

SEQ ID NO: 136727 - protein, 342 aa, unidentified
MSQFYLGVDLHLKRSYVILMDADGKMLDKRSLENSKMRDYLSEKVPPKTHAVLEATRNWPFMYDMLSEHVDRVDLAHPKELKAIASAAVKTDRIDAGVLAHLARLNYLPVAYAAPTEVRDLRLWTRHRAWLIRQRTQCKNRIHAVLASYNYVSPVSDLFGFSGRAYLEDIMAGGMRSAALRVIEDNMKLIDHLEQEIEALERDLELTPEQRDRVRLLRTVPGIGGVHAVTILAEIGDIQRFNSPKALCNWAGLTPRVRKSDRIARYGRISKQGSPYLRAAMVQAASVAVRVSPRWKIIYDRLALRCGKMAARVAVGRRLLTVVYCMLKREEPYCEDYQAQPR

SEQ ID NO: 136728 - protein, 313 aa, unidentified
MKREVFVGIDVSGERLDVCVLPEGVEESFDNNDEGVGSLGREIAKRKAALVVLEATGGLERLVVAHLAAEGIAVVVANPRRVRQYAQAAGVLAKTDKVDARVLALFGRDMKPEPRALRSEQEEAIRALVARRSQLMGMRVAETNRLRRADNRKVASSIKAVLKTFERQISAVDAEIDDAIKGSPVWRVADELLRSVPGVGEKTSRMLIAALPEIGRLTSKEAASLAGLAPFAHDSGKMKGRRMIRGGRSSVRRALYMSALVASRHNEDIRVFYQRLRGNGKSGKVALTACMRKLLITLNAVVARGTKWVPKNA

SEQ ID NO: 136729 - protein, 362 aa, unidentified
MPRMPQPVEDDQNSSPEEVILGVDTHKDLHVAAVLTVLGALRETKTFPATAAGYQALLAWVGTFGILRRAGVECTGSYGAALARYLRAAGVEVIEVNQPDKATRRQRGKTDTLDAEAAARAVLSGRASATAKAGDGPVEMLRMFKLAKASAIKARTQTINQLKAVLVAADPQLRETLSGLSNLRLIRRCADLDIDTPQDTTSAAAYTLQLLARRIQTLTDEIRELDHQITIAVTSHTPQLLTRCGVGPDNAAALLIAAGDNPDRLHSEASFAALCGVSPLEASSGKTSRRRLNRGGDRQANSALYRIALCRLRWDPRTRDYLARRITEGKTRREAIRCLKRYIAREIYRIITSPPETQPSAA

SEQ ID NO: 136730 - protein, 400 aa, unidentified
MLSIGIDVSKGKSTVCGMKPGGEIVYAPFEVQHTREGMSELVSLLRSSGEEVRAVLESTGSYHCPVVAALLENGIFVSVVNSLRMKRFCSQSIRKVKTDRIDAMQIALYGLAYWQELQPARLPEDTYRELQLLARQYYQMTSILIKAKVDFNAICDQVLPGMQELMSDHAGRHKLSDFVLRYHHTTHILEMGETRFRKDYCKWAEKKGYRNRERMAALIFATAQNGIPVLPNAPSTQIVITEAIRVLHTVEASRDAILTQMQALAKTLPEYSLVREMPCIGDTLAPRLIAEIGDVRRFHSKRALIAYAGIDAPPYQSGKFCANNRHISKRGNRYLRKTGYEVMQSYVMHKPANDPIFTFIEKKSGEGKSGKLAMVAGLNKFLRVYYGKVTELYRSLPAIE

SEQ ID NO: 136731 - protein, 342 aa, unidentified
MAKLYVGLDLGSRHIELVAMRLNGKVIKQRRFPTSESNLRQEFEALTGEVHVHMEAGELAAWVREVIKPYAKSIIIAHARDNAWIAKDPNKRDRVDAFKLADLLRMNRVHPVYYADDRARRDFKQLVQHYGDLTAQEVALKAMIKSRLRTQGVIVHNAAPFTEQGCKDVVARVPSAEIRKAIRQLYKVLAHTLEVRDEAYTAMVKAGRQFPEIKLFQETVPGVGPIGAARFSAYVQTPYRFSNKRKLWRYCRLGVSYRSSDGQLLSHPKLDRAGCGPLKDLARKAFEVAVNSEDDNQFKRAYEQVLARTHDKTHARLTVMRKIVSVLRAMWLTNSPYQDELG

SEQ ID NO: 136732 - protein, 428 aa, unidentified
MPQGSGLQGATLAHVTTSTIDPTLTEAAATEVFAGIDWGGSFHQICLIDEDGKVLRQQRVPHDAAGFDELDRLLTCHRARLRVAIERAEGLLVEHLHLLGVEIFCVSPKISARARERYRMAAAKSDAFDAFVLADTLRHEHRHWRALTPPSPVLAELRAISRDRDRIVIAQQATENRLRAVLEAYHPAPLHLFSTLDRDITLDFITDYPTPEQAGRVGTARMDGFCRRHGYSGRTQPEVLVERLRPHLLSAGEGTVAGKAFSASLFTEQLRMLNTHLRAYDKRLDELLERHPDTPIFTSFPGVGPLVAATLISEMGDDRHRFPAPGALLAEAGLSPVTRASGRTRQVRFRYASNRRMRHMIDWWMFTAIREDDWTRQAYDHARARGQGKYRALRGLGSRWTRILWRCWTDHTRYDPAIHHRNPEPTTA

SEQ ID NO: 136733 - protein, 348 aa, unidentified
MEQITTIGLDLAKQVFQVHAADADGVPIFNRKLRRAEVLRFFEKTPACLVGMEACGSAHYWAREIRGLGHDVRLIPPVYVKPFVKRGKTDAADAEAISEAVTRKTMRFVPVKSAEQQAAAIVLKTRALLVNQRTQVINALRGHLSEFGIIAATGTTKVAVLISIVRDNTDLRLPKAARIALMEVASQIDALKAQIEKLEQAIVATVKRDDDARRLVTIPGVGAITAASVRALVPDPGGFKSGRHFAAWLGLTPKDHSSAGKTRLGKITRAGDERLRSLLVAGATAVIQQVRRGRGRPSPWLLASLKRKSPKLAAVALANKIARIAWKLMVTGERYDGARMLGASAVVA

SEQ ID NO: 136734 - protein, 469 aa, unidentified
MKGYAAATGATSQKTGPAGLEIVHPDAAGIDVGAGEMWVCVPVGRGPERVRRFGTVTSQLLAIADWLKACGVATVAMESTGVYWIALFQILEGRGFEVYLVNARHVKNVPGRRKTDRLDCQWLQKLHACGLLRASFRPVAAVCALRSLLRQRDNLIRLAARHIQHMQKALREMNVLLDQVTTDITGTTGLRIIEAILGGCRDCAQMARLRDGRLQASEAQIAEALRGDYRPEHLFVLKQALAAYRFVWEQIQQLDAEVEQGLNAMVAHAGRSAVALPEAGLTGREKRRGNAPDYDVQAHLYRLTGVDLTRIPGLGAAAIQTLISETGADMTRWPTEKHFASWLGLAPDPKISGGQVIGQTRRHVQSRAARILRVGAMTLRRSPSWLGAFYRRIKARAGGAMAITATAHKLAVIYYTMLRTGQEYRALSATDYEQRFQERMLRNLKRRAQQCGFELVATAPSGSILTAAN

SEQ ID NO: 136735 - protein, 360 aa, unidentified
MFSERTSVGLDVHARSVVAAAIDGVTGEVFRARLTPDHGQIVRWVRALPGTAAATYEAGPTGFGLYRALTAAGVRCQVAAPSKLQRPSGDRVKTDQRDALHLARLLRLDEVTSVTVPSIDQEAARDLVRAREDCRGDLMRARHRLSKLLLRQGIVYCGGQAWTGAHDAWLRRQRLESAASRLAFESDFEAVLTVKARRDRLDAAIAVMASDSEFTPVVHRLGCLRGVSTLTGFALAVEIGDWHRFTGNTIGSFVGLVPSEYSSGASRVQGSVTKTGNGHARRLLVEAAWHHRARYVVGTTMRQRWELAPVAARARGDEGNRRLHHRWVTFTERHKRHVIANVAIARELAGWCWSLAVMDD

SEQ ID NO: 136736 - protein, 365 aa, unidentified
MQSTATVTTIAIDLAKNVFQLALADRDLRVFRSLRLRRKEFLAFWSNYPVVQVVMEACGSAHHFGRWVSALGHRVTLLPAQHVYRRRRNKTDAIDCVALLEALRAADIRPVPIKTESQQVIQMLHRARQQWQKMRTAQINLARGALREFGIAVPEGAARAVACMRAEQANAQLDPMIRGLLQSLLEEIAMLERRVADVDRQFAAASRTDVVLHKLQTLPGIGWVTASAIRASVGDIERFANARSFSAWIGMTPAQTASGDKRKLGRSKQGDTYVRTLVIQGARAVLAAAQRQRLTTRPLSAPGHWAATLADRRGFNKAAVGSGQQAAAYCRRNQKVPIKGRIDDCTDPASTIRSTSKRLTWGRSP

SEQ ID NO: 136737 - protein, 385 aa, unidentified
MKKNTTAKKSQKQVKGQKPEIHRLAAKQKLTVGLDLGDKSSRYCILDEAGEVVNEDQVPTTKAGLDSLFAKMPASRIALEVGTHSPWVSRHLASMGHEVIVANAHKVKLITQSVRKNDRMDARQLARLARVDPKLLSPIRHRGEQAQRDLAVIRARAELLAARTKLINSARGLVKPMGERLKQCDADQVGTGLGESLSEGARAVIGPLLKAVEALSEQLGKYEEQIDGMAKRYPEVKVLQQVYGVGPLIAMTYVLTLEDAGRFAHSREVGPYLGLTPKQRDSGDSQPELGISKAGDGLLRSLLVQGAHCMLRKKAPESDLRAWGLGKMGSGGKRAKKRAIVAVARRLAVLLHHLWATGEVYDPQYNRKAVEAAAAKAKGKGKVAA

SEQ ID NO: 136738 - protein, 340 aa, unidentified
MNATTYGLDIAKRVFQLYWVDPQTGEIANRKFGRDDLIAFLARRPAGRVALEACGSAHWWARKIRALGHEVVLLHAQFIRPFVQTNKTDAADARAIWTAVQQPGMRTVAAKTEDQQVMLSLHRMRSLLVKFRTMQINQLRGLLYEFGVTFRAGRVAGLDEIRERMAELEDTLPRSILINLLEQLRRINLFEEDINQLEKRIGAWQKHEAACRAISEVPGIGRLTATALVATIGDAKTFRSGREFAAYLGLVPRQNGTGGKIRLGSISRRGDPYLRTLLIHGARSVLCHTKVPTAWQKAIQVRRPANVATVALANKMARIAWAILAHGTSYEAHHVSNRPA

SEQ ID NO: 136739 - protein, 409 aa, unidentified
MDRMIERACGLDVHKATITACVRVAGSEGERRQEVRTFGTTTSELLALRDWLEAHEVTHVAMESTGVYWKAVYYLLEDRFTCLLVNPAHMKQVPGRKTDVQDAAWIAQLLEHGLLRGSFVPPAPIRELRDFTRYRKVLIQERTREANRVQKVLEDAGIKLATVATDVLGVSGRAMLDALVRGTTDPDVLADLARGKLRTKLPALRQALAGRFRPHHTFLLSQILGHLDYLDEAIVALSAQVEAVIAPFAETIHRLDTIPGVNQRVAEVLVAELGVDMAVFPSAGHLASWAGLCPGHHESAGKRHAGTTRRGNRWLRATLIQAALAAARTRHSAFGARYRRVLRHRGHKKAVVAVAHALLVTAYHVLASQTTYRELGADYYDRGHTGRATRRAVQALERQGYRVTLERAA

SEQ ID NO: 136740 - protein, 342 aa, unidentified
MDHYAGIDVSLEQSSVCIVDGSGKIIREGKVVSDPEALTSWFGALGLSLARIGLEAGPLSQWLFTAMKKAGLAVELLETRHVRDAFKAMPVKSDRNDARGIAQLMRLGWFRPVHCKSIGAQETRAVLTARKLIQSKLLDVENSLRGILRGFGLKVGKTTNRSFADRIRDLVINHASLQAIATALLSVHAVLLRELKAFDKQVRSMARGDAKTKLLMSTPAVGPIVALTYASAIDDPSRFKSSKRVGAHFGLTPKKYQSGDTDYTGRISKIGDATVRTALYEAAHIMLIKPIKGCSQLKSWAMRIARRSGMKKAKVALARKLAVILHRMLANGTPFNAAMATA

SEQ ID NO: 136741 - protein, 368 aa, unidentified
MSSVASPEGLIHLGMDTSKNTIVVATLLPGEESPVTDRVFNEEEAIRRLVGRFPDRSVLRAWYEAGPGGYDLYRLLTSMGVACQVVAPSLIPKGGSDKVKTDKRDSRRLARLGRAGELTPVRVPSAAEEAVRDLARARAVVLDDRKRARQRLIAVLMRHGRIWRGASYWTAAHRAWIAAQQFSEPALTSAVGHYRAALEVREAELAAIEAELAPWAAREPLAGPVARLGCYRGIAELSGLTLAAEVVDWRRFPAARAFMSYTGLVPAEYSSGDRTRRGHITKAGSEPVRTALTEAACAYRHGPAIGAGLRRRQHGAAPETLARSWTAQRRLHARYVHLVHAGGKAAPEAVVAVARELAGFVWAEMTAA

SEQ ID NO: 136742 - protein, 312 aa, unidentified
MANIICGVDVSSQVLDARIGFDGAAGQFERTAEGIAALADFCRQHAVDLVALEATGGYEKLPFMLLWAAGVPSAIVNPRSVRRFAEGMGLLEKTDRIDCGVIAWYAAVKRIVPHEPPAEAQQRLTALVCRLKQLTELRVMQINQRRLICDADAIASIDAIIALVRKQIRQFEAAIAELITADPLWRALDQAFRTIKGVADRTVARLMADLPEIGTLTNKASAKLVGVAPIAKDSGKIAGKRQVRGGRRSVRDILFVVAEIVRRHDPDFRDFHRKLSQAGKPKKVIRIALARKLLVRLNAKARDVRSQLALAA

SEQ ID NO: 136743 - protein, 275 aa, unidentified
MAKDTIGIDVSKDSLDAFWHSRTEACCLPNTPEGFRQLYDWLANEEDFLIVFKATGAYHRGLEWYLSLAELPFIKVNPKQARRFAQAIGRLAKTDSVDARMLARMGVVLDLAPQVAEGEDVHDLRELLTARRALVKDQVTAKTRLATALNPLAREQLGRRIEGIGADIQALDVVIAQIAKQRGTLEERICRLMTILGIGRPTATTMLIDMPELGHLDGKKITALAGLAPMTSNRESGRARRGSPGVGHQFGARSTCPHLSPSASTGTFTTSISNY

SEQ ID NO: 136744 - protein, 466 aa, unidentified
MKKMPLTVVNPHAAGIDVGSRTHFVAIGQEQKDVKSFGVYAEDLSSLVKWLIDSQVTTVAMESTGAYWQNLFVELINSGIEVVLTNGKFTKNINRKKTDVLDCQWIQKMHSLGLLPSSFLPDHTTERLRTLCRHRTNMIQQRADSIHKMAKFLKYLNFRLDVVVRDIAGQTGLKIIEEICNGNLDPKALAAHRHHNCRRSEEEIAKALVSNKREDYLFGLKQEFARHQFYTSMVIDCDKEISQFLEQTIQQKEDVVDDIPDGKYFKRQNKNAITGIDLNIASYQYFNGVDLLAIPGVSHSTILSLMSEIGPDGFNQFPTAQHFASWLKLAPNNKISGGRVLSNRIPQGSNRLKIALRNAANAVGNLKDSDLTKFFKKIAFKKGRQTAINATARKIAVILWNMITKRQPYKPKNNYLFLDQKRRIVSRMRKQIADLGINPDDLGFSRANRDKIAAQMPSDYQPFSLR

SEQ ID NO: 136745 - protein, 407 aa, unidentified
MYLLKTVFGIDVSSRKSNVCIMVNGQKVNDYAISNDMVGFNRLLGDLKQVTKPQIIFEATGVYSRRLQAFLDMHELRYVMMNPLEAKRKTKDDLHQNKTDKLDALYLAKLQSEHPQRLAYVQNKEYQELMANNRIYEQASHDLITNRNRLHKAIQLTFPEIEHLMVNPRGKNYWSIALRFPHPDIVLETKEADIIDFLKGLSGIGKKRANDITQSLIRLAKVACPAVKKNSAHIRGLKMAINNILSAEEECQTALQEMAKLAPKRDLEILTSIPGIGENTALRIISELGDIRRFNNPSQLNAFVGVDPQVYESGNLTAHLSISKRGTAIGRKVLYLAINQIQSAKKAGNPCHIADYYEKRKRSSETASHKKAAIASIHKLLRTMFALIKNDQLYSYDVAKHNQRLLS

SEQ ID NO: 136746 - protein, 348 aa, unidentified
MVILGVDSHKRTHTVVAVDANGRKLAEKTVAAISAGHLELVRWAGRFADRRWALEDCRHLSRRLSTDLLCAGEAVVRVPPKLMAGARRSSREPGKSDPIDALAVARAALREDLPVATLDGPEREVRLLVDHREDLVAERTRAQNRLRWHLHELDPGTEPPARALDRAVVLTALEARLAGQPGTVARIARELVGRIRELTTTINALEREIGRLVGALAPSLLALTGCGPLTAAKLVGETAGIGRFRSAAAFARHNGSAPLPVWSGNTERHRLSRTGNRQLNVALHRIAITQLQREGPGKTYLEHRRALGNTKTEAIRALRRRISDEVFRRMRHDEAARVAESSRLAAAA

SEQ ID NO: 136747 - protein, 394 aa, unidentified
MPKIVYPICCGIDVHKSFIVVCIATTDEKLVTTYKSKRFSTFTGDLRRLSDWLVQNNCRDVCMESTGKYWIPVYNILESTCHVVLAHPKYVKAIKGKKTDKRDAKWIADIFKHDLINGSFIPPVDIRQLRDLVRYHYKLTGYTTGEKNRAQNCLTVSNIKLDDVFSDVFGKAASAITERLLENSEPFDVKPYLTKGIKASPEEIQLAVDGVMCVNQAEKLRIIRSHMASLELCKANLESEILSIAEKFLPQINFVLTIPGIQTFSAIAIIGEIGADMSVFETSRHLCSWAGLAPQNDQSAGKKKTTRISRAGVYIKPLLVQCANCAIRSKTNPEIANRYNAIKKRRGHKKAIIAIARMMLTAIYNILKKNEPYNAELYRKADAPPAKGRPELFV

SEQ ID NO: 136748 - protein, 346 aa, unidentified
MEQYVGLDVSLKLTAICIVDRTGKIDREGVVASDPETIAAFVRSHAPHVARVGLETGATSTWLWTELNKLGLPVICIDARHAKAALKMQINKSDRNDAVGIARIMQCGWYKEVRVKDLGSHAIKALLVSRALLVKIKRDIENQIRGLLKNLGLVIGRAKMNVFAVRAAQLAESRPELAAAVEPLLKAREAIERQIADLDRKVMRLARNDAQVRRFMTAPGVGAITGLCFLATVDDPTRFKRSRSVGAYVGLTTRRYASGEIDWTGRISKCGDAMLRSYLYEAANVLLTRVAKWSTLKAWGIRLAKRSGLRKAKVAVARKLAVILHRMWIEGTEFKWSLKEAANQPA

SEQ ID NO: 136749 - protein, 387 aa, unidentified
MDVRTVNNLPPAAAHDEAVRCLLAIELSKKSWIVAVNTPLSEKISRYRLKGCDWKGLLELIEKIRGRVARELNRPVEIISCYEAGYDGFWLHRLLEAHGVRNYVIDPASIQVDRRARRAKTDNIDVAQLLRSLMAYLRGDPKVWSVVRVPSIAEEDARRLHRERDRLINERVQHVNRVKGLCAVHGIYDYEPLRSNRMLRLEQLRTGDGRKLPPYLKAEIVRELQRLELVLTMIKTIEAERKAIISDKSPHLNVKKIQDLIKIKSIGPGISTVLVGEVFYRKFNNRQRLGSYVGLTPSHFQSGPMSRDQGISKAGNPKARTVMIELAWIWLRYQPNSPLSVWFHQRVGTAKGRIRRIAIVAVARKLLIALWRYLETGLVPTSAVVRG

SEQ ID NO: 136750 - protein, 373 aa, unidentified
MPKYSTAFGMDVHLRSTTVCALDADTGEAVTRRFPGNPWGEIAGWMDGFPGPSLAAYESGYPGFAPQRELAGLGVECVVAAVSKIPRSAADSASKNDRNDAARMAKAILAHDISPVWVPSPEVEGIRDLAGAYDGATARLATAKQRLLAFLAKRGFAYGGTTPAGNPRKYWTYDFLRWLDKVRPEDDGGVRTLAALRSEVEAAAEARADLLSEYRAAVDASPIAAEVAALQSIKGCAFALAAAFSAEVGDFTRFRSGRQVTAYFGLAPSQRSSGDSVRLGGISGAGNALVRKLAVEGSWCYAAARHQPKLMPRDTGVPLEIRMHGRKGSERLLRRREEMLARGMPAAKANAATAAELVRWLWALGMMCREGAE

SEQ ID NO: 136751 - protein, 313 aa, unidentified
MDMNESVVVGIDASKDRLDVALHPSGEHFAVSNDHAGLEELITRLGASRPTIVGLEATGGYEMLAVGSLSAAGFGVVVVNPAQVRAFANALGRRAKTDPIDAAVIAAFLLATKPAIRPLRDAETQALSELIARRRQIVQMVVAEENRLRMAQAKQAQKSIKRLLTALRRELENLDADLDNHIRKSPVWQVREALLTSVPGVGPTTARTLLAELPELGSLDRRQIASLAGLAPWTRQSGKWKGKSFIGGGRGKVRAVLFMAALVASRYNPDLKAFRDRLVAEGKPKIVATVATMRKLLTILNAIIRDGRPWQNA

SEQ ID NO: 136752 - protein, 340 aa, unidentified
MEPIIGIDLAKRVFQLHIATLQGQIKANKLIIREKLMVFIVQQPPSRIVMEACGSANYWARQFRKYGHDVKQISPQHVAPFRMGNKNDKNDAIAIVEADSRPGMRYVPEKNLEQQDMQCLHRVRQSLMKNRTALINQIRGLGLEYGITIPEGPHKIALCLPDYLEDAKNELTAMSRQLFHELLQELREYQQRLKERDKRLEHIGSLNEDTTRLQSLPGIGVLGASALTVALGDSSDFKNDRHFASYQGLVPKEHSSGGKVKLLGITKRGDAYLRGLLIHGARSVVYRIGNLPDERCNDLQRWLKGIIARSGVNKAVVALANKNTRMAWALVNQQTIYVSK

SEQ ID NO: 136753 - protein, 340 aa, unidentified
MTHIAMDVHKKRSVLACEIPAQAEPEVVQCYTTRASIAKVLDGLPRPWIVCLEATRQSPAVVRWLRELGVDEIHLVDPKGLKAFLKGKPKSDARDAKEMLALLQIGRLPKAYLAPPEVQEVRALTRARQFVRRGSTSWRNQLRALLNQHGLEVPARNLCGIAGQRQLAESIAQLGPHGEAAAQELNAVLRATEATLDVLDGRVCEELARQPVAQALMALPGIGPVMALALVAELGDLERFPDVPHLLSYAGLAPRANDSDEHQGERHLPQRCNKRLRHLTIQAAQAASRSHQPSNARRTYQRLRGRGLHHNTAKVAAARDLLKDIFYGWKRAQDQTQPAA

SEQ ID NO: 136754 - protein, 315 aa, unidentified
MSSQVFVGIDVAKAQLDIALRPTGERWAVSNDDAGIAALVTRLQEIAPQLIVLEATGTYQRAAVAALAVVGLPVAVVNPRQARDFAKATGQLAKTDALDARALAHFAEAVRPMPRPLPDAQADELRALLARRRQLVAMRTAEQNRLGSAPPRLQADIQAHIAGLNTRLAALDDDLDTTLRASQVWREREELLRSLPGIGPVCARTLLLDLPELGTLSRQRLAALVGVAPLNRDSGTLRGSRTTWGGRAHVRATLYMSTLVAVRYNPVLKAFYERLRATGKAAKVALTACMRKLLTILNAMVKHHTAWQPQEVPSA

SEQ ID NO: 136755 - protein, 351 aa, unidentified
MYYTGIDLHKFTSYLTTVDSSGAIVKQENLKNVAHNFIQYFSSIPGEHKTTVESTMTWYWLNDLLTSINIPLVLAHAKYVKAIAYAKVKTDKVDSHTLAQLLRMNYIPVAHKISNDNRLLRDALRARLKIVQRHTSVTNSMQLLLAKYNYDSPTQLSGIPEFQYEQLTEVEELLNEQMLDLEKQLYPFLIPNDDIQRLLWIPGIGKMNAFTILLEIDDINRFPDVKNFFSYCRLVPSARNSGGKSKQRSSKDGNKYLKVAFSDAAVHAVQYYPVIRKYHNSLLRKKNKQIAKTIIAKEIAEIVYHVLKNKTDFNNKFKGQELEHKKSLQWPRNYKPVRITSPSRLCRWIGK

SEQ ID NO: 136756 - protein, 405 aa, unidentified
MRYYLGVDWADQTHAVWVVDESGTKIAARAVSHTAEGLGEWGRELDEWRAQGIALWAAIERPDGRVVDCLLDHGVVVYPVNPKALDRARDRFRQSGAKSDPFDARVLADFLRTDHAHLRALQPSSEAAQELKLLTEDCQRHIRQQTRLVNQLTATLKAYYPRALEVAEVTSALAREFLPAYPTPEALTALTERQWQRWARAHRLPEARAGELWAVLRQPQLPVPAHVVRAKARLMQTLMEQLRPVVAAVAQYRKAIDDFFASMPAAQWARTLPIGKHGITAPTLWARLGDAPGRWESFRHLQAHAGTVPVTKRSGKQQRVVQFRFACDKALRYVVDQVAYLSLLSSAWARPYYDQQRARGHSHRQALRALGAKWLKIIFIMWQRQVPYDEQYHLATMTRQQLGRR

SEQ ID NO: 136757 - protein, 365 aa, unidentified
MTKVRTWAGLDVHAAATVACVVDAPSGEMSVHRLAGRTSEVTAFCSRLPAPVRVAYEAGPTGFELARALDASGVSCVVAAPGKIERPAQDRVKTDRRDAERLVRLLMIGGLHPVRVPSSEEEALRDLVRAREDIRGDLMRSRHRLSKLLLRHDVRYDDSASAWTKAHRAWLSGVDLGEPAAQATLLDYLGAIDGLAIRRDAIERLIAELVPHSPWAVQIARLRCLRGIETLSAVGLCAEIGDFSRFEHPRQLMSYLGLVPSEHSSGQTRRQGAITKSGSRHARRLLVEAAWHYRRPPRRGTTLERRHEGQPAQALAISWKAQQRLHQLWRRLHTRRGKRKTVVAVAVARHLAGFCWAITTIDTDT

SEQ ID NO: 136758 - protein, 419 aa, unidentified
MRFIALDVHRDFSEVAIAEGGQVRLAGRVETTPAGLELFAQSLGADDQVVLEATGNALAIARVIEPHVARVVLANPKAVKGATQTAKTDKLDARTLAQLLAAGFLPEVWTPDERTRALRRRISRRAQLVRQRTREKNQIHAILIRNLKARPPVTDLFGVQGRKWLSGQGLPDDEREMVEACLRGIDFLDREVLAIDRALAELVLASPEMRRLMTLPGVNFVTAAGLLAAIGDAKRFPTARHLVSYLGLDPRVRQSGSEPARHGRISKQGPGEARHVLVEAAWHAARTTGPLRAFAERVAARRGANVATVAVARKLAVIAWHMLTRGEDYAFVRPSLVREKIRRLELMVGAERRQGRRNPVRVFATSEQHRLEKELAAQAELAYRRLMVDWKAQRRKGTGAAPGRASSAARQGTAPHPAL

SEQ ID NO: 136759 - protein, 408 aa, unidentified
MEVIHERCAGLDVHKETVVGCVRVSERGAVRHEVRRFATTTAGLLELGDWLRQAGCTHVAMEATGVYWKPVWHILEGEFELVLANPAHIRNVPGRKSDVNDATWIADLLAHGLIRASLVPPGPIQELRDLTRTRKQLMREVVQHKLRIQKVLEDANVKLASVVSDVFGQSGRRILKALIAGQTDARQLAALGSDQLSASRETLATALHGKVTAHHRFLLKQHLQMIEHLEQTAREFEAQIEAALEPFRAAVERLMTIPGVSATAASVIIAEIGLDMGRFATPGHLRSWAGLCPQLNESAGKVMSRRLRYGAPWLKTVLVQCAWAATRNKHNYLHAQFLRLRARRGPKKAILAVAASILTAAYYVLRDQVPYRDLGPLYFARLDQDRTVQRLARRITELGYEVQIRKAA

SEQ ID NO: 136760 - protein, 488 aa, unidentified
MRNRKESTFERLTRGRLNRKQRKELSRRLYADSPGLEIVHRNAAGIDVGNESHYVAVAPGLDPQPVREFGSWTADLHAMADWLKSLGIEHVVMQSTGVYWIGVYEVLEKRGFQVCLTNARDTKSLPGRKTDVQESQWLMKLHTYGLLRGSFRPPEEIRRLRTIWRLRDRHVREAGREIQHMQKALTTMNVQLANVISDLSGLTGQAIVRAILKGERDPYQLARRKDPRIKASEEEIARSLEGRWQEETLFELQQAVDHYDFCYAQIAKCDQRLKQYLEAMPSRAVAEAELEETKPEASAAVRSGGKRKKKRAGRKARKNEPGFDLDGELARICGVRLTAIEGVDVMTIQTWVSELGVDMRPWRSEAHLVSWLMLSPKRQISGGKLIKHERRQAKNRVANALRMAASTLLRSDSYLGARYRYLRSRLGAGKAVKAMAAHLARLIYRMLTRGQAWVDRGAAEHQKRRCEREKMALERKATAMGFRLIPAA

SEQ ID NO: 136761 - protein, 315 aa, unidentified
MTAPTERFVGIDVSKDRLDAHVRPDDTARHFANTPEGLDALLDWLRPLGVALVVVEASGGYERAVLAALSLGGLPVSLVNPKRVREFAKAIGRLAKTDAIDAAVLAHFAQTLRPSVWSMPDPDAQVLQALLARRAQLVGMRTAEKNRLAGLTVARVRRSVQNVIRPLDREIRRADKDLGDAIRACPGWAAKDDLLRSIPGIGPTVSRTLLLEMPELGTLTREQAAALAGVAPINRESGQYRGKRMIAGGRAVVRSMLYLAGHAARRGNATLRAFADRLKAGGKAPKVIRVALARKLVILANAVLRDNTAWTLKTA

SEQ ID NO: 136762 - protein, 340 aa, unidentified
MEHIAAVDLHSDNGYYGIIEPDGKRVYQKRLPNDLTTVLKELAPYRETIRCIVIESTYNWYWLGDGLREQGYRVKLANPAKFEKYNDLKYTDDKTDTFFLTEMERLNILPTGHIYPREERGIRDLLRRRMLLVQQKTSHILSFQSLISRQTGGSITSNDIKKLATEDAEKLLEGQERHVVFAGQSNIAIIGFLQERIRLLEKMVLASARLRTEYEKLQSIPGIGKILALVIMYETGAVGRFKAAGNYVSYCRCVKSNHLSNGKKKGSGNRKNGNKYLSWAYVEAANYSRRYCEEAKKYYQRKLAKGNSAIATKALAAKLCRAAYFIMRDQVEFDVTRMFG

SEQ ID NO: 136763 - protein, 345 aa, unidentified
MQVTTVGLDLAKRVFQVHAVDTSGHVVVRRALRRSQVLPFFAKLPSCLIGVEACGTAHYWARELTKLGHEVRLMPPAYVKPYVKRGKNDAVDAEAICEAVTRPTMRFVAMKSADQQAALSLHRTRNLLVKQRTQLVNMIRGLLAEFGIDIPEGLERALGLARQIAAKEAVPNVPAMAVQIIDLLCGQVLDTHARLQAIDRSLLALQRSDDVARRLSTIPGIGPVGATALAASVADPTQFRSGREFAAWLGLTPSQNSSGGKDRLGRITKMGDRYLRKLLVVGATSLIRRARHKPETADPRLVALLARKPVRVASVAMANKMARIVWAIMARGETYQAHHAPMMAG

SEQ ID NO: 136764 - protein, 403 aa, unidentified
MQNYVGLDWGGSAHALCVVDSSGKVVQTLTSEHSAEGLSALLRQLKRIAPPAELSVAIERPNGLLVDTLVRAGHPVIPIHPNVLKASRSRYRAARSKSDPGDAYILADLLRTDGHRFGPLRPNSDELRALQALVRTRDDLVGERVRTANRLRALLDEFWPGGDALFADLDGKISLAFLKRYATPSSAARLTVAQLARFLQLHRYPGRRTPDELLQRLRAAPEGLVGLREEAVKGALVKSLVAVLEVLVAQIGALTAQIETAVEELPLGKIMMSFPRAGRLNAAQIVAELGDAPQRFQSEGQLAAEAGVAPVTRASGKSHVVGARYACNTRLRVAMTLWANNSRFASPWAADVYARARARGCRHPHAVRILARAWVRVLWRCWQANTPYDAALHGAAKPHLQAA

SEQ ID NO: 136765 - protein, 347 aa, unidentified
MRFYQPHTQFYCGVDLHTRNMYLCILTRDNDVLFHRGMKNDPKRFLKTIEPYRESVVVVAESTSSWYWLADLCADQDLEFVLGHALYMKAIHGAKTKNDRIDSEKIAKLTAGSLLPQSYVYPRAHRSVRDLLRRRLKLVRQRAELYAHVRTVNTQFNLPALGDDLKRKAKRESIPEHFDDSAARRSVEADLELIDSYDPLVYSLERYIDRATRDIYAKERAILQSVPGIGTIISLTILLEIDRIDRFPTRQKFSLYSRLVYPRGESDGKLYGVQGRKHGNPYLKWAFSEAVVCAARECEEIAKCLSRLERKYGKGKGKSILGHKLGRCVYCMLLREKVFDLDKFLRR

SEQ ID NO: 136766 - protein, 393 aa, unidentified
MTTTREQQSSVPNVRLHLAFDLGWSEWKLAFTIGHGQSPRLRTIRARDQEAVLREIARAKERFGLPAETPVVSCYEAGRDGFWLHRWLLAQGIANVVVDSSSIEVNRRSRRAKSDRLDAGKLVAMLLRYHAGETKLWSVCRIPDVADEDRRRLHRELIELKDERTRHINRLKGLLANQGVALAAVDASFPEKMQEIRLWDGSELAADLKGQLLREHARWQFVDRQVRDLEGERSKRIRRDDTPQVSQVRRLLGLLGVGLNGAWLLVFELFGWRRIRNRKELGSMVGLTPTAYQSGSSSHEQGISRAGNRRVRRVLVELAWCWLRWQPNSALSHWYVRRFGVGARARKVGIVALARKLLIALWRWLEHGELPEGARECPWRPKVNGVPKGTGAA

SEQ ID NO: 136767 - protein, 355 aa, unidentified
MKNQAIHYLGLDVHQGTVVANVRNEQGTVVMNATVPTEAKAILGLVRAAGGRVHVAFEEGTQAQWLHDLLEPHAERVIVCNVRGKSEVENKNDRIDAGDLSERLRLGSLKAVYHGSRGVLTLKELVRNYNSLIQDATRVMLRIKALFRARAIPTPGTSVYRAARRQEWLDQLTMPGARVRAECLLEQLDLLLKQRPKAKAAMIAEAKKQAGWKSVRSIPFLGDVRTAQLMAIMATPHRFRTKRNLWPYAGLAVVTRSSADREFVGGQLRRRARPPRTRGLNRNHNPMLKSILKGAATAAAAKPGPLKDIYEACLARGTKPEMATLTLTRKIASIVLRLWKKGELWDPAKLTMQTT

SEQ ID NO: 136768 - protein, 352 aa, unidentified
MTEISKDQSITFVGIDLAKRSFHVYAADEHGQRVFSKKVTRARLPGFIAQLPPCTIAMEACGSAHYWARRFREAGHEVRLIAPQFVKPFVKSNKNDAADAEAICEAVQRPNMRFVAIKNVEQQDIQAVHRLRSLAVGQRTALINQTRGLLLEYGIEVAQGRAALRRRLPEILEDADNGLSERFRAELQRLYEELQHLNERVAHYDEQIDQVAKDNAQAQALMQLPGIGAKGATALLAAVGEDPSLLKNGRGMAAWLGLVPRQHSTGGKDRLLGISKRGDVYLRQLLIHGARAVLRCAERKDDALSRWAVALKARRHPNVATVALANKLARIAYAILTTGQPYDANRTISVAL

SEQ ID NO: 136769 - protein, 377 aa, unidentified
MDQQTGEIISQPVSFSNDKEGFDFLVQKIKSYPKDSILIGMEDKGHYHFALLKYLLDLQYTVALINPKTTDFNRKMQGGITKNDKLDTINICDVLDTPERKKQYRITKVNSFDLYEQKQLTRHHHNLKEEENVYKNRLQKCIDIVFPEFNKLFNSKYGIVYMNILKMFGSAENIANTDIRTIRKCFEIEGRGNRISLTPEILKECARSSIGISSSAEVIQIKHLTAQIEPIEEQLTEIDKKIEEFSIQNNSPILSIPGISHFSGTSILAELGDISNYSKPSQIIKFAGVAPLHYESSQFNAQHTAITKKGSKYLRKTLYQIILPVIRHNPVFNKYYQLKISQGKGHRCAQGHCVRKLLRIIYHLLKTNQQFDPQLLR

SEQ ID NO: 136770 - protein, 394 aa, unidentified
MIGVDPHKASHTAVAISAAEEPLGELRVSACAAQAGRLLAWAAAWPQRTWAVEGAGGLGHLLARQLLAAGERVLDVPPRLGARVRLLAAGDTNKNDPDDARPVAVAALRSAGVREVRAFLDDLRRIDAQVRETRKTPATAVQAAGTCLTRLFGVGPVIAAAVIGDVRDVSRFGSRDHFAACNGTAPIEVSSGPRKTCRLSRRGNRRLNHAIHMAAVTQIRHRHSDGRACYDKKLAESKTPKEALRSLKRQISNAIFACLQADAARAAARAEGPGGQQGNDSAASAAGSHPRHRLFGQATPGPGHHPTAAAGNTAPSPARARGGAGHSSIAATLPPAPPRVQVERPQRSEDERPAGAARRRPHSAARKATGQGSLRKPQRPKGTSQAAKNTGGAP

SEQ ID NO: 136771 - protein, 323 aa, unidentified
MSGFVGVDIAKNSFDIATHQPNGKHKTKAKLANDPKGFKEFEAWLEKNAERSALIVMEATSVYHLELAEFVYNKGFRVCVVNPATTKAYADSELRRIKTDKSDAKLIADFAREKDQKLHPWAPEPLKYRQLKAMVRRLDDLQEMEQMELNRLDVSDEKVKDSINSVLRHIEKEIVETHKAIKKHIDDDPDMRQMRDLIVTIDGIGQKTLERLLAELGDLRKYSDPRQLVAAAGLNPKLQESGKLKGHTLISRVGSARLRAGLYMPGMVALKHNKAIKAMKERLEANGKAPKQIICAAMRKLLHFVYGVLKSGLPYDPKLALAR

SEQ ID NO: 136772 - protein, 408 aa, unidentified
MKRYYIGVDWGDRLHQVYVGDDAGKKVREMKVPETVEGLAEIGRWLDEQRAEGFELWAAIEKPAGRIMDFLLDHGVEVYAVNPKAVDRVRDRYRMSGSKSDAFDAYVLAEFVRTDQSHLKSLRPSSEKAQELKMLSRDQRRVGRHKSRLLNQLTTTLKEYYARPLEVFGDLETEIALDFLHQYPTPAHLSALKRKEFNRFATQQHHLSKQRCEVLWGKLNQPQLAVPEHVVRAKAQLVEVLIEQLRASIKAVKIYNHRVESFFASSPAAQFAKTLPGGKSGTLVAAIWAELGDAQGRWESSRHLQAEAGAVPVTKASGKSRVVHFRFACNKHLRHTMYWFSFVSVNHSEWAKLYYRGQRDKGHSHHQALRALGAKWLKIIFVMWRDHKPYDENYHLANIARQKMRQAA

SEQ ID NO: 136773 - protein, 312 aa, unidentified
MEKLSCGGIDVSKDRLDVVVLPEGWFFSVSNDTAGWAELVARLRPLGVSAIGLEPSGGYERGIIRALLAAGLSVRRINPNKLRQFARARGVLAKNDRLDARLIAEYVAIMPTRVVQRDDAVERLAEIVTMRRQLCDEHVAVENQAAHLEDAMLRRLSKRRLIRLEADIRVLDKRLAEMVATNAAFAQLYALLTSMPGVGPVLSFTLIALLPELGKMSRKQIAALVGLAPYDFDSGKLRGHRSIYGGRMPIRNVLYMAALSASRYNPALKTFSNRLSDADKKSKVIIVAVMRKMITTLNAMLRDNTAWQPQSA

SEQ ID NO: 136774 - protein, 394 aa, unidentified
MKLVGIDVGKNSHHFCVMDKETGEFNVTPTSFSNNKEGFDFLINSLKPYSKKSILIGMEDTGHYHVALLKFLLSNGYTVALINPKTTDLTRKMEGGITKNDKLDTITICDVLDTPERKKQYRITKVDRFDLYEQRQLTRHHHNLKEELNVYCNRLQKSIDLVFPEFNTLFSSKYSIVYMNLLKTFGSAEAIASTDIRTIRKCFEIKGRGNRISLTPEKLKECAKNSIGISSEVETIQIKHLVSQIMLIKEQIAEIDKKIEEFSITNNSPILSIPGISHFSGTSILAELGDIGNYSKPSQIIKFAGVAPYHYESSQYNAQHTAITKKGSKYLRKTLYQIILPVINNNPVFKKYYLLKISQGKGHRCAQGHCIRKLLRIIYHLLETGQSFDPALLR

SEQ ID NO: 136775 - protein, 331 aa, unidentified
MTNATREADSDGRHLDYIGIDMAKARFEWAVHGAASTQGATNDPAGFEALLADLSARQVGLIVIEATGGLEHALASALLQAGLPVAVVNPRAAREFARSMGQLAKTDTIDALALAHYAHTLAHKADQAGVRFNAPSAHLEALQTMVLRRKQLMDMRVAEMNRRSGPMRVLRKSIDAVIKTLNQQIDALDKDIGAHLDQHFKELDKRFESIKGVGPNTCAAVVAFMPELGHISNARAAKLAGLAPLNNDSGTSRGKRSIWGGRPIVRCALHMAILSAIRFNPVIKPFYQRLLAAGKPKKVAMTACAHKLLRILNAMARSGQDWKPDLHGLPA

SEQ ID NO: 136776 - protein, 415 aa, unidentified
MRVGGENVNPLFVGIDVSSRNNVAYLMKPDGSKHSSFSVQNNLGGAKLLSERIVSALHSMQLCDVVIGLEATSIYGDSLVYALREDGGLSQFQRKIHVLNPKQVKKFKEAYPDLPKNDWVDAFVIADHLRFGRIGKEVYMDDYRYKALRTLTRARFDVIQNMTREKQRFANYLFLKCSGMAQNKDIANSSATTIALMERFETVDELADADLDELTAFITEAGRGRFADSEAAAKAIQAAAKGSYRLPKTVNDTVNQAMSVSIASMRALKAQVKVLEKAIEQQFEIIPNTLTSIPGIGKVYSAGIIAEIGDVRRFNSQASVAKYAGLVWTQHQSGDFEAEHTHLIKSGNRYLRYYLLEAANSVRRCDSEFRRYYDLKYKEVNRHQHKRALALTARKLVRLVFRLLKDDRLYKPPEG

SEQ ID NO: 136777 - protein, 380 aa, unidentified
MTRKKEMFVRDEDTTKTPTIYMALDLGRRCWTVGVLLPGDRDARLFQIAGGDREALLQLILRQRQTQGDPNVRVVSCYEAGRDGFWLHRWLRDQDVDNRVLDPASLEVPRRWRRVKTDRVDTLGLLRVLLRLERGETEMTRVVWVPAPAIEDERRQTRERERLVSERTAHRNRIQGLLAAQGVTTIKVGGRDWLDQLAVARTGDGRTLGVALLAEIRREAERLALVERQIKEVETAQHAALKADTALATRACKLMRLKGLGEVFANGLTHEAFWRDFENRRQVGGAFGLTPWPWDSGDMHRNQPISKVGNRRARTLAVECAWMWTIHQPDSVLTRWWQKRFAGGGKRLRRIGIVALARKLMVSLWHYLKDDLIPEGAVFT

SEQ ID NO: 136778 - protein, 339 aa, unidentified
MQQHNSLNPNLATYVGIDAHPSEHTALAMNRFEEEKAHLRFENTKTGIQQFLSWLEAVDTEVNNVIIGIEGGTSTRHALVSRLVAAYPNVYEVNPLYTRQRRVFGTKGVKSDPVDAKLIAGVLTRNIQDLSKISTRQLAPSMHCLQKTVGFYEEIAAHGTRLKNQLHQLVREKDLCENSEEAQVLGLIIKSKTTELKNIQKQQKLLETKLLKLLEGQGKNLTTFPGIGIISAAKIVAFSGGIERFATIDKFLSYAGIAPVERSSGRSKRHIQNIRGNRHLNSALYMVALNQLTHNPKAKAYFEKKVNEGKTKKHALRCVMKRTACFIYGMLKNGEEYRA

SEQ ID NO: 136779 - protein, 373 aa, unidentified
MLIKIVRVAVITAFATFKQPCKDMKKFIIGIDFSKETVDASIVQKEQPETLIAYKKFRNNLKGVDGLIAWAKSKVAQDGEIIFCGENTGTYSTLFSDELTDRGFIIWIEHGMNIVRGMGDVRGKDDKTDSLRIASYAARFYDKMKPYVRPKDETRVLKTLLAKRDRLKSFLKAEITNTKENPLMLQDSNIASSINEFFKRIEESLRKELKELERMILDVVMSCSEYAKNFNILTSMKGIGLINAVALIVYTDNFTKFNFNHRKIATYWGVVPFKNESGTSVRRGTHVSPKCNSWLKALLTEATLCAIRYNSRIKAYHDRLMARGKAIGIVLNNCKNKMLKILVAMVRDSKIYSDMDVSKDPHTTTTTSSIIVC

SEQ ID NO: 136780 - protein, 429 aa, unidentified
MMMKNNLTSTLFVGIDVSSKTNVVCALDFEGNKLLKLSVGNNLPGADLIAKGIISCVNDNKLLHVVVALESTSFYGLHIANFLSSHEELLFFSPLVYCLNPKSIANYRKSFVDIDKTDPLDAFIIADFARVGRIQSKPWRGSQHLALQRLSRHRLHLIEAMTREKTYMVSNIYLKFSELAVLDKSERPFSNTFGVTSAAILMEYMSLEEITYASIEELVEFISLKGKNRFNDPLATAKVLQKAARDSYRLDKSLYEPLSTSIASSFNVIEAYSKEIKVIDKAIVKAVKGLNTNEYQSLVSIPGIGPVLASGILAEIGSITVFSSQDALAKYAGLTWRQNQSGNFKSDTTRMTKTGNKYLRYYLIEAANSVRNHVPEYSAFYQKKYGEVTTHNHKRALALTSRKLVRLIFGLLTKNQLYSNNIVGVQKTE

SEQ ID NO: 136781 - protein, 345 aa, unidentified
MTKLIAGMDLHSNNVVIGLMDMDGKRVAHQKVECRLSEVVKFLAPYKKRLEQIGVESTYNWYWLVDGLRALEYPVLLANPAGMEQYNGIKHADDTNDAFFVAELLRLKILPTGYIFDPELRPVRDLLRRRLTLVHHRTALMLSFKSLYTRTTGQQMTLGELKDLGIKQAQDLYDHPANQLIAGMQIKHIEQLAESIEKVEKLVLDCARELPCYSKLTTLPGVGKILGMTITLEVGDIKRLAKPGHFASYCRTVEAKRTSNSKKKGVNNSKCGNKYLAWAFVEAANFARRYDEQCRRWYDRKAAKTSNVIATKALACKLAKAAWYLMAEGTAYDPKRMFGQAASTK

SEQ ID NO: 136782 - protein, 315 aa, unidentified
MSKMVVIAGIDVSKDKLDIHVLPSNQTFVVGRDPRGLASLARRLRKAGVEQVALEASGDYERIVIEALEADGFVVQLLNPARVRAFAEAIGMLAKTDPIDARLIALYCQHFPDTGLTRRPEQARKLGEFLNMRAMLLKLAGEIRNSLEHVREPGLKALADTLSADIAAKLKDVDDRIAKVIAGHDATMRKARIIRSFTGAGPVLTSGLLARVPELGGVTRHAAARLCRAAPTDRQSGRTRHRSSIEGGRDQVRPVLHMAALAAIRSNPIIKAFAHRLSAAGKPKPLVIAACARKMVVILNAMLRDNTEWKYAKAA

SEQ ID NO: 136783 - protein, 484 aa, unidentified
MHLQITNKLTQALDAFCFSFGSAGALELPNEYSGLATTAAPILPSQSSGMHVPLHKLAQWRRMMNRLTDTQYTAYVGIDWAAAKHDICVQAAEGGRREFARISSQPEGIEAWAQDLYRRFGGPIAVALELSKGPIVSALQKYDFLVLYPINPSTLAKYREAFTPSGAKDDPTDAELAVDLITRHPERFSPLKPQSVGMRKLIGLVEQRDKFLSDRGRLVNRLGHALNQYYPQVLEWFSEHHTAVFCDFVNRWPTLNQAKRARKASLERFFKSHHVHSVPLIQKRITAIKAAMPLTLDPAVIDPHRLQVEILIEQLRITIKALKRFDDQITITANKLPDYHLLFSPLPGAAKVLAPRLLAAFGEDRQRYPQADALQKYSGIAPVTKRSGKSTWVHWRWQCPTFVRQTFVDWASQTINKSAWAGAYYRQQRAKGCSYQVAVRGLAFKWIRILHRCWQDRTPYDESKYLEALRRKGSPLLKYLAETA

SEQ ID NO: 136784 - protein, 422 aa, unidentified
MAVYGGIDWAEGHHDIALVDDEGRLLAKRRIGETPAGLAELMAMLAAAGDSTADPIPVAIETPRGLLVAALRAAGRPVYPINPLAVARYRERTSVSGKKSDHVDAMALANILRTDRLLHRLLPDDTAEARAIGVLARAYQDAVWRRTKLVQELRARLREYFPGFLAAFGAGSGAGSGMSSTQLASGDARAVLAIAPSPAEGLRLSRARVEAALRRGGRQRRITTLAAHIVAVLRVPQLRQDPLVEQAMRAETLALLGMLDAACGAVNDLAGRLGEVFQAHPDYKIITSFPGLADVSGAIVLAEIGDDRDRFADDRALQAFAGSAPITRASGKSRRVTRRRTKNNRLAAIGYSWAFTAASRPSPARDHYLRRRDRGDGHPAALRHLFNRMLGQLHHCLATGQLYDPGKAFPHADLGHPEPAAA

SEQ ID NO: 136785 - protein, 387 aa, unidentified
MRKGITYVGLDVHKDTIVVSLADGGLRGLRGEVREYGKIANTAAAVERLARKLAANGNELKFCYEAGPCGYGIQRQLSGLRHQCDVVAPSLIPRKPGERIKTDRRDANKLAKLHRAGELTPVWVPDQTHEAIRDLVRARHAAARELRRARQRLSSFLLRNGHAYHRKAWTGLHRRWLATLKFDQPMQHLVLEDAIAAVEAAQERRGRLEAQIEAALPTWSLAPVVGALQALRGVALVGAATLAAELGDVTRFDNPRQLMAYIGLVPSEHSSGGTRRQGGITKAGNSTARRMLIEAAWSYRFSARISRELLLKQENLAKPIRDIAWKAQDRLCRRYRTLARSGKLSTVICTAIARELAGFVWAVAREVGRSASGKSTGKPAIRRAAVS

SEQ ID NO: 136786 - protein, 378 aa, unidentified
MKRILKIGMDVHTTNYTLCAMEPIIGEDDRVFATIKVTPDYKNILMFIENLKLKLGLNDEYDIQCGYEAGCLGYSLYNQLTAAGVKCVILAPTTMLTPQGVRIKTDMRDAYMIAQCLSYGGYHAVYIPTEDDDSVKEYLRMRNDHKLALKKIKQQINAFCIRYGFCYDGTKWTQTHLKWLKKLEITNGLYRETLNEYMASYEEQEAKIERYDKRIEEIAEQTKYHDKVKKLECFLGIKTHTALSLIVETGDFERFAKGNQYAAYLGLAPGENSSSDSIRRLGITKAGNSHLRQLLIEASGGICKGAVGHKSKELRARQNGNTADVIAYADKANTRLRSRYYKFIRHGKKRNVAVAAIARELACFVWGMMTDNIEMKVA

SEQ ID NO: 136787 - protein, 346 aa, unidentified
MRIIGCDYHPSWQQVCWMETTTGETGEEKLEHGTGEAERYYRRLPGRALIGMESTGNCQWFVEMLGKMEHELWVGDAGQIRASEVRQQKNDRRDAALILKLLLEGRFPRIWVPTGEEKDLRQLLLHRHKLVRMRATVKTELQHLAMNQGVTRKRKLWSQAGEKALRELALRPWGSRRREDLWKIREMLDRQIGPLEEAVAAEAEKNETARLLMTQPGVGPITSMAFVLTMGDVKRFPRGKQVASYLGLIPREYSSGGKQRFGSISKQGNRFMRMLLVEAAQSAVRCDPGMKNEYMHRCHRKAKGVAKVAMARKLAIRLYWMLRTNTAYPEVVGVESSPRVPLVSAS

SEQ ID NO: 136788 - protein, 341 aa, unidentified
MQTTKYFIGFDISADDFSASCITSPGDLVFSTQKFSNSIDGSNEFLALLFKNNINQSEAVICMEATGVYSEKISYFLASKGFTIAIEAPHKIKNKTKDSPRKNDFIDALAIAEYAYRYLDKLPIWKPSNEIIEQIQVLLTTREHLSVQMIANVNALKALKHKYYQTPLANQIYEQTISKLKEHIKQIDKEIKTLIDKDDSFKNNISLAKSVPGVGLLLAANLLVLTKGFTESLNYKHIASYSGICPYEQISGTSLHKPPRSRMCGPAKIRKLLYLAALSVRTHNQNFKKYFLRKVAEGKNKRLILNNIENKLLKITCAVINSGTAYTENYKSINPELLKTA

SEQ ID NO: 136789 - protein, 318 aa, unidentified
MTESFVGIDVSQEQLDLHERPGERLQRYPNNADGIQAIVARMAELQPTRIVVEATGGLELPLVLALAERQLPVVQINPRQARDFAKACGRLAKTDVIDAATLAHFADAIRPPVRPFPSQEMQALREFLDRRQQLIGNRVMEQNRLSSTTLPAVRRDIEAHIRFLNRKIVDVEKQMKKLIDASDALRHKDDILQSVPGIGAQVSRTLLVRLPELGTLDRRRLSCLVGLAPVNWDSGAMKGSRHIRGGRATVRVALYQAAICAVRVNSSMKAFYARLRASGKKAKVALIAVARKLLVLVNALVAKDEKWRANSILPTALS

SEQ ID NO: 136790 - protein, 453 aa, unidentified
MRQPSTLPQITPHAAGVDIGAHSHFAAVPPGADPQGHDVREFETFTADLYALADWLTACAVTSVAMESTGVYWIPLFQILEERGFDVRLVDPRRMKHVPGRKTDVVDCQWIQQLHSFGLLDGAFRPSADIVLLRGFLRQRAMLLRSCAQHIQHIHKSLEQMNLKLHLVVSNIVGVTGLRIIRTILAGERDPLKLAALRDRRCKNDVATIARALHGHYRPDLLFALRQAVELFDLYQTKVAECDKEIEAVLASFDDASKGKTLPPSRRKGGAYRNAPAFDARSALFRISGTDLTRVEGIDTSIALTVISEVGLDMRRWPSEKHFASWLGLCPGSKVSGGRVLSSRTKLCANRAATAFRLAANGLHNSHSALGAFFRRKKAQLGTPKAITATAHKIARLVYRLLRFGEDYIQVGEEEYERRHRARTVRSLERRAHSLGFVLHPAPAGPDLLAVPA

SEQ ID NO: 136791 - protein, 413 aa, unidentified
MDRVFTRVAGLDVHKDVVVACVRTPLPDGNQAVQTASFGATTEDLLGLRDWLVGERVEVVGMESTGVYWKPVFYLLEDDVECWLLNARHLRNVPGRKTDVADAMWIAELVEHGLVRPSFVPPKPIRELRNLTRYRRAQVQERTRETQRLDKILQDAGIKLSSVASDVLGVSGRAMLAALIEGTSDPAAMADLAKGRLRVKLPALTKALRGRFTAHHALLVGEILAKLEFLDDSIGRLSAEIDRVMLPFGRQRDLLDTIPGVNKRSAEELIAEIGVDMARFGSAARLASWAGVCPGHHESAGKSRSGKTRKGSKWLHGTLTESAKAASRTKCTYLSAQYTRLRGRRGHAKATVAVAHSILVSAFHILDRDVPYEDLGADWFLRRHSPEHQANKLVRQLRTLGYDLQLPERSTAA

SEQ ID NO: 136792 - protein, 373 aa, unidentified
MPKYSTAFGMDVHLRSTTVCALDADTGEAVTRRFPGNPWGEIAGWMDGFPGPSLAAYESGYLGFAPQRELAGLGVECVVAAVSKIPRSAADSASKNDRNDAARMAKAILAHDISPVWVPSPEVEGIRDLAGAYDGATARLATAKQRLLAFLAKRGFVYGGTTPAGNPRKYWTYDFLRWLDKVRPEDDGGVRTLAALRNEVEAAAEARADLLSEYRAAVDASPIAAEVAALQSIKGCAFALAAATAAEVGDFTRFRSGRRVTAYFGLAPSQRSSGDSVRLGGISGAGNALVRKLAVEGSWCYAAARHQPKLMPRDTGVPLEIRMHGRKGSERLLRRREEMLARGMPAAKANAATAAELVRWLWALGMMCREGAE

SEQ ID NO: 136793 - protein, 365 aa, unidentified
MQRKEISFKGQKVFIGIDVHKDSWRVAIAPEVGVVKGHSQKPSARELLDFLKKYYPDGEYHAVYESGFSGFSTYYALQDVGIDCIVIHAADVPTTQYEETMKTDKVDAAKLVRSLKSGLLTGIYIHKRDDIDARSVVRLRKTIQKQLGSYKSRVKHLLHSNGVTFPERFSTPGSHWSKVFIRWLKEEVVLLSATRTSLDLLIAQVESIRKTLLMATRNVRELSRSERYRHGCELLTSIPGVGVNVAMTLLTEIGDINRFHNEKEFASYLGLVPTSHSSGGKVAHGEKTFRGNKYLGPQIVEASWVSIYRDRGLGCAYLNYKKRMKPQEAIVRVARKLSNIVFSVLKTGKKYKPYEWDEKQKHTDL

SEQ ID NO: 136794 - protein, 337 aa, unidentified
MIVVGVDVHKHSLTAVAVDEVGRTLAEVTAAEGGELLVWSRSLASERLWAIEDCRQLTGMLERTLLADGEQLVRVPPKLMAPQRRAGRERGKSDPIDALAVARAALREPRLNRPRPGEQRLRELKLLVDHRDDLVDERRRAQQRLRWHLHDLDPSLAVPLGALDRTVWLERLARRLARLEQTAAVRIARELVGRCRTLTRTIVELERELQGQVDKTAPTLLALPGCGVLSAAKLLGEIGPIDRFDTDAQLARHAGVAPLQASSGKHQRHRLDRGGNRQLNCALHRIAITQGRVHPPARAYLERKQAEGKSRREAVRCLKRQLARTVYTTLKNKPPLT

SEQ ID NO: 136795 - protein, 386 aa, unidentified
MQTLNDFSRSLIALKPARTLIAVIEMSLSSWLVAGIVPGIERQPLKKIAVDESALLRLLYRWREEAEKAGCRIERIVVAFEAGRDGFWLARWLKARSIEAHVIHAASVAVSREHRRAKTDRLDTELLKRAFLGWLRGERHHCKVVAIPTLKDEDAKRPNRERESLVGEQSRIVNRMKAALIRLGIRGFNPKLKRAAGRLDSLRTPEGEPIPPNTLAELRRDMERRRLVRDQIRQIEEARLERLDHAPGDGPHAMVRLLVRVIGVGIETADMLVHEVLSRNMRDRRAVARYAGLTGSPDESGRKRREKGLARSGNGRVRRGMIQLAWRFLMHQKDSALAQWFRARTENARGTRKSMIVALARKLLIALWQLVRQGVVPDGVVLRPAQ

SEQ ID NO: 136796 - protein, 423 aa, unidentified
MKTYLLRDPKAVEPQKPPRPLRAAPAVTAPVAAILGRPAAPPPGLVLFLGLDVHNESIAVSLAPSESPEVRRYGIIGGQHDDVLKLLKKLSAAHPGVALQCCYEAGPRGYPLCRFIRQHGAECLIVAPSKVPRPPGDRVKTDRRDADQLARLFRAGELTGIYVPDPQDEAVRDLIRARYQVQKQQHRARQQLKMFLLRQNIRYAGTKPWTAKHLNFLATVKLPFAEQQFVFQEMVNVITEAGQRLERYEKEIASVVEGWRWEPVVRALMSLRGVALLTGATLVAELGDLHRFATAPQLMSYLGLCPGEHTSGETRKQGGITKLGNGIARKAMIEAAWNNSRAPRVSRTVLARQAGLPKAVTEAAWNAQTRLHQRYKHLTGVGRKKSQVAAAALGRELSGFVWAIGRMVKPRALEIEAAKPNAA

SEQ ID NO: 136797 - protein, 377 aa, unidentified
MSDVTSLAPADVRLWVSLDVHKLSIVAATLPPAGGKPDVSRIETTERAIRRFIDRLGGPAGLAVCYEAGPGGYALWRLLTRMGVACDVIAPSLVPVRAGDRVKTDRRDAKKLVTLHRAGLLRYVHPPTAETEGLRDLLRCRDDLRCARTAARHRVLKALLRHGHVFREGKTAWTLKHRRWINAQRLPDALAQLALEQMLIHLDGIERQLDALDAQLEQIAAAERWGASVQILTRFRGISTLTALGLIAEIGDFARFGNPRELASWLGITPSEYSSGDQQHRGHITKAGNHHARRLLVEAAWHYRHAPRRPAKDPQPDQRAWQAQVRLHHRYRHLTEHGKRPTVVNVAIARELVGFLWAAMTNQPLATSSQQPQEVAA

SEQ ID NO: 136798 - protein, 341 aa, unidentified
MLYSGIDLHKRSLVIHTLDADGTTTREAQLKSDRGAVLAYFGTLAGPHRAVVECVQSWYWLRDLLGPTGVDLRLAHAKYVKAISYAKVKTDRVDARMLAQLLRTGLVPEAHMIGAEHRETRDLLRSRLQLVTRAVRCRHAVGSLLEKYNVPTPEELPELARMQAALQEEQRTLIRTHVRRVEAVLKTRLLPTPDVQRLVWIPGIGKLSAYALVLEIDTISRFPTVRHFHSYCRLVPGADNSAGKVRHKRSRDGNRYLKQVFHTAAIRAAQYHPEIRQEYRRLSRRKGKIVARALIAKELASSVYWVLRKQEAFNGKFRGHVLTAKPAVWPRLASPESLTDA

SEQ ID NO: 136799 - protein, 384 aa, unidentified
MRTSNMCTPIVGHIGTIFVAIELSRRSWLVTVHSPDRDRISRHNVLGGDHAGLLALIECVRERAARRLGSAAAVVSCYEAGYDGFWLHRLLTAAGIINHVFDPASIAVEQRARRVKTDRIDGELLLRTLMAHCRGEPRVVRVVRVPSTEQEDMRRDSRERQRLVQEQTAHINRIKALLRLLGMAVGNPRRRDWLSWLEAQRDWQGEPVPARQMAELEREHARLMLVREQIAALERASAASPASEAAAQRGENKRLLQQIRGLGAVFSGTLANEVFYKDFSNRRQVGSYIGLAPSPWCSGGTDREQGISKAGNRRARHAAIECAWLWLRHQPDSALSRWFRERTVNASKRIRRIAIVALARKLMVALWRYLTTGLIPEGAVLSNA

SEQ ID NO: 136800 - protein, 425 aa, unidentified
MNSKWNEKLNQVTENTLIVGMDIAKRTHYTCFVDERGRVLEKSFAVHQSKEGFEALYENVLHAMKVYEKTDVIVGIEPTGHYWMNLAYFLDNYGIPLVMVNPMHVKKAKELDDNLQTKNDKKDAVVIARLMKDGRFSYPRILKNIEAEFRNGSTLRSKMTEDLSGIKNRIVRWLDRYFPEFTQVYPTFGKMALATLEKTPFPKDIVGKTAEELVFLYRQVEGMRAPQLPKAKLLINVANNSIGLREGLQMARLEIATLLRQFRLLEEEIEMINSHLAELAKFTEEYVYLASVPGLGDATIVDLLSEVGSFSHYENPRQLIKLAGLTLRENSSGQHQGHKHISKRGRKRLRSVLFKVIVPLVRHNIAFKQLHEYYTNRQRNPLRGKQSMVVLCGKLLKVLHGICKKKVHFNERHMMNDLHCLSTAA

SEQ ID NO: 136801 - protein, 354 aa, unidentified
MSILAIDLGQSKSVFVFGGDQREERFGSFNTNSDAVRKILMKHKPTLVVVEICPLAAMVHDIAAELGIRALVADTTQDAWAWRNVKRKTDRDDALKLLRLAMVNQINPVYIPPPEMRQWRGLLKAREAAVVAQTRCKVRIRALLVTVDRKLPRGKGGWAQAALDELRQWSRPLAECSPTELWRGALAIELEQLELLDKHVDAFDSKLRDWAKTDRRLQLVSTIPGVGTVTAATIVAVLDDPHRFRSRRQVASYAGLTPRRYQSGQMDHQGRISKRGNAMLRRILNQAAWASVRYNPSQREFYLRLSNNGQKGKRKRAVVAVMHKLLVTAWAILRDERPYQTPGSNAAAQAAQAA

SEQ ID NO: 136802 - protein, 343 aa, unidentified
MQAVTTIGLDIAKSVFQVHGVDAAGNVIVRRQLKRRYVLPFFQKLQPCLVGIEACASSHHWSRELQALGHKVRLMPPAYVKPYVKRHKNDAADAEAICEAVTRANMRFVATKTPEQQSCLMLHRTRHLFIRQQTAVINAIRAHLAEFGIVAPVGRNGVEDLLNIVADCGDKRLPDVARACIAALGAQLRMLKARILEFDRLIVAWHRSNEASKRLDDIPGVGPALATALVASVADPKAFRSGRDFSAWIGLVPKQHSSGGKDKLGSISKQGDRYLRSLFTAGALAVIRYAKSHGTKHRPWLTALLARRPTKVAAIALANKIARMAWAMMARGDRYKEPVALAA

SEQ ID NO: 136803 - protein, 405 aa, unidentified
MDVIIESACGLDVHKDSITACIMTSDGKEVRTFSTKTIFLLELIDWIKEQRCSHVAMESTSVYWKPVVNLLEAEGIEFLVVNAQHMKSLPGRKTDVKDAEWIAQLLRHGLLKASFIPNRTQRELRELVRYRRSIIEERARQHNRIQKVLEGANIKLGSVVSDIMGVSAKDMLHAIADGEDDPETLSNLARRTMKKKKDELELALRGYVNPHQRLMLKTILTHIDFLTEQIELLDKEIADRVSEYQEDIERLDSIPGIATRMAEQILAEIGTNVGSQFPSAAHLCSWAALVPGHNESAGKRKSSRAKKGNKYLRSALTEAAQSVRGSKNYLGALYRRTAGRKGKKRAAIVVAHAMLRIAYYLLTRKEMYVDLGEDYFDKQRQVSIVRHSVRRLENLGYTVTISEAS

SEQ ID NO: 136804 - protein, 426 aa, unidentified
MDKRLFMHMARATIARVGGVDAACAAIEAEYGEPVSRGTISKIQNGHLDITFAQVVALQKATGDIALGEAIMSAKTRQDFSAVAVIGMDIGKDVFHLVGFSSDGSLVLRQKIKRMAFVATFQTLPPCIVGMEACLSAHFVSRTLRGMGFEPRIIPAIYVKPFNKGQKNDYNDAEAIAEAALRPNLRTVSEKSQDQLDLQALHRVRSRLVSRRTATINQIRAFLIEQGITIRKGLRAVRNSLLSLLDERQDEMSPRMRHIILDLHDDWMRLDARIEAVSDEIEGIGQSEAHCRDLRTIPGVGPIISTALVAAVGKGEAFESGRDMAAWVGLVPRQYSTGGRTTLGRISKRGSRYLRTLLIQAAKIILMRPHNWPGLSFGAWLAEADLRMHRNKLAVALANKLTRIAWAVLRYGRGFDARRDTVAEAL

SEQ ID NO: 136805 - protein, 341 aa, unidentified
MAEYHVGLDVSLDETSVCVVDQDGKVLKECKAATEPADIALAISAYADDVARVGLEAQSLSPWLYTELQALGLPVIVVETQHMKAALRAQRNKTDKNDARGIAQMMRMGWFRRVHVKSHDSMQLRVLLSNRRLLKRKFLDVENELRGTLKAFGIKIGKVSRGRFEARTTELLDGTDPTLRGMVISMLRVRRMLWDECLKLHALLVRTVRDDPVCRRFMTVPGVGPVVALTFRTAVDDPHRFSRSRTVGAHFGLTPRKFQSGTIDYDGRISKCGDGEVRTALYEAASSLLVRCKTSSELRSWGLSLVKRRGHKKALVAVARKLATLLHRMWLDGTDFRPAAA

SEQ ID NO: 136806 - protein, 340 aa, unidentified
MNEIVTIGLDLAKNIFQVHGIDACGQVVVRKPLRRGEVLKFFAGLHPCLIGIEACATAHHWGRELSKLGHTVRLMPPAYVKPYVKRGKTDAADAEAICEAVTRPTMRFVAVKSIEQQGVLMLHKTRDLLVRQRTMVINALRGHLAEFGIIAAQGAAGVKAAIEAFHAAQDNLPTLARRALHGLINQMRVVASEIVKIEEQILTWHRNSAASRRLAGIPGIGPITASAIVAAIPDPTLFSSGRSFAAWLGLTPRSHSSGGKEKLVGISKRGDSYIRRLLVIGATAVIRRARQDNASKSWAAKLLTRKPARLVSVALANKTARIAWALLARNQTYIAGAGAA

SEQ ID NO: 136807 - protein, 388 aa, unidentified
MPQPNDLSRSLAAFDQDSTLIAVIEMSQSNWLVAGLVPGIERQPLKKLSADEDELLKLVQRWRNEAAQAGREIKRIVVAYEAGRDGFWLARWLRRRGIEAYVIHPSSVAVSREHRRAKTDRLDTELLMRAFLGWLRGEKRHCSMAAIPTIEDEDAKRPSREHEKLVGDRTRLVNRMKAMLARFGIRTFKPTLRKAEERLDGLCTAEGTPLPENTRAELRRDMMRLRMVREQIKDIEQERLRKLTAAPAEKGPPTMVRFIARIIGIGIETADMLVSEILSRGLRDSKAVARYAGLTGAPDESGRRRREKGLAKAGNARVRRGMIQLAWRLLIFQKDSALAQWYRARTANARGATRKRMIVALARKLLIALWRMATTGEIPEGISLRAAT

SEQ ID NO: 136808 - protein, 355 aa, unidentified
MDSRRYIGMDVHQASISIAVRDANGKLVMESVIETKAATILECVQGIRGNLWVAFEEGTSAAWLYDLLKPHVAQVIVCDPRKNALLKTGNKNDRVDARKLSDLLRAGLLTPVYHGESGVRTLRELARSYLTVTKDLTRVMNRLKALYRSWAIPCAGEKVYSPRHRSAWLEKLSEVGVRRRAEQLYQQLDMLLQIRREVRRELLRESRKHPAQELLRQIPRLGPIRVALVIALVQTPHRFRTKRQLWAYCGLALQTRSSAEYRFTGGQLQHSQKLPALRGLNINHNHDLKNLFKSVATNVSTSTGPLGDLYRSLLAKGMKPAMARLTLARKMAAIVLTIWKKGERFDPEQLKRQAA

SEQ ID NO: 136809 - protein, 414 aa, unidentified
MKLFVGIDVSSQELEACFMNPDGDKLESFKVENNLHGASRLRDRIVAAADKLSSSEIHIGLEATSVYSWHPAMYMHEDPALKERKAKVFTINPKLISKFREAYPDLDKTDRLDAWIIADRLRFGRLTTTIVMQEQYVALQRLTRMRFHMVHSLTREKQYFLQNLFYKCNAFTSEVESSVFGHAILEMLSEKYSLDDIATMEVADLADYLRDKGRNRFPDPENVARCIQKAARASYRLSKVVEDSIDLVLGTSIQTIRSIQAQLKDLDKAIERILEGIPGSKCLRSIPGIDKVYAAGILAEIGDIERFSDQAAVAKYAGLTWSRHQSGPFEAEDTKRIKSGNRFLRYYLVEAANSVKNRDPEFGEYYRKKYAEVPKHQHKRALVLTARKLVRLVDVLLRNDQLYTPRRKVNNAKG

SEQ ID NO: 136810 - protein, 341 aa, unidentified
MQTKKYFTGIDISADDFSASCITSPDHPVFSTQKFLNNFDGFNEFLSLLYKHSIKQSEVIICMEATGVYSENLSYFLASKGFTLCIEAPHKIKNKTKDSPRKNDFIDAVSIAEYAFRYSDKLSFWKPKDEIIEQIQVLLSTREHLSIQMTANQNALKTLKYKYYQTPLANQIYEKTISKFKEHIKQIDQEIKSLIDKDDSFKNKISLAKSVPGVGLLLAANLLVLTKGFTEHLNYKHTAAYTGICPYEQISGTSLYKPPRSRKCGPAKLRKLLYLAALSVRTHNQTFKKYFLRKVAEGKNKRLIINNIENKLLKIIFAVINSGISYTDNYKSINPALLKTA

SEQ ID NO: 136811 - protein, 367 aa, unidentified
MEKGITFVGMDAHKVAIKQAVLLPEQTKPVEWQLTNEKAAVRRMVRKVQRLAPGNEVRFCYEAGPCGYALQRWIQQAGAVCVVIAPSLIPRKPGDRIKTDRRDARKLAELYRAGLLTEVHPPTPADEAVRDLCRAREDAHEDLVRCRHRLSKMLLRRGWIWNGSKRAWSQGHRLWLRSLRFEQVADQVVLDDYLLAIEHVEQRLRGLEQHIEAASQQPAYAEAVGALRCFRGIDTLTAMGLVAELHDFMRFDSARGLMAFLGLVPSEFSSAESERRGAITKAGNRHARRLLIEAAWHYRHHPNASSLKRRRQGQPPEVVALADKAMHRLHRRFNRLLEKGKPRPKAVVAVARELAGFVWAALHSKAA

SEQ ID NO: 136812 - protein, 340 aa, unidentified
MREITTIGLDLAKNIFQVHGVDEAGAVVVRKQLRRAQVLGFFAAMSRCVIGMEACATAHYWARELIALGHDVRLMPPNYVKAYVKRNKNDAADAEAICEAVRRPAMRFVPVKTADQQAVLTMHRARDLLVRQRTMLVNALRGHLAEFGIVGAQGLHKVEGLMTIIRNGSDERVPEVARQVLSIIANQLDDVEAKIAALEAQVLAWHKSNPTSRRLATIPGIGPMIATAIAATVPDPSVFRNGREFAAWLGLVPRQNSTGGKARLGGISKRGDSYLRRLLVNGAHAALFWSKAAKTDPWLISLRARKHRLVATVALANKTARIAWAVMSKGEKYRPVATAA

SEQ ID NO: 136813 - protein, 532 aa, unidentified
MQETFFSSATMDRIVGGGKLKTVMTLMPKPKLNIQRGSESRVQDIGEAEPSNARLSRLEECFVSTRLGPSTGDLSRITQEKIMSPKSRPDIVSQKSPSPLLNAHAAGIDIGATELYVAVPAQCADKPVRCFGTFTEDLIALSDWLKSCGINSVAMESTGVYWIPIFQMLEDRGFDVCLVNARHVKNVPGRKTDVSDCQWLQYLHSVGLLRGSFRPPQQVCAVSSLVRHRDALAKMAAVHVQHMQKALTQMNLQIHHVISDVTGATGTAIIEAILAGERDPQKLAAFRDKRIKASQETIAKSLVGDYREEHLFTLRQSLQSHGHYKRLISECDQKVKDLLAAFDSRVNLDEQPLPERAKRSTKKSLCPEEMRTELYRITGVDLTAIPGIQSTTVHILLAEIGRDVSKFPSDKHFASWLGVCPDNRVSGGVILSSHTRSVKNRAALALRMAALTLYRSQTALGDYFRRLRAKLGTPKAITATAHKLARIIYHLLKTGNPYDHTRFARHEEQYRRRKEIYLKNQAKALGFALVPA

SEQ ID NO: 136814 - protein, 330 aa, unidentified
MKKWDFTLGVDVSKLTLDIHCTELNIHTKIANESIGYRHFLKWCKAAGIDLNNCLIAMEYTGGYEYRFIQFCETKSIPYCRIPGLSIKNSLGIIRGKNDKADARRIAQYANEKHEHIKAASSVNAAILELRQYLSFRKRLVRESAGYKATLKERKVMYAVKNDDVLIKIMTKKIKDNDKQIKRIEELIRSLIQADQKLLMTYKIISSIKGIGEINALMTIAFTENFTCFKNARSYAVYVGVVPFDHSSGTSIKGRKKISQLANKELKQELNQAAKAAITWNSDLKSYAERKLKEKPYKVVLNNVKFKLILRMFSLVKRGEFYVDKYQNVA

SEQ ID NO: 136815 - protein, 451 aa, unidentified
MSPRKSDATLSLAHPDAAGIDIGSASHFVAVPHDRDDQPVREFKSFTADLYRLAQWLKDCGVTAVAMESTGVYWIPLYELLDSQGFNVYLVNARHVKNVSGRKSDVLDCQWLQQLMSYGLLAGAFRPSDEICVLREFSRQREMLLASQVRHVQHMQKALAQMNIQLTQVLSDIVGVTGQAIIRAIVGGERDPHALARLKKRQVKASEDDIAAALQGNWRHEHLFALRQALALYDTYQQLLNDCDQHIQAELHKLHRHDGDPGKSQRRWPKKAMAFDLRTHLFAMCGVDLTRINGIDEMTAFTVLAEVGPDMNRFPSAKHFASWLGLCPGTRISGGKVLNGATKRSPNRAAQALRLAAMALRHSQSALGAYYRRLCARLDKRRAITAAAHKLARLIYTLLTKGSEYVDQGELYYEERHRQRVLHHLTKRAETMGYSLVPLTASGETNEVSMT

SEQ ID NO: 136816 - protein, 445 aa, unidentified
MAVVMIGVDPHKGSHTAVAVSGDEQPLGQVRVRASAIQAQRLLEWAAAWPERTWAVEGAGGLGHLLSQQLLAAGEQVLDVQPKLAARVRLLGAGAVNKNDPNDARSVAIAALRSRTQHEVRPDDHATVLKVWAKRYRDLGRSRTQTACRLHSALCELVPGGIGKEITAAHAARVLEQVSPLDAVQQARWELAADLLDDLRRFDARLGEAKKKLAAAVQATGTTLTEIFGVGPVIAATVIGEVRDICRFASRDRFAAYNGIAPIEVSSGKRKVHRLSRRGNRRLNHAIHMAAVTQVRYPHSDGGPCYDKKLAEGKTAKEALRVLKRQVSDAFYKHLKADAARAAGTGSPGGQPGSDSVASAADSHPERQLFGQATPGPALTLRSAPCDDHARTPAGPGAARAGGAGPGLPALPAPRGRRGSGVKAGRQAVAAGDAQQPNGHMAGHR

SEQ ID NO: 136817 - protein, 437 aa, unidentified
MSKRAYAATRVNHVEVSKLLDGRDVVGITVGIDVGKYELLAVGRWADGRFTRPWRVQNPNEIGALVALLEQLRAGRKLVVALEPSGTYGDALRQALADRNFAVERVGTKAAHDYAEVFDGVPSQHDGKDAAVVAELAALGKSSPWVYEPTDVWQQELAYQVAWLVGQRQVLALWQGRLEGLLARHWPEATRVLKLSSGTLLRVLAHYGSAQALAADPQAAAQLARWGGRFLDAAKVAALLAGARSSVGVRPGEWETRQVQDYAAQALQARQQAARAQRRLCVLARGHPVLEAQGKVIGLATACVLWVSTGDPRNYVAAAAYRKAMGLNLVERSSGTYQGELHLSKRGSARSRQWLYFAVLRLVQQAGVRGWYEAKKAQQPAEAKRVLVALMRKLALALYHVGVHHEAFDARRLLARIVSGVPSSPELASPKKVGVEA

SEQ ID NO: 136818 - protein, 422 aa, unidentified
MRKLVTTLANTFQRSIFMNAVGIDVSKGKSTVTIRRPGNEVLLPPCDFPHTQSCINGLIEQIKSLDGETKVCMEHTGRYYEPVASWLSDAGIFVSAVNPILIKEFGDDSLRTPKTDKADAKKIARYTLDRWTNLKQYNHMDEIRSQLKTMNRQFGFYMDHKTAMKNNLIALLDQTYPSANDFFDSPARSDGSQKWVDFVHTYWHVDCVRGRSPEAFAQHYQDWCRRKGYNFSASKAEAIYSRSSDLIAVFPKDNTTKMLIRQAVAMLNATSATVESLRQKMDETASALPEYPVVMAMHGVGPTLGPQLMAEIGNVTRFTHREALTAFAGVDPGSRQSGKHEQKSVRTSKKGSPNLRKTLFQIMAGLIKRSPADDPVYAFMDKKRAQGKPYYVYMTAGANKFLRIYYGRVKEYLSTDTEADNA

SEQ ID NO: 136819 - protein, 532 aa, unidentified
MSSYFFVKIRILPQFYCPEFLFPARTHASAARGKRVAAGAAPDLPIRRNAGTRRGIQHSAVETKPYRFLTEETLHPLENILVFDRVGFLETGLPGQLLDQPLLLGIEFRRNGDVHHDQLICCFQKLDPIAGELTSEHRSFGTTIPQLLEFAAWCRVRESSVILMESTGVLWFSPYRSLEDVGFDNDTLALVNARDVKAAVGRKTDAQDAKRLAEYARLGKFHKSFVPSRPFRDMRMVSRDIIRLSDDISRQKNRYNKNLNSVGCRATSVFSDVHGKAAGKILDAYIRGDRDFEEIVRSARKQLRATQQEILEAINFAMSDALRELLRSSYEHLQYLIARRDSQIALLERMQAPYQEYIDRLMTIPGVKELSARLLFCEFTNEQQSFPDAAHFASWLGLCPGNNKSAGKSSSGKTPKGNRWARKTLTEVAHGIGLMKRGALKALFQAFKERRGARRAVVAIAHKVAMIMFAMIWDGSEYVETTCSALRDTRVKRLLQTSKNLREQRTVITLSGQIVDKDTGELIGQLSVDAAT

SEQ ID NO: 136820 - protein, 452 aa, unidentified
MKNNKQKNLAQPVSFNKDAAGIDIGGAFHFVAVPSDRDEKPVRKFDNFTSDLYQLSEWLLACNIKTVAMESTGVYWIPIYEILEARGFEVILVNARHIKNVPGRKSDVIDCQWIQQLHSYGLLRASFRPEQNICQLRAYMRQRESLIQYASNHIQHMQKALALMNVQLANVVDDIMGVTGLKIIRAIIAGERSPEKLASFRDGRCKKSEEVIAKSLHGNYRDEHLFALQQSVELFDTYQVKIIECDLAVEKLLNQYSSDEQDPSATIGNKKKRRKNELHFNAENHLKQMTGVDLTQIDGLSTHSVLRIISEIGVDMSKWLTAKHFGSWLGLSPGTKISGGKKLGSRTKPSANRAATMLRIAASTLHRSNSALGAFLRRLKSKVGAPKAITATAYKIARLIYSMMKHGQDYVDAGQDYYDQQYKERIVRNMQKRAHMLGFELTPIQTLTLEVP

SEQ ID NO: 136821 - protein, 345 aa, unidentified
MEITTIGLDPAKNVFQVHGVDATGKVVVRKALRRVKMLPFFTKLPPCPIGMEACGTSHHWARELAALGHNVRLMPPAYVKPYVKRGKTDAADADAICEAVTRPTMRFVPVKSREQQAALFLHRTRSLLVKQRTQLVNMMRGQLGEFGIDIPKGLERALTIAHEIIDGEAEMDLPPYGVKMLAILCQQALATHVQIREIDRELQRLERSDEMAKRLATIPGIGPIGATAFAAAVTDPAQFRSGRQFAAWLGLTPLQNSSGGKERLGRISKMGDQYLRRLLVIGATAMVRQFKMRPEKTPPQIASLLARKPVRVATVAMANKMARIVWALMARGETYRAAHMPALAA

SEQ ID NO: 136822 - protein, 350 aa, unidentified
MRIESKQLLPAWNGIDVAKETFDSALYMPVEPGQAPRDIMSLPKKTFARTLEGVKEFHDWSFQVRDKAGLEGGNMRIVMEATGRYSKELAGWLNAEMPFTRPVIEDPRAVKDFIKSLKLRNKTDRIDAGALARYGAERMPEPSEDMPEEYQYLREFTRQREALKDQLTAARARLTEMGEFKKMIKIQQAVIKSMEQAVAKMELEIKRCINDSEELRKSLKYAVTVPGVALIVSATVLGECGPLYRHTSRQLGSYSGIAPQIRQSGTSVCGSKISKRGSGNLRRVLYMASIAAIDHNPEMKMFYNRLIAKVKKPLQARCAVMRKLLILIRAVVVNETEYDKNFAKKSILKT

SEQ ID NO: 136823 - protein, 328 aa, unidentified
MENNIHFIGIDVAKAKLDVDMLRPDGRHRSKKFANTPKGHDELVSWLRGHQVIHAHVCMEATGTYMEDVAAHLSDAGYPVSVINPMLSKAFVQSQGIRSKTDTVDARQLAYFCREKRPPKWEAPHPVERALRALVLRYQALTEMHVQEQNRRESAREVQLPSIDMHLLWLETELKRLEKQIKDLTDDDPDMRHRRKLLDSIPGIGPKTAAVLLAYVGLKDRFREGRQFAAYAGLTPRQHESGSSIRRVSRMSKMGHVSLRRALYMPAMVTLYKTEWGRVFRERLEKSGKNAKLIIGAMMRKLAQVAYGVLKSGRPFDATLHTKNACMA

SEQ ID NO: 136824 - protein, 345 aa, unidentified
MNVKVLGIDLGKTVFHLIGMDEHGKIVLKKRYSRSQLFKFLANTPVCLIGMEASCGCHHVGRTLSSFGHDVRLIPAQFVKPFVKSQKNDYRDAEAIAEAVQRPTMRFVPIKSEEQLDVQAVHRVRERLLAQRTSLVNQLRAFFLERGLMVRTGRAYLWRALPEVLARAEETVSPRMFRLMQSIVQQWRNLEMQIVELEEEIARVAQADPACQRLQTVPGVGPLAATAIVAAVGNGGAFRKGREFSAWLGLVPHQCSTGGQTKLLGISKRGNEYLRRLFIHGARSVCLHVNRERHAWGGWITELKDRKPSNVATVAMANKLARIAWSVLYRNEVYRSHGSVVSATA

SEQ ID NO: 136825 - protein, 338 aa, unidentified
MEQQREYVGIDLHRRRSVIVRITESGEVLETVRVDNDPLSVVRAVMHDDPNPEVALEATYGWYWAADLLQAEGATVHLVHPLGLHWDSRRVKNDERDATELAKRLLRGDLPEAWIAPPELRELRELVRYRAKLTALRTSAKAQVHAVMAKEGVLPTYGRMFGPAGQRLLDEMPVQGVYRDRVESLRHLLEIYERELVLVESHLSRRLKGHQGFSAIQAIHGVGPIMAAIFVAEIGDASRFPSARHLCSWAGITPSHRESDVKVHRGHITRQGNNLVRWAAIEAVARYHGGAPIEATFERVAKRRGTMIARVAAARKLLSLVYYGLRDGEIRCLSREAS

SEQ ID NO: 136826 - protein, 339 aa, unidentified
MRKISTVGVDLAKGVFQVHGVDERGEVVVRRALRRSKVAAWFADLAPCLVGMEACATAHYWGRELRKLGHDVRLIPPAYAKAYVRRNKNDPADAAAICEAVSRPSMRFVAIKSEPQQAMASIHRVRDLLMKQRTMLINQLRGLMAEFGIVAAKGVPHVEELLAILADPKDRRVPEPLRSGLMATTDVLRTIDRKLAAIDRQIVTAGREDATYRHLITAPGYGPIVSSAMAAMVVDPAAFRCAGDFAASLGLVPRQDGTGGKVKLGPISKRGNGYLRRLLVSGAMAVLMSKRAKQDPWLAKLLATKPRKVVAVALANKMARIGWALMMRQEDFRRLPAAA

SEQ ID NO: 136827 - protein, 457 aa, unidentified
MAMHVKRAGSTGAQDWQIVHPNAAGIDVGAAEHYVAVPAGRDAQPVRRFGACTEDLIALEQWLKQCGVDTVALESTGVYWIPLYELLEARGFKVILANARAVKNVPGRKSDVLDCQWLAQLTAYGLVSSAFRPAGEVCALRELVRQRQMLIGMQAQHIQHMQKALALMNLKLTEAVSDITGKTGLAIIRAIVAGERNPSELARLRDRRVKASEDDVRRALEGHYRAEHLFALKQALHLYDAYAERVQECDLELERVLIALARSDDDVPPQDPRKAKSHAKNAPTFDLRSALFRCYGVDLTRINGIHVTTALTMLAEIGFDLTKFKSAKHFCAWLGLAPGTKISGGKRLSGRRPKVANRAAQALRLAAQSLRNSQSGLGAYFRRLCARMDKPKAITATAHKLARIIYAMLTKGQAFVDQGEALFEERYRQRVLHNLKRRAMQLGMNLVPVQTPQIVHA

SEQ ID NO: 136828 - protein, 335 aa, unidentified
MSKKRNQVGIDVSSQTLVVEMKRASDNCIATGEFDNTTTGHKKLLKFITKNGGTARVCMEATGNYHFELALLLAKSGKVEVMIVNPKAMHHFGTAILQRAKTDSCDAHIILEYLLRMDFKQWQIPSDNKVALNRLARRLVQLKKMMVQEQSRRSAAEFQGKDGKEIIKSINKTIAVFEKQIAKLQGLAAKLINDDEELKNTYALLTSAKGIAEVSATQLLAEFIMLPEGLTAAQWVAYAGLDPKPIESGSSVNKPRRISKHGNKYIRAALYMPALVAIRHDPNVKAYYEKLLANGKKKMQAIVAVMRKLLLAIWGMLNAKKNWDGTKFYKIENIA

SEQ ID NO: 136829 - protein, 372 aa, unidentified
MKEETAGHPGVVGGVDTHKDLHMAAVVDEHDRVLGSECFATTRHGYRQMLAWMRSFGELLRVGVECTGTYGAGLLRYLQHAEVTVLEVTAPDRSDRRKRGKDDTLDAENAAHAAFAGVRTVTPRTRDGMIESLRVLKVCRKTAVAARRVALQLIHNTVVCAPDELRESLRTMTRMQLIRTLAAWRPDLSDYRNLTSAYRITLKSLGRRYLELHDEIADLDVMIAGLVDELAPDLVSRNSIGYESAAQLLLTAGDNSERLQSEAGFAALCGVSPVPASSGKVTRHRLNRGGDRAANSALHIIAIGRLRTDARTKAYVERRVSEGHSKLEAIRCLKRYIAREVYYVIRKRNRQIGQVQVAWKRPVPDNRQAFVI

SEQ ID NO: 136830 - protein, 410 aa, unidentified
MTETSIAQNLPILVAIDIAKGRHEVLIAIPGKKRRRRLTVLNQLDDFKRLITTLASYGLPVRVAFEATGNYHRAIAYHLAAAGFEIKLVSSVSLARTREALHNSWDKNDPKDAQVILHMLEIGNTQFYHDPLACGTNDIQELSKTHDIVSKSKTELWHRILTHYLPLYFPEADRFHRSSRGDWFFAFLERYPSPHLISAMDRAAFIAEAWDVVGRKVAKERLLTDIYETAKTSVGLPIGPHSDAVGMFRLVLGEGRGLIAQRNQIEARAVELLQDLPDYQLLTSVPGIGPINALTILAEAGDLRRFNHHRQFLKFCGMDLATIQSGTFRGQTKLSKYGNARLRRTLWMAGQVAILQKTNSFRDKFERYIAKDRHNTHLRRKAYTAIAAKMARTVHGIIKNGEPYRPFFEG

SEQ ID NO: 136831 - protein, 335 aa, unidentified
MKEITTIGVDLAKSVFTVHGMDAAGHTVLRKTVRREKLMELVAELPPCLIGMEACGGAHEWARRFQAHGHRVGIMMARFVAPYRKSSKNDGNDAEAICEAVARPNMRFVPAKSAEQQAILSLHRVRQGFIEQRTATINRIRGLLAEFGVVLPQRAEQVRRAAVVVAEELPVLAREAIIDLRAHLSYLDERISRYERQLVELARQREAAVRIQRLPGVGPLTASAITASISDGHEFANGRQFAAWLGLVPRQYSTGGKPRLGRITKRGDAYLRTLLMLGARAVLQSAAQQSDRLSRWAMALRARRGYHRAIIAVAAKNARIIWALLANNREFVPPA

SEQ ID NO: 136832 - protein, 311 aa, unidentified
MQHVVGIDIAKYHFDLHLLPQDKAAHYSNNAQGIADCCRFLAEVHPEAIVLEATGGYEQALVLELQAASLPVIVVNPRRVRDYARSCGRLAKTDQIDAKVIAQFATQPSVSLRELPDASARQRMAWVARRDQLVECHGAESNRLEHAGDPMVAESIHKVLDVLETQMAAIDAKLAETIAADKPLQRKVEILDSAPAIGPVTATMLVTRLPELGRVNRRQIAALVGVAPINRDSGQHRGKRMTGAGRLRVRTALYMPTLTAIRCNPRIRDFYQRLVNNGKSKMTALVAAMRKLLTILNTMIQTNQSWKSQNA

SEQ ID NO: 136833 - protein, 324 aa, unidentified
MIDGMLGIDVSKNTLDVSLSSCNKVRARSFPNSSDGWRHLLDWLINQKVRRVHACLESTGRYSLGVACVLYEIGHIVSIVNPAQIRDFARTKLGRNKTDGVDASHIREYCELFKPQPWAPPSESHRRLGELQTIRAGVVAGLTEWNNRKNSGMVDAAALSLADATISHFTSQLEAVDEAIAKTIDNDSELRCKRDLLLSISGVGETLAGVVLTELPSPDVLRSSAEVVAYAGLNPRRHQSGTSIDRVTRISKIGNAVLRAALYMPAMSAMRYNPAIVALVTRLRSRGRLKPMQIVVAAMRKLLVLCFGVLKTGKRFDPALAMGC

SEQ ID NO: 136834 - protein, 359 aa, unidentified
MHSECTKVQFTGQHVCSGLDIAKKSWKVCIYLGGAYHKRFSQPPDPTVLVEYLHRNFPGATYHTVYEAGYFGFWIHRELIRLGVDSIVINPADVPTTDKERRTKTDRVDAAKLARALANGELTPIYVPERAAEEDRTLIRMRSAFVRKQTRTKNQIKALLQIYGYRLPQDLSDRYWSRAYIRWLESLTFEQEAGRAAFKALLSELLTLRATIADLTNQIRHMARQERYQTRVELLLSVCGVGLLSAMTFLCEIITIERFKNLDRLLSFIGLVPGEHSTGESEEDTGLNPRRNPALRYMLIECAWIAQREDPALLNAFNAYCRRMPKSMAIIPIARKLVSRMRFVLKNNQPYVTGVLSAR

SEQ ID NO: 136835 - protein, 427 aa, unidentified
MHDSTIVPFPASPSMTAAVLAVDVSMDDLHCYIQLHGLVVERILVNRTREIEKGLTEIRERARQAGFAQVVVTAEPTGIYHELLFATALRLGMKTDFVNAEAVAKLRTLESNDPGKTDRKDPRVIALVAGLGKTIKHRVLAEPYQLLRQHQLLYTKAEVSVVEAKCAIHNHIRALFPDFPFKKDFIYGASGRALLDGFGFNPYLIVAAGKDHFRAEMKRLAPRIKNKSIERLFEHALASALRPCPERIHKTRELALRQTFEDLSTNEDRKTAAQTALEKLYDELRTLDPKLPPSQSRVVSKIALARFVAETGPLSDFASHRQLLRFVGLNLVEHQSGKFRGKTKIAKKGRSLARKVADQIVLPLVKRNGLFGEDYHRMRNVQKMPGTKAMTAMARRFVKLLFGWYKSGRAFDRSRVTVCQSQMKAAA

SEQ ID NO: 136836 - protein, 431 aa, unidentified
MNVKKEKDKEELMDTKIATLFVGIDLALKTNHVVIVDNQGSKLASFSIDNDLIGAKILRDKLLHLVEENNVTAFDIGMEATNIYWWHLHQFLLEEKLLNAVSKVTVYIINPKLIKKFKESFSKLNKTDPIDAYVIAERVRFGNLTKSAMIDEMYEPLKRLTRFRFHLIENLISEKNYLLTHLFLKYSSWQKVKPFSDAFGKTASEIISEMDMEEVASLQVGELVKKVTTLSKGTIADPKKAAELLKKVVEESYVIKDSFVSPVDLILTNTYENIKYFQGKIKSIDAVIEKEYQRSLNTLTSIPGIGLVFAAGVTGEVGDINHYPAEKYLASYAGLTWSKFQSGEFTAEETHMKQGNQYLRYYLVQAANSLRIHNEEYKDYYQKKYDEVSIHKHKRALVLTARKLVRLLYAMLRDQRLYSPTVKKGEKDKIA

SEQ ID NO: 136837 - protein, 347 aa, unidentified
MNKVMAGIDLHSNNVMVGLVDQEGRRLAHQKLECDLEPIVKFLKPYKKRLESVAVESTYNWYWLVDGLKAQGYPVVLANPAKIDQYSGIKHADDKNDAFFLAELLRLKILPTGHVYDPILRPVRDLLRRRMSLVHQRTSLMLSFKSLFTRTTGQAMNLSRLKSLTVAEATALYEHPANQLIAQVQKKHIEGLTESIEKIEKAVSKAAADLPYYPKLKTLPGVGIILGLTITMEVGDIARFGDPGNFASYCRTVDSKRMSNGKKKGDNNQKCGNKYLAWAFVEAAHFARRSDDQCRRWYDRKAAKTSTVIATKALACKLAKAAWYLMAEKTDYDPSRVFPELAAKAQN

SEQ ID NO: 136838 - protein, 469 aa, unidentified
MNNAKKKKRKNNGKQHNSLSQLEQINLNAAGIDIGAEEHYVAVPQGRDPEGEDVRHFNTFTVDLLSLADWLKKCKIDTVAMESTGVYWIPLFEILDSQGFDVKLVNPRFIKNAPGRKTDVLDCQWIQQLHTYGLLQGSFRPDNQICELRSYLRQRSMLISYASHHIQHMQKALEQMNIKLNHVITDITGVTGMAIIKAIIAGERNPQKLAQMRNPRCKNSKGTIAKSLQGNWRSEHIFALQQAVELYDFYKSQITACESRIQQHLETFDDRSDGKPLPKPPVKSGGSRNKFHFDAKTYLYRMTGVDLTRIEGIDTPTALTIIGETGIDMNKWPTDKHFASWLALSPGSKISGGRILSSKSKPCGNRAAHAFRLAAHSLHKSNSALGAFLRRKKSHLGSPKAITATAHKIARIFYNMLKTGTEYVDLGQDYYERCYRDRVIANLKRKAKQFGYNLVNVKEHELLTTHLQI

SEQ ID NO: 136839 - protein, 375 aa, unidentified
MKEKVRFLGLDVHAETIVVAVAERDGEVRSLGAIANRAESIRKLVKKLGPVEQLKACYEAGPTGYVLYWQLAEMGVQCDVIAPTLVPMKAGDRVKTDRRDAERLARSHRSGDLTAVWVPDEGSEALRDLVRAREAAKADQLRARHRLSKFLLRTGRRPETKIKLWTGVHMTWVRQLRFEHPAQESTRLDYLHEVEHMAERVLRLEQAITDAIKLATPEMQEVIRGLQALRGIAEISAVTIVSELGTLSRFENARQLMGYSGAVPSENSSGKRVQRGSITKAGNAHLRRIAVEAAWSYRLRPGIGPRLRKRQENVPEEIKEIAWKAQIRLTKRYARLAAAGKDQRKIVTAVGRELLGFIWAIGIKAESTAMQKVAA

SEQ ID NO: 136840 - protein, 414 aa, unidentified
MEVLYPRCAGLDVHKASVVAGVRLAAPGGEVAREVRTFGTTTAGLLELAAWLGESGCTHVAMEATGVYWKPVWHVLAEGGFALVLANAAQVRNVPGRKTDVGDAAWLAELLAHGLVRASFVPDAPTEELRSLLRTRKQLVREKASHTLRLQKTLEDANIKLDGVLADLLGKSGRAMLEALAAGEDDPAKLAALAHPRLAATPERLREALRGRATRHHRFLLRLHLDQIDGLDAAVARVDQEVEGHLAPFRVAVDLLTSIPGVGPLAARIVVAEVGLDMSRFPTAGHLVSWAGLCPRSDESAGKRRSARLRRGSPWLKTTLVQCAWAASRRKASYLQAQFHRLRARRGPKKAVCAVAASILTAAYHMLRDGTAYRDLGPDHFDRRSKEVQARRLVRRLGALGYAVELTPFEPAPA

SEQ ID NO: 136841 - protein, 344 aa, unidentified
MDIVIVGIDLGKNSCSVAGLDPSGRVVLRRRMRRNVLENFVQGLQRCIVAMEACCGAHHLGRVFVAQGHEVRLMSPEYVRPYVKAQKNDDLDAEAIAEAASRPTMRFVEVKSQAQSDIQALHRARERLVSERTALINHLRALLLERGIVAAQGRRKLQEALSTFANEGGIEALSPRIRVLIDDLRSEWRGLDERIAAFDAEFIRMARDDAVMRRLTSIPGIGTINATALAAAVGNGHAFRRGRDMAAWLGLTPRQMTTGGKPRLLGISKRGNRYLRKNLIHGARAVLPSLVERETPLGRWVRGLLARAHKNIVVVALANKLARIAWAVLAHGTAYGAGSEAATA

SEQ ID NO: 136842 - protein, 313 aa, unidentified
MTEHNIGVDISKSHLDVFRLEDEAARRFENSAAGFRALVKWLGKSAVARIVFEPTGPYHRAFETALSGKFPLVKINPLQARRFAEACGTRTKTDAVDARMLARMGAALALEPDAPVSEKLNELRDLQVARTGLIKERTRLHNRGHVQANPVLKRQTKARLALVERQIAELDAEIARQIAEDQPTARKRQILCSVPGLGPIAAALILTFLPEIGTLDRKQAGSLAGLAPHSRESGQWKGKSFISGGRKPLRDALYMPALVAMRFNPDLKAKYTALRHVGKPAKVAIIAIMRKLLETANALVKGDHLWAKKSSCS

SEQ ID NO: 136843 - protein, 341 aa, unidentified
MNIVTVGIDLAKNVFALHGVDQSGKAVFIKPKVVRGQLLEMVANLPPCLIGMEACSGAHYWAREFSRFGHTIKLMAPKFVAPYRMSGKRGKNDAADAAAICEAVTRPHMRFVPVKDIDQQAILCLHRTRQGFVEERTALYNRLRGLISEFGIVLPQKVERLRREIGAHLEALPGWANRCVGDLLVHADRLNERIEEYSLAIAQAAKQDQRSRCLMQLPGIGPTTASALVASLGGGHDFKNGRQLAAWAGLVPGQYSSGGKARLGRITKAGDAYLRSLLVMGARSVLAGLGDKQDRFSRWARNLVERRGYWKAAVAIAAKNLRLAWAVLRYGDDFRRIDEAA

SEQ ID NO: 136844 - protein, 325 aa, unidentified
MQTSQSFFGVDVGKSEVVVAMHGAAKPLTRVVKNSTTGLEKWLQTLPPGSVLAMESTGGYERLLADLAYERGLRVYVLNPKALHHYAKSQAQRGKTDRLDAVMIARYVALEHERLHSYEPCPEHIERLSQIQRLRKVAVTTRTRLRLSSDRHKHVGSQAQVQHALDALAQLADALEREMLDQIAAEPALADDFNLITSITGVGKLTGAALVTAFARIPFASSDAVVAYAGLDPRPKESGAYKGLRKLSKQGDAALRSLAYNAATSASRTAAFKPLYAALRAKGWASTQALNIIARKLLRIAFGVWKSRKPFDVNRFIANQACAKP

SEQ ID NO: 136845 - protein, 407 aa, unidentified
MDVIYCRCAGLDVHKQTVVACARLAGDGAPRQEVRTFATTTSGLLALADWLESVGVQHVAMEATGVYWKPVWHVLEGHFTLVLANAAHVKNVPGRKTDVNDAIWLADLLAHGLIRASFVPPLAVQELRTLTRTRKQFVRERGSHAQRIEKILEDANLKLSVVLSDILGKSGRAVLQALIDGQTDPEQLVRLVVGRVKASRAELLEALRGRVSTHHRFMLKLHLDHIGTLDKAIAQIETEVGLGLEPFQQAAKLLSTMPGLSSVSANVLIAEIGIDMSRFATPGHLLPWACLCPRNDESAGKRRSTRLRRGGKWLKTTLVQAAWSAVRVKGSYLQAQFHRLRSRRGAKKAIIAVAASMLTAAWHMLRDGTEWHDLGAAHFDRADAAKTANRLIRRLQQLGYTVQHTPA

SEQ ID NO: 136846 - protein, 384 aa, unidentified
MFAGIDIASERHVLARLDDAGAAIGKPITISEDREGYDALLAALGRAPVLIVMEATGHYWKNLFVVLTTAGHDVALLNPLIARRFQETNLERTKTDAIDATGLARLAFEKRPAPTHLHDEIAETLRELVRHRDRLRQDFDDRVRQLHRLVDLGFPEFTRYVRSLDSMLATCLLAEYPTAHAFARATPRRLARLRYDGRHFVGPELAHSLVEAAKHSVGQHHGPAYKLQARHICQDLDTWRKRLAEIEHDIENLLNTHVTGKLITSIDGIGPQTAARIIAATGDPAHFKSAGAFAAFVGVVPALRQSGKQKGARAGIGHLGHARLRRALWMPVLSAVRLNPWLRAFYLRLRAAGKPPKLALIAAMRKLLHAVYSVAKNRRPFVTT

SEQ ID NO: 136847 - protein, 388 aa, unidentified
MYRILKIGMDVHSTNYTLCAMEPTIGAEDRIYGEVQVAPDYKAVICFIESLKLKLGLSNRYSIECGYEAGCLGYTLYHQLTGAGLKCVILAPTTMLTQQGQRVKTDRRDARLIAQCLCYGGYHPVYIPTGEDAAVKEYLRMRDAHKLALKKLKQQINAFVLRHGHLYTGTKWTIRHTTWLKKLELDPIYRETLDEYLASYEEQEAKIERYDKRIEEIAAEAHYQENVKKLCCFLGIRTHTALSLIVETGDFKRFAKGNTYAAYLGLVPGEHSSSTSVNRLGISKAGNTHLRCLLIEAAKGICKGAIGHKSKELRSRQSGQPAEVIAYADKANTRLRSKYYKMIRHGKKKNVAVAAIARELACFVWGMMTGSISIASGTGTSSPAVSQG

SEQ ID NO: 136848 - protein, 359 aa, unidentified
MQTQINKLDFKGQNIYVGFDVHLKSWNVTIMTDELVHKTFSQPPSPENLYQYLEQNFPGGIYHSAYEAGFCGYWIHHKLTSLGVRSMVVNAADIPTTNKEIVQKEDKRDSRKIAKSLRSGNLSPIYIPSEKTLEDRSLLRTRAMLVKDMVRYKNRIKSFLYFHGIEVPPSFSNPQSHWSKRYMNWLEGIKMKEQSAEESLSALVTESKNLRSSILTRTRSIKKLSQTETYQKQVELLSSIPGIGILTAMIILTEIVDISRFSKTDQLHSFVGIVPSTRSSGEKDRVGTITPRGHNVLRKALIESSWIAARRDPALMKCYHDYCKRMEPNKAIVRIAKKLLNRISLVLKNKQPYCYSIVK

SEQ ID NO: 136849 - protein, 372 aa, unidentified
MTSIIYVGMDVHTTNYTLCCYSMEDDRFFAEVQVEPDAKNILKNLAHIEKQQSRDCRIVCGYEAGCLGYSLYHQLHAHGIDCVILAPTTMMTKPGKRIKTDRRDARLISKCLAFHTYSPVYIPTEVDDAVKEYIRMRDDANSALARVKQQIIAFCIRHGKIHDGKSYWTNKHLEWLSSLDLGNKILSEVLQEYLIRYYQLREQVDMYDMRINELAQAEPYRQKVEKLGCFRGIAAHTALSFCVEVGDFRRFATAQQFASYLGLVPGECSSGDKQQYTGITKAGNSHLRKLLVETAQVFGRSATKSGKSVALKERQAKCDSLTVAYADKANARLKKKYFKIAMRSKVNIAKTAVAREMACFIWGMMTDNISCA

SEQ ID NO: 136850 - protein, 446 aa, unidentified
MYYTRCQLTTDPNKTHRRYSQLNTNQKQRIMQVSEKTLIIGVDIAKVNHVARAQDFRGIELGKRLLFKNTRDGLDRLVQWIRDLQDQHSKENVILGLEPTGHYWLPLAEFLHREGIKFVLVNPYHVKKSKELDDNSPTKTDIKDARVIAQLVKDGRYSEPNLLTGIHADLRVAMVQRERLSKELIRVKGRVINWLDRFFPEYPQVFKKWDGKASIATLKQFPVPEDILKLEPEAIVTKWKEDVKRAVGIKRAKLLIEQARSSIGLTSGLTAARYELQQLLEQHELFFRQMEKMMVYIEGLVIRIPGSKEMKTIPGVGWVTVAGFLAEVGDLTGYDHPQQIIKLAGLNLKENSSGKHKGKSTITKRGRPQLRALLFRCVLPLVAKNPEFQRIHRYLTTRQINPLKKKQSLIALCGRLIRILFTLGTKRISYNPEKVLSPVHLEQLAA

SEQ ID NO: 136851 - protein, 353 aa, unidentified
MKPKTESDTALPMVIGVDIGKEVFHLIGFGGDGKIVFRRKIKRLGFAAVFEKVPPCIVGMEACLSAHFVSRTLRTLGHEPRIIPAIYVKPFVKGQKNDYNDAEAIAEAALRPNLRFVQEKSQDQLDLQACHRVRARLVSRRTATINQIRAFLIEQGIAVRSGPRALRTSLFAILENRKDEISPRMARLILDLYKDWCHLDERIDTVTGEIEELSRVEAKCQRLMTVPGIGPVISTGLVAAIGSGEAFERGRDFGAWLGLVPRQYSTGGRSVLGRISKRGSKYLRTLLIQAAKVLLMRPHNWPRYSFGAWLKTASERLHRNKLAVALANKLARIAWSVLRHDTAFDTHLETAAI

SEQ ID NO: 136852 - protein, 347 aa, unidentified
MKFYTNQHPYYCGIDLHARSLYVCILDAGGETIIHREIEALPEPLLALLSPYIGQIVVGVECMHCWYWLSDFCAEQGIDFILGHALYMKAIHGGKAKNDRIDSYKIAHLMRGGNFPMAYVYPPAMRSARDLLRRRTRIVRHGADLKAHVKNTTSQYNLPPNKLNLRYPNAREAMRNRFADHCVQRNIDLDLNIIAFYNHELSAIECFIEKHAKHHKSTDYHILTSFPGIGRILALTILYEIGDIGRFDTVQAFASYSRLIKCKAESAGKTYGTQGNKIGNAHLKWAFGEIAVLYLRGNDKAKGYLQKLQKRMSKAKALSALAHKIGRCVYYMLKNQQVFDEKRFLAC

SEQ ID NO: 136853 - protein, 334 aa, unidentified
MLYAAIDIHKHAFQAAVLDSDSGEVVEERFPADRDSLARWAEPWRGRVAAVAIEATTGWRWVWRELVANGFDVRLAEPVQTRALLGRRRSAKTDRLDARWLARLLAKEMLPQSWIPPAQIQELRDRTRLRKALAEDRRRWGQRLHAYLLHEGWPCSRSNLLRPPGLRWAAALQLPEHARLQVDSLLAVMAALQEQLDTVEGELRRFARNDQRCRALQSIYGIGPILACHLLAEIGEARRFHRAEQITRLAGLDPVVDESGETRRRGHLAKAGSPHLRWALVEAAVHAHRTTAPDLALYRATRERRDTTVARLTVARKIGKRAFHALRELELATT

SEQ ID NO: 136854 - protein, 457 aa, unidentified
MLYCRKWLSPNESAILFLDLKPAGKLVFQTGERSIAVNKIKAKKTREVNKKVLIATIDGGKDKHYGYYRCPDGADCKAFGFWNNGRGFQEFWERISSAARTHGLEEIVVGFESTGPYMEPLAQFMRGKKGVRLVQVNPMHTKRLKELTGNSPLKTDQKDPKVIADIIELGHALTVVIPEGPAAELRRLTQARERTSDSRTRLYNQLQSLLVISFPEFLQVMTDVKTASAQHLLRHYPTPEDIVALGESALTALLRKVSRGKLKEDRARGLFEAANESVSVRDGRRSMLLEIELMLDTIARYGRFIEGLEIDMSRYLKQIPYSGVILSLKGIGTVTAAGLIGEVGDFTKFSTIGEVMKLAGLDLYEVSSGQHRGKLRISKRGRPLMRKLLYFAALSAVRKGGVLHEWYQRAVGRGMLRMKALVAVGRKLLGIIFALVRDHSVYLEDYAKQGPNLQEAA

SEQ ID NO: 136855 - protein, 360 aa, unidentified
MRIIGCDLHARQQTLAMLDTETGEVVTRTLLHEGRGVREFYTQLPRPVLVGIEAIGPMQWFLVLLEELGIECLVGDAAKIRAAEPRKQKNDRRDAELILKLLVEKRFPAIWRPSQEQLDLRALLLHRHHWVRLRTQVQNALQAIALANGLRRGPGLWSYDGQSKIAFLPLAPHASYRRSMLQALYRKMDEEIGQLSAQVAEQAAQRSGARLLMTHPGVGPVTALATDVFLGDPQRFADGKALASYVGLIPREYSSGAHQRLGALTKQGSPLLRFLWNEAGAHAVRRDPELQRFYRRKLVQKGLGKARVAAARKLGIRLWIMLRDQIDYQEFCRRGQKQSSAACAGMPETGFGANRHRSVD

SEQ ID NO: 136856 - protein, 306 aa, unidentified
MEKGKVNNEPVSLSKFFLKFENEYCCKTTLLIVFENTGIYSKPVARFLNENKWCYSEVSALEIKRSKGVSRGKSDRVDAHQIAQYGFRNLDKIMLCTEPELIHQQLKILNTEREKMLSAISSFSRTGEAEEFLGKEVFKVVKTHNRQTLSALRKQLKQLDDKISALLRSNEDLKKKQELLKTIPGIAEVGSLYLLLATKGFTRFKNWRKFACYCGIAPFEYSSGSSIRGRNRVNPLADKKMKSLLHLLALTSIRHDPELKLYYERKKEEGKHSLLALNNVKCKLVSRIFAVIKRETPYVKTHQFAN

SEQ ID NO: 136857 - protein, 390 aa, unidentified
MIYAGIDVAKDKHDCLIVDSNGKVLSKVFTITNNRQGFDELLATLKTHSKDLLELKVGLEATGHYSDNLLEFLIANNLPTTVINPLHTNLYRKSLSLRKTKTDKVDAHSIVTMLRTECLKSYLHSSYHIQELKSLTRYRFSLVQDLAKLKTSYVRLCVILFPELEKLVSSLHTASVHALLSELPNARAISECHLTKLVNLLSKASKGRYNKEKVIELRNAAINSIGSYSGVKSLELQQTIQLIQVMEKQIEQIEERIKPIVDSFNSPIMTIPGISYRMAAIIIAETDNLSNFESAEKVLAFAGLEPSVYQSGQLTSTHAKMVKRGSKYLRYALFNATKFVCRWDAGFNQYLNKKRAEGKPYNVAVSHATKKLTRVIFHLVKTSKSFVSQV

SEQ ID NO: 136858 - protein, 366 aa, unidentified
MKKTSTVRTIGNKIFKGHKLTIGVDLGDHWSCYCVLDEAGKIILEQKVAMTPEAMKQTFGKIPQSLIALETGTHSPWVSRLLTELGYKVIVAHAQKVQLITKSNRKDDRHDARTLARLARIDPELLGPVRHRSAQAQIHLTVIRARAELVRARTALVNAARGLVKSYGQRLPKCGTQRVSRELGVGLHAELREVLEPLLKEVESLNERIQEYEVRMEKIAKESYPQVELLKQVKGVGTQIALTYVLTLEDPHRFPKSREVGCFLGLCPGRRDSGESQPQMRISKEGDRYLRTMLVQGAHYILGPFGEDSDLRRWGLKLAARGGKNAKKRAVVAVARKLAVLLHRLWVSGEVYEPLRNSQKAMRAAA

SEQ ID NO: 136859 - protein, 316 aa, unidentified
MSATPHFVGIDVAKAQLDIALRPTGERWAVANDEAGIATLLAQLQAVQPTLIVLEATGGYQRAVVAALAAAGFPVAVVNPRQARDFAKATGQLAKTDALDARALAHFAEAVRPTPRPLPDAQADELRALLARRRQLVAMRTAEQNRLGNAPPRLQTDIQAHISWLNTRLAALDDDLDTTLRASPVWREREELLRSVPGIGPVCTRTLLLDLPELGTLSRQRLAALVGVAPLNRDSGTLRGSRTIWGGRAPVRATLYMSTLVAVRYNPVLKAFYERLRAKGKAAKLALTACMRKLLTILNAMVKHHKSWQVQAVPSA

SEQ ID NO: 136860 - protein, 419 aa, unidentified
MNKQNLVNTGQLVIVGIDWADDNHVFHLIDLDKEPLTGDVKQDPKAIDDLVQAWRKRAPGARFAVAVETTKGPLITVLLRYDDVVIYPINPAALASYRKAFAHGGGKNDPSDAMLLAEYLQHYVEKLRPLRQDDPLTREIASLAEDRRRLVDQRTAHCNELKAVLKRYFPVILQLNAAKIYADFIIRFVLKYPTLAAAQKTGASRLRKFFYGAGAKQKVEDRVEKIMSAMPMSEDGVLLRTCARRAIALCRLIETYNQQIDRYDQEIKKLVVQHADYAIVASLPAGSHATRGRLIAALGDDRTRYANAASLQAASGIAPLTTQSGKQRFVSSRWACSKFMKQTFHEFAGLTITRCPWSEAYYKMQRSKGKSSQMARRALAYKWQRIIYRCWQDRVPYDEAHYLQRLKATNSPLVALMKD

SEQ ID NO: 136861 - protein, 368 aa, unidentified
MKKGSRGAMLRASSTDEGRPVAMLYAGLDLSRKRLDFHLLDREGATVERGATPPDADGLHRLSERVARHGAPVRAAIESMNGARFVHDRLELAGWQVEIADAQKVKGLAPLACKTDRIDAWVLAELARRDLVPAIWLPDPLVRAERERARWRLHLVRHRSSLKQRVHAVLLTHGKPCPVSDLFGVRGRQLLARLGLPEPWQGTIEASLRLIDKLDREISDCERELRRLGAEHRYVPLLLTVPGISWVLAYTIAAELGDINRFPTPRKLAGYTGLCPRVYQSGERDLRGPLAKQGPRYLRWALVEAATHACTHPIYRERYTQTKARIGKQRGAKVAQIDLARRLSEAIWHMLSRNQPFAPKGATDPLAA

SEQ ID NO: 136862 - protein, 364 aa, unidentified
MKRKVYVGMDVHKETISFAYLTSKSKDVVKEQQIKHNEIQIKKFVNKLKSEWNEIHCCYETGVTGYPLYRYLNSLGVNCTLVAPGKIPRQNSDKIKTDKRDAIKLARLLRSGDLESIHVPNEEDESVRDYLRSRDSLRLDLGRNRQKLMKFLLRKGNVYSATKYWTTSHYKWLNNLHFENEILQETFNDYYSRVRVQEENLKAMDQKIQEIAKSEAFKERVGILRCFRGVDYLTAMFLLCEVCDFKRFKTAGSFMSFLGLVPGEYSSGSKRKQTGITKTGSPRLRRILTEAACQHRFPGTGSKIVAARRTGQPALVVSLAEKASLRLHKKFRNLQLREKSPQAMITAVSRELSGFIWAAMNLAA

SEQ ID NO: 136863 - protein, 396 aa, unidentified
MTGNKIDRVIGPASGDLAMVHGKAQGRGVVTPRKRGRPPMQYHAALDTSATTTAICVVKAKDGEIALETSVTTDPEAIWQALEPYANRLLLVGHESTSWSAWLHRELEKHGIPMVLLETHHAARMLDAQRNKTDKNDARGLAQLVRSGWFKQVHAKSERANRMKLLLAHRRTLKRKLLDIENEVRQSLKMFGLMVGPRVQRSTFCNRVRELVAGDPLLQVLSESMLTCWQVLWDQYRELHKMLVQLVGQEELCRRWCEIPGVGPVTAMTFMAAVDDPHRFAKSKTLGAHFGLTPKREQSGTSVDRDGHISRRGDGEVRTALYEAASGMLTRSKQHSTLKAWGMKIATKRGHKRAVVAVARKLAVIMHRMWIDGSRFRFSAANDQPESSGNAVAVQA

SEQ ID NO: 136864 - protein, 344 aa, unidentified
MPHYVGLDVSQKTTAICVVDEQGRRLWRGACVTDPGAISARVLRHAGVVDVKVGVETGSMTPWLVHGLRSAGLDVECLDARRVKAALQMRLNKTDENDAEGLAQVLRTGWYRPVHVKSFDAHRARALLGARAQLVGMTTRLSNMIRGVLKTFGLLPGAGRGLRFDRSVETLLEGAPEIGLIVRPLLATWRQLREQIAVFDKAVQQRVRADPICRLLMTVPGIGALSSLVYVSTVEDPGRFSRSRAVGAHLGLTPRRYQSGETDRSGHISRCGDGLARTLMYEAAVVILHRIKRSLHLKDWAAAIEQRSGPGKARVALARKLSVILHSVWRSGEPFRWTPHTIAA

SEQ ID NO: 136865 - protein, 409 aa, unidentified
MRIIGMDIHRVFAEAAVLEDGEIKRLGRIGMTRDQLNDFARTLLPTDHVVVEATGNATAVTEILAPHVARVAVANPLQVHLIAKAKIKTDAIDARVLAKLYGAGFLPEVWIPDAATLARRRQVTRRRQLVRQRVRLKSIVQSILHANLIPPCPFADLFGGKGRAWLRAQHLPDDEREAADRHVEEYDRLSEALKGVERDIARAALADANVTRLMTIPGVDMVVAVGLMAAIGRIDRFDGPDKLVAYIGLNPSVHQSGDGPAQHGRITKRGRSDARHLLVEAAWQTVRSPGPLHAFYERVRGKRGNHIAAVAVARKLAVIIWHLLTKGEDYSWVRPSLHAKKLRDLELRAGHPPRRGQKGASYDYNITQRRRDERNLAQQAEGAYQRMTSGWRRTGPRSKPTGATNEERR

SEQ ID NO: 136866 - protein, 339 aa, unidentified
MAILFVGIDLAKNVFAIHGVDEHGKAVLVRPSVPRARLHQLVAALPPCTIGIEACSGAHHWARLFAQHGHTVRLMAPKFVAPYRMSGKRGKTDAADAQAICEAVQRPNMRFVPVKSQDEQARLCIHRVRQGFVEQRTATINRLRGLLSEFGIVLAQKAATVRREAAAHLEDLPGWANIAVGDCLSEVHRLDERLAEYDRHVSQMAGEDERSARLMQLQGVGCTTASAIVSTIGDARDFKNGRQLAAWLGLVPGQYSSGGKTRLGRITKAGDGYLRTLLVLGAKSVLAAARNKHDRLSRWAMALEVRCGYWKAVIAIAAKNARMAWAVLAKGEDFKLIEA

SEQ ID NO: 136867 - protein, 344 aa, unidentified
MKISVLGIDLGKNVCSVVGLDPSGVVVVRRRAKRETLIDLAAKLPPCLVAMEACCGAHHLGRVFADHGHEVRLMSPEYVRPYIKAQKNDDRDAEGIAEAATRPTMRFVELKSQDQLDMQTLHRSRDRLVGERTALINQLRAILLERGFIAPQGKRKLEQFLVALMDERGGAGLSPRIVMLIADTRAQWAELDRRVAAFDAEFIRWVKENVDACRLATIPGVGAMIASALIAAIGKAETFERGRDLAAWLGLVPRQFTTGGKPKLLGISKRGNKYLRKLLIHGARAALPYVAERETPLGRWAKALLNRAHPNVAVVAYANKLARIAWAVLRRGETFAVKGLPLAA

SEQ ID NO: 136868 - protein, 363 aa, unidentified
MFASCDRKTTLFVGIDVHRDTHTAVGVSPFGEKLFEITVGNYEKDFRSLRQKVDEVSEKALLSPFYGLEDCQSYGERLAAHLVGEGLQVVSVPPILVDEKRKHETHPEKSDPLDALGVARVMIQRIDMLPVFTVTEESRKAKQIKELSMDRDFLVSERTRLKNQLHTLLHRLWNTEYRVKFKDPFSQKALRYWRAQTPKESDPFLARSMRRKVKRLQDINEEVVELEHELETLLKESGHTLTSASGIGTVIASEIVGEVGDVNRFHSPAALAKYAGCAPRECSSGKTNRHRKTRSGNRRLNRAFHRMALSQISRSGNEKARAYFQRKIAEGKSKAQALVCLRRQLVNVVWMMMKHKTEFRLSA

SEQ ID NO: 136869 - protein, 507 aa, unidentified
MLWPYHLGHVQKQRLVSYFAVRQKKHPAYNIFNTSDATCWRLFYKIKNMNKAKEQKTERYERMPVVNPSAAGVDVGSSSHFVGIGQNKEDVTEFGVFTENLHALCKHLVANKITTVALESTGSYWQPLFVLLQQYNLNPILVNGKFTKNVKGRKTDVQDCQWIQKLHTMGMLEGSFLPDLFTEKVRQYYRHRQTLVDNAAGYINKMQKALRLINIRLDSVLRDVMGRSGKDIIEAILKGERDPKVLSSLAQPTVKKSKEEIIAALTGDWREEYIFELRQCYEIYQHYHKKIDECDEAIKQLLAAEIERRQKEENLPLAKDIKIKKKKARKNEARINVQQLAVDLTGGVDISAIEGVGLGLVLCIIAETGLDLKAFPTAKHFSSWLGVAPNIKKTGGKVINSRTRKGKGRLAKAFMHSANAIGNMQKSNYLVHFFKRKERKIGRAGAITATANKLSKIIWNMLVKKQSYCPIMPQQYLDKIRKKELKNIQRKINQLNIKDNEILFAVA

SEQ ID NO: 136870 - protein, 346 aa, unidentified
MLHAGLDLSRKRLDVRLLTEAGETVLETWAAPDRDGLAGLVRRVRPLGESVRAVVEAMNGARFVHDHLEQLGWDVEIADAARVKGLASLACKTDRLDAWVLAELSRRDLVPAIWLPTPGVRAERERARWRLHLVKRRTALKNRVHSTLITFGYPRVASDLFGVAGRQQLECLDFPEPWRSNLRAALRLIDELHADITMCEADLRRLGAHHPYVELLMSAPGISWVLGYTIAAEIGDVARFPSAKKLAGYTGLCPRVMQSGESDWRGPLAKNGPRYLRWALIEAAVHAARHPRYRAHYERTRRRLGKQRGPKVARVEIARKLTYAIWHMLTKGEPFAPTGPDYSLAA

SEQ ID NO: 136871 - protein, 338 aa, unidentified
MKKIIHFIGLDMSKKTFDCSVIINEQRDNPKHKQFTKTAMGLEGFQAWLKGLGVALNGQTLICMEFTGLYNRMTLDFLAKTGAVVWMEMAVHIKRSLGLQRDKSDKLDSRRIALFAWRNRDEIKPWSSLDPDVQKIKDLLSQRDRLVDTKTRLLVPLNEMEQEGLVAEAKQLKKLQSSVITQLGNSISKIEKAIAKIISSNAALKKKSEIVKSIKGIGNIICWYLISLTNGFKQIQSGKSLACYCGVVPFSATSGTSIKGRPRVSHIANKKLKALMHLAAVCAVTHDREIKSYYERKIAEGKHKMSVFNAVRNKLILRVAAVLREDRKYEDNYVRKAA

SEQ ID NO: 136872 - protein, 376 aa, unidentified
MRNVRFVGLDVHAETIAVAVAEVGGEVRSLGVIPNRAESVRRLIGKLGKPESLKVCYEAGPTGYVLYWQLTELGVACEVVAPTLVPVKAGDRVKTDRRDAEKLARCYRAGDLTAVWVPDASHEALRDLVRARLAGKRDQLRARHRLGKFLLRQGRRSPEGTTGWTGKYLAWVKQQRFEHAAQEATLLDYLHEVEHVAERIVRLERSIDAAVESMPESLRTVIAGLQCLRGIAKVSAVTLVSELGQLSRFGHARQLMGYAGMVSREHSSGERVRRGSISKAGNAHVRRIVIEAAWNYRHRPSLGTTLIARQSGQSETVKAIAWRAQYRLHARYRALLARGKSKQKVITALARELLGFIWAIGCELERTHNPEVRRAA

SEQ ID NO: 136873 - protein, 341 aa, unidentified
MNVTPIGIDLAKTVFSIHGTDQHDKVVVRKRLNRPKLLAFFAQLPPCLIGMEACSGAHYWARELTKLGHDARIIAPRFVAPYRKSSKNDDNDAEAICEAVSRPNMRFVPIKTEAQQAVLCLHRIRRGLTKERTAQINQIRGLLAEFGLIIPQGRYHARHRIPEILEDAENGLPMLARRLLNNINQRILLLDEEILAYDREIEAMARRDEQAKRLMAIPGIGPQTATEILASAPDPRQFKSGRHFAAWLGLVPRQYSTGGKPRLGRITKRGDKYLRTLLIHGTRAVIAKLADKNDQLSEWAKGLVERRGYKRAAVALAAKNARIIWALLMNQTEFKTQPAEG

SEQ ID NO: 136874 - protein, 293 aa, unidentified
MIVIGVDVHKQSLTAVAVDEAGRMLDERTVAVGSNELIGWAAELAEERLWALEDCRQLTRWLERQLLMRGEDLVRVPPKLMAPERRAGRARGKSDPIDALAVARAALREPELSRPRPDEQIFRDLKLLVDHRDDLVDERRRTQQRLRWHLHQLDPTFAVPLRMLGRPSHLERVSRWLARQEQELQVRLARELVTRCRSLTRAIVELDRELEQRTAATAPALLELPGCAALTAAKLLAEIGPIERFKSDAQLARHGGVAPLEASSGRVQRHRLDRGGNRQLNAALYRIAITQAR

SEQ ID NO: 136875 - protein, 320 aa, unidentified
MQTPTEVLNIGADIAKDEIVVACSQGSFPARTLANQRTALLAFLKGLPAGSRIGVESTGTYHELFANVAHQLGFIVFVLNPKDARHYAKAVGLRGKTDRVDAELIARMIAHEHTKLHTWIPPTPEQREMARLIKRRAKLSSLRQALSMSLKGLDGFAADLKVLRARFDQIVARIDQRVKALVEASPDRQQHVTHLRTIDGVGQVVSAALVNTLERAPLKSADAFVAFTGLDPRPDDSGQHRGKRRLSKRGPAELRRLLYVAAMSAKKSKAWKPLFEHYRAKGLSSTAALVILARRIARTAWSMYTYRTEFDPVRLAKSLT

SEQ ID NO: 136876 - protein, 399 aa, unidentified
MQYQYFLGIDIAKDSFDIALIDKEQKLLAKAKYPMGYDGFNELAKLLQNYSKDELLLLCESTGIYHLNLLSFLLEKEYRCAVVNPMLIKAHIQSSTLRKSKTDTIDAKHIALFGLYHYPKFSLATNELFSSIKPLLRERVTLSQEAAKLKTEIKALVDQLFYELSKNYNIFTKSILHLLLQAPSRKKVRNLKEQKIQKILDSASQGKSTILAKEIRNLAKRSVGISSQSLETILQSKIRRLFALEEEIALLDAKIEEESRQSLNDDIDILSSIKGVGKTTAISFLGEVGDIKKFSSPKKLCAYIGTDPAIYQSGSSLNTSGKITKRGNRYLRRTLWLMALGVIRNTNTFKAYFAKKRSEGKSFKQAVIATANKLLRTIYALLKNKNKFIDNLAYEAVLV

SEQ ID NO: 136877 - protein, 336 aa, unidentified
MSDVFALDVSKGHSVGVWYRGNHCLREFECTHDQISFSPLLKLTEQAINPIIYFEATGVYSTPLERLCRDHQLQYSCLNRLELYLQSESLRRVKIDRKDAHRIAQSVAQHYYRLTTPWTRKYERLGQLNHFYGQVISYIKLNRLRLHTTLQQTYPEEEQLFSSRISRLALNVILLHPHPDFVRGISRTRLKNKLMSETDKSLSKMKCLKYAERLMKLAKNSYPAADKDSIQVRKAQYDCRQLIELVKQQDSLSKEMTTAPAAIPEDALYASAPGIGLQSVAQLIGELGDIRQFENANQLNAYVGIDLNRYHSGQYTRQDHINKRGNPHLLDCQKHD

SEQ ID NO: 136878 - protein, 361 aa, unidentified
MAKVRSWAGLDVHARSVLAVTLDAESGELRSVRLSGETVKVVEFLAKLPGPTRVAYEAGPTGYGLARALHAAGIGCVVAAPGKIERPAQDRIKTDARDAERVLRLLMIDALHPVRVPTLEEEALRDLVRAREDLRGDLMRARQRLSKLLLRHGIVYEDTSSTWTGRHRAWLRSQDLGGGAQATLLDYLGAVDTLELRRGQLEKRITELVPSSPYAQTVARLRCLRGIDTLSAVGLAAEIGDFGRFDRPGKLMSYVGLVPSETSSGETRRQGKITKTGSKHARRLLIEAAWHYRKTPARGVTLERRQQGQPATIVAISWQAQRRLHHVWRRLAEQRGKRRTIVAVAVARELAGFCWALDRAD

SEQ ID NO: 136879 - protein, 392 aa, unidentified
MRRARVAPGWPTPSLTHRGRSMQETSRVFVGLDISKLKISVALAEEGRQGEVRFLGDIDNTPDAMKRLVRKLSGKYLQLLFCYEAGPTGYGLHRQITALGHDCSVIAPSLIPKRSGEHVKTNRRDALTLARLHRAGELTTIWVPDLGHEAIRDLVRAREAAMEDLREKRQQLQSFLLRHGRLYPGLRSWTLVHARWLSSLIFEHPAQYLVLREYRQAIEDAEARLKRLTQQVADVVSTWSMAPVVEAYQAMRGVAFLTAVTFVAEIGDVRRFETPRQLMAYLGLVPSERSTGEQVRRGSITKAGNPRARRVLIEGAWTYRYPARLSRPLQVRQESLPDVVRAIAWKAQVRLCARYRRLMAAGKRQTLITTAIAREMAAFLWAIGHEVQPCSA

SEQ ID NO: 136880 - protein, 367 aa, unidentified
MKKHTTMNKPVSVTDVSVCTTVAVDLAKKVFQVAGEDALGQLAYEQRIKSREAFQVFLQKLPEGVTVLMETGPGAQAWARLLQAQGNLVRILPAQRVAEHRSGAKNDRNDAHAILRAGRDSSIASVPVKSVAALAMQAWHRVRRGYVQRRTAMGNQIRGLLLEQGIALAQGDVGLKQGVTRVLEDTRQPLPALLRELIDEMLSEWKRLGERIAALTGRLEACAAADPTAKRLMTVRGIGPITATALLAKQVEPERFANARQFAAYFGIVPDQHSSGQKVRLGKMTKRGDAYVRSLMVVGSHAVLKQLRPDSEHPDDRRLQRWLQRLGRKGAAVRLANRNLRIAWVLLCSEQTYQRKPNACREMEMSH

SEQ ID NO: 136881 - protein, 430 aa, unidentified
MKSNTQNKKIEAITEKTLVIGIDVGSETYYARAFDYRGIEYSKKPFKFSNTEAGFVTFKEWILDLKEKHEKDKVVPGMEPTGHYWFNLGKYLQDNEMKPVLVNPHHVKKSKELDDNNPTKNDRKDPKVIAGLVREGRYMIPYLPDGVYADLRTASNIRFQLQSELTRIQNRISRWFNIYFPEYKTVYGKPDAKSGMLILKEAPLPEDILTLGIDGVDQIWRDAKMRAVGKARAKTLIEAAEHSVGSKEGAVSARMEIRMLLEDYESRNMRLQEVMVLIEELVKQIPMAEKLLEIKGVGIKTVSGFLAEVGDISRFNSPKELQKLAGLALVENSSGKHKGETTISRRGRKRLRYLLFEVAMSLVAKNPEFRELHNYYTTRRLNPLKKMQSLMAIAAKLIRVFYVMLTKGVNYDPKKMVNDIKRPAVYLQTA

SEQ ID NO: 136882 - protein, 348 aa, unidentified
MVRFVGIDIGKAKCRAAIMDPGGIILEEFTFTNNHEGIEGLAATLTMDDRVVMESTGSVWTNLYNRLDERHIPVALANPLKTKAIASAKIKSDKVDARILAHLLRSNLVAESYVPPKHLREIRALVRHRVGIVKIRTMVKNEIHALIDKHGLRHEFSDLFGKRGLEWLRSLELPSLDKLILNNHLTHLESLDQQTERVDEEIHSKACEDEDVRLLLSMTGIDVYSALLVRSEIGSIDRFPDYKKLVSWAGLAPSLHQSGSIEYHGSITKQGSRMLRWIMVEAARVAVNHDDRMRAFYERVKHRRGDQKAIIAVANKMLKIIWFMLTRREPYQSRNERRYQQKLNSITD

SEQ ID NO: 136883 - protein, 409 aa, unidentified
MDVVYARCCGIDIHKKTAVACVINADPNGRPRKQIRTFGTMTDDLLALADWLAAEGVTHVAMESTGVYWKAPYNLLEGQFEVLLANAQHIKAVPGRKTDVQDAEWIADLLRHGLLKASFVPDRPQRELRELTRYRTAVVRERATEANRLQKTLEGANIKLGDVASNILGQSARQMLEGLVVGADPVSLAQFARGRLREKIPQLERALAGRFAAHQRFLIAQQLAHIDYLDEAIERLNAEVAERLAPFVSTIERLDAIPGIARRTAENVLAEIGPDVRRFPTAGHLASWAGLCPGHHESAGKQKRGTTRPGNPWLRAALVEAARAAARSKDTYLAAQYQRIARRRGGKKAAVAVGHSILVIIWHLLQHECAYVDLGAGYFDEHDRAFAKRQLVRRLEHRGCTVNLSRSAA

SEQ ID NO: 136884 - protein, 408 aa, unidentified
MNTLYVGIDISSKSNVVYMMLPNGDKHSNFSVASSHEGSIQLVKRIYSALTSHSLDTVLIGLEATSVYGDNLVYFLREDATLAPFNSRIHVINPKQVKRFHDAYNDLPKNDYVDSFVIADCLRFGRINKEVYSGDYRYQALRNLTRARSFTVQNLIKEKQRFMNVLFKKYSTMTQEKVFSNTFSATALAVYEEFDSAEALANMDLHELTDFIIEKGKNRFQNPDAVAKAIQKAARSSYRLPKTVNDSVNQVFSISITSMKALESQIKEFDKAIKAQTELLPNVLISIPGICPVYSAGIMAEIGDINRFDNQAALAKYAGLAWKQYQSGGFEAEVTRLIPSGNRFLKYYLCEAAFSLVRCDKEYSDFYHLKYKEVNRCQHKRALALTAHKFVRLVFRLLKDNRLYCPAK

SEQ ID NO: 136885 - protein, 352 aa, unidentified
MDRYIGLDVHASSCTLAVIEPSGKRLSTQVVETNAATLIEVLRGIPKRRHLCMEEGTLSEWLHEVLEPHVDELVVTGVGKKSRGPKSDKQDALGLAEQLRIGAIKTRVYKGRGEFGRLGNLAKAYGFVVGDTVRVKNRLRSVLRSRGVAYGAGQSVYAKRERAHWLGELPAATRTLAELLYEEHDALVALREKAEKTMLAEARKHRQWHVLKTCPGLGPIRIAELLPVVVTPYRFRSRSGFWAYCGLGIVMRTSSDWMRNPSGQWVKTPVQQTRGLNRNFNRTLKRVFKGAATTVIGRAEDGPLYRHYQSLLDGGTKPNLAKLTIARQIASITLALWRTGERYDATRLEATK

SEQ ID NO: 136886 - protein, 344 aa, unidentified
MDNHTQYLGFAGVDLAKKVMQIHFVTEDGEITDKSAKRAEFLDFFRNRGKCLIGMEACGSSQDWARKLEAMGHEVHLMSPKAVKPFVSGQKNDHNDAIGIYKAMFNGVRRVPVKSTEIRDLQTLRRIRSQVTKDKVKEINHVRGLLAEYGIVMGKSITAFNKGISSALESLKERGDVSPLVAEELQTTVESIKTKIERQKRLDREIEQLARGCKNYENFLKTPGVGLFTAAMLCVLLCDPAIFANGRQFAAYIGLAPRSRGSGGKNFIIGIPSKFNCDSESRAVFVECAQALARYKNKSPWVDGILRRKPKKVAVIAIANKLARQVWAMANKGESFKQMTILTA

SEQ ID NO: 136887 - protein, 338 aa, unidentified
MDRQYVGIDFHRRRSVVVRVSSTGERLATTRVANDPLAIAAAVAEAGPDPEVVIEATYGWYWVVDLLRADGARVHLANPSALNWGQRRVKNDVADATDLADMLRLGRLPEAWIAPPAIRELRELVRYRAKLVALRSGLKAQVHAVMAKEGVLPGTTDLFGVKGNAQLAAMTLGDAYTTRVESLRDLIEVYDREVTMLAGDIHRRLRGDRGYRAIQAINGIGPTMAAILVAEIGDVTRFRNAAALCSWAGLTPKHRESDTTVHRLEITKQGSRLVRWAVVEGCVRYHGGGKLAADYRRIAERRGKNKATVAIARKILTLVYYGLRDGEIRCLAAAPEAA

SEQ ID NO: 136888 - protein, 417 aa, unidentified
MKSARVTLPEELANGVTCGIDWARDDHAVSVVDARGREIARRTVEHSAAGLRELVTVLARNGAREAAIERPDGPVAGALLGAGITVVVISPNQVKNLRGRYGSAGNKDDRFDAFVLADTLRTDRARLAPLIPDSPATVSLRRACRARKDLVSHRVAAANQLRAHLQLAFPGGAGLFAEIDSPVSLRFLARFDTQDRADWLSPRRLAAWLASAGYSGRTGPAILHARLTAAPRGATGDDGLANACITRALHAVLVVLTGQIKALSEQISEQLALHADAHIFTSLPRSGTVRAARLLAEIGDCRARFPTPEALACLAGAAPSTRQSGKIRAVSFRWACDKQLRDAVTDFAGDSRRASPWAADLYNRARARGHDHPHAVRILARAWLFVIWHCWQDDVAYDPARHTALQTLLNQDQRGAA

SEQ ID NO: 136889 - protein, 435 aa, unidentified
MEQPTRFIGMDVHKDTIVVAVTAAGEVGKAMPYGTFPNTAATVEKLVRRLRQAGSGPLKFCYEAGPCGYGIHRALTKMNEDCMVAAPSMIPRKSGDRQKTDKRDAASLAVLHRGGLLTAVWVPDAAHEAMRDLIRARLAAVRAVRAARQQLSAFLLRHERIYPAGRTAWTKAHRGWLAEQSFAQPAQQIVLEESIETVRLGEQRRDRVDGYLRAQIPTWSLFPLVQNLSALRGLDTIASAGLAAAIGDPSRFVSAPDFMAYLGLVPSEHSTGPKRRIGAITKAGDVHARSLLIEAAHSYRFPARVTRHKLTAVDAVPDAVREIAWKAQTRLCQRYRHMMAKGKLKQVVVTAIARELAGFVWSIACITTDPPTKNSAVTTLSEKICPTGSTTCSSVPRRQPIKETARRAERPGQIRTASADGKRPDRMIAHHHSSG

SEQ ID NO: 136890 - protein, 377 aa, unidentified
MATTRTVLRDQLTAKPGDLYMSLELGDKHWHISIGGERRSVSHYIVEAGHTEEVADCIAKAAARLHTARVHSCYEAGRDGWWLHRWLTDLGVDNIVVDPASIEVNRRARRAKTDRLDADKLLAMLVRHHSGERVWSVLREPSPSDEDARRAHRELQRLTHERIAHTNRISSLLVLHNLRPRIVIGGRDWPAWWNEHREQVPPTLRAELEREAVRLKVVKEQVRAIEAARARELAEGKQPLVAQLVRLRAIGAKGAWVLVKEVFGWRHFANRRELAGSLGLVPTPYASGDSEIEQGISKAGNRRVRALLVELAWSWSRLQPASALTQWFNRRFAGGGKRMRRVGIVALARRLAIALWRYLQTGEIPIGARLKPTGSGI

SEQ ID NO: 136891 - protein, 338 aa, unidentified
MNITTLGIDIAKNVFQLHGVDQDSKTVLTKRLSRAKLLEFVTNLNPCLIGMESCGGSNYWARKFIAAGHIVKLMSPQFVKPYVKSNKNDKNDAEAICEAVARPNMRFVCVKQIEQQDIQSIHRIRTRLVAERTALANQIRGLLAEYGIVIPKNIGNIRSNLPEILEDGANELSGIGRETFKDLYDELVDKDKKILAYDKKIKLICNQNAKCKKLTEISGIGPITATAILAAVGDARVFKNGREMAAWLGLVPKQCSSGGKERLLGISKRGDKYLRSLLIHGARAVIFKHKNKDDTKSKWAKQLVERRGINKAVVAVANKNARIIWAKLTGAQPWQAAA

SEQ ID NO: 136892 - protein, 364 aa, unidentified
MLIIGCDYHPGFQQIASVDNETGELVERRLGHREEAEKFYLELKQQNTSVRVGMESSGHSRWFERLLHELGFELWIGDPAEIRTKRVRKQKTDRQDAQLILQLMLENRFPRVWVPDAENRDLRQLLWHRHRLVQMRTRVMNQLHVVPLNEGLRRKKALWRPAGRKELESIALAPWASRRRQDLLDLLDQLTPKIQELTRALEEEVEKRPVTRLLMTHPGVGPLTALAYELVIGTPERFHCGKQLASYIGLVPEEKSSGDRRRLGHISKQGNVLLRFLLVEAAQVTVRSHQEWRNKFFHLAMRRGRKIAKVAMARKLAVHLYWMWRQGCDYGQTQKLGSHAGEPGNPDGVQSNTDVMIGHPAPSK

SEQ ID NO: 136893 - protein, 348 aa, unidentified
MEHICRIGMDTSKHFFQLYGVNAAEEPVLRKKLRRKDMVAFFEKLAPTVVAIEACGGSHHWARLLSSFGHQVKLIAPQLVKPYVKRGKNDAADAEALCEAMSRPTMRFVPVKTAEQQAAVMLVGVRDRLIRNRTQLANSIRGYASEFGLTAPKGMAHLDPLIERIQADEGLPDLARELFAAQAKEYEQLQAQIDEVDVKLKAWHHADECGRRLAQIPGVGPIGAALLMMKTPAPEMFRSGRQFAAWIGLTPKDHSTGGKVRLGVITRAGDEALRSVLVVGATALLRFVANGKSKSALSPWLGQLLKRKPAKLVAVALANKLARIAWKLMVTGQSYVRKSTPTTVAGAA

SEQ ID NO: 136894 - protein, 341 aa, unidentified
MRKFIRIGIDLGKNYFQVHALESEDRKATTRKLSRLAMRKFFSETDPCLVGMEACASSHYWARELLAMGHDVRLIPPIYVKPYVKRGKNDAADAAAVCEAMSRPGMRFVPVKSEENQATLMLHRARQLLIKQQTMSVNALRGHLAEFGIVASKGIGRVDELVEKAENDATLPSAATAALKLFVQHLAAIGASIADLDRRISSAHAQNGTSQLLAGIPGIGKMTASAIVASVPDPNVFKSGRDFSAWLGSTPRQNSSGGKERLGSITKQGNAYIRRLLVLGATSLLNQVGKRKGALHDWVVALLARRPARLVTVALANKLARITWAIMTTGESFRIEAFAKA

SEQ ID NO: 136895 - protein, 414 aa, unidentified
MPKIVYRVCCGMDVHKSFVVACIASTNEYGVTTYKSKRFSTFTGDLRRCANWLSENNCKDVCMESTGKYWIPIYNILERTCNIVLAHPKYVKAIRGKKTDKRDAKWIADIFKHDLVAGSFIPPADIRQLRDLVRYRWKLTNFITGEKNRAQNCLTVSNFKLDDVFSDVFGKAASAITARILENPTEKIVDVSGFRTKGMKATNEQVLAAVDGEMCAEQAEKLRIIRSHMGSLGLCKLNLESLILSTAEKYLPQLGLVMTAPGIQSFAAIGIISEIGVDMSVFPSSKHLCSWAGLTPQNSESAGKKKTTRISRAGAYIKPLLVQCALCAIRAKQFPEVRNRYLALKKRRGHKKAIIAIARMLLTAIYNMLKKNEPYNPELYRKGDQPPAHREVSVDEAIFILQRQGYLVTAPPTP

SEQ ID NO: 136896 - protein, 457 aa, unidentified
MPQPKRSRSRTGLSAVHPAAAAIDIGATMHVAAVGPDRDTEPVRTFQTFTDDLHRLADWFARCGVKTVAMESTGVYWIPVFEILEQRGFEVMVVNARDAKHVPGRKTDVSDAEWLQRLHEYGLLRPSFRPQAEIAGLRAYLRQRERLLDYAAAHIQHMQKALMQMNLQLHHVVSDITGVTGMNIIRAIVAGERDPNVLASHRERGCHASVETICQALVGNYREEHVFALSQAIELYDVYQTKVAACDRQIEVILKRLKKSATPPASKLLPPKHRSRQPNAPSFDARAALHAILGVDLTQIHGLGPYLALKLVGECGTNLTAWPTAKHFTSWLGLAPHNKISGGKVLSSKTRRTSNRAASLLRLAAVSVGRTDTALGAFYRRLAARAGKAKAITATARKIAVLFYNTLRHGMSYADPGATYYEERYRQRVLGNLQRRAKSLGYVLHQAERDPIQIVVS

SEQ ID NO: 136897 - protein, 363 aa, unidentified
MIIIGVDYHPEFQQIALLDQDTGELQEKRLSHPGEAEKFYRALAVSQKVRVGMEASGHARWFERLLGELQFELWIGDAAAIQSKRGRKQKTDRQDAEHILKLMLKDDFPRIWVPSGENRDLRQLLWHRHRMVQARTRIMNQLQAVAINEGLRCKKRLWRTGRQQLALLRLAPWASRRRHDLLELLDRLNPTIAELSQAIEQEAAKCAEARRLMTHPGVGALTALAFVLIIGDTERFQCGKQVASYLGLVPLEKSSGNRRRLGHITKQGNSLLRFLLVEAAQVTVRSLPEWRSQYFHLLMRRGRKTAKVAMARRLGVDLYWMWREQRDYQSKSSVRTQDSRNRRWCAIEHREIDWASCSPSRGV

SEQ ID NO: 136898 - protein, 345 aa, unidentified
MKKVIKQVLGIDVAQKELVVCLAKMNDDWTSELYAHKTFANTANGFTALLKWTKKLTDPDISVRYVMEATGVYHESLAYFLNDQGLEVSIVLPNKISNYARSLTIKTVTDKTASEAIAQFGLERNIDLWQKPLPTYKKIRQLTRERDQIIVERTMVKNQLHAELVEAEPNKTSITRIKKRIEVLTKQEKEITSEIRQLIVADEKVSSTVKLLCSIPGIGMLTTATVLAETNGFDLIRNKRQLASYAGLDVKEKQSGTSVKGKAKISKRGNRFLRKAMHLPGLAAIRHDERFKSVFVRLVSKHGIKMKAVVAVQRKLLEMMFTLYKSNQSYAKDYLNKVKLTMTEA

SEQ ID NO: 136899 - protein, 361 aa, unidentified
MSAVAERVLPSQGVVIAVDPHKASWTAVAVTAGLAAAGAVRVEANRAGYRQLRRFAAGWSDVRWAIEGATGLGAPLAGRLGEDGITVVDVPAKLARRVRLLPAGHGRKSDPADALSVGIAAWSAPALRTVEIDQAIAVLRALTEHRDDLVRTRTQLINRLHVLLVKLIPCGLARGLTAESAAEALRRIRPRDSLGRTLRALAVDLVAELRRLDRRIAETTQALSDAVTASGTTLTQLLGIGDVVAAKILARTGPITRFLSTAAFASFCGVAPIEVSSGDVVRHRLSRAGDRQLNYALHVMALAQIRYDGPGRSYYQRKRAAGKSHKEAMRCLIGGLSVSRPGHAGRGSPAALGDGLVAEPL

SEQ ID NO: 136900 - protein, 388 aa, unidentified
MLIEQIAPVAQTEFAPVFVALELSRSKWLVGVGTPRKWTVRRHQVEGGDLYGLLELLRRISAEEEKRGLPVKVHVCFEAGRDGHWLYRALKLAGYEAYEIEPASVAVDRRARRAKSDGVDVDKLVRTLARFVRGELDACRIVAVPSEAEEDAKRPHREYERLVKEQTSHRNRVKALLFAQGVRDFDPMAPDRLERLAALPIMPRLKAELIRECRRLAGIIADIAAIEAEMKAAIVPPKKAKPASAACAAPSPAEAKAAQLMRLKSIGVHFSTALAREVYYRTFQNRRGVGQYIGLAPSPFQSGDMARDQGIAKAGNKRARKAMIELSWLWVQHQPDSALSQWFRERVGDKKGRVRRIFIVAMARKLAVALWRYLETGVIPEGAVLKRA

SEQ ID NO: 136901 - protein, 451 aa, unidentified
MARKSNRFDEVRRHVAGIDLAGNAEHYVCGPRKDDGTHDIERFGTTTNELLRMVAWMKERKVESAAMESTSVYWIPVYDTLESAGIEVVLVDTRTVKMVPGRKSDVKDCQWLQRLHSCGLLRGAFRPPEMFNAVRSVIREKGNVLQMRTQAIQSIQKALDQMNIRLHHAVSDIDGMTGMKILGAIVAGERDPRRLAALRDWRCKKSEAEIVEELTGNWREEHLFNLKQAYETLCFLDGRVAAYDSQIRAMYAKIAASFPPLDPPPNGGGRKPKDKEDAKAKADLARICGGFDMTKIDGIGYDSAAAILSELGPKLDAFPTESHFVSYIGVAPALGKSAGKNVSSRRKHKNTSRVGIVLKMAASTLSRSESSLGARYRCVRSRTCSRTAIKDVAREMAKRIYRGIKHGQAYIDEGERAYLERTRERTIKSMKKKISKLGISAEELGIYAVAV

SEQ ID NO: 136902 - protein, 350 aa, unidentified
MTYYAGLDVSLEETAICVVDDAGRIVKEVRAASEPDALVEALQALKLPLERVGLEACSLTAWLHDGLCQAGLRAICIETRQANAAMKTMPNKTDRNDARALAQIMRTGWFRQVHVKSRQCRLWRSLLVARRTVLNEMRTIENVVRAILREAGLKIGTPSRAAFDGRVRELAAGNGTLMPMVDPMLKILATMLRELARLTKQVLTIVRDEKVCRRLMSVPGVGPITALAFRATIDRPDRFGHSRDVGAHLGLTPSRYQSGETDIQGKVSRCGDELARTALYEAAHSLLTRSKKWSSLRVWGMKIAKHRGMVRARVAVARKLAVILHRMWSDETEFRFGKEPDAKPMVSATA

SEQ ID NO: 136903 - protein, 347 aa, unidentified
MEYFAGLDVSLETVNVCIVNAAGDILLEKKIAAEPAAIVNLLKSFGSPFKRIGLEAGPTSSWLYGELRAAGYGAICLECRHVKAGLSAMRNKTDRNDARGIAQLVRLGWFRQVHVKSEEAQRTRMLLVNRQQLLTKALDIENSVRGSLKVFGLRVGVVARRGFEARALELVADDPILLAITKPMLRVRQVLLEEFERLDRLCQQLARRDPVCRRLMTVPGVGVVVALTYRTGVDAPERFSRSRDVGAHFGLTPKRYSSGQTDYDGRISRCGDEMVRTALYQAANVLLHHGRWSSLRSWAMRIAKRGSVKGAKVALARRLAVVMHRMWTDGTDFRWSDTSRMTAPTAI

SEQ ID NO: 136904 - protein, 335 aa, unidentified
MTEITTVGVDLAKTIFTIHGVDAHGKTVLRRTVRRERLMEVIAGLPPCLIGMEACGGAHDWARRFEQHGHRVGIMMARFVAPYRKSSKNDDNDAEAICEAVARPNMRFVPVKSAEQQAVLSLHRIRQGFIEERTATLNRIRGVLAEFGVVLPQRAEQVRRAATVMAEALPLLARDAIADLRAHVTYLDERINRYEQQLVALTRQREAAMRIQQLPGVGPLTASAITASISDGHEFANGRQFAAWLGLVPRQYSTGGKAKLGRITKRGDAYLRTLLMLGARAVLQRAGQRSDRLSRWAIALRERRGYHRAIIAIAAKNARIIWALLARRTEYAPAM

SEQ ID NO: 136905 - protein, 345 aa, unidentified
MKYIGIDYHKQYFVATMMNEQGEVIRRDKASTDRASIRQYFQNAHLSGDVKAVMEACYGWEYFYDEASALVDELIMAHPLKTRLIAEARIKTDTIDSETLAHLLRADLIPEAYAPDSETRNKKNLLRYRSSLVAMKVRIKNIIHSVLTRNHIEDTGFTSLSDKFGKQGLSYLRAVTLKDNDTVILNDYLDLLGETEQKIKEAEKRIRAICRQDKICSLLQSIPGIGPILAVTIRYEIDDIERFMSAGKLCSYAGLVPSTYSSGNRTYQGRITKQGNKWLRWAMIEAARQAPCRDLWLRGFYQRISKNGKKIARVAVARKLLEIIYRIWKEEKPYYKKGTVALPFV

SEQ ID NO: 136906 - protein, 361 aa, unidentified
MYDATTAKETKVTVGLDLGDRYCQLCVLDEAGEVVEEGRVATKPETLRRRFSGADPLRIVIEAGTHSPWVSRLLFELGHHVIVANPRKLRLIYQNDSKSDRVDAQYLARVGRLDPALLAPLTHRGAETQVDLALLRSRTALVRARTRLISHARGCTKSLGSRLPPCASDVFARKAGPCVPEELTPALAPVLTVIQGLSEEIRALDAKIEEMAKERYPETALLSQVPGVGTLTATVYVLTVEDPRRFPKSRSVGSYLGLRPRQASSGSLDPQLRITKAGDEHVRWLLVGAAHYILGPFGPDSDLRRWGLALAAQGGKRGKKRAVVAVARKLSVLLLRLWTTGEVYEPLRNARLRGELLPAQT

SEQ ID NO: 136907 - protein, 378 aa, unidentified
MPSENIVHIAIELSFSSWLVAARLPGAEKPRLHRIAGGDTTGLLALTAELRARASAKLGQAVEVACCFEAGRDGVWLHRLLTAHGIAAYVLEPTSILVNRRARRAKTDRLDAEGMLRVLAAWLAGDGQVCSMVRVPTPEEEDAKRPHREREHLVQTKLRLENRIKALLFTQGIRSRPSLRSWERDMAELRTGDGRALPPLLRTELDRLRRQLVVILELIRELEAERAAAIEAAADDARVQKIVGLQRIRGIGPNVAAVLVREVLYRSFANRRQLASYVGITPMPHQSGGMDRDRNISRAGNPRARTTLIQLAWLWLRYQPGSTLALWFRERVGALQGRTRRIAIVGMARKLLIALWRYVETGVIPDGVELRMPAAATA

SEQ ID NO: 136908 - protein, 343 aa, unidentified
MQIHSVGIDLGKTTFHLVALGASGKVLVKKKFTQRQLLAYTANMQTSLIGLEACSGAHFLGRALHKQGHDVRLIAAQFVKPFVKSNKNDFVDAEAIAEAVERKNMRFVPIKTDDQLDLQAIHRVRDRLISRRTAVINQLRAFLLERGMVFAQTPAKLKAAMADILENAEADLTPQMRNLIDILWSEWKTVEHQIKELTEQLERISAADADCTRIRQIPGIGPIVATAIVAAIGNGAAFRKGRDFAAWLGVVPRQYSTGGKAKLLGISKRGNVYLRKVLIHGARAAVLRIKRDRAAIGPWLDRLDARAPKNVVVVAMANKLARIAWAVLSSGQDYRPSPIVSAA

SEQ ID NO: 136909 - protein, 424 aa, unidentified
MKVTYQTCCGVDVHKSFLVATIVKTTSGIEPSYQKKRFSTFNNSILEFKQWLLDNDCHDVCMESTGKYWIPVFNLLENEINVVIANPKWVKAVKDNKDDAKDSKWIGDLFRLGLVKGSYIPCRKVRILREYSRYRYKLVSCRSSEKNRYQNALTVCNVALDSVVSDIFGKSSTSIIDYLLEQSGTSINHEEIAPKLLRSLKSKEDAVIESVEGYQMTDAQKYRMRLIRAHMDYITAEINDVDKMIENMISSNPDFENAVRFLCTIPGVKHDSAVTIISEIGTDMSQFSSSKRLCCWAGLTPGSNESAGKKKSVRITRAGVCLKPALVQCAHAAVKSDKSPYYKKKYDSLVKRRGKKRAIIAIARMILTAIYQMLSTGEQWNPSDLYKIDMPAPLLEKQKAKAIKQAKKLLQRERLLPPDEPLAS

SEQ ID NO: 136910 - protein, 343 aa, unidentified
MEQISTIGLDIAKTVFQVHGIDGSGEPVVRRQLKRRQVLSFFARLPACLVGLEACATSHHWARELAKLGHEVRLMPPRYVKPYVKRNKNDAADAEAICEAVQRPTMRFVPIKTPEQQSVLMVHRTRQLFVRQRTTLINAMRAHMAEFGIVAGIGRNGVEKLLELITKGEDERLPPVARECLIALAAQLELVKQQILEADRRVRAWHRTSKTSKRLEAIPGVGPLVATALVASIPDPHVFRSGRDLSAWIGLVPKQNSTGGKDRLGSISKAGNRYLRQLLVVGALSVIRRAKQLGYTRHPWLVRLMARRSTKVAAIALANKIARIAWAMMARNESYRTPLPQSA

SEQ ID NO: 136911 - protein, 416 aa, unidentified
MVSRGSGWKLLFVGDDWAEDHHDVCLQDAAGRVLAARRLPGGVAGITRLHELVAGHQDGDDPSQVVVAIETDRGPWVRALVAAGYRVYAVNPKQAARHREVVAVSGKKDDAFDAAALADMGRTRRHQLREVAADSDEAEAVKVAARAHQKLVRERTRQALRMRSALREYFPAALDAYAPLTLTGPDTLELLAKAPGPAAAARLTIAQISAALKRARRHDVAGKARQIRAALREQHLGQPEIVTEAYAAGVRASAAVITVLNEQVKVMEAMVESLFRRHPDAGIYLSQPGIGVITGARMPGEFGDAPGRYADARARRNYAATSPLTIASGKKKTVHARFIHNDHLVNAMHDQAFAAISASPGARAYYDELRSREIDHTDALRRVANRQAGILHGCLKTGTGYDEHTAWGHRSQPAAA

SEQ ID NO: 136912 - protein, 343 aa, unidentified
MTIIRIGLDTAKHVFQLHGVDESEQPILRRQLRRGEVERFFAKLPPTRIGLEACGAAHHWARVLRALGHAVVLLPPQYIKPYVKRGKNDALDAAAICEAMSRPSMRFVPIKSAEQQAALMMLRARELLVKQRTMLINAMRGHAAEFGVVAAKGPVKVRELLPRAHAAEAGVPELALEMLRLLASQLDALDGKLKMIEATLMAWHKQDAVSRCLASQPGIGVPGLDPGIGAVSFALGVSDPKLFRSGRHFAAWLGLTPKENATGGRSRPGRISRQGDQSLRRLLVLGATTVIQFAKPGRASPWLLQLLARRPRKLAAIALANKMARILWAMMVSGELYRRPQPV

SEQ ID NO: 136913 - protein, 491 aa, unidentified
MSERRLVGIDLGIASAHTVRVLREDGSEVCRRRCWPRLDSLLEVEAAALAGAPPELRLEVVIEPTGPAWLPIAVFFSGRGHTVYRVSSAQAADLRRFLSRHAKSNGIDAQTLARLPLVDPGGLRPLRLPERDAASLDRRVRATDRLTRQAAEHKRRIKDLVRQLLPMTPLQGELGKADLAVLERTGAHPRRLLDLGRTRLTRLIARASNDHLGEERAQAWLDAAHLALELYGDHHAVAFNDRAAEVVTEVRLLHATQAELPAHESAREQAYRQVDPDQLARGLPGVAAVGGPALAALIGDARRFPDGASFRSFTGLAPRASETGETDRKGQPMSKAGPRLLRSTLIRAAETARHLDPQLARLYYVQVVERGACHLKALCVVAAHLGERAWAVLARGTPYQFRDVDGTLVTPAEAKALAARWKVPDEVRQCRRSRKSRKQGGKAPHQVHLGPATRARGALTRRPSPQPILTSGLTPIKQILNDLQERINVRP

SEQ ID NO: 136914 - protein, 402 aa, unidentified
MNAVGIDVSKGKSMVAIMRPFGEIVSAPFEIKHTASDIHSLVELINSVEGESRIVMEHTGRYYEVLAHQLSKANLFVSAINPKLIKDFDNDSLRKVKSDKADAVKIARYALDKWQNLKQYSVMDELRNQLKTMNRQFGFYMKHKTAMKNNLIGILDQTYPGVNTYFDSPARSDGSQKWVDFASTYWHVDCVRKMSLNAFIDHYQNWCKRKKYNFSQSKAEEIYGKAKELVPVLPKDAITKLIIKQAVDQLISVSTTVESLRTLMNETASKLPEYPVVMAMKGVGTSLGSQLMAEIGDVSRFTHKSAITAFAGVDPGVNESGSYEQKSVPTSKRGSSDLRKTLFQVMDVLIKTHPQDDPVYQFLDKKRAQGKPYYVYMTAGANKFLRIYYGRVKEYLSSLPES

SEQ ID NO: 136915 - protein, 343 aa, unidentified
MEVAIGIDTHKGSLAAASVDVLGRVLGVREFPNAPAGHRLLMRWVREQGQPRTIGVEGSLHYGAAVARMLLEGAEDVREVCPSLTHVERRRRSKGKSDSIDAVAIARVVAADETLPSARRTALLSDLKLLVDYRDQLVRARTQVANRVHADLVVLRPGYEQVVPNLRARRHVARARTLVSRDRSVQGELVRHRLREILRLEAEIAGADRRIADKLAEVDTTLTQIPGIGPFIAAKILGEVGEISRIRSKASFALLSGTAPLIASSGQTHRHRLNRRGNRQLNWALHYIALAQSRTNAEAKAYLARQRESGKSHKEAMRCLKRHLSNVVYRHLLMDARRLEQAA

SEQ ID NO: 136916 - protein, 318 aa, unidentified
MPPAASVFVGIDVAKAELVMAIRPSGERWTATNDDAGIQRLLPRLREAAPALVVLEATGGYERAAVAALAAAGLPLVVANPRQVRDFARATGQLAKTDRIDADTLALFAERVRPDPRALPNESAQALDALLTRRRQILGMVSAERNRLEHAVPAVRRGIVQHIRWLERQLHDVDNDLDRTIQASPAWRAKENLLRSVPGVGPVVSRTLIGDLPELGTLPGKQIAALVGVAPLARDSGTLRGKRLVWGGRAPVRAALYMAALVATRRNPVIRAFYQRLLTAGKPKKVALTACMRKLLTILNAMLHANTVWRHPAQTATT

SEQ ID NO: 136917 - protein, 343 aa, unidentified
MTYDTMIGVDLAKNVFQVHGALLSGEVKFRRKLSRQHFRRFMAGQDAAIVVMEACGSAHYWSREMTKLGHEVRLIAPQYVRPFVKRQKNDAADAEAIVTAAQRPEMRFVTPKLEEQQAQALLFRGRERLVRQRTELVNALRSVLYEFGYPIPPGIVQLTRIEAMVEAENSDLPELVRDECRDILLQIAEKTQRIEAKAQQISALAKITDTARRLQTMPGVGPMSALAVEAFAPPMESFRRGRDFAAWLGLVPRQHSSGGKERLGRISKAGQADIRRLLIMGAMSRLNWLGRKTIPERSWLSGMLARKPRMLVAIALANKMARAIWAMLTTGKDYQNPAQTAAA

SEQ ID NO: 136918 - protein, 430 aa, unidentified
MKSNTQNAKIEAITEKTLVLGIDVGSETHYARAFDYRGIEYSKKPFKFSNTEAGFVTFKEWILDLKERHEKDKVVPGMEPTGHYWFNLGKFLQDNEMKPVLVNPHHVKKSKELDDNNPTKNDRKDPKVIAGLVREGRYMIPYLPDGVYADLRTVSNIRFQLQAELTRIQNRISRWFNIYFPEYKTVYGKPDAKSGILILKAAPLPEDILTLGIDGVNQIWRDAKLRAVGKARAKTLIEAAKHSVGSKEGAVAARMEIRMLLEDYESRNIRLQEVMTLIEGLVKQIPMAEKLLEIKGVGIRTVSGFLAEVGDISRFNNPKELQKLAGLALVENSSGKHKGETTISRRGRKRLRYLLFEVAMSLVAKNPEFRELHNYYTTRRLNPLKKMQSLMAIAAKLIRVFYVMLTKGVNYDPKKMVNDIKRPAVYLQTA

SEQ ID NO: 136919 - protein, 413 aa, unidentified
MSVTDEPGSRRPTAGVDWATADHAVAIVDPDGEQTGRFPVTHDAAGLRTLVRKLLAAGVAEVGIERPDGPVVDALRAAGLVVYVIPPGQLKNLRSRYGSAGNKDDRFDAYVLADVVRTDRRRLRPLLIDQPVTTALRQTVRARRDLVAHRVAVANQLRAHLQICFPGAVGLFADIDSDISLRFLERFPTQDRADWLSPKRWAAWLASVGYSGRTLPETLHTRLRDAPRGATGTTADTAAAVTAAFVAVLRTITVQIEALAARIAEQLDLHPDAPIFTSLPRSGRVRAARLLAEIGDARGRFPTADSLACLAGVAPSTRQSGKVEVVSFRWGADKQLRDAICDFAGDSRHANPWAADLYTRARARGHDHPHAVRVLARAWVDIIWACWTTNTPYDPAKHRALQRILNQDQPTAA

SEQ ID NO: 136920 - protein, 339 aa, unidentified
MKLHCGLDLHSNNTYAGIIDQNGKRVVRTKLKNIPENIVHFLDPYKEDLASIVVESTYNWYWLVDLLMDEKYKVHLANPSAIQKYSGLKHSDDTDDAFWLAEMRRLGILPEGYIYPKAERPIRDLLRKRGHLVKLRTSLIISLQNIISRNCGVKLSANDIKVVQEDRVAPFLSDQEELFLAGAVSKDAIDFLGGKIRYIETEVRNRSRLKEPYTLLRTMPGVGNILSLTIMLETGPISRFSKVGDYVSYCRKVPSLWTSNGKKKGKGNQKNGNRYLAWAFSEASELSRRTDEKARAYYNRKRQKTNLMVAHAALAHKLARAAYYIMKDQVPFMPEKLFR

SEQ ID NO: 136921 - protein, 356 aa, unidentified
MAILADTIDGVIGVDTHRDILAAAAVTPIGRVIAQTTTNADTAGYHALLAFAQAQIPGPRCWAVEGTGSYGAGLACFLLDHGERVVEVGRPKRPASRTGAKSDAVDALRAAREALAFDHPPAPRRRGDREALRVLLTTRHGAVRARVEAINQLKALVVGAPEELRAELRGRSTSAQVDACARLRARPAKSLEHRATVRALRATAQRIQLLQAEADELQAELTALVGAIAPWLLELHGVGPISAAQVLVSWSYAGRLHSEAAFAALAGVNPIPASSGQVTRHRLNRSGDRQLNRALHTIAVARLRDDPDTRAYAARRAAQGKSPREIRRCLKRYIARQLFKLLECCDQPGAEILHAA

SEQ ID NO: 136922 - protein, 340 aa, unidentified
MKKVFIGIDFSKLKFDAAIYIVDRKSIVSEEVFENGPSGYAEFLKWVSSTACCQKSCLLFCGEHTGYYSANLSTFLHESGYDMWLVSGLEMKLTQGIKRSKTDRVDACKIAEYAYRYQDKSVLFQPVSKELEEIRELLSYRERLVETRKVLSTSAKEMKRVKDNASCDFIYLDSLAYITTLSESIRNCEKRIVELLNQDTSLRVNYKLVSSVVGIGLVNAALILVSTANFTLITNPCKFGCYCGVVPFEHASGSSVRGKTRVSKLANKHIKTKLTLAAQNSIRFDPELKEYYQRKISEGKSHWLVLNNVKNKMIHRIFAVVREGKMYEKQYIHPLKLQAA

SEQ ID NO: 136923 - protein, 401 aa, unidentified
MNAVGIDVSKGKSMVAILRSYGEIISKPFEVKHTVSGIRSLIEQIQSIDGESRIVMEHTGRYYEPLVRELSKADLFVSAINPKLIKDFGDNSLRKVKSDKADAVKIARYTLDSWTELRQYSLMDEIRNQLKTMNRQFDFYMKHKTAMKNNLISILDQTYPGANTYFDSPAREDGSQKWVDFSATYWHVDCVRKLSLNAFIDHYQKWCKRRKYNFSRSKAVEIYEASKELVSILPKDDLTKLIIKQAVEQLNTASQTVEQLRTMMNEAASKLPEYPVVMAMKGVGKSLGPQLMAEIGDVSRFTHKGAITAFAGVDPGVNESGSYEQKSVPASKRGSSTLRKTLFQVMDVLIKTKPQDDPVYLFMDKKRAQGKPYYVYMTAGANKFLRIYYGRVKEYLSSLPE

SEQ ID NO: 136924 - protein, 450 aa, unidentified
MRSTYAGVDWASEKHDVVIADETGEEVLAVTFAHDEAGVRGLCRALVRHEVTLVAIERPDGLLVERLLEAGLRILALHPNQVAATRDRFRASGGKSDRFDAFVLCELARTDHHRFRVLEPDSDQTKALRALTRAREDLVGTRTALVNQLRAELAGFWPGPLGLFTSLHSQISLAFLERYPGPADARGLGEQRLQAFLARQRYSGGQKPARLLAKLRRAPEARVGELELGVRRALVLSLVATIKTLNEQIKQLERQIATAIREHPDGPIFLSLFKKPNSVITAAELLAEIGDCRGRYPTRDTLAADAGQAAVAVESGKRKAACFRWACNKRLRQAFVTLADTSRHHNPWAQDLYAAASARGHDHPRAIRTLGRGWCRIVWRCWQDGVPYDPARHRALQRHVTVTIPTSPGPRPDTAATQRMAGAAVTQQADRRAERNALDGKPTSAIALEG

SEQ ID NO: 136925 - protein, 394 aa, unidentified
MHSVGIDIGKRQHVAAICREGQRSADKAVLRFGADRSGLALLERWLSRHGPVERVVMESSGHYWLPLAAALHRASVPVAIVNPVTARHFSARRLQRVKSDPADARTLAALGMADRPRIREPLAGAEVREAARFAMHLVEEQSRIDNKVTRLIELGFPELEQVYDDPTCQSALAVLRLAPTARAVARKQVATLAAANRAPGHRAVGTAKAARIQALAKDTIAPPELAPQIGFEMELLIAQHDLLEQQIVQAEARVAGLLDGELARRLQTIPGVGPAICATLIAEIGDILRFSDFDQLVAYAGVHPAEQSSGQKGANPETSWHMAKTGNAYVRAALYRMSVVGLQHNPTIKAHYARKRAQGKSKMNALGHCMKKSLAIVWGIWRGDHDFTPEPPIA

SEQ ID NO: 136926 - protein, 383 aa, unidentified
MSEFNTLHVGLDVHKESIDIAVAEPGRQGDVRHVGTFGGDLASLDKALRRQISKGVPLHVVYEAGPCGYVIWRHLSAQGINCEVVAPSSIPKRSGDRVKTDRRDAMMLARLSRSGDLIAVRVPDVVDESVRDLVRAREDAVRECRNGRHRLKALLLRNGIGYAGKTAWTAAHLRWLATVKLAHSAQQIAFQEYLGSITQSTDRIARLEKSMIDALPQWGLRPVVQALQAMRGIQLIAAMTLVAELQDFLRFDNPRQLMSYVGLVPSEHSSGPKRRQGGITKAGNSAARRMLVEIAWQYVHSPRVSPIIAKRHEGLPEAVIEIAWKAQLRLSGKYKRLLARKVLKTKAVVAVARELAGFVWAIGREVQTSRWPGLKSDQVTPVA

SEQ ID NO: 136927 - protein, 412 aa, unidentified
MKDLLEISCGLDVHKEKIVACILTGPLGKPTHSEIREFTTLIPDMVALRDWIVSHDCHHVAMESTGIYWMPIYEILEDAFAGDITLLVVNARHMKNVPGKKTDMRDSEWISTLLRAGLLNGSFIPEKRIREFRDLNRYRKSVIRDITSQKNRVEKFLQSSGFRLSSFISDIFGTSGRNIILRLIEHGRINRAALDSCLKTKTRNRIDEILMSVNGTLSEHQKGFLKILMNHYDSLKEHLGEVEAALMEDMAPFALQVGQLSSIYGISTTASCAIIAEIGIDMEPFKTAEHICSWAGLCPGNNESAGKRKSTSVTKGNPYIKSMLCEIAWVIAGKRNTYLSAWYWRIKQKKGAKKAIVALARKLLVIIYTMLKQGTLFDESCFEARRKSCEQKQLSRYIRELEKRGYHVEAQV

SEQ ID NO: 136928 - protein, 323 aa, unidentified
MSQPNPLCVGIDVSKTTLDIATANNEFAQFTAGNDTDGFELIIAELRKHSVALVLMEATGGLEAAVACSLQAEGFDIAVINPRQARNFSRAMGYLAKTDRIDAKVLSQMAEVINRHPERERFIKAIPDAERQILAAMVVRRRQLITMLVAERNRLHPAHPQNRKSINTIIKALEDELSRIDEAMNNHIKTHFKELAARLSSIKGVGAMTVATLLSEVPELGSLSRREISALIGVAPVNRDSGTMRGRRTIFGGRAGVRTALYMAALVATRFNPVIKAFYTRLITAGKVRKVALVACMRKLLTILNAMIRKNEEWSDSYHKFSL

SEQ ID NO: 136929 - protein, 371 aa, unidentified
MKKQTKTTPSVVPTSTPAAVTASRFTLGLDLGDRSHYVCVLDATGQILHEGPLVNDRVALTLLLTQYPAATVALEAGTHSPWISRYLTGLGAQVIVANPRKLHAISRHERKCDRRDAVMLARLARADVALLHPLQHGSAQAQHDLLGLKLRDSLVRTRVNLINTVRFTLKSLGHTVSNPSSEAFHKNIVTAVPADCLPVVQPVLAVLALLTEKIKLLERDLVRRSKKDYPVTQRLQQIAGVGPLTALCFVLKIGEPNRFGRSRDVGPYLGLCPGRDQSGGTDKQLRISKCGDGLLRRLLVSAAHYILGPFGPACALRAYGQHLVGTSVREKKRAVVAVARKLAVLLVSLWKHGTDYEPRVPAVPVLVLTPA

SEQ ID NO: 136930 - protein, 389 aa, unidentified
MDPHKRSATIEVMDPAEAVLGGGRFGTDRDGYDAMLSYGRQWTDRVWAIEGCTGIGKHIANRLLADGEQVIDVPPKLSARARVFATGQGRKTDATDARSVALVGTRMTGLRPVVNDEQLAVLRILVDRRRSLGEDHTRMVSQLHQLLLELIPGGAKKDLSARQAKALLAKVRPRDAAGKTRRRVAAELISDLERVYTRKKAANRELTELLAATGTGLLDLNGIGPSGAARLLVEVGDITRFPSKAHFASWNGTAPIDASSGDQVRHRLSRKGNRQINRVLHIMARVQIRNPSEGRDYYERKKADGKAPMEAMRCVKRRLSDIVYQQMLNDALATTGTGPGGQRGNDSDSSATGSHPNAGSSDKPLPGPPPVSLRHHSARLVDTEGGQIR

SEQ ID NO: 136931 - protein, 425 aa, unidentified
MSEKIVVGIDVSKVFSDICILSTNNDIIKRLKISNDINGMKSLIYVLEKVEDEYEDRAVIIMEATAHYHQILANFFRKHNYEVIVINPIQSGALKNINIRKIKSDKTDAYNIALLYRIKNYNETITHSDTVNSIKKLCRQHKELTDEIVEHINRLIAFLDISFPDFKKVFTDLQGKTPLSLLEKYPTIQEVLSPENKQDIIQLIKENSHKSSSYAEAKYEKLLKAAKKSIEVCIVNLSSAVLIQTTVKVIFSLQEALKAIDDEIKRLSLLDEKFHKEIVFLQSIPGVGEYTACVVLSELGDISNFSKPKELVAFFGLDPGVSQSGTYNRKNNKISKRGSPNVRSILHMLAKSNVYPNRNREYLNPVMRAYFEKKIAEKPYKVVMCAIMRKMVQIIFAVLRNQKSFELRTPEEHQKLIREKSKLVA

SEQ ID NO: 136932 - protein, 335 aa, unidentified
MSLKLLAVDLGKRSFHCHGIDSDGVVLSRKVSRSKLLETIKDLAPETVAMEACASAHFWGRRFLADGRQVLLINPRFVKPFVKGSKNDAADADGIYEAALRPTMRFVPVKSTEQQDLQSLHRARERVVCARTALINHMRGLLGEYGVILPQGAWRFLKEAQEAIAAADLSDLARGLFVDLFDELRALDLRLDKLDRQLLRLCRTNEACKRLSKLPGVGPVIATALVAAVDDGRHFRSGRELAAWIGLVPRQYTTGGKPRLGGIGRRANHYLRRQMIHGARAVMFRLTKHEDRRSQWLKELAARRGFNRAIVALANKTARIAWVVLTRKEDYSAAA

SEQ ID NO: 136933 - protein, 337 aa, unidentified
MFSLGVDIADKKFDISLYDPLTNKHIIQSVFTNDETGFIACYNQIKEKCSDLKTLTVFMESTGGLEEPLYDFFYQKVKDCYILNPQQAKNFKKALFIDQKTDNIDAKALALMIIMPQLQKSLKTQNDKMSQVLISLISQREFLIKENTRAVLRKSRISRTKVDGTKDFLVLQLDRNIEHLAKEILIIDKEIMKRIKKNSQYLKNYELLKEIPGIGDKTAKILVSYLGTQAELFASAEKFAAYAGLYPTENQSGNHVGQAKLTYKGCRKLKSSFYNCALSAIRNNGKLNEYYYTKVATGKSKKQVIIALANKLAKLSWSVIKYQKKYDYTKFMPAYNT

SEQ ID NO: 136934 - protein, 412 aa, unidentified
MEVLVEICSGLDVHQASVVACVRRPGKRGRRTSEVRTFGTTTPELLQLADWLTTEGVTHVAMESTGVFWKPVFNILEGHVEVILVNAEHYKAVPGRKTDVRDCEWLAQLLEHGLLRASFIPPQPIRELRDLTRYRKSLVQHRATEGNRVQKLLESANIKLGVVATDILGASGRAMLQALMAGEGDGTVLAELAKGALRQKRGRLADALTGRFTAHHAVLLGELLAHIEYLDAAIARLDERVEAALRPYADHVARLQTIPGVGREAAETIVAEIGVDMSRFPSAAHLASWAGLCPGNNESAGKRKTGKTRKGNRWLKPLLVECGWGAGRARRTYLGAQYARLGRRRGKKKAAIAVGHSILVAAYYILRDGVPYRDLGPDHFDRLVTERLTRHYVCRLEQLGHRVTLDADQPAA

SEQ ID NO: 136935 - protein, 358 aa, unidentified
MAVIEGVCRIVGGVDTHKDLHVAAIVDEQDRIIGTRSFATTRQGYRQMLAWMRSCGELQRIGIESTGSYGAGLLRFMQQAKVTVLEVTTPDKQDRRRRGKNDDLDAQNAAHAAFAGQRTVTPRSRDGMIESLRVLMACRKTAVSARRVALQMIHNTIVCAPDGLRDQLRNLTRMQLVRTLASWRPDLTAYRDLDSAYRIGLKSLARRYLELHDEIADLDAMIAAIVDELAPNLVARNSIGHTGAAQLLLTAGDNPERLRSEASFASLCGASPVPASSGRTVRHRLNRGGDRAANSALHIIAIGRLRTDQRTKDYVARRLAEGHSKLDAIRALKRYLAREVFTLITQRRKKINATRIAA

SEQ ID NO: 136936 - protein, 397 aa, unidentified
MKADSLHYEAVRIGSNGAPRMQKPSTIDIDPVIYLAIELSASTWLVVSKIPTSEKTGLHRMEAGNSQALIALIADLRKKVSAKLGVESAVMSCFEAGRDGFWLHRLLSEHGVINHVVEPTSILVNRRARRAKTDRLDAQGLLRILTAHAKGDHDVCSVVHVPTIEEEDAKRQHREREHLVQERVRIENRIAALLTTQGVRKRPSLRSWQKDMEEMRTGDGHPIPPLLRAEANRLRRRLVMTLEMIREVEAEREQALQKQDDTASRTIQALRQLRGIGDNFAAVLTREVFYRSFENRRQIASYLGLTPTPFQSGGMDRDRRISRAGNARARKTLIQLAWLWLRYQPDSSLACWFRERVGNLQGRTRRIAIVAMARKLLIAIWRYATDGIVPEGAQISI

SEQ ID NO: 136937 - protein, 354 aa, unidentified
MSKYIGFDVDSKKTVACVVQKGKKDRYTTFETDIEQMQNFLKQQSKDTERLHLTFEVSGQSGYIHDSLLNSVHTITVGNPAKMTWIYRTAKKTDRIDARKQAVLLSIGEIPKVHMPKKHVRQWRATIQHRRKIVSSITQVKNRIRALLKSVGINKPAVTKNWWTKANHNWMLQLAARPTETIQSAWQLTLADMLNQLELFQLQLKQRTKYLDQYLQTQPAANLIMTIPGIGPRTTEAVLAYTDDIKRFSKNKRYCAYFGLTPRLDESGTTRRLGHISKQGPSVVRWLIVEAAWRVVKKSPSLKLFFERVMAGQKNRKKIAIIAVARKLLTIIRAMLTTGELFNEQLISKYCYQQ

SEQ ID NO: 136938 - protein, 353 aa, unidentified
MTIVANSVSFVIGADTHSRTHTLAIIDTSSSARVDAATFPTSAAGMSRALAWTRRRTAEAVQVLVVIEGIGSYGARLARAFHDAGYRVVEPFATPARARRGQGKSDEIDAELIAKSVLGTDSDRLRDPRQDSGIRAALRVLISARELINTERTREINALTALVRIVNLGIDARAALSRIQIATIASWRPRHEDVGTDIARREAIRLAKRIRACDDELAVNREQLATLVEASDGAHLMNQPGIGAVNAATLVAAWSHDGRIRSEAAFAVLSGTSPLPASSGNTNRHRLNRGGDRRLNRALSSIALTRMSHHEPTRAYVERRRAEGLSNKEIRRCLKRYIARQVYRQLHHSEALT

SEQ ID NO: 136939 - protein, 381 aa, unidentified
MSEITKAHVGLDVHKDTITVALAEAGRQAAKVLCTMDHDVPKLVKLLRKRGEASALHVVYEAGPTGYGLQRALQAKGYTCEVVAPSQIPRRPGTRVKTDSRDSVQLAECSRAGLLRSVWVPDPGDEAIRDLARAREDAVHMRTQLRQQLKGFLLRHGIGYEGKTSWTQKFERWLGTLSFEGPAQMAFTEYWLATKAGDQRVERLSQSLQDAIKGWRFEPVVKALQALRGIDVISAVGLTAEIGDFRRFDHPRKLMGYLGLVPSEHSSGQCVQRGSITKTGNAHARTLLTEAAWHYRFGARIGEDAARRQSGLSEAVRATAWKAQLRLTRRFAVLNGRGVQRNKVCVAVARELAGFVWAVARIGLDEHLASLGAQPAANATA

SEQ ID NO: 136940 - protein, 343 aa, unidentified
MSAYYYIGLDIHKRTISYCMKAIDGALIGQGKIEADRKSLDEWAKGLPGPWVGAMEATIFTGWVYDFLKPYAVKLKVAHPEMLKAITAAKKKNDRADAEKIADLLRVNLLPECHMLSEEIRELRRILRYRNHIVRMAVNMQNKVSGLLMEVGASYSKKRLHGKKYFRELLERVEDIPPSVKELLKLSRSSYEMFRSFQKRLVETLHTNNLIHDQVERLMTIPGVGELTALTWVLEIGDSERFTSIRKAVSYCGLCSAQRESAGKEQRGPISKKRNKHLQTMLIEAAKLAPRWNEQLAILHERELKRGDRNRATLAVARKLVAYMLAVDKKQADFKLPAEMQAA

SEQ ID NO: 136941 - protein, 484 aa, unidentified
MSKPKKHSKQLGEKKTVAGKGKRGLKRKGMCLEDRPILEANAAGIDIGAREIFLAVPPDRDEYPVRVFPTFTEDLEQMAQWLVSCGITTVAMESTGVYWIPLYDVLEEHGVRACLVDARGMKNVPGRRTDWHECQWLQFLHSVGLLRAAFRPEGAVCAVRSMMRHRTELVAMTSQHVQHMHKALTQMNVQIQHVISDLTGVTGLAIVDAIIAGQRDPMVLAKLRDPHIKADEETIRKSLVGNWQPEHLFTLKQSRQSYQHYREQIAACDEQIEKLLVAFQPRVNPEEKPLPPDRKKKQSGRRKKNVNPKTGFDLRTESYKLFGVDLTQIPGLMAIVLALFSEVGRDMSRWPTASHFISWLALCPDNDISGGRVLWRGMRRVQNRAGHLFRLAAHSLHHDQTPMGDYLRRMKSKLGPAGATTATAHKIAIIFYTMIKKQVEYDATIWAERDAEREKRFEAKLRRQAQQRGYKLVPIEENPARVSA

SEQ ID NO: 136942 - protein, 449 aa, unidentified
MAKPKRSHPERDISPTHRDAAAIDIGAKIHVAAVPPDRDPEPVRSFGTFTGDLRRLADWFERCGVRTIAMESTGVYWIPVYEILEQRGFEVMLVNARDAKHVPGRKTDVSDAQWLRRLHEYGLLRPSFRPKGELAALRAYLRQRERLLDYAASHIQHMQKSLMQMNVQLHHVVTDITGATGMRIIRAIIAGERDPAALAVHRDRRCHATVDVISAALTGNWRDEHVFALGQALELYDAYQAKLIDCDAQIEAVLRRLRNVASPAGPLPAARHRDNTANAPTFDARAALHAVLGVDLTQIHGLGASLALKLIGECGTDLTAWPDAKHFTSWLCLAPANKVSGGKILSTRTRRSGSRAAALLRLAAVTVGRTQTALGAFYRRLSARVGKAKAVTATARKIATLFYNTLRHGMAYSDPGASYYEQRYRARVFSNLQRRAKSFGYILQELPAA

SEQ ID NO: 136943 - protein, 428 aa, unidentified
MNTPTSNPPVVAWVGLDWADQRHEIRLQAAGSPRLESFSVEQKPEAFQAWVAELRARFPQGRIALALEQSRGAVIYALMNYDFFLLYPLPPKTLARYREAFASSGAKSDRSDADLLLELVRTHGDRLRAWQPDDAMTRQLRLLVEYRRKTVADRTRLTNRLTDLLKTYFPQALDWLGDLRSLAACEFLGAWPTLQAVQGANRPALRRFFHDHRRLSAEEREKLLDQIRHARPLTQDRAVLEASELMTQTLVEQLRAVISTLARLDQALEELFGQHPDQQLFDRLPGAGEALGPRLAAAFGTDRDRYQSAEEIQQFSGIAPVTAASGKMRWVHWRWACPKFLRQTFHEFADASRKKSLWARAYYQQQRQHGVSHHAAVRALAYKWIRILYRCWKTRTPYDEALYLRALQRRHSPLWLAAASLSTQEAHP

SEQ ID NO: 136944 - protein, 369 aa, unidentified
MNRLFVGMDVHKEKIVLIGFPKDGHMPVVRETFPGEATRVVKRLVKLSREWKIEACYEAGPSGYGLARDLVKAGLDCRLVAPSLIPRRPGNRVKTDSRDALELALALRARTLAFVRIPSREEEEVRGLVRCREDIARQARVLKMTISHWVFTRGHRLPTGLKRWTPRHWSWLRSLPLSALERETLDHYLDMLFLQEERRKQIEARICELGDLPEYRERVKRLMALKGFSCLAAMRVIAEVMEFRRFKNASSFMKFTGLVPSEYSSGERIRRGKITKAGNSHLRHVLVEAVQRAHSSVRPGRGLLKRLQGVSGPLRQIALRCLARLHHKFWALTRRGVTAGRVRVAMARELAGFVWTLMVFPAGETNTAG

SEQ ID NO: 136945 - protein, 351 aa, unidentified
MVYIGVDLHRKVSQVAAVQANGEVLWNRRIRSRPEEFAEIVGDLPASPAGVAFEATYGWGWFADLLADLGLPAHMSHPKGTKAISSVRVKNDAVDAETLAQLLRTNLLPEAWIAPPVCREARRLVRTRAALVRLRSRFKCQLLALLAEHGVQLPEVADPFGKEGRRFIQNVALAEESQFCITANLRVIDLLTTEVRQLDRKLVTFFKTDPRIGRLRAIPGIGFYTAAVILAEVWDVQRFPRPELLCSWAGLTPTERSSAGHIRRGHISKQGSRLLRWALVEVATAAPRHEAHRRYFMKVLHNDRRRAKIARVALARRLLTLCYYALRDEGGCRAYPVATNDDGCRSRARSC

SEQ ID NO: 136946 - protein, 516 aa, unidentified
MPLLYRRCAGLDIHRDTVAACIRVRVAGSQYEEQQETFGTFSGDLRRLAGWLQEHQIRQVAMESTGVYWIPIWNTLEASRYKFQPLLVNPTQVRAMAGHKTDRIDCRRIAEYLQNGQLAGSFIPAPPVREARTLARYRVHLQQDRNRAINRIGRLLQTANIKLSSVLSDIVGVSGLRILRAIAQGQTDGARLADLVHGRVSGKKPQIIESLEGCYGEHFRYLLGQLLEEYDHVNQKLEEITRRLGSKMAEHAELIDRMCQVPGIDQLAAWTVLAELGTDLSAFPDAAHLASWASLCPGNNESAGKRKQGRTGKGNRYLRRILVQAAWAAAHTKHTFFSTLFLRFARRQGMKKAAVSVAHRLLVILYHVIAEGASYQEKGGDYFDRLHPERTAYQLMSRLQRLGYDTTTVVRKTSGMGEDQPPESPKRRGRPCKCAELGRSCIHPLPPKAARSDPEAKPERVSAVRPRPEPGSRASESVAPGPPCRVCGQWGIRCIHARPKAPSKPRPPISETEDSQ

SEQ ID NO: 136947 - protein, 376 aa, unidentified
MRRHGEAFVGIDTAKARNAVAVAEGGREGELRYLGESDNTPDAVAKLVRKLAERYETVQFCYEAGPTGYGLHRQILALGQNCIVVAPSLIPRRPGDRVKTNRRDAQTLARLLRAGELTAVWVPDETHEAVRDLVRTRALAIEDYRRKRQHVSSFLLRHGRSYEGTATWKGRHLQWLDRQSFAHPAQRLAFQEMLNTVRSVAERINRLDTALLEIVPAWTMAPVVAAFQAMRGVGLVTATTMVAEAGDIRRFEHPRQLMAFLGLVPSERSTGDTRKQGGITKTGNIRARKALIEAAWTYRHSAGIGEVHQARLAQLPEQVREIAWKAQARLCARYRRLTAKGKKPTVAVTAIAREIGAFLWAIARHVEPSPAQPGRT

SEQ ID NO: 136948 - protein, 431 aa, unidentified
MHYTQNDKIAQVGHDSLVIGVDVGSEKQHARAFGPMQIEYTRKAFSFNNSAEGFDQFLKWAQDMQFKKGLKKIMVGFEPTGHYWFNLADCLEEQGIEYVLVAPQHVKHTKELDDNIQQKDDNKDPRVIAKLVFGGRYFYAYRPKGIYAELRVGFIRRCEIMEHLVETKNRITRWFNIYFPEYLKVYRKVDASTGKKILRQAPLPKDIIALGVDGVNKIWRDAKQRGAGKKRATTLVTAAQSSIGSKQADQAARMDLWQLLDEYDLIEKQLREINDLLLNLLTGIPDAQRMLAIQGVGMVTVAGFLAEAGDIRRFTDPKQIVKYAGMAVIKPNDSGKHNGKGKLSRRGRKRLRTILVQAARSLVKSNPDFQQIHKYFTTRECNPLKKIQSICAIANKLIHVFYGMIINDQPYDGEKMLRDIHRPIKAAAKAA

SEQ ID NO: 136949 - protein, 400 aa, unidentified
MHKKSITACVLWAGGAGKVRKEKRRFETFTRELLKLADWLRECGVTHVAMESTGVYWKPVWNILEGQFEVLLVNAQHIKAVPGRKTDPKDSEWIADLLQHGLLRGSFVPPRETRELRDLTRYRVSLAEECNRIANRIQKVLEDANIKLASVASDALGASGRAMLEAILAGQQDPEQLAEMSKGLLRNKIPELRLALTGRVTDHHRFLLRQLLDHLKFTESKMTEIEAEIDRRLRPFEEQVTRLCTIPGVQRVTAWGILAEIGFRMEQFPSAAHLASWAGLCPGSYESAGKRLSGKTRKGSAALRRCLCQAGWAVSTQKHTYSSALFRRLAARRGGKRAVIAVAHTILVAAFYMLTRKEDYEEVGAGYFDRLHADRLKRSLVRRLEQLGHKVNLEPLAQPA

SEQ ID NO: 136950 - protein, 348 aa, unidentified
MKNYQMGIDISKEKLNICLRKGTQTVREEEIKNTVAAIKKCVKRIEKESGVTNDDLLVCAEFTGRYIYPLVCACDEMGLFLWMEDPTRIKNSFGVTRGKDDRVDARRIAEYAFRFSDKAVAYEMPDKTIVSLKNLLTDRDTLANDRKKYEMQLRDQRGYMDSEDYNRKKRSWAAVVKTLDKQIALIDDEIQSLVESDVKVKHQTELLKTVDGVGDRIAVRMVVVTLAFTRFETPRQFNCYAGLAPFRYTSGKSIYSKSKVSQRANKQIKSLLHLAAVSVATHMKSGEYKEYYKRKTEEGKHPMSVLNVIRAKLVSRMFAVVKRDEAYQRNYKIFTPTEKNFQKTVANS

SEQ ID NO: 136951 - protein, 414 aa, unidentified
MEIVHRRCAGMDVSKRDAKVCVRVAGRGRRKTVETVRTWGSTTNAVLALREHLINEQVTLVVMEATGDYWKPFYYLLEDANFEVMLVNARQVKNLPGRKSDVSDAAWLAQLGAHGLVRGSFVPPAPVRELRDLTRARTATTRERGREIQRLEKLLEDAGIKLSSVASDITCVSGRLMLQGLIDGQHDPAVLANLAKRRLRAQIPELTEALTGRFSDHHAFLAGMYLDAIDQRSRQIAELTARIEVVIKPFRAFCDLIDTIPGIGERCAEVIVAETGAEMSIFPTAAHLASWAGCCPGSNESAGRVKSTATRPGNPYLKAALGAAALSIANTHSTYFAAKYRRIAARRGPKKALVAIEHAILIAIWNMAHTGALYDDPGADYYTRRDPERARRNAVTQLQRLGYQVTLTRTAVSA

SEQ ID NO: 136952 - protein, 330 aa, unidentified
MRKVTEAGIDVSKAVLDVAIRRDESLLETARFDNDAAGHQRLIRWLRKGGRTVRVVLESTGTYSLDVAIALQRTRGVAVMVANPRAIKQFTGALMQRSKTDLTAAVALRDFVIRMPFVAWEPPAAHVLELRAIARRIAALVVERTRERNRLHALQATAAASRVVCHDIDVNVRHLERRMELLSAQAVTLIGEHAALQTAFDLLVSVPGIATHSAIQLLPEVLVLPETMTVRQWVAHAGLDPRAHQSGTSVDKPARISKVGNAHIRRALYMPALVAVQHNRHVRAFHEKLVARGKTPLQAYVAVMRKLLHAIYGMLTTRTAFVATKFHAAA

SEQ ID NO: 136953 - protein, 456 aa, unidentified
MSNGSGVSRGDRNRNARLSRLRQAVPVSNAVVGIDLADRKQMVVVSDHDSRVLARRTFRCKAWDLGAALDWAAERAARAGFAGVTVACEPTGHRWRVVGQLAEQRGMPFVCVQPALSSWARKTEDLTSDKTDDKDAVLIARLTTQLRCYLPEPVDATWGRLRHLGARREQLLETHISSVQQIRDLLECVWPAALEAAAQPFKSTTWVAAVNVIVDRDGGNLARTRRLGMDRFIRVVRAEVVRRGKTKPCLRIVRKLFAALSEPSLLAAGVVEHRQAAFERIGWIVTDWDRARGDQVDVEARMVAVLGQLGLTELVTSIEGLSAVGAAAILAETGDLRRFTSARAVVKLAGLAPRERLSGTFTGKARLTGAGRPRLRVAAWRAVWGCLHTNRVHAARYRHLTSRQTNRLKPTQAQIAVAAAILRQLYAVVTTGQAWDPHIAAGRHGAPMVQAVVAAA

SEQ ID NO: 136954 - protein, 357 aa, unidentified
MRGLAQEEDRMRFYNRQHRHYCGIDLHVKTMYVCILDTTGQVLVHRNVQSNPEAFLETIAPYRDDLVVAAECMFTWYWLADLCAAEDIPFVLGHALAMKAIHGGKAKNDKIDSQKIAALLRGGLVPQAYVYPAAMRSTRDLLRRRLHLVRKRGQLLAHIQNTRAQYQLPEFGRRLAYPANRAGVAEHFTDPSVRKSIDVDLALIDQYDTLIGDLELTIVREAKRHDADAFHRLRSVPGIGKVLALTILYEIHDVTRFDRVQEFASYARLVKCVHQSAGKKLGTGGAKMGTVHLKWAFSEAAVLFLRHTKDGKKLLARIEKKHGKGKALSILAHKIGRAVFYMLSRGTVFSMEKFLAA

SEQ ID NO: 136955 - protein, 314 aa, unidentified
MSSPSCYLGVDVSKDTLVVSCQRRRWEFANTKEGHRKFIAQIQKLPGSGHVVCESTGPYHFTMCLALQEAGLSVTIAHAARIHYFGRSEGIIAKNDPIDAELIERFANAKQPPADPPLCREQLALSENVTHRQQLVEMIKVLRTHRQQVLQAALVTEIDRSITALEKRLEAFERKLRAQIDAHPLWKKKLALLTATKGIGFITALILLAKMPELGTLNRGQCAALGGLAPYDDDSGKHQGKRTIRGGRKEVRSALYMAALTAAHFNPILKTFYQRLIDQKKAFKVALTAVMRKLLIHLNAVLKNAANPPLTTTS

SEQ ID NO: 136956 - protein, 412 aa, unidentified
MEVLYACCCGIDVQAKMLVACLMKAGQKEVRTFATMTEDLLQLLDWLVQAGCTHVAIESTGVYGRPVFNILEGALDVILTNARDAKGYKARKTDVIDAEWLADLLRHGLLKPSFIPPLPIRELRDFTRYRESLVRERTALANRSQKLMESANVKLGQVASDALGASGQRMLRALAAGQTDAEQMSHLAQGVLKRKQAQLQQALEGRFSQAQRWILTELLDQYDQVEAALQRVAERIRQEVENSAAPFVVDAVQLLDTIPGVGETVAQIIVAEIGGNMERFSTDHHLASWAGMCPGNNESAGKRKSGKTTKGSRYLRAALVQAAWAASHQKETYLAAQYKRLVKRRGKKKALIAVGHSILVIAYHVLQTRTSYQDLGGDYFERRNVDKQRKRLIRQLEGLGLKVTVEEVKEAA

SEQ ID NO: 136957 - protein, 350 aa, unidentified
MKMRSEVPQVKSVGIDLAKNSFHVFGVDADGQKAVRKQLSRQKLKGYLINLTPCTVAMEACGSAHYWARLLRSYGHQVKLIAPQFVKPYVKSNKNDAADAEAICEAAQRPNMRFVAIKTIEQQDIQSIHRMRSLTVGQRTAQINQIRGLLLEYGIEIPAGRSNLLKRLPEILEDAENSLTDLFRGELFGLYDALRHFNERIAHYDEKIEQIAQADERMQRLQTIPGVGPKIATALLAAIGDIHAFKNGRQLAAWLGVVPRQYSTGGKSTLLGISKRGDVYLRQLIIHGARSILLTVDRKTDRTSRWATTLKARRHHNIATVAMANKIVRVAFALLKTGETYRSEPTPGAA

SEQ ID NO: 136958 - protein, 398 aa, unidentified
MTESSDYESVQVFIGVDVGKDTHHAVAINRSGKRLFDKALPNDENKLRSLISDLKQHGQILLVVDQPATIGALPVAVARSEGVLVGYLPGLAMRRIADLHAGEAKTDARDAAIIAEAARTLPHALRTLKLADEQIAELSMLCGFDDDLAAQTTQASNRIRGLLPQIHPALERVLGPRLEHPAVLALLQRYPSPEKLASLGEKKLAAQLCKLAPRLGKRLAADIAQALAEQTVVVPGTNAAAVVLPRLALQLITLRKQRDEVALEVEQRVIAHPLYPVLTSMPGVGVRTAARLLTEVACRAFASAAHLAAYAGLAPVTRRSGSSIRGKHPSRRGNKALKRALFLSAFAALRDPLSRAYYTRKMSQGKRHNQALIALARRRCDVLFAMMRDGTFYTPQGS

SEQ ID NO: 136959 - protein, 362 aa, unidentified
MPVEHYIAMDTHSYSTEICVKTRANTSGRKWRVPTTIPALREVISSIRRPRYVAFEEGPLASWLYRNLKADADGLTVCDPRKNAWIAKGGDKDDPIDAGKLADLLAGGFLKAVHHSDEVGRDVFKQLVGCYHERVGHRVSEANKVIGALKRWGIVVRESGFKDQAARVGLLAKLPEGSELAPTRLSLKLLLDSYDQAGRQEARLRRELEKLAGKQELIVRLMELPGVAWVRAATFFVYLDTPWRFRSKQALWKYLGIGLVRQTSGNGPEYLSVDLASNRTLKSMILGAAESAIIQGDNPFAEQHRRWKEAGLSPRNARRNVARSLAAVMWGMWKNGGVYDPQQVNVKASEQQVESCGSRSNR

SEQ ID NO: 136960 - protein, 352 aa, unidentified
MIIIGVDAHKRVHVALAVDEAGREIGDWRGPNSADGWISLAQWALSLGTERRWGIEGAWSYGRGLAQHLVALGEVVYDVNPRWTALGRRSARKPGKTDQLDARAVALFVRQEAPNLPRVHSEDETALLDLLTTERESAVGESTRLRNQIHALLMQVDPEYQTRLPALTSHAGLDALQSYQSPVPGALQEERAAAIRRVARRLQLASLEANELKERIKRLAEASFSPLTRLCGINLVTAGTLAAILGPGNRFASDAQLAAYAGVAPLETSSAGLVRHRLNRGGNRRLNAVLYRIVLTQAHHLPQARAYIERRASEGKTRREAHRALRRFVIRAIWRLWQECQQVQQPNVGQAA

SEQ ID NO: 136961 - protein, 412 aa, unidentified
MEGETVIAGVDTHKDVHVLCLLDGLGRKIWSGSFGADPEGYDRLAEAIGDPGSCMVVGVEGTASYGAGLTRRLVELGYNVVEVLRPKRDKVRPGEGKSDPLDAERAARKAASGKGCSVPKSQDGWVEAVRQLYVARRLAVATSTSCVACAKSMLTTAPGALRERFRGRERPKDLMPLLARGRKAGDALEESVLASLRSVAAVWKEARSQVESLDERIRALLEANAPALLGVEGCGTTTAAALVVAAGDNPGRLKGEAAFSMMCGASPIPASSGKTERHRLNRGGNRQANWALYEIAIKRMAYDERTKRYVAKRTSEGKSRREAIRCLKRYIAREVYRVLMDPNPDGAAPEGPELAKMRKAMRVTQKKAAAELGLSAATLGHLERGKRRSTKLERMYYELLCELERTLPQTAS

SEQ ID NO: 136962 - protein, 473 aa, unidentified
MKKRNIYQNQSQELLHLFEEAGSSEKVMCVPMDYAKKDHLVMFCNGHGDILRKPFSVKNTPDGIAYIDDQVTRSCRRRGIKKKHVFFGGEDANSFAKNFVSTLRCKGWLVASVNAHDAKKQRENVQASTDRIDLMGIATMLLNYRANCCPAQSGIYRNLRTLVRHRRKLVQMLTEVKNRVHGIVDELFPGFLNEKNSGIIPFTQSSLYLMEDRFSPKQIRRRRRQKLIEILKRFGTSKAERTAVKLQQYAAKVLHAPVEYVDTMQLSLAQHVKHIRCLKESVAQMEKEIALNLAQTQGAFLTSVRGIGLVLAAGVTAEIGDLNEQKPLNNLASYSGIIPRVKQTGGSDGKTYTGPVAKRCNRILKDYVVKSAYHLGLHGPQDLMADYKRRDASGQHADFGMGRRYLRMAISLMRTSQVYLPPNLRRDDYTLEERAGYYLTSWPYLKEKWKKVGALEAAFAKDRPLGLWRQIVQ

SEQ ID NO: 136963 - protein, 473 aa, unidentified
MSKPKPVKQTKGKKAKWTPVIQQRANPLTVIRTDVAGIDVGSEELFVCAAGPEEGSLQTMIFGSTTPELMKMAEWLKQCKVQSVAMESTGVYWIPPYEVLESQGLEVLLTDTRQLSRVPGRKTDMLDCQWIQCLHSHGLLNGCFRPEEEIVELRSVVRGKAVLVAERADWIRRMQKCLDQMNVRVHRAVSDLTGATGMRIIREIVKGERDPRQLAKLRDRGCQNSEAAIAEQLSGHWRADHLFGLEQALKMYDSIEERIQEHAAEILRRMKALQSEKVQGKEVPPVRKPEKAKSIRRRKQEPARQALFGMTGIDGTAIDGVGVETMEAVISEYGPTLEKFPNEKAFVSHLRLAPHLNITGGKPKKNVRSGNGTTRVGNLLRTAALSSEKTSTESGAYFRNIARQKDRGVAVFATARRLGTLIFRALRWGQEYVDRGSAAYEQRNAEIRMRNLTRNAAQLGYQLVPNAANSTAV

SEQ ID NO: 136964 - protein, 372 aa, unidentified
MNHNTIYVGMDVHKENFSLCVYTIEAEKASYHQRTEADYKEVLKYLEFLRSIYGNDANFICGYEAGCLGYTLYHQLSVNNVNCVILAPTTMLEQRSKKRIKTDKRDAEIIAKCLAQHNYSAVHIPTAKDEETKEFLRMRDDHKLALKKIKQQILAFCLRHSYRYDGKSHWTAAHLKWLRSLTPEALYKEILDEYLLTYQNLSDKLDRMDKRIEELASLEEYKEAVKKLCCFIGVRTHTALSVLVEVGDFKRFASAKNFASYLGLVPGENSSGENQTRLGITKAGNSHIRLLLTEASQCYARGQIGFKSKELKSRQSGNTPEVIAYADKANERLRRRYYKMVLSKCKKHNVAKTAIARELACFMWGMITDCIA

SEQ ID NO: 136965 - protein, 424 aa, unidentified
MKNTAARKRKQVPEGYLVIGVDPHKKRHAAVAITQDFTIQAKFKFDNSGEGLEMMLDRAREEMVKCGCRGVMFAIETGGHYWRNIAYYLDDRGIPFRFINQYTLKRRREGKDLNRRKNDYRDSEVAAQLLCTGEFVESVIPQGVYAELRTSHNAYQRLVKERTRITNLLKGLLDALFPEFTHVFKDPSGLTALSVLSTCPIPRAIAGMTEDEFVATIEAHHKGRRLMRKKLRALHRSAKTSIGINAGALSLSSEIAFLIDKLELIKQQIRIMEATLVKLVDETEEGKYLLSIRGLNYIAVAGLLAELGCFKLYRSAKQMIKMAGSNPTESESAGKKRPKTPMSKQGRPLLRYCAWTAVIPMLRFNENFRAWAKQRRERPAHANPLNGREIVGAALNKLLRLAFALVKNQAYYRDTRPALIPIAV

SEQ ID NO: 136966 - protein, 454 aa, unidentified
MNNDLDVNRIRVFRQLKKEIRGSKDYLIVGIDVAKDKHNAFFGTAQGKTFLRRLIFDNNIEGFEKLRSQVGAFKVQHDLKRVVFGMEPTANYHKPLGEHLIGWGEEVVLVSGVAVKHNRQLMDGRWDKHDTKDSANIADLISQGKCLYYDYPLIALRDLRALLAFKRRRKKEEHSYKVRIRNNLLAKHFPEMDHYYRDTSEGLAIVRWCPDPRKIAGMEYETFCQLVAPGKRTAQKDSRLQAIWTKAHDSIGCEAGETFGFEAELMVSGLKEIRKTIRAVEAKIHEVCSLFSEYEYLLSIPGFGPDVASKVLGAIGNPFRFENGSQVIKLTGYDLCADRTGKRSDSAVPVISKGGKADLRYALYQAAQVATTSNKVFRDYYTNQLQGREREKGIKTKRRVKLAAKMIVIAWTLMKKKEKFNPDYLKKSSNDLKESPANNVGANDLGRDSTGPPQ

SEQ ID NO: 136967 - protein, 388 aa, unidentified
MFYVGIDIAKLNHFASAISSDGEILIEPFKFTNDNDGFQLLLSKLDPLDKDNSIIGLESTAHYGDNLVRYLVACNYKVCVLNPIKTSTMRKNNIRKTKTDKVDTYIICKTLMMQESLRFVTFCDLDLMDLRALGRFRQKTIKQRTRLKIQLTSYVDEIFPELQYFFKSGLHQKSVYALLKEAPTPKAIASMHMTHLAHLLKVNSHGHFDKEMAQQLRVLAQKSVGANDSALSIQVTHSIQQIELLDSQLERVETEMTDIMKFHDSVIMTIPGIGYINGGMILGEIGDIHRFSNPNKLLAYAGLDPSVYQSGNYQAKKTRMSKRGSKVLRYALVNAAHNVVKNNATFKSYYDTKMAEGRTHYNALGHCAGKLVRVIWKMLTDEVEFNLK

SEQ ID NO: 136968 - protein, 616 aa, unidentified
MDRASYRYEPRPDRNAELREELVKLARQKPRYGYRRLHAVLERRGYAVNVKRVYRLYVEQGLAVRRRRRKRLLREQVIEPRLIRANQEWAMDFIVDGLANGRMIRILSVVAAFTRECLALEADTSLGSGRVTRELDRLIEQRGQPESVRSDNGPEFTSRRMLGWAEERRISLIHIQPGRPMQNGHVESFHGRLRDECLNASWFRTLKDVRQTLNNWRQEYNCERPHSSLAYRTPAEFSRALGYGDVESKQHFPLLEWSAACSQLRAILVGRRVFMEISTLGIDLSKTSFHVIGLNARGEIVLRRKVSRKQLLQFTSNRQPMLIGMEACGGAHFLARVLRSQGHEARLMPAQFVKPFRKSNKNDYLDAEAIAEAVQRPTMRFVPIKTDDQLDLQALHRVRDRWVARRTAVMNQIRGFLLERGITIRKGPSHLMTRLKEVLEDAQMPLSTKLRLLILELKHEWEELEVRIEGVNLQLQQIARQDDGCRRLMEIPGFGPLVSTALVAAIGNGITFRKGRDLSAWLGLVPRQHSTGGKTRLLGISKRGNEYLRRMFLHGARSVVAQIDRNRSALGLWLTELSARTHRNVTVVALANKMARIAWALLSGGTNYCAPASAAA

SEQ ID NO: 136969 - protein, 536 aa, unidentified
MPVAFLVRRASTLGPVVRLGWGAFSARSFGDRCLPRATRPRRIPLGRLVPLPTPPPDVARPACPVPVPRFWQTAMAARQSKTRSPRTPPHQPRVAPDPAQAKARNANAKATAAARASAAAALRRAGRHAEQVRREAEECAKLASLPVKHEHAAGIDVGDASHWVCVESTPDSSDTAREFPAHTPGLRQRVAWLQLCAVTTVALEASGVYGHVLFLTLLEAGFTVAMTSPSFTRPIKGRPKADRRDCQWIQRLHKHGRLPSVFQPDEATHTLRDYVRQRANHVRLSGQHIQRMHKALALMNLKVTKVLGDVTGVTGLKIIRAIVKGERDPQVPAKRRDRRCKHSEAAIAEALDGRDRPEHVLELKLCLTMWEHYQRVIAELDKAIAAPLRQMQTKNDLPPLEPKPRVRGRKPHDPGFDVRTALYHLTGVDLTAIEGIDEIHALTLVSELGTDVSKWPTVKHFGSWLGLCPNWQKTGGKVKSSRTRQGKNRAATALRRAAWSLVRSHSYLGAYLRRQRSRLGAPKAITATAHKLARML

SEQ ID NO: 136970 - protein, 391 aa, unidentified
MVCVGIDVAKDKHDCCILDSDGMVRADCFTIPNNMDGFKQLLQTIRNCTKKSDKIKVGLEATGHYSYNILGFLLDNDLAVYVMNPLHTNLYRKSLSLRKTKTDRVDARTIATMLLSDVDLKSYTDIAYHNEELKSLTRYRFEKVRERAKLKQSVSRLVTILFPELEKLVPSLHGASVYALLSEYPGAKQISEVHLTKLTNLLVTASKGHYGKEKATLIRETARASIGSVMPAKSLELKHTIKLIQELTSEINEIEDSIQKIIDELNPPILSIPGMGVNSAAVILAEIGDFSNFSSPDKILAYAGCSPSTYQSGKLTNCYAHMEKRGSRYLRHALYNATKYVCYWNPVFAEYLAKKRAEGKHYNVALSHSMKKLVRLIYALQKSGKTYLAAA

SEQ ID NO: 136971 - protein, 337 aa, unidentified
MTVTIVEETRPATCRTAITGGVDTHADTHVAAALDPVGGLRGVREFPATAAGYARLLGWLGGFGTVCLVGIEGTGSYGAGLARYVTAASIRVVEVDRSDRQVRRRQDKSDPLDAVSAARAAQSGRARGAPKGRDGAVEAIRTLMVARRSAAGERTRTINQARALVLTGPDDLRTRFARHTPAALITGLASLRPRTGDGTGHATRIALRELGRRGQFLDGQLARLDQLIIPLVTARAPGLLALYGVGPRTAALLLIAAGDHPGRLRSEAARAHLCGAAPIPASSGKSPATGSILAVTGRPTTPYGGSCSPVWALIRPPAPTPSAARRKGNPRRRSSAA

SEQ ID NO: 136972 - protein, 402 aa, unidentified
MITCGIDIGKGKHAVAVIDESGRQLVRTRFYDNTKAGAEKMLAELLRHAEPSQIHVGMESTGNYWRAYYDFLTDRGCVVDVINPIVTSASSAGDIRGRKTDKRDAEAIAEVVLRGKYVRRRDEGLQERKLRALTRQRGFIVEERTAAKLHLASQVAEAFAEFESLFEDPYGTLALAVLSKYPTARHLARARKSSLAKIVRANTRGRDVDAEAQRLIGAARDSISLACEITDALARCIISSIRTIMDLDERVKDVEEAIKGFDPPDLASKLMSINGSGKIMPMVVAAEFGDISRFRTNPKDGSEAGMHKRLLAYAGCEPRIRESGKWKGRKFISKRGSRQLRTALYLIANNIRQWDPYFKAVYKRKIEAGKHHSVAVFYVVVKLIEVLCALYKSGRNYAVIQP

SEQ ID NO: 136973 - protein, 412 aa, unidentified
MKVVYPRCAGIDIHKSSMTVCVYTDRGNGSEPEYEKRRIATHSEGIAELMRWLEDRRVTDVGMESTGVYWKPVWNALEGKFRLHLSNPLHIRAIPGSKTDMRDGTRIAEMLAHGKLPESFIPPKWQRELRDLTRLRVRYMEQSTRIQNRIAKVLEDAQIKLGSVTTRLLGVSGRAMLKALVGGEIEPEKLAELAKGRLKRKKSELREALRGNFTEHHRFQIDLLLDELSQCEAKVAKLEARIGTYLDPHRELVKRLDEIPGVDEIGAAVILAEIGADVTAWPSARKLASWSCLCPGNCESGGKRLSGRTRKGNRWLRRAFCQLAWAAIRKRGSYFGTQYRRLARRRGPTRALLAVAHTLVVIIYHLIGNPHLQFQDLGADYFDRRDAEQVKTNLVKRLARLGWEVTLTLKAA

SEQ ID NO: 136974 - protein, 419 aa, unidentified
MKITKTKKLKVVNEKTLIVAIDIGKVVHYGYFRGPQGYDIKPFPFRNTQKHFKDFWDKIVRYKTENKLEDIVIGFESTRSYAEPLVRYLAQKPVQLVQINPMHTKRIKELIGNSPNKTDRKDPRVIADVIALGHALTVVIPEGSAAELRRLIQARERVIKIRTIMINQLHHLIYLIFPEFTQVVKNIKTKSALYFLKNYPTPESIVSLGLEPLVLLLKKVSRGKMQRERAVSLFEAAQHSVGIHEGRQGMLLEIEHLVSDIENKNRFIDQLEEKLTYHLDCIPYSQSMLSVKGVGPVTIAGLIGEVGDFGRFKTVSEIMKLAGFNLYEVSSGKHSGQRHISKRGRSLMRKLLFFAAIGTVRSNGIMHKKYHDMLDRGMPRVKALVAIARKLLCILFALARDNMVYCDNYNKAHKVALAA

SEQ ID NO: 136975 - protein, 356 aa, unidentified
MSRDIKYIGMDVHKEAIVIAVLNGSGKLVMETIVETKASSILQFIHGLRGELHVTWEEGTWAAWLYDLLQPQVEQVLVCNPRRNALLKEGSKSDQVDAQKLADLLRTGMLRPVYHGENGLRTLRELGRSYQTISKDLTRVMNRLKALYRGWGIPCAGTQVYGPRYREEWLNKIPQAGVRRRAELLYQQLDGLQGLRRHLRPEFLAESRKHKAAKLLRQIPCIGPIRAARLIALIQTPHRFRSKRQLWTYSGLGIETHDSAQFRFVRGQLQRSRKPQQIRGLNRNHNHEMKEIFKSAATRASCATGPFRDFYAALLTNGMKPEMARVTLARKIAAITLTLWKKEERFDAEQLKTQAA

SEQ ID NO: 136976 - protein, 355 aa, unidentified
MSCEKYIGMDVHQATISVAVMDSMGKLIMESILETKASTILEFLGGLRGTLSVTFEEGTSAAWLYDLLKPHVAHVLVCNPRKNAALKQGNKSDKIDARELANRLRLNDLKPVYHGETGVRMLRELARSYLTIVKDLSRVMNRVKALYRSWAIPCAGRDVYYTRHRSQWLEKIPEAGPRRRAERLYQQLDMLQYLRQQARRELLAESRKHSITAKLRQIPSLGPIRSALAVALIQTPHRFRSKRQLWKYSGLALETRISGEYVYVHGERRRSKKQISIRGLNKDHNHDLKGLFKAAATRASVIPGPFREFYQRSLAKGIKPTMVRLTLARKIAAITLTLWKKGENFDLEKLKSQAA

SEQ ID NO: 136977 - protein, 353 aa, unidentified
MIVIGADPHKNTHTLVAVDAATGEQRSCETVPASAAGSERALRWARGLGGERVWAIEDCRHVSGRLERWLLARGERIVRVAPKLMAGARRSARERGKSDPIDAVAVARAALREGVDRLPQARLEGRSLEIRLLLDHHDDLIADRSDEQRRLRWHLHDLFDDFSVPAGALDREVWLAKIARRLARCEQTVRVRIAREQVRSIRDATRRVRQLEREITQLIELEAPQLLAEVGCGALTAAKLVGEIAGADRFRTDAQLARAAGVAPIPASSGRHNRHRLDRGGNRQLNLALHRLAVNKGRWDPDTAAYLARKQDEGKNRMEALRCLKRHLARRVWHLLNHPNPTANALDPALALT

SEQ ID NO: 136978 - protein, 418 aa, unidentified
MLGAGIDWAEEFHLVALGSPGEGVIGVRRVEHRPEAVSALVERIAGLEADPAEVRVVLETRHGLLVEALVEAGYTVLPVNPELVSRRRGPARKKDDAEDARICCLLALDRHAGLRRLIPHGQVAGELRSIARDDERACRDERRLLNRLRADLIVTFPAALAIAGEDLGATRILRLLERWPTAGALAAASREEIIEFGRTQRTGYLQRFADRVAAALAEDQFIAPPHLVRAKVDTIRLTARQLLLIDAQRRVWEKRMGELLLGTPGQPAEDQPGQAFPGGEIYLSFPGLGRRLAARIAGEIGEHIGQFTTPNSLQCYAGRAPVTRRSGKRDLVVAHRLACNRYLAGAVHKWAFASLRRSAGAREFYDAQRARGKNHHAALRALGNRWLEVLWHCLTNHMPYDEAIHIANRNRALSPIAA

SEQ ID NO: 136979 - protein, 345 aa, unidentified
MEIRTIGIDLAKTVFHFVGVNARGEVVVRRKGSRTQLLRFTSNLRECLIGMEACGGSHFLGRALREQGHDVRLMPPQYVKPYVKTNKNDYIDAEACAEAVTRPTMRFVPIKTDDQLDLQSLHRVRERWVERRTAVINQIRGMLLERGITIRKGRHYIEESLPGILEDANNKVSGALRVLLTQLRLEMQYLHGQIEEADKLIARICSELEQCKRLIAIPGIGPIIATATVAAIGNGAAFKKGRGFSAWLGVVPGEHSTGGKQKLTGTSRRGNKYLRKLFVQGAHTVLLQKTKQSSGLSTWLVNLTSRKRTQVATVALANKMARMAWAVLFKEEAYRPPLLPQAVAA

SEQ ID NO: 136980 - protein, 402 aa, unidentified
MHIFGIDISKASAVVAHYEDETLVNEFDLLYDSKNLLQFYTYLKCFEDKLLIFEATGVYSTIIRQFCIDHNIKHVCINPLEAHFKMNSLRRYKTDKVDAHKLAHLGFTLDEKYIIHTPSDEDVERKSYTRLIMHIEDDLTKLKARLKERLSQVFPSLQDLVKHNYNIPNLKLINLFAHPQFILNMTKQQLKKLIKQHNNCTKTYLEELTIKLIEWAQNTYIIVHEEHPLVEEIKDITEDLIRLIGRKKNYVAKLKKLCADQKLYHVLLSINGVGEQNAALLTGELGNIDRFETNKQLNAFVGIDIVRYESGTIYKKDRINRRGSSVARKILYQMVELFIMNQHRQQNHICDYYYKLKEPPYNKHHKVAMIACVNKLIKVMHYLNTTNSRYDYERATSHLKAN

SEQ ID NO: 136981 - protein, 393 aa, unidentified
MFFVGIDIAKRSHEATVIGHDGNSIVKPFKFLNSTLGFNKLMEAVNSVSADLSAFEFGMEATGHYWLNLYCKLVEVGATVHVVNPVQSDALRGLYIRKTKNDSKDAFIIAELIRFGRYSETTLSNPDLISLRELTRQRFYLVDCISDAKRKVISLVDKVFPEYEQLFSDMFGATSLALLEQFPTPDLLAEISTTKLVNFLKSVSHGRHGRSKAEQIKSLATNSFGSSVFAAGSAFALKQFIQQIELLERQVSDIEEYIAELLPKFNSSLTTITGVGTTLAAVFVSEIGDVNRFDSPDKLAAFAGIDPSVSQSGEFNGSKAHMSKRGSPYLRRAFFLAAVAANLHNPALKALYDRKRLQGKHHLVAISAVMRKLVNIVYSLLKSGLPYIMIMPD

SEQ ID NO: 136982 - protein, 329 aa, unidentified
MRLGSVLLEQRVSTTPKAMKEVFGGMPRSRIALETGMHSPWVSRLLSELGHEVIVAHARNVRLIGESRKKDDRLDARTLARLARIDPHLLSPVKHRSAKAQADLTVIRARAGLVRARTALVNTARGLAKSYGERLRGCNVRNMNPEKAEALSPELQRALEPLLAGIESLSERIREYNEGIEQLAQESYPQVARLKQVKGVGTLIALTFLLTLEDAHRFRKSRDVGCYLGLQPGRRNSGQSEPQMHISKEGDPYLRTLLVQGAHHILGPFGVDSDLRRWGLKLAERGGKSGKKRAIIAVARKLAVLLHRLWVSGEVYEPLRNQRALSAAA

SEQ ID NO: 136983 - protein, 330 aa, unidentified
MKKKDYVGIDISKEKVDIRLFNSKMDGKFDNKPSGFRKMRSLIEKQVDKDTELLFCFEHTGLYAIPLQVYLEKENLAYHMVSGLQVKRSLGIQRGKNDRVDARRLAEYAQSHEQEIKPQNLQSPSLIQLKYLISMRSRLVRQRAGFKASIKEYKKCLALTNTEVMIQVQQEMIKALDKQINKIEKEIRGIMASDTEIQTLFNLATSVKGIGLISATYMIVLTNCFTEFKTWRKFACYAGSAPFEHQSGTSVRGKTRISHYANKQMKTILTNAAMSAIQYNTEIRRYYQKRLKEGKHKKIIINIIRNKLISRVFAVIRRGTPYVNLVKYAA

SEQ ID NO: 136984 - protein, 430 aa, unidentified
MTINRFTPDGGVLVAIDVSKARNEILIAAPSSTRRRKLTILNERADHDRLVGLLTELQRPVMCGLEATGNYHRPLAWRMLEAGFDVRLVSSVALARTREALHNSWDKNDPKDAQVILHMLQIGACQRYYDPLAQGICDIQELSKTHEAISRSKTEVLHRLQTHYLPLYFPEIARFQQNSRGDWFFAFLERFPVPASITAMEKAPFIEAAWSVVGRKVAKAQLLGDIYESARTSIGLPIAPNAIAVRMFRMILAEARSLIRQRNEIEQIADGTLSEHRDYHLLRQIPGIGPINALTIIAEAGDLRRFGHHRQFLKFCGMDLATQQSGTFRGKTKLSKYGNARLRRTFWLAAQVAIRQRENSFRDKFERYVARDRDNKDLRRKGVTAIAAKMARVVHAVVKSGSDYRPFFEGAAPGGRTSLSKCREGASATL

SEQ ID NO: 136985 - protein, 331 aa, unidentified
MNNNMEACGVEVSARELVVARKGKAGVQLTRFANTAAGHRQLLRTLTRGGQRVRVVLEATGLYALDLALLLSAQEQVQLMVANPRAVRHFAQAMMQRSKNDQLDAVVLLEFAERMPFTPWVRPQENALALWAIARRLQALTRLCTAEKNRAHAMGLSEAIPATVRRDIARSLQFHQRAMKKLRQQALQCIAADAQLQQRYQLLRSVPGLGEISAVQTLAELLLLPEDRDVRQWVAYAGLDPREYSSGTSVRKYTRISKVGNAHLRRALYMPALVASRVEPHMRGFYEHLLARGKSKRQALVAVARKLLHAIYGMFRSRQSYDGTRVYLLPA

SEQ ID NO: 136986 - protein, 343 aa, unidentified
MECYVGLDVSLKQTSICVVNERGSVVREGVVDSVPEAIAGFVRSKAPGAVRIGLETGPTATWLWTELARLDLPVICIDARHAKAVLKMQVNKNDRNDAAGIARIMQTGWFKEVRVKDLDSHAVKALLASRALLVKIKRDLENQVRGLLKNLGLVIGHGTFNVFAVPAKELIADRPELTSAVSPLLTARTAIEQQIGELDRQVLKLSRQDAQARRFMTVPGVGPITALCFKATIDDPARFRRSRSVGAYIGLTTRRHASGELDWSGRISKCGDAMLRMYLFEAAGVLLTRVPKWSALKAWGTRLTKRNGLRKAKVAVARKLAVILHRMWIDGTEFNWSNKEVAA

SEQ ID NO: 136987 - protein, 418 aa, unidentified
MSRGDSNAVLSVVHHHCCGLDIHKDKVSAAVITTQEDGTIEESLCEFGTFTEDLYRLKEWVLEQGCHVVAMESTGVYWRPVHNVLEDSCQVILVNARHVKHLPGRKTDVSDSRWLAGLLRHGLLRGSFIPEKHVRQWRDLARLRRTYVESLADYKRRVHKLLECANIKIDSVASDLFGVTGRNLMDLLASGEEVTLDAVLRCTKGRLKGKEEELFKSITGFFTEHHRFQLESIRTLIEGVEAQIRRVHERLGSLLSDRREKIHRLMEVPGISDVSAHALLSEIGDTLDQFETAASLASWAGLCPGNNESAGKRHSGRSPVKSGHVKTIMTEVAWGAIRKKGSYYREKYYSLRARKGAKKAIVAVAHRILKAVFHILKFDRPYQELGEAYLIQLNNKARVHSLHKQAAKLGYILVPAEV

SEQ ID NO: 136988 - protein, 391 aa, unidentified
MIFVGIDVAKDTHYAAVSDDSGAVLVKPFAFQNNAEGFCLLLKKLSEFDRSKLLIGLESTGIYSENLICFLYESGFRLAVINPIQTATLRKTAIRKTKTDKVDTMLIIKSLMVNSYRLYSQRDADSLKLRTLCRFRQNLKKSKARLKIQLAGYVNLVFPEFGKFFKSGIHIAASYALLKKYSSPKEIAALRTSTLCILLSKASHGRFGKDTAEALKSLALSSVGVKNPYISIQIAQTIAQIELLEQQIKDLNSAIEEAMESINSVLMTVPGIGAVNAACILGEIGDIKRFSKPCKLLAYAGLDPTVRQSGQFTAKSTRMSKRGSALLRFALINSAWQLTLNDTTFKAYYDLKRSQGLNHYGALGHVAHKLTRVIFKLLTSDTPFNPAKLVA

SEQ ID NO: 136989 - protein, 340 aa, unidentified
MKITTLGIDLAKSVFQLHGIDTNGVVVLQKKLRRGAVLNFLSKLEPCLIGIEACATSHHWAREIAALGHEVRLIPPAYVKPYVKRQKNDAADAEAICEAVTRPNMRFVPVKTEEQQGVLVLHRSRDLLMRQRTMILNAIRAHFAEFGIIAAQGARKVAELVIRLTDEGDIGLPETARSAIQALAEQLDGLAQEVRKIERQLLAWHRQNDASLRLETIPGVGLITATALAASVPDPTVFKSGRQFAAYLGLVPRQNSSGGKDRLGHISKMGNGYLRRLLVVGATSVTRRAPTTDNRTGAWVRSLLERKPARVVTVAIANKTARTAWALLAKGESYKATPAI

SEQ ID NO: 136990 - protein, 358 aa, unidentified
MSNVKSNKLDFTGQPIYAGLDVHKKSWEVNISTRYGEYKSFSQPPQVETLVHYLRHHFPGAVYYAVYEAGYCGFWIHDQLVKEGVHCLVVNPADVPTKNKERRRKGDRVDCRKLSRGLRQGDLEGIYVPARGKLEDRSLIRTRLSMGRKQTRCKNQIKSMLLFYGVVIPEQKEMGHWSRRFIQWIEGIRLERASGDMALQIHLEELSHLRQILAKLNRAIVALSRTEEYRSWVRLLRIIPGISTLTAMILLTELGEIMRFRSIDQLCSYVGLIPDTQSSGEKEQVGGVTQRSHSHLRWLLIEASWIAVRKDPALLLAFDQYCKRMRKSKAIIKIARKLLNRVRYVLRNQAEYVPCVIE

SEQ ID NO: 136991 - protein, 370 aa, unidentified
MEQYTEAFVGIDTAKNKHALAIADPGCDGEIRYLGEIDSAPAAVQRMIRKLAGHYEKLYFCYEAGPTGYGLYRQVRALGHDCIVVAPSLVAKRPGERIKTNRRDAVTLARLLRAGDLTPVWVPDAAHEGVRDLVRAGTAASEDLRRKRQQLLSFLLRHGRIYSGRKHWTKMHLHWLAQQKFDHPAQQIVFHDAVDAIEDAATRLRRLDQQVAEIVPSWSMAPVVEAYQAMRGVSFGVAVTFVAEIGDLRRFDNPRQLMAFLGLVPSERSTGERVRRAGLTLAGNKRARRVLVEGAWSYRYPARVSQTLQARLEGLPKTVRAIAWKAQIRLCARYRRLTAAGKKRPLVIAAIAREMAAYLWAIAQHVAPAA

SEQ ID NO: 136992 - protein, 320 aa, unidentified
MYVGIDVAKAELVVAMGATGPVTTFPNDDVGLTALVGAMREAKPTLIVLEATGGYEIPCTAALAAAPLPVAVINPRSVRSFAKATGTLAKTDRIDARLLAQFGERVQPEPRPLPTAAQQELEALVTRRRQLLEMRTAEQHRLGQALGGHRQRVKQSLRKHLAYLDRELRITETDLRDRMQASPVWRARDDLLQSVPGIGPTVSQTLVAELPELGRLNRREIAKLVGVAPLNRDSGTRRGRRMTLGGRASVRAILYMACLSAIRHNPVLRAFYQRLTRAGKVKKLALVACMRKLLTIVNQMVRTGQHWSPSPSIACQLQPT

SEQ ID NO: 136993 - protein, 346 aa, unidentified
MLYAGLDLSRKRLDFCLLDGEGATVEVGAAPPDADGLLGLTRRLERHREPIRAAIESMNGARFVHDRLELQGWQVEIADAQKVKGLAPLACKTDRIDAWVLAELTRRDLVPAIWLPDPMVRAERERARWRLHLVRHRSSLKQRVHAVLLTHGKPCPVSDLFGVRGRQLLAQLGLPEPWQATIEASLRLIDELDNEISNCERELRRLGADHRYVPLLLTVPGIGWVLAYTIAAEIGDISRFPNPRKLAGYTGLCPRVYQSGERDLRGPLAKQGPKYLRWALVEAATHACTHPSYRDRYQHTKARIGKQRGAKVAQIDLARRLAEAIWHMLSREQPFAPKSATDPLAA

SEQ ID NO: 136994 - protein, 346 aa, unidentified
MLSKNDFNKNNLNTDNSPLILYSLIIGIDIAKSSFDISFLQNNSTFYARFCNHDDGFLDLSNYLTNHLTEHKITCLNIHFIMESTNIYWQALALWAYQAGFLVSVVNPAFIRAYAKSLGIRNKTDKQDAALLARYGRHENPPLWQPPSPIEDKMISLVRQRHHSKHKLTNELTRLETANYHTLSFIQSTINYWQTHIQKLDCVIWQTINSDVNLKVRATLLHSIPGIGKKSIPPLLALIGDGSRFASSKHLVSFVGLVPRAYQSGSSINKQTTIGHGGRPDIREVLYMPAVVVSFGRYKAFQPFVQRLLANGKCKKQVIVAVMRKLLAICYVVIKTGQPFDPSLHQ

SEQ ID NO: 136995 - protein, 342 aa, unidentified
MSVYVGIDVHRKRSQVAVIDQSGEVLTNRNVPNGAEPILKVPGGLPPGTPAAFEACYGTSWLVELLEDYGFDPHLVHPSRCKAIASARLKNDKVDAAILAQLLRADLLPEAWIAPPAIRQLRALLRHRVALVRLRTRLRNRIHAIVADYGYDRPAGGYWTGPGRAWLAALELAAVSRELVEDYLGLIDALQDRIDRLDWEIRQRARSDPQVKVLTQLPGIGPFTALVIVAEVGDISRFASARKLASWAGLTPTVRGSDRVAHYGHISKEGSAWLRWVLCEAAQTAKRHPQFAASFQRIATRRGRKIATTAVARKLLTRAWHLLASAGHAAAPQPAAPQPAAR

SEQ ID NO: 136996 - protein, 347 aa, unidentified
MTIVEAARGITGGVDTHRDVHVAAALDPLGGLLGTESFSTDPAGYKALLSWLASFGDVTKVGVEGTGSYGAGLARHLRRVGVEVIEVDRPNRQKRRSSGKSDPLDAVEAARAALGGRATGSPKSRDGAVEAIRVLVVAKRSARQARVKALIQMRHLGYSAPEQLRCRLKGLSVPALVAEGAKLRPSRSPDPVTAATKASLSSLAHRIEALDRELAELDERIEALLVTTVPDLLELFGVGPDTAAALVMAAGDNPERLHSEAAWAHLCGVAPVPDGSGKTSGRVKAHDGGDRQANSALWRIVMVRIAHDPETRVYFDRRVKAGKTKHEVIRVLKRYVAREVYRYLPRG

SEQ ID NO: 136997 - protein, 307 aa, unidentified
MTIAACIVGIDVSKQWLDCFLHPAGRRCRLANDRQGHAALAALLGAQESFCVLEATGPYDRDLCRHLHEVGQPFHRANPRKARQFAKAAGFLAKTDRVDTRMLARYGAAMALPAEERCTPAREALRGLMDRRDQLVEMRKSERIRLAQPHADWLKESFLQVITVLDQQIAALERRMEDLLASAHALAAQNAILCSAPGVGPVTAKVLLAHMPELGKRDRRAISALAGLAPIACDSGNMRGKRCIWGGRKRVRDALYMAALAACRSGPFQAVSKAMREKGKPPKLVIIAIARRLLVALNAAIREKKAF

SEQ ID NO: 136998 - protein, 361 aa, unidentified
MADTTSLVTGGVDTHKDFHVCVALDELGQVLGTEQFPTTLRGYRSLLRWLGSFGQLGAVGVEGTGSWGAGRARFLTDAGVEVIEVNRPNRQARRKRGKSDPADAEAAARAVLAGEAVGTPKAATGTVESIRLLRVARRSAMKARTQAANQVHSVIDTAPEELRAKLIGLKERERITKAARMRSNDTSTPLGAAKLALAALARLWLSLTEEITQLDAHLAVLVESAAPSLLGIKGVGVTTAATLLAATGDNPTRLRSDRSFAALCGSSPVDASSGRQLRHRLNRGGDRQANCALYLIVLNRLSWDQRSKDYVARRTGEGKTKKEIIRCLKRYVAREVYQAIMRDMAAQVAPITTLKAFQRAA

SEQ ID NO: 136999 - protein, 342 aa, unidentified
MKQYVGLDVSQKETSVCVLNAAGLIVYEGKAKSDPGALTKLLRKCAPNAERIGFETGAMASWLWHELRRVNLPVVCIDARHAHAVLSVRMNKSDQNDAHGLAELVRVGWYREVKVKSEESQSIRAIFVARSRLIAIRKDIENQIRSMIKEYGLLFRRAVGLRFRQQVIELLGKDHQLRGVIEPLLSIHEQACRQQAKFDEEVRRLAKSDETTRRLMTVPGVGVVTALTFRHTIDDPTRFKSASSVGAYVGLTPRRSQSGETDKNGRISRWGDRLLRSYLFEAANVLLHRTKKWSSLKAWGIKLAKRIGLKKAKVAVARKIAVILHCIWVDGTSFEWGKAKAA

SEQ ID NO: 137000 - protein, 342 aa, unidentified
MEQIVRIGMDTSKQVFQLHGVNASEEPCLQRKLRRSELIAFFDSLEPTVVGIEASGAAHHWARTIGDLGHEVKIIAPQFVKPYVKRGKNDAADAEALCEAMSRPTMRFVPAKSVEQQAALMLVSLRSRLVRSRTQLSNAIRGHAAEFGLIAGRGVDKIRQLLRRLQEDEDLPELAGSLFRELEAEFEETDTRLRRVDAALTKYHRDSELCQRLSLIPGIGPVSSTMLALKTPDPGGFRSARHFAAWIGLTPKDHSSGGTTRLGGITRAGDEALRSALIVGATAVIRQMRRGSGRRWPWLELLLQRKPPKLAAVALANKLARIAWKLMNSGESYNPGHAMRAL

SEQ ID NO: 137001 - protein, 469 aa, unidentified
MGNKKISMAIINPNCAGIDVGSRSHYVAIGQGSKDVREFGVYAEDLKALADWLASNHIITVAMESTGTYWQNLFVELMNSGLEVVLTSGKFTKNINRKKTDVIDCQWIQKMHMLGLLPSSFLPDETTEKLRTLCRHRANMITQKADTSRKMQKFLKWLNFRLDVVVRDVTGLTGIKIIEAICNGNLDPKSLAQHRHYNCRKSEKEIAKALVSNERADYLFGLKQEYQRYQFYKAMIEDCDLEIATFLQKYLDQKKDIVDHLPEKKTYKRQNKNGIKGIDLNIISYQYFEGVDLLAIPGVSHSTVLTFMSEIGPKGLKKFSSAKKFSSWLRLAPNNKISGGRTLSNRIPKGSNRLKIALRNAANAVGNLKDSDLGKFFKKIAFRKGRHAAITATARKIAVILWNMITKKQPYNPTNQYIFLDEKRRAIAQLRKKITKFGIDPNELGIFSTEKYRLAYEKRTSDNQGFSER

SEQ ID NO: 137002 - protein, 427 aa, unidentified
MPYKIAGIDVHKRMLHVVVSDVQVDGEYDFTRRVFGSLPEALRSLAAWLVEQQVQEVVMESTAQYWKPVWGTLERYWKPICQTREGALATSGTLHLAQALSNRGRRGRKKDFRDAERLVKRLVAHELVLSFVPDVEQRLWRTVVRTKYQLTRNRVQLHNRLEALLEEAHIKLSSLVSDLLGASARRMLAAVADGETNREILAALADRGLRATQEQLQDALGVCQELNPVYRRLIRMVLDEVASIDKRIEQLNQEAANLLRRHEDQVKRLAEVPGLGVDTAQQIIAEVGATAATFPSEKHLSSWVGACPGDEESAEVNRSRRSPQGNRHMRRILNQAANAAAKLKGSIFEILYRRYVPRLGHNQTIGIIAHKLCRLVWKILHRGIQYEERGPEVKKASKQKRTRKMIQALRRLGYRIEPSPSQSAIPA

SEQ ID NO: 137003 - protein, 532 aa, unidentified
MEVLVERVAGLDIGKKIVVVCVRTSGPGGRRVSETRTFRTMTRSLGLMADWLVECGVELAAMESTSTYWKPVLYCLEERMTTWLLNAAHIKAVPGRKSDVRDAEWIAQLLEHGLVAPSFVPEAPVRRLRNLTRYRLQLQGDRTRDAGRLEKLLEDASIKISAVASNITGTSSRAMLSALVDGQRDPVVMADLARTKLRRKIPDLVEALTGHFDDHHALIVGQLLARIAATEQALADLDLHLEVAMAPWAHEIDLLTTIPGVGRLVAWTFIAETGGDMSRFPSPGHLASWAGVAPAMHESAGRRQPVGTRHGNRFLTSMLVEAAQSASHTKDTYLASQFAHLTSRRGHNRAAVAVAHSILVSAYWMLVATRPMTTSDRAGSPTTRPNKPAPAAWSTSSRPSATPSSSTPSPDGPSPSTTIRAPPGAVARPLPDILGSVPTSPSCHDNRGCRRGRHLLPSIRLPTGRSERSEVHDGQGTACSCESGQSGGRGGGSTARRRLRARVGRASTGSEGRLSADFRPKPRRRDDGPTPG

SEQ ID NO: 137004 - protein, 403 aa, unidentified
MELMDASGRRLAKARLPEGVAGITRLHAMIGEQLVELVGENAGGNAGEVEVVVGIETDRGPWVQALVAAGYTVFAVNPLSVKDYRRRHRVSGAKSDAADAHTLADMVRTDSHQLRPVAGDTPEAEAVKVVTRAHKTLIWERIRHTQRLRHALRDYFPTALEAFDDLDATDTLELLGRAPDPQSAARLSFNQIRAALKRARRRAVDDKAAAIQKVLRSEHLEQPPVVAAAYAATTRTAVAVLTTLREQIRALEGEVEAHFGRHPDAEIILSQPGMGMILGARVLAEFGDDPDRYASAKCRKNYAATSPITIASGKKKTVLARYVHNDRLLDALMAQAFSALRASPGARAYYDHLRARGLEHNPALRQLANRLVGILHGCLKTRTLYDETTAWAHHTQKTSKTAA

SEQ ID NO: 137005 - protein, 318 aa, unidentified
MNVVGFDVSKNSLSGTRIDRSGKIKQHVDMLNIKGAILPVLSDLNKHYRHLLVAAEATGDYHRPLAEACLELGIEFSLLNPITSKRYRRTTVRKQKTDITDSEAIARVAMQGEGTVLTNDLLNPLKPILRASNKFTEMVSALKLVEQHLANLPIEKPNLLKGLLGCRVQLLAASATFRDDATSGCDQKVLSLLKSIPGIGDNLATTILLEIGDIYRFTGPKQLTAFAGLDPKVMQSGTTLNRYGHLTKRGSPYLRRALYIAATIAKRHDPVMQATYEKKRTEGKRYKEAMMVVSRKLLRVIYAVWVHAKPYQIQKLDF

SEQ ID NO: 137006 - protein, 405 aa, unidentified
MTWMYVGHDQIMKGCVLMIYVGIDVAKEKHDCFIVSSDGEIIKDVFTIQNNLDGFNLLRSSIPDVPKDKIRVGLEATGHYSMNLMRFISENQLPLVVLNPLQTNLFRKAHTLRKSKTDKIDAKLIALMLQSGNFKLHSDESYHLKELKSLTRHKLRIKENLSRYKLSLNRILDIMFPELSSVVYSLNQKSTHELLKAFPSKNAIASAHLTKLTNLLRKSSRGKYGKEKAILIKETASRSIGSDSRALSFELSQILTLIEMYSAEIHKIDCEIKAIMDEMQSPILSVPGISYGLGSVVLAEIGDISKFDSPAKLLAFAGLEPSTYESGKFTAAGMKMVKRGSPHLRWALLEAARLISMRDPVFKEYYYKKRAEGKHHYVANSHVAKKLVRVLHYLLINRLNFVPQG

SEQ ID NO: 137007 - protein, 368 aa, unidentified
MQELITGFVGLDAHAQSTAIAVAEAGRTAPRFVGTVGPRIAELTKALGKLGEPHSLYVVYEAGPCGYALARELIDLGYRCEVVAPSKIPRRPGERIKTDRRDALNLAGLARAGELVSVTIPDERDEAIRDLSRARVDAVRARHKARQQLKALMLRHGRRYSGKTSWSAAHERYLAAVSFAHPAQDIAFTEYRQAVSEGEARVQRLSESLTQEVEHWRRHSLVSAVMTLRGLDLVAPATVVAELGDLRRFAHPRELMGYLGLVPSEHTTGSKRRLGAITKTGNGHVRRVLVEAAWNYRYPARISPALQVRQERQPPEIRAIAWRAQLRLNHRYRRLRARGLQHNKICVALARELAAFVWDIGRHVTPSP

SEQ ID NO: 137008 - protein, 408 aa, unidentified
MNTLYVGIDVSSKSNVVYLMLPNGDKHSNFSVANSLEGSTQLVKRILSALTSHSLDTVLIGLEATSVYGDNLVYFLREDATLAPFNRKIHVLNPKQVKKFHDAYNDLPKNDYVDSFVIADCLRFGRINKEVYLGDYRYKALQNLTRARFFAVQNLIKEKQRFMNVLFKKYSTMTQEKVFSDTFSTTALAVYDEFDSAEALANMDLHELTDFIIEKGKNRFPDPDAVAKAIQKAARSSYRLPKTVNDSVNQVLSISITSMKALESQIKEFDKAIKAQMELLPNVLISIPGIGPVYSAGIMAEIGDINRFDNQAALAKYAGLAWKQHQSGSFEAEVTRLIPSGNRFLKYYLYEAAFSLVRCDKEYSDFYHLKYKEVNRCQHKRALALTARKFVRLVFRLLKDNRLYVPAK

SEQ ID NO: 137009 - protein, 343 aa, unidentified
MEAVTTIGLDIAKSVFQAHGIDAEGNVIIRRQLKRRHVQAFFQKLSPCLVGIEACATSHHWSRELTALGHIVRLMPPAYVKPYVKRQKNDAADAEAICEAVTRANMRFVETKTPEQQSCLMLHRTRHLFIRQQTAVINAIRAHLGEFGVVAPVGRKGVEELLDVIADAGDERVPEVARACVGALGVQLQTLKAQILEFDRRIMAWHRSNETSRRLDAIPGVGPALATALVASVADPKAFRSGRDFSAWVGLVPKQHSSGGKEKLGSISKQGDRYLRSLFTAGALAVIRYAKVHGTKHRPWLAGLLARRPTKVAAIALANKIARMAWAMMAKGEPYKEPAALAA

SEQ ID NO: 137010 - protein, 345 aa, unidentified
MEIHTIGIDLGKTVFHLVGLNVRGEVVVRKKCSRDQLLRFTANLQVTLIGMEACGGAHFLARALREQGHDARLMPAKYVKPYVKTNKNDYIDAEAIAEAVGRARMRFVPIKTDDQLDLQSLHRVRERWVSGRTAVINQIRGLLLERGITIRKGRRHIEESLPGILEDADNKLSGALRVLLTELRQEMQYLQRQVEECDKLILRIADELEDCRRMVAVPGVGPMIATATIAAIGNGSAFKKGRGFAAWLGVVPGEHSTGGKQTLTDTKRRGNRYLRKLFVQGAHAVLQQRMKQSNGLNTWLAQLTSRKRIQVAAVALANKMARIVWAVLSKGEAYRPPLLLETAAV

SEQ ID NO: 137011 - protein, 341 aa, unidentified
MQTTKYFIGFDISADDFSASCITSPDNLVFSTQKFSNNIDGFNEFLALLSKHNIKQSEAIICMEATGVYSENISYFLASKGFTVAIEAPHKIKNKTKDSPRKNDFIDALHIAEYAYRYSDKLPIWKPSNEIIEQIQVLLTTREHLSLQMIANVNALKTLKHKYYQTPLANQIYEQTISKLKEHIKQIDQEIKTLIDKDDSFKNNISLAKSVPGVGLLLAANLLVLTKGFTEHLNYKHIASYTGICPYEQISGTSLHKPPRSRMCGPAKLRKLLYLAALSVRTHNQNFKKYFLRKQAEGKNNRLILNNIENKLLKIICAVINSGTAYTENYKSINPELLKTA

SEQ ID NO: 137012 - protein, 392 aa, unidentified
MVCVGIDVAKDKHDCFILSSEGEVLADVFTIANNRDGFETLLQRLHSCTHPTDNIKVGLEATGHYSYNILGFLLENGLHTYLINPLHTNLYRKSLSLRQTKTDRIDARTIASMLMSDVDLKSYTDTAYHNEELKSLTRYRFDKVQDRARLKQSVSRLINILFPELETLVPTLHMASVYAMLSEFPGARQISDAHLTHFKTILSDASKGRYDREKAVEIREAARRSIGSAMPAKSLELQHTIRLIRELDKEIDEIETAIKAIVDEMAPPILTIPGIKYRMGAMILAEIGDFSRFDSPDKLLAYAGLSPSTYESGKLKATGAYAHMEKRGSRYLRYALFNATKYVCIWEPSFKAYLAKKRAEGKHYNVAISHAAKKLVRLIFALQTSGKAFQPA

SEQ ID NO: 137013 - protein, 422 aa, unidentified
MEKQRNKVCGADIHKRFLIATILSRDGTKKTNRFGMTLDDILKFKNWVMENQCEMVVVESTGTYWIPIHAVLEETIDLIVANAYKIKHVPGRKTDISDSEWLAELGLNGMVEPSRIFPQEDRELRMLTRAREGYVTDMTKEKNKIHYALESCGIKLSSVLADIFGKSGRYLLDSLLKGVELEEMIKGIPVKRIREKAGQIREAVRGSLETAQIILIRGSLDQMRSIQRRIDEIDKEIKDRIARRKEDLRIAMSVPGIGFVSAATILAEIGDFRDFAKAEQLAAWSGLVPAVYQSADKLVTGSITKHGSRHIRRILVEVAHAIARTNKSRLKRFFRRVQAKKGYNVAAVALARKVLCILHHLLMKRELYQEDDVKAKKKATIGVNFSAQATRMDLDEMIYILARAGYVIQKTSIRQNSFDTGG

SEQ ID NO: 137014 - protein, 353 aa, unidentified
MTSTKYIGMDVHKESISIAVRNDAGKMVMECVIETKANIILDFIHGLRGELQVTFEEGTWATWLYDLLKPHVTKLVVCDPRKNSRQGNKNDRIDARELADRLYMNKLSSVYHGGGGVRTLKELARSYLTISKDLARVMSRVKAIYRGWGIPCAGKQVYAPRHRAEWLAKITEVGVLRRAEFYYQQLDALRSLRHEVRRALLAESKKHKATKLLCQIPSIGPIRAALLIALIQTPHRFRTKRPLWKYSGFAIETHSSADYRSVKGQLHKSKKQVSVRGLNRDCNHDLKNLFKSAATIASVKPGPFQEFYATLLAKGMRPEMARLTLARKMATIVWIVWKRGVSFDAKYLKPQTA

SEQ ID NO: 137015 - protein, 485 aa, unidentified
MNVWQASSSLPSRPALASEEEESVDQMTLGIDVACRAAHQASLADERGRFAWTGRRFRTTAADLERLWAQVPAGAKLTVVMEPTRNAWVPLAAWFRRRGAVVILVPPEQSADLRDYYSKHAKSDHLDSRMLARLPLLHPEGLRPSPGLGPADGLRRATKLRASLVKRRSTILARLDAYLELLGPAWHAALGGDLALNTPLRFLAAGYADPHALRRLGKTRLARFIWRYSHGAWGEQHATRLLAAAAETLQLWDGELSYPDLAEDIATEARLALQITTEIRDLEQKIAALLHDRDPAGIMTSAPGVGVINAAQILARLGDPARFRSLAGARSFTGLIPSLSASGTSGHHGPPTKSGDAPLREALFMAADQARRTDPTLAARYHRLMVHQGKHHNSALCHISTVLLTRIIACWRAGTPYQLRDTDGTPITPTQGRQIISQRYQISAELRAQRRTSHTSTRRRTGEERSRQALRHQPASPHATTRPPA

SEQ ID NO: 137016 - protein, 387 aa, unidentified
MTTTAMAIAADTILALDLGKYKSVACVHAQASGTFRFTSFETTRSELHRLLARDWPTVVIIEACLLAGWVHDLCAELGIRCLVANTASEAWKFKHLKRKTDRDDAQRLAQLYLLDQLPTVTLPPTTVRQWRSLIACRQALVGRRVAVQNRIRALFVAQGLPAPRGARAWAAPGLAGLASWARPLGDCTADELWRGLLELSLTEYHQLCELIDQTQTKLDALGRQNADVVLLQTAPGLGPRTAETVAAYLHNAPRFQSAKQVSAYSGLVPRQHQSGEMDRRGRITKRGPALLRKMLVECAWCMIRYNAWARGIYQRLTGGGQRRKKQAIVAVARKVLVRCWAMLRDRKPWHDPQTGPKATLPPSKQRRQAEAQQRRQAKQQAASAATS

SEQ ID NO: 137017 - protein, 393 aa, unidentified
MPDAIRWVGLDVHAHESTIAIFDQASGELTTRRMVGRPHELIDRLVDIPVPARMVYEAGPTGYGLARRARAVGIEMYVCAPTRTDREPTDRVKTDKRDATRLARRLAAGELTLVVVPSVEHEQLRDVVRCREQIRCDLMRARHRLGKFLLRREIYYEGPGESWSRRHRVWLAGLRFADRASQLTMADYLHAHDVLLARRDRLEAELEQLAAASPWALTIARLRCLRGIDTLSALGLCAEIGEFARFDHPDQLAAYLGIVPSERTSGQQRRLGSITKAGSTHARRLLIEAAYHYRRHPAIGQTLERRQRSQSAEIINIAWRAQRRLNARWRQLKDARKKPSGVTVVAIARELAGFCWEIATYNPHPDPIPPASLPAGDPLTQAHPIPQKLTTTA

SEQ ID NO: 137018 - protein, 354 aa, unidentified
MSLEQDTGLVAGVDTHRDTHTAARCDGRGRLLAQLEVRATAAGYAQLLAWARAAGPGARIAWAVEGTRHYGLGLARYLAGEGERVEEIDASRHVGRRRRGKSDAIDAVRAARELLARPQPAQMRCDGDREALRLLMIDRDNAVACAKTARTVLASMLVTAPAPVRERLAGLPRDRRATVCAALTCPRRADRQTRVLHQSLARLGQRIVMMSRVAADLEKQIAALVEDLAPGLVAAEPGLGALTAAQILLSFSHAGRIRNEAAFAMLSGTAPVPVSSGRTDRHRLNRLGDRQLNRALQIIAVSRMRGHPATQAYAQRRRAEGKTDREIRRCIKRYLARHLYRALNNQPNLHQQTT

SEQ ID NO: 137019 - protein, 342 aa, unidentified
MKEVSIVGLDLAKRVFQVHAAGSDGSVVLRRKLSRGQVVTFFTELAKCTVAMEACATAHYWAREIGKLGHDVRLIPPAYVKPFVKRQKNDAADAEAIVEAATRPSMRFVVPKTESQQACSMLFRTRDLFVRQRTQLINALRAHLAEHGVIAPQGTANLALLAEIIEDHEAGLELIVVETGRLYLEQIAALSSRIASLEKALRSEAKRSQSTARLMSMPGMGPITAMAVEAFAPTMTTFRRGRDFAAWLGLVPKQHSSGGKQVLGRTSKMGQRDIRRLLIIGAMTVIRWACRKAPPENSWLARMLARKPRMLVAIALANKMARSIWAMMTRNEDYKDSVLPAV

SEQ ID NO: 137020 - protein, 334 aa, unidentified
MENIALIGIDLGKNSFHIHCQDRRGKAVYRKKFTRPKLIEFLATCPATTIAMEACGGSHFMARKLEELGHSPKLISPQFVRPFVKSNKNDFVDAEAICEAASRPSMRFVQPRTESQQAMRALHRVRESLVQDKVKTTNQMHAFLLEFGISVPRGAAVISRLSTILEDNSLPLYLSQLLLKLQQHYHYLVEQIKDLESQLKRKLDEDEVGQRLLSIPCVGTLTASTISTDIGDGKQYASSRDFAAATGLVPRQYSTGGRTTLLGISKRGNKKIRTLLVQCARVFIQKLEHQSGKLADWVRDLLCRKSNFVVTCALANKLARIAWALTARQQTYVA

SEQ ID NO: 137021 - protein, 445 aa, unidentified
MEVTFTHCAGLDVHKKTVVACCITPGAKGEKQIEVRTFGTMTVDLLALSDWLTSKQITHVAMESTGEFWKPIYNLLEGNFEILVVNAKHIKNVPGRKTDVKDAEWIAELLRHGLVRGSFIPPQAQRDLRDLTRQRTNLVQDRATVVNRLQKVLEWANIKLSSVATDVTGVSARAMLEAIVQDQVDPAALSELARGRLRKKRDALEQALTGAVRDHHRFMIGQHLTQIDFLDQQIAAFDEQITAAMQDMSQPPDEPGPAQTDASQVVVTPPEDTTAPLTWEAAVALLDTIPGVGPRAAEMILAEIGLDMSRFPSEAHLSSWAKVSSGNNESAGKRYSGAIGHGNRWLRTVLVQVAWAAVKVKKSYLSSFYHRLAARRGAKRAIIAVAHRLLIAIYHMLKKHEPYKDLGATYLDERNKPKVVSRMKHRIEQLGYRVTIEPVTVSVPG

SEQ ID NO: 137022 - protein, 398 aa, unidentified
MLPHKERKRTEKKGGVSMSVEVMYQRCAGIDVHLRFLVVCLIIVEAGKRRQEIRTFRNETADLLALRAWLLQEGCTHVAMESTGVYWMQVYRRLEGFFELVVANAQHIKAVPGRKTDVQDAEWIADLLQHGLITPSFVPSQEQQDVRDLTRTRVSLVRERARLVNRVHKVLEEAGMKLSTVRSSVMGLSGRAILQALCEGESDPERLAKRVHPSVHASREQVVAALAGEVREHHRFLLRELLSLISAQDRSIKHLEEEIERHLLPFEEQIKRCEQINGVSRHVLHVLMAEVGTDLSRFPDAEHLSSWAGVCPGHKESAGKRLSGKCKKGNRYVREALVQAAHGVRRSRTYLGERYRRLKKRRGGKRAALAVGHNILVIYYQMMKTGQEYQEKDFLCQP

SEQ ID NO: 137023 - protein, 344 aa, unidentified
MPMYQLGIDVSKNTLDLCLLREGIKGRIKTRKLKNTADAAKVVAEWLKKQSCELGEVHIIMEATGVYHEPLAYGLHFAGARISLANPHRTREFARGMNILTKNDKVDAWMLACYGSLKEPEAWTPPPESVRYLRALLRRRDALVADSTREKNRLEKSVFTDSPDAVRASIENMLQELSNEIEHLDVLIQEHIKAHPELNQDFRLLTSIKSVGYLLGLNMLAILKSHSFESAEQAAAFLGVVPVERRSGTSVKGKPKLSKIGPPEIRTKLYLAALCGLRFNPVMKQMYTKLCQRGKSKMCAIGALMRKLVHWCYGVLKTQLPFDAEHNQQSYYKTTCYSTPSEQY

SEQ ID NO: 137024 - protein, 434 aa, unidentified
MNNNGFLGLDISKGYADLYVINSDKIPVEAAFRLYDVQDGHQRIEELIDKWFEKQSFETLYCGVESTGGYENNWINLLQELAIKRPLKIARLNAKGVKSLSDAALKRTITDSVSAENIAMYLVDFRHKIKWIDDPQSFKKYTDGRRHNTFIRMLKKQRIQLSNQLEKLLYQELSPILTYCRHGAPGWLLNLLLKHSSVAAINKAGVKGLSKIKGITTEKAEAILNKTRESKHCTSAHISSVIKGTIKQMLHLDETIKEEKNKLIAEYSDSEEVKLLTSISGLGNQSAVEILIEIENIHRFEDAKKLSAYFGLHPVFKQSGDGKWGNHMSKKGRSEIRAVLFMSSLTAIRYSDLFKNIYSNARAKGKNHFNAMGVVMHKLLRVIYGVLKNKIAFSQAIDAKNVENAELKQQAEKEKSKEQKREQVQKLERYNRSA

SEQ ID NO: 137025 - protein, 463 aa, unidentified
MSKKESQPKSPNPDLPLINLNAAGIDIGADRHWVSVPVDRDKDSVRSFGCFTADLYAIADWLKHCRIETVAMESTGVYWIPVFQILESRGFEVKLVNAHYVKTVPGRKTDVLDCQWLQQLHTYGLLAGSFRPEDQICALRSYIRQRDNLVKSACVHVQRMQKALTQMNVQLHRVISDITGTTGLAIIDAIVSGERNPQKLAALKDERIKASSTNIAAALTGDYRPELVFVLSQELLLYKFYQTQITECDTQVEQCLARFTDKVDVETNPLGKPKRRGKKQPGNAPQFDLRTHLYRITGVDFTAINGFGALTVLLILSEVGLDPSCFATVKHFTSWLGLCPGSRVTGGKVKSSKTRPVINRAANAFRMAAQTLCRSNSALGGFYRRMQARMGAPKAITAAAHKLARIFYRLWTSGTAYADPGVDAYEQKYHERMVNNLKKKAHVLGFNLVPQPTINEEQLSLVI

SEQ ID NO: 137026 - protein, 343 aa, unidentified
MDHFAGLDVSVKETSICIVDDAGKIVREVKVASEPEALLAVLKNLVYHFKRIGLEAGPLSQWLFSALAEAGLPVICVETRHMRAVLKAQINKTDRNDARGIAQMMRVGLYRPVHVKTLRSQKLRVLLTHRKLLQSKTIAIENDLRATLRNFGLKVGMVGTVKFEARIKELVESLPDLAVLVEPLLIVRQVVREQLGILHRRLLAIVRDDDVCRRLMTIPGVGPVVALTYRVTVDVPARFRNSKAVGAVFGLTPCKYQSGQNDRTGGISRCGDEMMRMMLYEAAQSMLVRSAKWSWLKAWAMKIARHRGIKKAIVALARRLAVIMHRMWVGGTEFRWTREVAVA

SEQ ID NO: 137027 - protein, 316 aa, unidentified
MNESIVERFVGVDVSKSTLDVCIDSPSEVLHVDYDDKGIKTICTRLKSIAPILIVMEATGGLEMRLACELAAMGLNVAVINPRQARDFAKATGQLAKTDLVDAAVLAAFARAIRPQARTLKDEQTRELDEMVSRRRQLVANRVQEALRLDTAASKALQKSLKAHIAWLEKRITQIDEDLGHRLKTSDVWRAKDNLLRGIPGVGAVTTLTMLAKCPELGTLSRREIAALTGVAPVANDSGKHRGKRFVWGGRADVRVVLYMATLSAMQCNSVIKEFATRLKQAGKPAKVVIVACMRKLLTIMNAVLKSNTPWRPKSA

SEQ ID NO: 137028 - protein, 311 aa, unidentified
MDSKEKFIGIDVSKDTLEIAVAPTGERMTFAQTEDGLALMVDFIQSFSPRLVVLEATGGLERAAIGILGAKGLPAVVVNPRQVRDFAKAKGILAKTDKIDAGVIAGFADAIRPEIRPLKTKETQELEALLTRRRQIVEMLTAEKERLYSAPECTKKDIQAHIQWLQKRRDKLAKNLDGMIQKSPLWRAKDEILQSAKGVGPVLSQTLLTKVPELGSLNRKEVAKLVGVAPLNRDSGKFRGRRSVWGGRAEVRSVLYMATVSAIRSNPVIGAFHDRLIKAGKLPKVAITACMRKHLTILNAMVKNQTPWQVA

SEQ ID NO: 137029 - protein, 284 aa, unidentified
MPLYGGIDLHANNSVVVIRNEQDQVLYQKRLPNHLPTILEPFSLHQGEIEGVVVESTYNWYWLVDGLMEAGYRVHLANPAAMQQYNGLKYTDDHSDARWLAHLLRLGVLPEGYIYPKAERAVRDLLRKRTHLVRQHTANVLSVQNILVRNTGVRLSIKQIRELTKRDLERLLPEADQILAVTSSLAVLDCLSRQIKALEQTVHTRLKHTPAYEQLLTVQGIGTILAQTITLETGAVSRFPTVGNYASYCRCVDSTKISNGKRKGQGNFKNGNPYLGWAYMEAAQ

SEQ ID NO: 137030 - protein, 473 aa, unidentified
MQRRIVGLDLGVATDHTAVVLDESGAELARRRVQPTRASFEALRAAALSGAEEATVLEVVMEPTGPAWLPVAVFFGAAGDRVYRVSPQRASDLRRYFRRHHKTNRIDATTLARMAIVEGDALRPVELARGDAAALDREVRVTERLTEEIATRKVRIRDLARQLMPTSATALSKQLSRADLEVLRTWGNPKALVAAGVEAVDELVQSIGRGMHGRAKAEAFVAAATAALALYGDSDAVPFEALAADLATEIALLEAIEAARAPHERRREELYGRVDPEGLARSVPGIGDKGGPLAVAVVGRAGRFPNADAFCSYTGLVPKASETGETDHKGQAMTKAGNRKLRRMLYRAADTARKEDPQLARIYWTQMVERGANHTKALAVVAAHLARRLWRTLQRQSPYVVRDTDGNEVDRARAKVIIAERWTVDEETRRRRRSRKKVGKAPQQVLKGHAQNGARSASTRRPSPATIVDRAAS

SEQ ID NO: 137031 - protein, 402 aa, unidentified
MNAVGIDVSKGKSMVAVMRPFGEVVLSPFEVPHSSSELSKLARLLKSLDGESRVVLESTGNYHTPVAKMLHDAGLYVSVVNAMLVHDYGNNSLRRAKTDKKDAVKLANYGLDHWLSLPGYVPEEDTRLLLKNCYRQYQQYAKVQTMMKNNLLSLLDMIFPAVNRLFSSPVRADGSEKWVDFIDAFWHVQCVSGLSANAFSAKYLKWCRKHGYNFSEEKALEIHRTARDHVAVMPKTDTTKLLVKQAVAQLRTVSSAKAALQNEMDALAASLPEYPVVMDMFGVGPKLGPQLMAEIGDVRRFHSKKALVAYAGIDAPPYQSGQLNVHSRSISKRGSPALRRTLFLVMSVYLQCSPADEPVYQYMAMKRAEGKPYLVYMMASANKFLRRYYAAVKAYLNALEQG

SEQ ID NO: 137032 - protein, 328 aa, unidentified
MKTIFIGIDISKDTLDVAVQEKPGGKPVDAFVVENSLDGIQKMVKRVKKLNHEAWYCFEHTGNYGYLLCHQLSAIEQKYSVVPGIEISRSQGLVRGKTDAVDAVRIANYACTHQHKLEEFKLQSEQLRKIKEMLSYRNQKSRMLRQYKNSLKSHKITGKILDNDFIIRDIESSIEMLKKDIADIEAMIMSLIKQDESLSVNFAKVKSVIGIGPIIAAYLIVYTNNFTSFDNPRKFNSYSGIAPFEYSSGTSIRGKTRTSKYRNKMIKSLLFNGANAAANYDPELRAYYKRKKEEGKPRQLIMNNIACKLVYRAFAVVKRDELFVKLVR

SEQ ID NO: 137033 - protein, 334 aa, unidentified
MYYSGIDLHTDNSYITTQDDTGSVVKQERTDNDRENVLAYFHSLPGPHIAVVESTSGWYWLNDLLEANGIELVLAHAKYLKAIAYAKVKTDKVDSQTLATLLRQNLIPRAHKISRELRGLRDTMRLRLRLVQQRTACLRRIDSIKVKFNTTAVPDPYRFQLSVLEHTRDTFTSQILALEKSLHPVLIPNDDIQRLLAIPGIGKLTAFTIYLEIDGIERFACDKHFFSYCRLVPAADNSNRRVHHRSSKDGNKYLKIAFTEAAVHAIQFYPEFKTFYLRLARRTHQTIARTIVAKELARIVYYIVKNKTPYRGFKGQPISRNKSLQWPRLPSPDA

SEQ ID NO: 137034 - protein, 357 aa, unidentified
MGKSIKNLSSVTIVGLDIAKNVFQVHGVDAGGALVVARAVRRGQLLSFFSSLPPCVVGIEACSSAHHWARSLIGLGHQVKLIPPAYVKPYVRRSKNDAVDAAAICEAVGRPNMRFVPVRGVENQAQLMRHRARELLVGHRTRMLNALRGHLGEIGIVAAQGAQNAYALKRLLADGCDDNGEVIVPDCVRRALAPLVHQIDAIDAEIEAIDEEIKTLVKADETARRLMTIPGIGPITAQAIVATVRETSAFASGREFAASLGLTPRQNSTGGKERLGRITKMGDRYLRKLLVVGACATLCHRKGHNDALRVWADRLLARKAVKYKFKLTAVALANKVARIVFALMTRGGEYNELPTAA

SEQ ID NO: 137035 - protein, 390 aa, unidentified
MACVIVNRKKEIRKFGTMTDDILEMVRWLKEVECEVVALESTGVYWKPIYNILEQESLPIIVVNAQHIKAVPGRKTDVKDAEWIADLLKHGLVKASYIPHREQRELREITRYRQEIVNERARELNRIQAVLEGANIKMASVITNIDGKTGLSILAAIIDGQTDPIQLSALGCKNLAAKKIPELQRALKGSIGEHQMHMLKYQIEHITFMSKLIAELDLEIKKRTAPSEEYIELLDELPGIARRSAEKILAETGIEMNQFRDAAHFASWAGLVPQCNESAGKKKSTRLRKGNKYLKETLVECARVAIRKKSSLFYAKYCKIAARRGGKRALIAVAHRMLVIIYHILKNKSQFFDLGSDYFVKLDEERIKNRNINILRKMGYEVSLMPLKDL

SEQ ID NO: 137036 - protein, 381 aa, unidentified
MKTVHTKRTGQAGRPSVGADRCVARVVPSLLPKSSNSCQGYPSPHLSQGRASLEQIKSIKEDCLLEAPLIFVGIDVSKAQLDVAIRPSAQSLSVTNDRAGIKSLIKHLKKLRPQLVVLEATGGLQRQVLSALIAGEIPVVMANPRHIRDFAKSIGQLAKTDRIDASVIAHYAEAVRPKPRPLPDEASLELRALSARRRQVVDMIVAEKNRLATASKVVKKRITAHIAYLEQELNDADQDLDRFIEKNAAWKQNQQILCSTPSIGPVSSRTLLVELPELGALDRKKISALVGVAPFPRDSATLKGRRTIWGGRASVRSALFMATVVATRFNPVIRDFYKRLKAKGKPSKVCLVACMHKLLTILNAMIKNKIRWSENFTRQTT

SEQ ID NO: 137037 - protein, 351 aa, unidentified
MAVMTILESTAVCGGVDTHLDVHVAAAVDPNGGLLGVEEFEVSRAGYEKLLGWLTSFGAVTRVGVEGTGSYGAELARFLAGAGMEVVEVDRPDRQARHRQGKSDAVDAIAAAQSALSGKAKGKPKGRNGNVEAIRVLNVARRSARNHRIATLCQIRHLAFCAPDELRVQLTGLSTRQVVAKAAGLRPATSTDPVLKMTKRALRELGGRVKNLEAEIERLNAEVEALVQATAPELLTLFGVGPHAASLLLVAAGDNSGRIRNEAAWAHLCGVAPIPASSGKVTRYRLNRGGDRQANHALFRIAMVRARSDARTKAYVERRVAEGRTKGEIFRCLKRYIAREVFKYLPRDLRA

SEQ ID NO: 137038 - protein, 344 aa, unidentified
MNSTTIAVDVAKSVFEVAVSEYPGQVRERHRLSRGRFSRFLAEHPPATVVMEACGSAHHWAREAQSRGHRVILVPPHAARPYVLRNKTDRTDAKGLLEAFRNDDLHPVPVKSETQQALAALHRLRSTWVATRTARLNTVRGILREFGVVIPTGAHHVVPHVRALLEDADAGVPGLLRVPLSEAIREIGELEERILAIERQLARTAEPALLIGRLRTIPGIGILTATALVAAVGDVQRFPSGRHFASYLGLTPREHSTGQRRHLGAISKQGDTYLRMLFIHGARSVLHHAKSKTAPATDRLRTWALQVERLRGHNKAAVALANKLARIAWAVWRSGNDFTAAAAV

SEQ ID NO: 137039 - protein, 354 aa, unidentified
MPNSMTSADVTLGVDTHADVHVAAALDHRGRLLGTHVLPATPEGYASLEAWAAGLGTVERVGLEGTGCYGAGLSRWMRRRGHQVIEVNRPDRQMRHRKGKSDALDAEAAARAVQAGVATAVPKSGDGAVEMIRALRVARRSALKARTQAVNQLKSLIVTACDSLREQLRGLHRTELIQTITRWRPGTAPDSLTSVTKLAMRSIACRYRQLDEEISELDRHLRRLVDQAAPTLTAVKGLGTGTVASLLIAVGDNPERLRSESAFAHLCGVAPIPASSGKTNRHRLNRGGDRQANHALYMIAVSRMAWEPRTRAYVARRTAEGKTKPEIIRCLKRHIAREVYRLLVPRTPNPAATA

SEQ ID NO: 137040 - protein, 425 aa, unidentified
MNYKQNEKINQVKESTLVVGIDIGSTTQYARAFDWRGIELGKVFPFSNSREGFESFKAWMQHLQDKYKKLDAIVGIEPTGHYWFDLGAYLEDEGILLVMVNPYAVKQTKELDDNSQSKNDRKDPKVIAKLVTEGRYSAPYTPDGVYADLRIMVANRKRLIREMTQIKNRFARWFAIYFPEYTDVFGDYEAQSSMLLLKKVCTPEAIVELGAEKINQIWRDAKLRAVGMKKATTLCETAKRSIGLKKGSSAAQYEMKLLLEDYEYKKAQLDAVMEEIEKLCRKIPESEQMLAIKGIGVITVAGFLAEVGDVRRFESPRQIQKLAGLSLRENSSGKHKGQTTISKRGRSKLRAVLFNAAIPLIAKNPEFKSLHEYYTTRANNPLKKKQSVIAISCKLIRVFYAILANGVTYDAQKMLSDIHRQPQAA

SEQ ID NO: 137041 - protein, 448 aa, unidentified
MAAHSVSQIPAMVVPSQLERHWQQAFRQRWQAVAPAQWRCIGIDVGKYEHVAVAYDGLGQLLARPLRFGIRAADYQALFAWVATVVPDPAVTPLFGLEPTGHYYEQLVYELAQKYGPKQVYIVQTTDVARRRADWNQGTFKNDEVDAAIISELLRQGHGRPYHPDEGAYLSLYQLERYRWAREQASTRLKNQIVGHVDRLYPGLVISDQAAAERYQPLFRNLWANDTPRRLLLLYPEPRDLRSTDVETLCQRFRMADYWMTRPYAAKILAAVCALPLPDAELAARRSTFLQQDLASLAYVEGQLAEVATEMVDLLDLTWGLWLRPTGVDPLRLVCLVATIGDMRQYHSARQLFGRSGLHSGCHDSGTRQQRGQGERMVKPGDRHLRRQLLRFTLSMVAHYPTLQTYRNQLLQRGKRKITANIAVARKLCGMLYTVASQERPFDPTRLA

SEQ ID NO: 137042 - protein, 530 aa, unidentified
MVTKFKKRKFAGSKKRFIGRPAGQIQERVQAVGPEHFGIVAVDCAKRRSKWMLCNFYGKVIVEPTVVEHTAGALRVMTQLFAEACRQEELTDTIVAIEMTGIYHKPVQRAFRKAGFDTRIVHPFASSHYRRPLHPDAKTDDHDLEAIFHAAVKGYGLATLPVGEAYQSLQAVSRHRHNLVKQRSRLMVQMRRLLHQTMPGFADLFEDDKLFHKSIALPIALEFSSADAIRQAGVGGIEGHLTKTKVRFQTRTIERIVAWAGAAAEPSELASLHTRQWQQLNEVRRLFDEQVAAAEREIAAFLVKTPYVLLLSVTGINVVSAGRLAGEAGPIEHYASARAINGRAGLYPSRYQSDEVDHADGALVRQCNRQLRGAAMLVAENLIKCHPHYRGLSALWAQQKVDPRDRRCRIANRAMRMVYQLVGGRQVWRGQGVEREYLLAKLQEFHRVHHTPIDQSIRDLNEAFVWLPKSAYADEAKPLSELSRRKHRGPQRLGDLLIPLLIRLGIGREELGVPDEETVESTTSEARSSG

SEQ ID NO: 137043 - protein, 344 aa, unidentified
MFYIGLDCHGKWTTAAGLNPETGESLSLERVSNEPGEMAKALEGLEGPLYGVMESGTNAWAMYREFLPIFERLTVVDPSGVWDRRSDRQAKTDRLDAMRMAQMLYRGQIKGLYIPDEVTQDLRVLVRAKVRMSRWVTRLTSEIGSVLKSWGYVGNRSLLSKSGKAQMGKVQLPNHSAKVLKLWSELLEKAQEIEDELQAAIEEEAANDPECAILQTIPGVGAFTSLLVRAEVGDIARFGKAKNLVSYIGLSPRVFQSGESCHYGGLGNWGNRWLRYALGLLAQRVAASKRESCLRQTYWRVSFRRHRNEAKIAVARKAARIIHGMLSEGEVWNESKHRRAKAAA

SEQ ID NO: 137044 - protein, 321 aa, unidentified
MSDQHCVFVGIDVSKARLDVCVLAGEQRESFAADNTPGGVTSLVERLARQPMAALVVIESTGRYERRCAAELMDGGFEVAIVNPRRPREFARATGQLAKSDRIDAFVLAQFGKLIGPRPSVKPRENQLLLDELVARRRQVVQMLAGERMREQQAFDKRIVARIRKVMRVLDQQREDLEREIADLLDRDDDWRGKLHLLKTVPGVGEVTAAALIAELPELGQLNRQQIAALVGVAPFCSDSGQHRGQRHIRGGRPALRSVLYMATLTARTFNPLIRATADRLTRGGKPFKVMMIACMRKLLTMLNTIVRTGQAWRAPTPALA

SEQ ID NO: 137045 - protein, 321 aa, unidentified
MNPVSCVGIDVAKAKFDVALLKPDGKYRSKVFSNNPEGFRQFLDWLEKQEALEAHLCMETTGAYGRSLARFLAQQQLLISVMNPALIHAFGKTELSRAKTDKADARLIARYCQMHRPAPWVPPAEAIVTLQALVQRLEDLLGMQNMENNRLEMAEPAARASIEALLLTIHQQIDAVRRQIQDHMDDHSDLKSQKALLLSIPGIGEATAARLLAFLSPLTRFHSVKQVVAYAGLNPHIRESGQWAGKSHIAKAGNVLLRKALYLPAVVAKRYNPVIAVFCDRLLSRGKCPMQVIIAAMRKLLHIAYGVLKSGQPFEPEKALA

SEQ ID NO: 137046 - protein, 429 aa, unidentified
MNYNTQNAKIASITEKTLIIGIDVGSETHYARAFSWRNYEYSKKPFAFSNDEAGFAAFKEWMDDIAEKHEMEVIIPGMEPTGHYWLNLGAYLQEQGMKPVHVNPHHVKKSKELDDNNPSKNDRKDPKTIAGLVNEGRFSYPYIPTGIYAEIRNLSNLRIQTQEEITRIKNRMARWFSIYFPEIKDVYRNPDAVSGLMVIKQAPMPCDIRELGVEGVNKIWRDARLKGAGIKRATTLVTAAEHSIGNTEAPRSARKEIRNLLEDYEGYKKRMDELMEEIEKTLSEIPYIDKLMKINGIRIKTVSCFIAEVGDIGRFDNPKQVQKLAGYAIVADSSGKHNGESRISHRGRKRLRYALYESAISVIGKNKEFKEIHSYYRTREKNPLKKMQSVIAVACKLIRIFYTILTKGVDYDGQKMLNDIVRPEIQPAA

SEQ ID NO: 137047 - protein, 424 aa, unidentified
MSKKKSRVAGLEALYARVCGLDVHKKVIVACVRILDAKDGTVQSTLRQFGAMTADLKDLRGWLGEFKVTHVAMESTGIYWQPVFNLLEGHFKTWVVNAQHIKKVPGRKTDVKDAEWIAQLLQCGLLRPSFVPERQQRELRDLTRQQTKLVQQRNSVDNRIQKVLETANIKLGSVASDVMGVSGRKMIEALIGGEKDVTVLAELAQRKLRGKIPELQRALEGELTEHHRFLLSRLLGQYDFLEKEITGVSERLGAVAPPSFRAAVEQLDAIAGVGERGGRALLAETGIDMSRFPSHKHLASWAGQCPGNHESAGKRRSGKTPPANRHLDAVLTEMAHAAVRTKNSYFKAQYHHLAGRRGKKRAIGAVKHSLLVTVYFMLRDNKPYKDLGVDYFDKLNPQQRIRYHVRKLQQLGQEVELSPMAAAA

SEQ ID NO: 137048 - protein, 371 aa, unidentified
MADIDGVAGIDAHKHTFTVAVLDGRGGRCAIESFPTSPDGLTDMLALLDSFGFAIGRIGVEGSAGLGRHVAGFLVAAGYDVREVQANRTAERRRRRRRHKTDREDAEAIARETLADPDLPPAGKQRRPDPCWDELVAVRNRRKSLIGQRVRLLNEAEAVLTGLPLGLRAALPQTSRVRPRLRALQQGVASSVQVTAADRVNLAWLVEAAGDIARLDARVTELDKKIPALLGRLGCTLAEEYGIAAVGAMDLLVEVGDPTRFATEAQFARWCGAAPVAVSSGEGDQAPLHHRLDLAGNRQVNSTLHVMHVTQVRSYPPARDYIAKKRAEHKTKREARRAHKRHLANVVIRRMWADHAQRFETPANLATPAAA

SEQ ID NO: 137049 - protein, 351 aa, unidentified
MEEYIAFDSHKRYTWVEREEVASGKLRQFRLAHAPGAIRNALVGCAAGTAVAIEATANWYWITDEIEQAGLQPRLVHPRKAKLMMGLTNKTDRLDAHGLNQLQRNKTLPTVWIPPGPLRELRELTRTRVVLVAQRTRWKNRITATLTKWGLPASEYSDAYGKSARGELQTRIESLPTQTRWVVQQMLAQLDVLSEQIRQFEQRLKELVEVTPEMQRLESLPGVGEILAATIALEIGEIGRFLSAERLASYAGTVPRVHASGDRVRYGRTRVDVNRYLKWAFAEAANSVAVNYKRRPERHVSRLYARLRAKKGHSKAVGAVARHLAEATFHVLSGRQDYRDPAVAVGRTREV

SEQ ID NO: 137050 - protein, 407 aa, unidentified
MLFVGDDWAEDHHDVEVQDETGRRLAKARLPEGVVGVARLHALVAKHLGEDGEPGQVAVGIETDRGPWVAALVAAGYQVYAINPLQVARYRERHCTSGAKSDAGDAHALADMVRTDRHQLRPVAGDSGAVEGVKVLARAHQNLVWERIRHVLRLRSALREFFPAALAAYPDLDAPDTLQLLAAAPDPASAAGLSVEQVAAALRSARRRGVPAKAAAVVAALRSKQLRQPEALSAAYAASVRAQVAVLTTLNTEIARLEARLEADFGQHPDAEIILSQPGLGPVTGARVLGEFGDDPDRYADAKSRKNYAGTSPITRASGKKKTVQARYVHNDRLLDALHSQALSALSGSPGARAYYDALRARGAGHNAALRQLANRLVGILHGCLKTRTLYDEAKAWAHHTTGQAAA

SEQ ID NO: 137051 - protein, 382 aa, unidentified
MPAYADPTPQPISADTIFLAFELSGTSWLVALHAPDADKVERHRLPAGVAAEVLGLIARTKARVTRRLGTTPRVACCYEAGRDGFWLHRVLEAEGIASHVMDPTSLQVDRRARRAKTDRLDAQALLRALMAWSRGERQVCSMVRSPSPEHEDERRLSRERGTLLKERLRLSNRIKGLCAAQGIYDYEPLGADRRDRLARLVTGDGRALPGRLAAEIGRQLDCLELVLRHLAEVETVRDARAAQARKEGGSKLATLLRLKGIGPEVATVLELEVFHRHFANRRDVAAYAGLAPSPYASGGTSREQGISKAGNRRARKALIELAWLWLRHQPESALARWYRDRVGTASGRVKRIAIVALARKLLVAIWKYVETGLVPAEAVVRT

SEQ ID NO: 137052 - protein, 310 aa, unidentified
MDAIVVGIDVSKNRLDVAVRPTGEVFAVVRDAEGLDALVARLKPLAPVAVAVEATGGYETVVAASLAAADLPVVVVNPAQVRSFAQALGKRAKSDPIDALVIAHFVEATRPEIRPLPDAETRLLGDLVSRRRQIVGMITAERQRQKILTGKRLQRSIARLLAALQKELSSLETDIDQAVRGSPAWREKEDLLASVPGIGKIIARTVMAELPEIGTLDRRQIAALVGLAPWTRQSGTWKGKSFIGAGRAAVRAALFLGAMVAARHNPELKLFRDRLVQAGKPKLVALVATARKLLTILNAVIRDRKPWQPA

SEQ ID NO: 137053 - protein, 422 aa, unidentified
MSYCPVAGIDVSKRFSDMCILSPDNKIFAQEKIYHDEASINRANALLQKAERLFFRKPVIVMESTSHYHSILFQFFSEHGYDVIVVNPLQSNSMKDFSIRKRKTDRVDAFKLAMMYRTKTLRPSQIPQTATRALRQLCRHRAELLNDVSSYKNRLTALLDQTFPGYDKVFSDVGGVTSCAVLVRFPTPTILLVEEESELVEVIASASKSGYSFAKKKAGLLISAAQKAQAWGIHSCADETLIVCTIQMLRTLSESVLQIETAIDNLLAQIKEMRNNVSLLQSIPGIGSHSAALLLGEIGDISLFKKPKQLAAYFGLDPTERQSGSFRGTKNKLSKRGSPYARAALHMGVVNSICKRGKDSAANPVLLSYYEKKCKNKPAKVAQAASMHKLVFIVFAVLRDQKPFELKTPEQHAVEQGFVKAA

SEQ ID NO: 137054 - protein, 355 aa, unidentified
MDKAKYIGMDVHKETVSIAVLESSGKLVMESILETKASTIIQFFRGLRGELHVTLEEGTWAAWLYDLLRPHVTEVVVCDPRNNALLKVGNKSDRIDARKLAELLYLDRLKPVYHGEQGVRTLKELSRSYLAISGDQARVMTRIKALYRSWAIPCAGKQVYAPRCRSEWLGKITEAGVRRRAEFYYQQLDALRGLRQQVRRELLAESGKHPASQLLCGIPAIGPIRAAQLIAILQTPHRFRTKRQLWAYGGLGIDTHSSADHRYVDGQLQPSKRHVSLRGLNRNHNHELKNIFKGAAIIAATKPGPFQEFYDALVAKGIRPEMARLTLARKIAAITLILWKKGVRFDAQHLKPQTA

SEQ ID NO: 137055 - protein, 429 aa, unidentified
MKIIYPRVCGIDVHKQFIVAVICISESVEPIYLKKRFSTFHNDLIRFREWLIQNDCQNVCMESTGKYYIPVYNVLESHISNIVVANPKWVRAVKGEKDDDKDAKWIADLFKFDIVRSSFIPQKDFRILRELTRYKYKLVNMRSSEKNRFQNALTSGNCKLDMVFTDVFGKSASNIIDLILSDNPYTDEDILSKVHKKCKASPDMILDSVNGTDLTPVQKSRIELVNDHIKQLSSNIQRLDKLIDLMIEPYEDYISFLCQIPGVSRNSAIIVLSEIGVDMNQFTSTRRLTSWAGLTPSSNQSAGKKKSVRISRAGVYLKPCLVEVAHAAVKDKNHPYYANKFNKISKRRGKKRAFIAIARKILVAAYHMLLTGEIWNPADLAEVETPVEQRIKYVKNNLKSDIKQLLDIGLTVEELTLMIQQNANIIATQ

SEQ ID NO: 137056 - protein, 449 aa, unidentified
MHIRWGVAPRAPVQGTIRHRGGLAAKGSEGVVTEDVEWFAGIDWASQTHQVCLVDAGGKIVGERGFAHGGAGLAELCSWLLTMTRAAPTAIAVAIEVPHGPIVETLLERGFQVYAINPKQLDRFRDRFTVAGAKDDRRDAHVLGDSLRTDRHCFRRLSAENATVIELREWSRMSEDLQQERNRLANRVREQLWRYYPQALAISDDLAADWFLQLWAAAPTPATARRLRESTVEGILKRHRIRRITAAEVLASLRQKPLTVALGTAEAASAHIRTVAHRLRLVNRQIKQAHQRLDALSDRIAENEGDSDATGQKSEQRDVAILRSLPGVGRIVLATLLAEASEPLRRRDYHALRTLSGVAPVTRRSGKYCIVVRRQACHMRLRSAVYHWARVATQHDQRSRHRYAELRKRGHSHGRALRSVGDRLLAVACAMLTRRTPFDPDYPVKQMAA

SEQ ID NO: 137057 - protein, 412 aa, unidentified
MKIVYEICGGIDVHAKMLVACLLLANGEKEIRSFSTMTDDLLRLRDWLVSAQCTHVAIESTGVYWKPVFNILEDALTVILINPEHARALRGRKTDVKDAEWLADLLRHGLLKPSFIPPPEIRELRELTRYRESLVREQTAVANRIQKVIESANLKLAQVATDALGASGRAILWALARGETDPVKLASLAHGKLKAKRPQLERALHGRLTPNQRFVLRELLQRWEELEAADRRVTKEIDRYLQDHPKLARARDHLDTIPGLGPRAAEIIVAEIGVEMKVNFGSDAHLASWAGICPGNKSTGGKRLSGRTRKGNTYLRAALVQAAWGATMKKNCYLSSQFFRLVKRLGRKKALVAVAHSLLVIIYHVLQCDQSYTELGGDYFDRHHVGQQREYFIRRLQMLGLKVSVEELPKAA

SEQ ID NO: 137058 - protein, 344 aa, unidentified
MTYYAGFDVSLRTVNICVIDDEGELVAETKLASDVQDIVAYLDELDLDIESLALEAGTLTQYLTYGLQSAGFEVICMEARQVKGALSAMRNKTDKHDARGIAQILRSGWYSPVHVKSIDSHHIRMLLSSRRAVLSKCVDLENEVRGLFKIFGIKLPPKLGHGAFDVTVRAIIETDENLSHALLPLLEARLALYRSFRELDNRTRKMANKDTVCQRLMTVPGVGYITALTFKAGVDDPSRFKKSRTVGAHFGLTPRRSQSGEMDFDGHISKAGDADVRCALYTAANAMLTRTAQWSSLKAWGMQIARTRGHRRAVIAVARKLAVILHRMWIDDTQFRWGTEVARS

SEQ ID NO: 137059 - protein, 337 aa, unidentified
MKNSSQSMEFFVGIDVSELTLDVTAIHTASKSKKYIQVENNDSGLNVLNHWLHDMPGFAHAQTVFCFEHTGMYTRVLLDYLLSQSANVWMESSLQIKKSLGLNRGKNDKIDSCRIAAYAYRFSDRATFVENNSPEILLLKDLLSARNRLKKSLQQISVTIKELTKVDFPQGKEIEALNLHAIRGLKASIEQIEEKIHQVITSDKHLKEVYQLITSIPGVGFILSVKLLVYTKVFTCFDNVRQLACYCGVAPFEYRSGTSVKGKTGVSKFANMDLKATLHLAAISAIQHNVELKKYYERKVEEGKCKMSVINAVRNKLLARIVAVVHRGTPYVQLTNG

SEQ ID NO: 137060 - protein, 347 aa, unidentified
MDYIGIDLHKTSSQVCILTEDGELIERRIKTDKESFDKLFADRPPARILVETSTESEWCARHLEALGHEVIVADPNFAPMYATRDRRIKTDKRDARALCEACRLGAYRPAHRTSDRQRDVRAHLLVRETLVRTRSKYISFIGALARLEGCRIKAGPSPSFARRVEVAGLPAHTLAQIEPLLVMLKALNEQIKAADKRVEEIAKADKVVQRLCSVPGVGPVVATTFAATLDDSSRFRGAKHVRSYLGLVPREYSSGERQRRGRISKAGSVRARSLLVEAALSLLRWKTERTKALHEWWARIAQRRGKATAVVALARKLAGIMFAVWRDDTEFDPQLLRPGGAPMRPVA

SEQ ID NO: 137061 - protein, 401 aa, unidentified
MNCVGIDVSKGKSMIAVMRPLGEVVIPPFEVGHTESELCELSKLLGNLDGETRVVMETTGNYHFPVASFLYDSGFYVSVVNAMLVHSYGNNSLRRAKTDKKDAIKLANYGLDHWLTLPRYIPEDDVRLMLKTTYRQYQQCAKVQTMLKNNLISLLDTAFPDANRLFASPARADGSEKWVDFVAAFPHCECVCGLSERVFTAKYQKWCRKHGYNFNQDKALDIYASACGHFSVMPRTDTAKLLVVQAVSQLRAASASLAALRNEMQSLAASLPEYPVVMGMFGVGPALGPQLMAEIGDVRRFHSKKALVAFAGIDAPPYQSGQLEVRSRSISKRGSSALRRTLFLVMSVVLQRSPADEPVYQFMDRKRAEGKPYRVYMMASANKFLRIYYATVKQYLDSLEV

SEQ ID NO: 137062 - protein, 367 aa, unidentified
MVHYIGLDVSLKQTSICVVDQVGSVVREGVVDSEPEAIAAFVRSKAPGAVRIGLETGPTATWLWSELKQLGLPVICIDARHARAVLKMQINKSDRNDAAGIARIMQTGWFKEVRIKDLDSHSVRALLASRALLVKIKRDVENQIRGLLKNVGLVIGRAKFNVFAMRAEELIEDRPELIAVVGPLLKARQAIEQQTDDLDRQVLKLARYDAQVRRFMTVPGIGPITALCFKATIDDPTRFKRSRSVGAYVGLTTRRHASGEIDWTGRISKCGDAMLRSYLFEAAGVLLTRVPKWSALKAWGMRLAKQMGSERPQSPSRASSRSFCTACGSTEPSSTGRRRRQPRRHIRRSQVPATRREMTSLPGRWRW

SEQ ID NO: 137063 - protein, 351 aa, unidentified
MNSYPAGPTWTVGIDLSDRYTSFCVLDDQGEVQEEGKVRTTPEAFSRRFAGTEPCRMVMEVGTHSPWASKLLSGQGHEVFVANPWKVKLISASITKTDRSDAETLARLGRTDPRLLSPVVHRSVQAHADLEVINARKALVGARSLLINHVRGAVKPFGARLPTCDAHVFHKKVADAIPPDLKPAIDPVLSAIATLTERISTADARIEALGRERYPETTVLRQVPGVGPLISLAFVLTIDDPHRFKVSRQVGPYLGLVPKQRESGQRSPELRISKAGNKYLRELLVNGAHYILGFRGPDTDLRRWGLPRAGAGKAAKKRAIVGVARKLAVLLHRLWVTGEVYVPVRSEVAAA

SEQ ID NO: 137064 - protein, 345 aa, unidentified
MKITTVGIDLAKNVFQVHGIDERGQAVLRKQLRRAQVAVFFGNLPPCVIGMEACASAHHWARTLQRFGHTVRLIAPQFVTPYVKTNKNDVADAEAICEAVGRPNMRFVPIKSIEQQAILSVHRVRQGFVKARTAQANQIRGLLGEFGLVIPQGIINVAKRVPEILEDASNELPVPFRHLIDRLTKHLKELDRQVKEFEGEIIAWHRSSELSRKLEKIPGIGPLAASALVASIADAHSFDNGRQVSAWLGLVPRQSSSGGKPTLLGMSKRGDAYLRTLLIHGARSAILAAKNKVDNTNGWLTNLLQRRHPNIAAVALANKNVRTVWAMLAHGREFKADYVPTRMAA

SEQ ID NO: 137065 - protein, 465 aa, unidentified
MKLRLGIDVACRADHQASLADETGTFLFTGRRFRTTVDDLEALWSSLPEADEVLVVMEPTRNAWVPLASWLRARGARVVLVPPEQSADLRAYYSKHAKTDRLDSKVLAKVPLLHPEGLREQTDDGPADPLRRAVRRRSSLVKRRTGTFQRIDALLEIAGPAWADVLGAGDCSKTALTVLARTGADPAALRRLGRTRLAALLVKTSRGRWGEEKADAILAAAAETVALWAGGGLGFAELAADLAGEARHALALTAEIETLEERIETLYTQADPGGIFLSGPGLGVTLAAGILGRLGDANRFASLAGIRAFTGLVPSIAQSGTAEKHGGPTKAGDAGLREALFHAADNARRVDPILAARYRDLVVGKQKHHNAALCTIAAILITRLAACWRHGTRYELRDTDGRVITEAAGRQICATRYQVTAADRAKVRSTRRAQRLKNGTGRRSKESPGAPATGPSSRHATAGAA

SEQ ID NO: 137066 - protein, 440 aa, unidentified
MKPLPVLDPKAAAVDVGSEKLHASVAGDTPKVFGTFTRELESLREWFKGQGVRTVAMEATGVYWLYLYEVLEAGGLEVVMVNGRYVQNVPGRKTDMSDCQWLATLHAHGLLRGGFVPSADIRRLQDYQRLRADHIIGAGSQIQKMQQALERMNVKFHDVISDLTGVSGLKVMRAILEGERDPARLLTLCDQQIVKKKSLAVQESLRGCWREEHLFALRQGLELWETFQQKIAACDRELQKLLQQLAGPPGAEGSSPLKLAAAKDPGKNAPAIERFQELLARICGGRDATQIPGLGVYLVLQLISEVGTDMTRWATEKHFTSWLGLAGGRKQSGKRKGTVKAHRNRAGRMFCAAARALAQSVDKALGGFYRRLRGKVGGLAANVALARKLAQLFYRLLRYGMEYVEKGLKEYEAKVLATETYLLRKLAKKQGFALIPTLAK

SEQ ID NO: 137067 - protein, 344 aa, unidentified
MTDVSILAIDLAKHGFQVCAVNAEGVVLYNRKYSRGKLSELLASHPRCLVAMEACATSHYWGREAQGHGHDVRLIPPVYVKPFVKRGKNDANDAAAIAVAVRQPDMRFVAIKSPEQQAQAMLFRTHQTFTRQRSQLLITLRGHLAEHGIIVAKGNAALLAYEDVLEAQPDLVPDLVLEAARFYFHHIAQINTTIATFERQMRDTAKRDDTARRLQTMPGIGPINAAAFLAFAPPMESFRKGRDFAAWLGLVPRQHSTGGKTKLGRVSKMGQADMRRLLITGATACLRWAVAKGIDPQSWLGRLLARKPFKMVAVAMANKMARAMWAMVTKEQDYSGGLVQYAKA

SEQ ID NO: 137068 - protein, 458 aa, unidentified
MAHRKKKIGAQLVEDEEYQLRYERVAGIDVAKGKADVCTRLPPAREGGRRVSRTEEVAATVTVILALAARLLADGVELVSMESTSDYWRIWFYVLEAAGLNVQLVNSSHARQLAGRPKTDRLDAQWLARLTEMGLLRPSFVPPAEIRALRDLTRTRLQLVHDRTREWQRLEKLLEGALVKLSSALSSLARVKSARVILEALAGGERDPRVLAGLAARQVRAGRAGIEQAMEGMLYGDHHGRLTRIHLDHITFLDRSIAAIEDDVAAALDAIPAAQGIDAAGTRSPDPGPGAAVLPAAERLAEIPGVSLDLARAIIAETGLDMTRFPTAAHLVSWAGLTPVARQSGPRSRKPGKGHGDSYLRGYCTQAATGAATTDTFLGERLRRLSRRLGGSRARCAVGRSILVIIWHLLASPEARYTELGPGWHARKTDTDRRTRSLLNQLRALHPDSDITITEPAA

SEQ ID NO: 137069 - protein, 386 aa, unidentified
MAHSTNIAPPSVDYDQTLILAIELSNKSWVVAAQVPGLSQTKAKRTIEPNKNDLLAAIDGYRIRAAAAGHSVKRVITSYEAGWCGFWLARWLMAHDIEVHVVQPSSVPVDRRMRRGKSDGIDAELLLRTLLAWLRGEPRVCSMVPIPDEADEDARRCVRERSELVSERVGLVNRIGAVLATLGADDYDPLLQSRRRRLTELRTALGDPIPPNALGKIARLLTRLELVLAQIAELELERDAIAKTDAPDQAGKMIQQLISLRGIGVQSATVLVREAFVRRFANGKALGSYAGLTSTPYSSGGIDREQGIGKAGNRRLRTAMVELAWLWQRYQPGTAQAVWFRERVGSTGRRLRKVMVVALARKLLIALWRFVIDGVMPEGAVTKPSI

SEQ ID NO: 137070 - protein, 365 aa, unidentified
MTVIHYIGLDVHKKTISYCIKAADGRIVQEGKLAATRPALHEWAKAQRVPWHGAMEATLFSAWIYDTLKPYAERLVMGHPARMKAITAGKKKSDSIDARTIADLLRCDLLPTCYVMAPEMRDLRRLLRYRNMVVQQSVRMQNKMAGLLMETGTAFHKDKLRGKKYFSQLIKSLEEVPESVKDLLRMSRGSMEMFESAQKQIINRLLSEPTLQQRVERLMSIRAVGPITALTWALEIADPHRFSCIAEAVSYCGLTAAFRSSAGKQQRGPISKQRNGWLQTVLIEAAKLAPRWNPQLAALHAHELERGHANRATLQVARKLVAYLLAVDKSGQPFQVHTPPPPVANSAKKKPARKSKKAVALTPAA

SEQ ID NO: 137071 - protein, 343 aa, unidentified
MAEIATVGLDLAKNWFQVHAADAQGRPVLRKKLARSKVLEFFASLPPCLIGMEACGGAHYWARELIKLGHEVRLMPPQYVKPYVKTNKHDAADAEAICEAVTRPSMRFVPVKTVEQQTMAQLHRIRQLLVKQRTMHVNALRGHLAELGIVRGQGRGKAGELVRLIEAAADDGIPAKVRQQLRHLVELLRDLERRLAELDRELGELAREDPVARRLATIPGVGPITATALAMTIGDIGRFRSGRHLAAYLGLVPKQHASGGKERLGRISKRGDTYLRSLLTHGARAVVRVVRARPDPSPGWIGRLLQRRPVNVAVVAQANRTARIVWALLTKGEDYRRPTAAST

SEQ ID NO: 137072 - protein, 332 aa, unidentified
MENNCFIGIDVSKNKLDICVLQGKEVLQEDVIDNTPSAIHRFLVDMAEKRGLDLCSCLVCAEHTGNYTYPLTLACRDLGCRLWLENPAQLKYSSGVHRGKNDRVDARRIALYASRFNDKAMLYHELTPELERVKQLRQERSLYRSDLSKYKGQLSDQKNFMESTVYKAKAIPLKHVIKELEKMIDVVEREITGIIDSCDVLKRQMKIITSVEGIGRETALCFIVETAAFTRFTDSRKFACHAGIAPFQYTSGSSVRSRNRVSRRANKQVKTLLHMAALSITRKKKSELKVYYKRKVEEGKNKMTVINAIRAKLVARVFAVIRKNDIYSINFT

SEQ ID NO: 137073 - protein, 340 aa, unidentified
MTVYAALDVSMEKTAICVVNADGKTVLEASTSSDAEAIAMCLEPYCAELDQVGLEAGPLAEWIARGLEYHGMRVVLMETRHVRAALSAMIAKTDRNDARGMAQLLRSGWFRPVHVKTVPAREQRALLAARSTLVRRHRDVENSVRGLLKGFGLRIARALRGRWDNAVREAIAGNSVLLSIIDPLLVARQAIRDQLAILDKRVRDVARADNVCRRLMTAPGVGAIVALSFRAAVDQPERFKSSKAIGACFGLTPRKYQSGESDRDGAISKAGDASVRLALFEAAHVILTRVSKWSKLKAWAVAVAKRRGAKRAKVALARKLGIVLHRMWIDATDFRWGQAA

SEQ ID NO: 137074 - protein, 373 aa, unidentified
MKSTRFVGLDVHAASIAVAVAEPNGEVRALGTIPHEPEALRKLLRRLGAPQSLRVCYEAGPCGYALYWQLTQLGVAGTVVAPTLVPVRAGDRVKTDRRDAAKLARSFRSGDLTPVWVPDAAHEALRDLVRAREAAKRDQLRARHRLQKFLLRHGCRPPAGVTPWTQRFRQWVGALTFANPAQEATRLDYVTEVAHAADRIERLERALDAAVAAVPVTMRRLIEGLQALRGIARVAAATIVAEVGPLSRFERPRQLMGYSGAVPSEHSSGPRTRRGHITKTGNAHLRRVLIEAAWAYQHRPGLGPTLHQRQRHLSEPVKAIAWKAQHRLHSRYRRLTGRGKPKQHVITAVGRELLGFIWAIGVQVEREQAAAVA

SEQ ID NO: 137075 - protein, 356 aa, unidentified
MTDKPIVGIDVSKGWLDACVAGGAKVERIANDTQAVGAFLDRIGPGLVAFEPTGGHERMLAAALREREIPFIRVHPNDVTAFRQSRGVKAKSDPIDARLILAFVSDELSRRGWRSSVVGDDRLPALAARRRQLIEVLQAERCRLALAAIPAVRDSLELVLAALRHSLDALEAELNAAIAGDPQTAQLAQLLQTIYGIGPVTAATLIADLPELGLLTAKQIAALVGLAPQTRRSGTMRYREPTGHGRTGIRQALFNAARAAIRHPSPFKDFYDRLVSQNRRPGKVALIAVMRKLVITANAVARDRQPWHGLNQAMPQLSAVGTPSRPHGEPRARRAGRVKAVAAPGAGARSASLDAA

SEQ ID NO: 137076 - protein, 344 aa, unidentified
MIWVGLDVHQRFSRMGCFDPASGEVRDLGSVSNNASALEEALEELASPRTVVLEAGRSSYHMAGLLESIAEEVWIVDPGEVRRLQHTISKTDRRDAAALAWWAAKGVLKPQWRPDGQTMDLRELTRGKTALTRMSTQVRTMIRMLLARHGHECPHRDLMSERGQLWLEEVELEGHAGQMLAGLREILVVVQSKADNFERLVEQTSKQHPVAQRLRTIPGIGPFLSLALAVEIGDINRFPGPAQLRGYSGLVPAVYQSGDKDARGPLTKAGNKWLRYAAVLAAQRIGQMREPDPRLKRIFLSVAFRHGRNPGKIAVARRLLDLIYHLLKEGQDYRAPKPRAATTA

SEQ ID NO: 137077 - protein, 321 aa, unidentified
MTYVGIDVSKVTFVVAYSSVKTNKTRTFKNTVNAVHEFVQTISASEHNCVLEATGNYSALLVYLLSEAGITISLENPLKIKNFARVMLTVTKTDEIDARLIALYGEKMQPAPYKLRSDAILVLKQKRTVLRQLKKQLVATRNLKGSMEVLPFFDPKCKKTIEKTITFLEKQIKEMEEELASLAQGEYKKQMDLLTSIKGIGVTLAAALIVATGRFSYFDNAKQLTRYLGLSPTYQQSGTSVNVKGHINQNGDSNLRSQLYVAAFSSLRCNAECKACFDRLRSNGKPGKVAVVAVANKLIRQAFAVVTQGKPYVDGFKSEKP

SEQ ID NO: 137078 - protein, 368 aa, unidentified
MQKSIIFIGLDVHKNSIDVAIAEAGRNAEVRHYGTIGGGLDDLDRLVKKLASPGKELHFVYEAGPCGYEIFRSLTDKGFDCAVVSPAHIPKSPADRIKTDRRDAMTLARLHRAGELTYVFVPRTDDEAMRDLTRAREDAKKAQRVAQQQLGGMLLRLGFRYSGNNWSLPHFRWLANQKMPTPAQQVVFQEYINAIRDTIARVDRLTKQIESLVLDWRMAPVVNALQALRGVSLIVAATMVAEIGDLTRFDHPKKLMAYLGLVPSEHSSGEKKKQGKITKTGNGHARRVLVEAGQAYRHPARITRPLLKRQETLSQEARDIAWKCQVRLCARFRRMTAKGKNHNTIVTATARELAAFMWAIANETPIAA

SEQ ID NO: 137079 - protein, 283 aa, unidentified
MHSENIAAYVGLDVHKETLAVAIAAPERLGEVRYYGTINNEAQAVRRLFQKLQGLYGNILSCYEAGPCGFRLYHQLTAMNIKCQVIAPSRIPKSPTDRIKNDHRDAISLARLLRAGELTPVWIPDLTHEAMRDLIRARAAAKRDSRVARQRILSMLLRTDKHYAGKHWTGKHRTWLANQSFSQPSQQIAFQHYCQSLEQIEDRILQLDQEISRLLPEWSLCNLVCQLQALKGVGQLIAITLVAELGDFSRFSNPKQLMAFLGLVPGEYSSGNSIRPRVSRTVQ

SEQ ID NO: 137080 - protein, 342 aa, unidentified
MLSRVGVDLAKNVYQLHGVDRSGKTVWKRRLKRHQWLKVLLDKAGPECEIGMEACAGAHHWGRELQSRSYTVKLIPPQFVKPYVKSNKNDAKDAEAICEAMSRPNMRFVTVKRVEQQDIQATHRIRAELITQRTAKANQIRGLVAEYGLVAPKHLSSLRAAIPCWLEDAENGLTVNFRTLLQGVWNDLLGLDDRVCEMDQVIRRLAENNEDCVRLQQIRGVGPMISTAMIATLGDARQYHKGRQMAAAIGITPKQHSSGDRDRLLGISKRGDVYLRTLMIHGARAVVARAKYKDDRLSRWVTNIATRKHPNVAAVALANKTARMAWAMLRNKTDYDPDFAMS

SEQ ID NO: 137081 - protein, 419 aa, unidentified
MEDIKAKKVKSINEKTLIVAMDIGKGVHHAYFRAPNGREMKSFPFSNSRDSFESMWTRICQFKAMQGLDEVVVGFESTGPYAEPMCHFLIKKPVRLVQVNPVHTKRLKELTGNSPNKSDQKDPRVIADIISLGHALSLVVPEGPAAQLRRLTQARERAIKRRTALSNQLQNLIFVIFPEFLSLMKDISCKSAIYLIKNYPTPESIVGLGLEGLAMLLKKISRGKVGRGKAEALLRAAEHSIGIKEGRQSLLLEIEYVVSQLGADTQFILSLENQMEHYLEQTPWSHSLLSIKGIGRVTVAGLIGEVGDFKKFHTVSEVMKLAGLDLYEISSGRHKGQRHISKRGRSLMRKLLFFGAINAVKSKGILHKPYHEMLDRGMPKIKALVAMARKLLRVIFALARDGSVYMENHGYQEPLKLAA

SEQ ID NO: 137082 - protein, 341 aa, unidentified
MDKELYFGVDVSKKTLDLAYYDGETIDWKNAHIKVSNDDAGFKKIGSWVAKVGKDFDTFLFCMEYTGLYNQNFRLWLESKEYIYGMVEPRKMHRFEPDLDDDQRSLDRIKTDELDAFRIAIYCEQNHKKILRNPSKLPSPVYFKLKRLLAERKQNTKQSTLYKQQLHDICAYDTDLSVERKKLLLKNMQENQKAIDKEIDSYMNEDTSIRKNYNLLTSIPGIGRIIALETIVLTENFTAISNPRKYACYIGIAPFKKESGTSVRKRTTVSKKGFSEAKADLSIAVLSAIRNNPSIRDYWIRKRKEKCGGIVLNAVKFKLVLRMFAVIKRGTPYVETDAYKN

SEQ ID NO: 137083 - protein, 356 aa, unidentified
MSRDIKYIGMDVHQEAIVIAVLNGSGKLVMETILETKGSSILQFIHGLRGELHVTWEEGTWATWLYDLLQPQVQEVLVCNPRRNALLKEGSKSDKVDARKLAELLRTGMLRPVYHGENGLRTLRELARSYQTIGKDLTRVMNRLKALYRGWGIPCAGTQVYAPRYREEWLSKIAQAGVRRRAELLYQQLDGLQALRRNLRPEFLAESRKHKAVKLLRQIPCIGPIRAARLIALMQTPHRFRSKRQLWTYSGLGIETHDSAQFRFVGGQLQRSKKPQQLRGLNRNHNHEMKEIFKSTATRASCGRGPFHDFYAALLAKGMKPEMARLTLARKIAAITLTLWKRGERFDAEQLKAQAA

SEQ ID NO: 137084 - protein, 420 aa, unidentified
MPNIEIGVDSMVKENFIYVGIDLHKETHTAVMIDCYNQKLGEITFPNRPADFPKLVTKVKKCNTDAKEVVYGLENAYGYGRPLAVWLIDKGYFVKDVNTAISHRQAKHRGAMYRKSDSDDAEAIALATLNMLDKLPDACPNDAYWSLGQLVHRRDNIMKQRTRLVNQLHEQLCIAYPSYKQFFNDISRPTALYFWEHYPSRKYLKGKSVEDLRTELVPVSHNRCSTKNCEKILDAVASDKVKNNAYQDARDMVTLSIVSDLQHYDSQLAEVDKMLEQMYKMLGCTLTTIPGVNVITAAKILAEIGDIKRFSNANKLAQFAGIASLHLSSSGKGKDLATKQGNRRLQATIYFLAIQMVQVSSKGTPRNSVVRAYYEKRKAEGKTSQQALICISRRLISIIYGMLKHGTEYRMPVVESAGEK

SEQ ID NO: 137085 - protein, 312 aa, unidentified
MTSTAIVGIDVSKRSLEVQIYGEEKGWKIGNDADGLGSFIEQMKVVQPGLIVFEATGGYESRAVKSLSEAGFAVAVVNPTRVRRFAEGLGILAKTDKIDAKVIAHFGSVVQPPVNGRQTPLEEQLAAFVERRRQLLVELTAEKNRLSTCPDCVRDDVEDHIAWLEERVDRLDADIQVCIGLKPEWLKRAEIIDSVPGVGIVTATTMVAELPELGQLNRQKIAALVGVAPFNKDSGPKKGRRRIFGGRSGIRRTLYMAALSATRFNPVIRAFYQNLLKRGKEKKVALTACMRKLLVIINSMVRKGEAWRFSPA

SEQ ID NO: 137086 - protein, 343 aa, unidentified
MAQQTIIGIDLAKHVFQVCIVTPQGTIKTNTTVARGKLLTLMARQPPALIFMEACGGAHDWARRFRAMGHEVRLLAPQYVTPFRRGQKNDPNDALALTEAGQRPNIPTVPIKTIEQQDLQALHRVRERLVKHRTAVVNQVRGLLLEYGIVIPQGMARLRKRLPRVLEEADNGLSFLMRDLLQSLQSELSALDTRITEVTSQLTRLSHELEACQRLQAMEGIGPLSATALVAALGNGHDFQTGRQVAAWLGLVPRQHSSGGTTRLGSITKGGNSYVRRLLIHGARSVISHVRDKPDAKSAWIRQLVTRLGVNKACVAVAHKMARVAWALLHTGEQYRKPAVLSI

SEQ ID NO: 137087 - protein, 416 aa, unidentified
MNAVGIDVSSRKSTVAVLRPLGEVVCLPFDVSHDADGLASLAEKLKALDGETRVVMEHTGRYYEAVAKALHEAGFFVCAVNPLLIKEYGANSLRRVKTDKADAVKIARYALDNWADLRDFTPMDAIRYDLKTLNRQFQLASKQRTASANNLIALLEQSFPGIRKCFDSPVRSDGTQKWVDFAHSFWHVDCVRKQPFAAFCERYRKWCKRHAYLFKQSNAEEVYALAKRTVVLTPKSKVVKVLVQEAANQLSSISRSVEVYRAEMDRLAAMLPEYPVVMAMYGVGKSYGPQLMAEIGDVRRFERKQALVAFAGIDPMPNQSGDKNVRSNKSSKRGSPYLRKTLFNVIRTYLQCAPQDEPVFQFLNRKQAEGKPFYVYMLAAANKFLRRYYAKLRDFFASLDTLQPVAPIPTILKATL

SEQ ID NO: 137088 - protein, 414 aa, unidentified
MEIVHTHCAGLDVHKKTVVAAIIVPDPKGGWHKETRTFGTMTSDLLALSDWLMEQGVSHVAMESTGEYWKPVFNILENNFEVLLVNAQHIKAVPGRKTDIKDAEWIAELLRHGLLKASFVPPLGQRELRELTRYRGTFVKERASLVNRLQKVLESANIKLASVATDITGVSGRAILQALLESQSSPEQMAELAKGRMREKRELLAKALQGQVKSHHRFVLTELLCQIDGLDETIVRFDEQIEAYCRPFEQVVQWLDTIPGVARQTAEVIVAEIGTDMSRFPSADHLASWAGVAPGNNESAGKRRSGKTTQGNHALGVALNHAANAASHTKNTYLSAQYHRLASRRGKKKAIVALEHSILIIAYHIIQRKEPYHELGGDYFDKRRPEATAKRLVQRLERLGFQVSLQQAPAPVAA

SEQ ID NO: 137089 - protein, 342 aa, unidentified
MEVKKVTKQIVGIDIGMGSFYACYKVRYQDNSIVIKGAKSFENTISGMKSFLLWCKKRNKSPKNPPVYVMEATGVYYENLAYFLYDNKQKVSVHLAQKLNYFAKSCNLKTKTDKVDSKMIANFGIEKDVETIGLWRPPSKEFKVIRDLSREHTSLKQDLTAAKSQLHAMDHAHATYKKVVVMKKQMISFYEKQLKTIEKEIKNLIKSDPKLQLKIKNIQAVKGLGFITIIKVLSEVNGFLLFTNIRQLVSYAGLDVVEKESGKYKGKTRISKKGNARIRAALYMPAMTAAKHNGALKLFYDRINQKRTIKKQGLIAVMRKLLVLIYTLWKKEEAYVENYQVR

SEQ ID NO: 137090 - protein, 360 aa, unidentified
MKKSSREREWQERPARTIGIDLGDRFSRYCVLNSEGEVIEEGRVRTQEEALRQHWEGEPSLRMVMETGTHSPWVSRLLSQLGHQVIVANARKVRAITENESKSDRRDAEMLARLGYCNPRLVAPIQHRSLERQRDLNLIRARDTLVRARTMLINSARGLVKSAGGRLPCCAADVFGKRVSTLLLGDMKEAVGPLVEQVTALTGQIRQLDQQIETLAERYPEIGLLRTAPGVGPVIAAAYVLTLDRVDAVAQSRSVGAFLGLRPRQSQSGDSDPEHHISKTGNLYLRRLLVQAAHYILGRFGPDSALRRWGLKLASGGKRAKKRALVAVARKLAVILHCLWRTGQSYQPFPTPTTASGSTA

SEQ ID NO: 137091 - protein, 322 aa, unidentified
MNKYNEIFGVDISKDVFDVYGSKSGHNQFKNAASGFMFFLKNLPKKSLVVMEATGYYHYRLAQFLFKQGVLVSVVNPLSVKRFIQMKLAKVKTDKSDAKAICEYGQINQVPLYSALSDVQSECLQLFRLLDSYLKKRTMTKNKLHGEDVLGIPSKHVYRSLKRNRKHLDTEIASIETKLLSLVKQDQQAQLTLLKSIPGLGVKTALFLIVITDGFTKFETAAQLCSYVGITPTIRQSGSSVRGRSSISKVGNKKLRNLLFLCSFSACKHNKSCREIYERIVNKGKSKKLALIAVSNKLLKQAFAIAKSGNPYDETHVSLLSK

SEQ ID NO: 137092 - protein, 387 aa, unidentified
MGQVIIGMDPHKRSATIEVINDREKVLAQGRFGTDRDGYQRMLKLGRQYKDRIWAVEGCNGIGKHIAQRLVADGETVMDVPPKLSARARVFDTGQGRKTDPVDAHHVAVAALRSKGLRQVAVDDVTVALRLLVDRRDGLGHARTDLLNRIHKLLLELLPGGAKKYLSAAQARALLNTVRPRDLVGRTRRRLASELITELVQVDKKAKAADKELRELVEATGSSLQDLHGIGPSGAARLIGDVADISRFASRGHFASWNGTAPLDVSSGDQNRHRLSRAGNRRINRTLHIMAVVQLRNDTEGRAYYKRKLAAGKTPMEALRALKRRLSDVVYRQMVNDARHAETGPGGHLGAALKSSAADLIPMIETSDKSLPGPAEPQPRTRLLAAS

SEQ ID NO: 137093 - protein, 375 aa, unidentified
MSDHSEAFVAFDISKLRNAVAIAEGARGGEIRFLGEFESSATATAKLVKKLAAKYQRLTFCYEAGPTGYGLYRQIRNLGAECIVVAPSLIPKKPGDRVKTNRRDALNLAKLLRAGELTAVWVPDRGHEAMRDLTRARETAMMDLRSKRQQVSAFLLRQGLHYSERKKTWTKAHMNWLASQKLEYAEQRLVFEEMMLAMRQAQDRLERLEQAIRVAVPDWSLAEVVTALMAMRGIDLISAATFLAEIGDLSRFQHPSELMGYLGLVPSENSTGDKIKRGPISKAGNRRARRMLVECAWSYQHPPRVGQEKQAKVAAAPRAVREIAWKAQCRLHGRYRALVRRGKLKTVAVTAVARELAGFIWAVSRAITAARVVAK

SEQ ID NO: 137094 - protein, 320 aa, unidentified
MKTSDNVSVTVGIDVSKLNLDLHVSSGLYDSFRNDGSGFSDIKKLLSKFTVSLILLESTGGYENGIVCYLQRLGYDVVVINPRFVRDFSRSLGRLAKTDKVDAELLSQFATVINSRGDRARFVRPLTDETRRYLGDMVSRRRQLVDLITVERQRKSVSSQYASESIEAVISYLRSQLERVDADISAHVSLYYSDLSDLLTSFKGVGSATVGVLLGEVPELGKLNRRQISALIGVAPFNRDSGQMRGRRRISGGRSLVRNSLYMPTLSAIRFNPVIREFYERLVKSGKSRKVAQVACMRRMVCILNAMLRDGTRFEMVYEV

SEQ ID NO: 137095 - protein, 356 aa, unidentified
MSVYLGVDFHARTQTVCWCDTSDGVIHQRTLDHEHDDVRGFYTQFAVPAVVGLEATGYARWFHRLLEALGHRLLVGDAYVIRKCALRRQKNDRRDAELLLDLLLHGDFPAVHIPPIASQAVLRLLRYRQRLVEIQTKLRNGVQALALNHQLRLGPKLWSKQGQQQLLALALDNTDVLQREHSLELLQQIRTRIRAIEKELTSRAEQDARVRLLRTHPGVGLLTSLVVVHTLEPVTRFDRARRVAAYCGLDPCESSSGETVRMGHISKQGNRLLRHLLVEAAQRAVHSKADADLRNFYFRLIARKKNAAVSITAVARKLVLRLYRMLRENIDYTEFRRRGREARCARKSASPPSGDC

SEQ ID NO: 137096 - protein, 338 aa, unidentified
MGLYGAIDLHSNNSVLVVLDERDQVLYEKRLPNDLGRVLEVLLPYRDQLVGVVVESTFNWYWLVDGLMAAGYRVHLANTTAIQQYKGLKYTDDAHDARWLAKMLRLGILPEGYIYPKEARAVRDLLRRRAQLVRQRTTNLLSMTNQFARLTGCGVSVRRLKQLSKAQIDEWVSDPNVASALRANLAVIRVLDREIERLEGEILRQAKIAAQFSPLLSIPGVGEILALTIMLETGDVGRFAKVGQFSSYARCVDSKRISNGKKKGEGNVKCGNPYLAWAFGEAAAFAVRFNPRIKRFFERKRSKANAPLAYKAVAHKLARPAYHVMRERVPYEERRAFG

SEQ ID NO: 137097 - protein, 429 aa, unidentified
MNSTQNKKIEQVKETTMIVGIDVGSEQHYFRAFNWRGIELTRKPVAFSNSMEGFNSFYNTIMELMQKSELEEALVGIEPTGHYWFDLGQFMGEKNIKFVMVNPHHVHKTKELDDNSPSKNDRKDPRIIAGLVRDGRYFYSYMPTGVYAELRNASNRRFVLVEEQTRAKNCLQKWIAVYFPEYKGIYTRIDAKGGLLVLKQAPTPEEITKLGEEGIIKIWKDAKLRGSGHKKAMKILNAAMRSIGLKAGLTEARMEIQDLIEDYELQTRRLERVNDLIKELCQQVRYADKLLEIKGIGITTVAGFIAEVGDITRFDSTKELQKLAGLELVADSSGKHNGRTKISKRGRKRLRYLLFEAAISVVGKNEEFKEIHRYYTTREKNPLKKMQSLIAVACKLIRVFHVILTKGVSYDASKMLKDIQHPGEQLKAA

SEQ ID NO: 137098 - protein, 460 aa, unidentified
MPLGRTPRQQRLDELACVHPNAAGLDIGSEEIVVAVPPARDPQPVRLFQTFTPDLHALLAWLLECGITTVAMESTGVYWIAIYELLEQAGITCYLVNAQHVKIVPGRKSDWNDAQWLQKLHMLGLLQASFRPDAEIRSLRLLARHRAELIRHRAPHILHMQQALKLMNIQLSEVLSDITGLTGQAIVRAIVAGERDPAKLAELRHPGCKHTEAEIIKALTGTWHAAQIFILEQNLQLYDFYTAQLSACDREMERYYQAMESRHDKDAPLPDLPKAKPGSRSKNEPNFNVRAQLARIVGVDLVGVMGLSASSAQTIITEIGTDMTRFPTVKHFCAWLGLAPRNDISGGKVLRSRTLKVRSRANQAFRQAAESVARSQSSFGRYFRAMRARLGPEQAIVATAHKIARVVYHLLTTKEPYREECAEEAERKRHERELKQLARRAQKLGYTLNPLAAPPSAPSP

SEQ ID NO: 137099 - protein, 360 aa, unidentified
MKKDTREGSGLTVGVDLGDRWSRYCVLDQQGQILEEDTIATTGPAFRKLFGDRRTARVVIEVGTHSPWVQRLLHELGHETITANPRHVRLIYSSRNKNDQLDAERLARLARVDPKLLHPIQHRGEAAQADRALLRSRDALVVCRTKLINHTRGIVKSMGGRLPSCSTSYFHKRVRQDLPDELKPALTPVLDTIAALSLKIQRLDTQIERLASKRYPETGLLRQVSGVGSLTALSYVLTLEDPQRFKSSRAIGPYLGLRPRQSQSGDLDPELRITKAGDSDLRRLLVGSAHYILGPFGPDTDLRRWGLALAAKGKKNAKKRAVVAVARKLAVLLHRLWVTAEVYEPLRTHRPGTAAEAISA

SEQ ID NO: 137100 - protein, 358 aa, unidentified
MKLTTVGIDLAKSVFQVHGVDERGNTVLRKQLRRNQVLAFFARQERCRIGMEACAGAHYWARQLTTLGHEVRLIAPQFVKPYVKANKTDAADAEAICEAVTRPSMRFVPIKSEEQQTVLSLHRARAGLVKARTALANQIRGLLTEYGIVLAVGIRQVRVGVPALLEDGERNLPPLFRQLLSRLHEHLHELDEQVAALDRDITAWHQTRLVPRQHSSGGKVRLQGISKRGDVYLRTLMIHGARAAERTAQPDRSATDAWTAMMAQRRPKNVVLVARANKHARIVWALLAHRREYQTAYRPVRAAATDEFVDPTRGGALADDMMARQDRPWRVEPMLPRSIKLGELVRDPSGRFHQGQRR

SEQ ID NO: 137101 - protein, 347 aa, unidentified
MYQDNVIALDLAKNVIQVCILDKQNQIKSNRELRRQQVLGWLAKQAPSVVAMEACGSAHYWAKQARVLGHQPVLLSARFVKKFVEGHKTDKNDAVAIGIAVRQPNVKPVAIKSNDQLALQALEKMRQHYQDTAIATSNMVRAIVYEFGMVIPQGEKAFRKRIPDILEDAENGLPMMLRAPLHQQYQFWINLKQQVREAEKQLRAQLKTHEQCNELQKLDGVGPVNALNLYLALGTRGEAFKNGREAAACIGLTPKQHSSGGKVVMLGISQRIAKKQLRANLIQGALAKMKIVAKRAPKNTREVWMKQLIERRGLRRAAVALANKTVRMAWAMVHYQQPYQAPESVTI

SEQ ID NO: 137102 - protein, 288 aa, unidentified
MLYAGLDLSRKRLDFHLLDREGTTVEIGAAAPDADGLHHLSKRVARHGAPVLAAIESMNGARFVHDQLELAGWQVEIADAQKVKGLAPLACKTDRIDAWVLAELARRDLVPAIWLPDPLVRAERERARWRLHLVRHRSSLKQRVHAVLLTHGKPCPVSDLFGVRGRQLLARLDLPQPWQGTIAASLRLIDDLDREISECERELRRLGADHRYVPLLCTVPGISWVLAYTIAAELGDINRFPTPRKLAGYSGLCPRVYQSGERDLRGPLSKQGPRLKGVKTTFTQAAAL

SEQ ID NO: 137103 - protein, 423 aa, unidentified
MTQVVGIDVGAYKHAAAVCREGERRADSKVLSYDATRPGFNELDRWLERLGGVEKVVVESSGHYWWPLASHLRQRGVAVAVVNPLESKYFAKSRLQRSKSDSADARTLAVLGMVDQPPTREPLVGAEIKEAARFCMRLVRDQANVCQRLLRLIEIGFPELKEAFQDATCDTALAVLRQAPTARSAARRRLSTLGDAIRPGGRRRLGMTKAKRIQELAKGTIAPPELDEQVAFEVRLLIDQYDLLGNQIEAAERRVAELLDSDLALRLQSIPGVGAATAATLIAEIGDIWRFDDFDQLAAYAGTHPREQSSGEHGKNPETSWRMAKTGNSYLRSALYRMAVVGTRHNPIIREHYRRKREQGKAPMNALGHCMAKALAIVWGVWRSGQNFDPSKGRRKACQGPMGSKPQSDRPKRPVCGHLLALR

SEQ ID NO: 137104 - protein, 339 aa, unidentified
MKLYCGVDLHSNNAVYAIINEESKRIFKKRIENNLEKVLATLDPFKKNLESLAVESTYNWYWLVDGLQANNFPVHLANPAAIDQYDGLKDANDTTDAFFLAELQRLGILKEGYIYPKETRPVRDLLRRRMLLVHHRTSIMLSMESLLCRETGRQFGWRQVCRLSEEDLTDLLHNDETLLFTAHHEMSVVRYLTNKIELFEKEIMGHVNLRPEYELLLTIPGIGIILGLTIMLEVGDINRFNKVGNFTSYCRCARAKHTSNGKKKSDNNRKNGNRYLSWAMVEAAHHAIRCCEPAHKFYQRKMAKTNGSVATKSLASKWSKAAYYVLKNQEPFNMERVFG

SEQ ID NO: 137105 - protein, 400 aa, unidentified
MVGSIATARSVPDCIGMDVHAKTCTWTAIDSSGKPIQRKTFPTNRRALAQFARGVAPSVRIGIEASTAGLAVFRLLRDLNLDVHLGSPRKLKAITDSDVKTDKKDSADLAHLLQMNYFPDCYVPPPNIERIRQLVRHRMRLGQSLTAIKNQVHALVVKNLFQSQMDGHSDWFGKNALAELVKLPFNEDDRNVLRSLLEQVKLLVKEEERMERDLAKLGETIDEVRLLMTIPGIDFYSALAFIGEIGDVHRYPSKGHLCSDAGVVPQSDNSGEHISKHRRVKRGNKILKYFLCNAVHGMISSRRETAVTKFYKKKAKQIGEGKAKVAAARKLAAIIWRMLTDNTPYVEEDPELTSRKVVRMERTAKSGTNAIADDELISLASDLGAKEVLLKRMAPGDDSQ

SEQ ID NO: 137106 - protein, 338 aa, unidentified
MEAYAGIDLHSSNSYIGVIDQGDRRLYGKRLLNSMNEIMAALDPFKENIEAVVVESTYNWYWLVDGLQAEGYKVHLANPSAIKQYEGLKHTDDKWDSFWLAHMRRLNILPEGYIYPKEERPVRDLSRRRILFVRQRTSQILSLQSAITRNLALRMSGRAIKKLKEKDAEDLFDSPSLVLTAKSNIGVIQFLTKTIGAIEKALLSQIKLRKEFRLLKTLPGIGDILGFTIMLEVGDINRFPKVGNYSSYCRCVNSKKLSNGKKKGENNRKNGNKYLSWAYVEAANYAIRFYPDAQRFYQRKMAKTNKIVAIKALSNKLAKASYYVMRDHVPYDPSKLFG

SEQ ID NO: 137107 - protein, 416 aa, unidentified
METTPTASFVEGAEITYVCGIDIGSQSCSGCITRPNKSVVVKPTTFANAREGWNRWEERLSSLDAAPSQIVIGMEATSRYHENLYHELEQRGYQMRLLHPGQMHHFHQQRGLRAKTDRLDAMTIARALLSGEARVGYIPGEQVATYRELVRLHTQLSEEAARYENQIQALVVVLFPEFTQVFADPCGQTALAVLQAYPHAQAVAEAGPEAVYQVLRAVPAPHFGHPTAHQLMALAKESVSSGRVLSGRGRSLQILCDQLQHTQANLSRLEQELEELITTDPGTRGLQQMPELGPKTIAVLRAELGEVDRFACTDQAVAYAGMDIKIKESGLWKGKAKLSKRGSGLLRQMLYLAALRSISLQGSAFGAYYQHLVARGLEKMSALMAVMRKMVVVATHLMQTGEDYDPGKVWVEATSS

SEQ ID NO: 137108 - protein, 457 aa, unidentified
MSKRRSKAKSKSIKVPKLPRHLQHMNLNAAGIDIGSERHMVAVPEGRDTVSVREFGTFTADLEALATWLKQCGVTSVAMESTGVYWIPLFELLERRGFEVKLVDARHVKNVSGRKSDVLDCQWIRQLHTYGLLAGAFRPADEVCVLRSYLRQREMLIQTSSKHIQHMQKALQQMNLLLHNVVSDITGVTGMKIIKAILAGERDPRVLARNRDERCQNTSATIAKSLVGNYREEHLFALRQAVDLYQTYQAKIADCNQAIIKQVEKQPDRSDDDPPTPEKQVQARDRIRNGVDVRDLLFKKSGVDLFAIPGLAADTLLTLASEVGFDMTPWKTEKNFASWLDLCPGTKISGGKVLHNRTKRNPNRATQAFRMAAASLYRSQTALGAFYRRIKSRAGGKQAVTATAHKIARIYYAMLTHGTSYVEFGQQAYEQRYKERRIDHLKVQAKSLGFQLVPCAS

SEQ ID NO: 137109 - protein, 365 aa, unidentified
MASVSHPAPIHLGLDVHKDTISVGILDPDQQVPDVERITHDEASVRRLVARFPDRGWLRACYEAGPTGFELARLLHGMGVRCEVIAPSLIPRAPGDKVKTDRRDCRRLARLHRAGELVAIRIPSSEEEAVRDLCRTRSDMVEDLTRARNRLGKFLLRHGRPWRGGSTRTKVYQAWLRAQRFDQPAMTQTFGHYLAVVEVRNQALDAVEADLVGWCGRPPFAWQVTRLAAYRGVTRLGALTVAAEVADWHRFAHASQFMGFCGLVPSEYSSGSRVHRGRLTKAGNAHLRAQLVESAWSYQHRPSVGAEIARRQQGLPPEVVARAWAAQQRLSGRFRTLAARKHTKSIVAAAIARELAGFLWAEMTA

SEQ ID NO: 137110 - protein, 331 aa, unidentified
MEFKESLGIDVSKKTIDVMLHCKKLHRQFKNTTKGFNNLIRWAEKQTGIKMPQIIICFEHTGIYSLPLATYLYERQLIFSMVPAIEIKRSMGLVRGKNDAVDAERIAEYAYLRRGQIKPYNLPSKNILQLQKILTLRDKMVKQRAGYKSDLKETKTMLKSSDYELFFSTQKKMIHYFDKQITRLDEQIIQIIKDDEAMNKIHTLITSVRGIGVIISANFIVLTNCFTDFNDSRKFACYSGIAPFEKQSGTSLNSKSRVSHFANKKMKSLLNMAAFSAIQSDPELRMYYLKRVEEGKSKMSTINIVRNKIVHRVFAVVKRGTPYVVLQNHAA

SEQ ID NO: 137111 - protein, 312 aa, unidentified
MNQNLSPVYAGLDIAKDHLQLLLQGRSYQLRNTGAGHLQLLKSLRSVAGVHVICEATGGYERAVVAALHAAAIPVSVINPARVRQFARASGEQAKTDPIDAATLTAFGHTFAPEPTPPRTAVQIKLAALVSRRLQLLDLRVAEAQRAELCGEPSLRKHFLNWLRQLDRQILQIEALIERLLLKQGPLAAQVERLDQITGVGRITAVSVLAQMPELGRLNRRQAAALAGLAPFNRESGKWTGKRFIRGGRAQLRRALYMAALAASRSNHLLKPFYQRLVAAGKPAKLALTAVMRKLLVLMNHLLKNPNFSLAH

SEQ ID NO: 137112 - protein, 411 aa, unidentified
MTLLFCGIDWAESHHDVAIIDEGGQLVAKKRITDDPSGFAELIEMLTAAGDCAEDPVPVAIETPRGLLVASLRTTGRPVYAINPLAVARYRERHSVARSKSDHADAMTLANILRVDAHLHRRLPADSELCQGIAVLARAHQDAIWRRTTAHHQLRSLLREFYPTFLAVFTGRFTLGIASPEARAVLDIAPTPTAAAKLSVSRIAAALRRAGRSRGIDQTAAEIKAGLRKPQLHQPVLVENAMGKQAVALLAVLDTACANVDELGHASAELFQQHPDYAIITSFPGLADSTGARVLAEIGDDRARFADARALKAYAGSAPVTRASGRSLSVTHRHIKNNRLASVGWMWAFSASSTFEPARSHYRQRRAHGDRHAAATRHLFNKLLGQLHHRLQHAQTFDQAKAFPAPLPEVA

SEQ ID NO: 137113 - protein, 412 aa, unidentified
MKIVYEVCCGIDVHAKMLVACLIRTKGEKEIRTFSTMTDGLLRLRDWLQAANCTHVAIESTGVYWKPVFNILEDALKVILINPEHAHALRGRKTDVKDAEWLADLLRHGLLKPSFIPPPEIRELRELTRYRESLVREQSAVANRIQKVIESGNIKLGQVASDALGVSGRLILRLLARGETDPVKLASLAKGKLKDKELLLRRALDGRLTPNQRFVLQESLKRWEELEAADRRVTKEIDRYLQARPKLAQARDNLDTIPGLGPRAAEIILAEIGIEMKPNFESDANLASWAGICPGNKRSGGKRLSGRTRKGNTYLRAALVQAAWGATMKKNCYLSSQFFRLVKRLGRKKALVAVAHSLLVIIYHVLERDQTYTELGGDYFDRQNVERQRDYFIRRLQMLGLKVSIEELPEVA

SEQ ID NO: 137114 - protein, 360 aa, unidentified
MQLHDALTIPKIFIGLDIHKKSWTVSIQTDLFFHKTYSLPSVSEDLYQYVERTFPNHEVHLVYEAGCCGFSVARYFLNLGWHVLVVNPADVKTGDKERYQKTDALDSKNLSNQLKAGVLKGIYIPTEEHEQFTTLARHRTQVTKKLRQTKSHIKSMLLFHGIKVPDQFDNSNWSNDFVTWLEALKFSTSCGDLALQGKIRLYKFIKSEYLEIANQMRLHCRKNNKKDYYLLKSIPGIGGYLASVIIAECGDLRRFNTEAQFSSYIGLVPGIYNSGDSEKCLGITPRSRSQLRSYLIEAAWIAIRKDIEMQQDYRKHQGKNVKSIIVKVAHKMARRILSVIKTETPYQVNRNLEVEQKNKI

SEQ ID NO: 137115 - protein, 347 aa, unidentified
MRFYTRQHRHYCGIDLHARTMYVYIISQDGTVLVEKNIPARPGPFLDLIAPHRDDLVVAVECIFTWYWLADLCHEQNIAFVLGHALYMKAIHGGKAKNDRIDAGKIATLLRGGMIPQAYVYPSPMRSTRDLLRRRLHLVRHRARLLAHIQNTNHQCNHDDFRKKLTYKANREGVAEQFADPSMRKSVEVDLALIAHYDGIIRDLELFILRMAKQHDADMFHRLRSITGVGKVLALTILYEVHDINRFETVQQFASYSRLVKCSRESAGKRMGTGGAKIGNVHLKWAFSEAAVLYLRKNPEGQKYLARLTKKHGKGKALSILAHKLGRATYFVMTRSRSFDEKKFLAA

SEQ ID NO: 137116 - protein, 411 aa, unidentified
MDVVHARCCGLDVHKKSVVACVLITQPNSSVERHVRTFKTVTADLLKLADWLSTLQVTQVAMESTGIYWRPVFNVLEDDERTLLLVNPQHMRAVPGKKTDVKDAEWLADLLRHGLLRASFIPPAPIRAIRELARYRKTLVQERADETNRLHKTLEGANLKLAGVATDVLGLSGRAMLAALLQGERDPEVLADLAQGRLRAKLPQLREALDGRVQPQHLVLIDHILAHIDFLGQAIAEVQAAIESCLPPYEDALQLLQTIPGVKPIAAAAILAEIGTDMSRFPSAGHLASWAGLCPSNKESAGKRMKAPMNHGNVWLRAMMGEVAWASIRTRATYFHAQFRRLSRRRGPKKAAVAVAHSLVIVIYHVLRTGKPYTELGVDYFNTLDSARLERHHVLRLEQLGYKVSLTPVAA

SEQ ID NO: 137117 - protein, 392 aa, unidentified
MYFIGIDIAKRFHEAAVIDEQGKIIVKRIKFQNSHAGYCKFMDTVRKLNQPVEFAMEATGHYWFSLYAHLRQDNQTVRVINPLQSDALRGLFIHETKTDAIDAFIIAEVVRIGRYSNTEILPEDIHALRELCRQRFYVIDMASDIKRKIIALLDQIFPEYEKLFSDTFGVTSMELLANYQTPEQILSVDSQTLADLLQKASRGRFGLDKANQIQQYAKNSFGIILASSSLSLIIKQYIEQLKSFEASIAIFDAEIAKIYDTFGCHLHTITGIGTTLAAVIFSEIGGDISKFDSVPKLVAFAGLYPKNQQSGESINSKGHLSKRGSPYLRRAIWLAAFVAAFKDPAIHQFYERKISEGKNHLNVMGHVCHKLISIIFAILRDNKPYQPVQISP

SEQ ID NO: 137118 - protein, 422 aa, unidentified
MNFGPVVGIDVSKRFSDMCILSPDNQIFAQTKIYHDSTSMKRAEALLKKATEAFGGRPAVVMEATSHYHLILFQFFSDCGYDVLVVNPLQSSSMKDFSIRKRKTDKVDALKLAMLYRTKTLRPSQIPQSAIRALRLLCRERVELLNDVTRYKNRLTAFLDQIFPGYDKVFSDVGSITSRAVLSHFPTPAILLASDEYELVEVIATASKSGYKFAKKKAEALIKTAETAKVLGIHTCADESMILSVIPMLNTLSDRVAYLEQSIENLLAQVKTIRKNVELLQTIPGVGPHSASLIMAEIGDISLFKKPKQLAAYFGLDPSERQSGTFRGTKNKLSKRGSPYARAALHMAVVNAVFKHANAPAANPVLSSYYEKKCKTKPAKVALAASMHKLIFIIFAVLRDQKPFELRTPEQHAREQGFIKAA

SEQ ID NO: 137119 - protein, 376 aa, unidentified
MKKELYLGLDVHKDCIITAVAQEGRKGEVRDTGVISNDLHALEKWVGRLRKAHGSDVILRACYEAGPCGFGIARRLKQLGVECEVVAPSLTPKRAGERVKTDRRDARKLARLLRAGELSPVYIPESTDEAIRDLCRARTDAVDDRCRSRHRLKGFLLRHGYHYQGKSSWSAAHERYLRELVLPHPAMKVILEEYLQGIAAAGERIARCEEAMRALLEKWHLRPAVEALMAMKGFRTVAAMILVSELGEVHRFSHPRQVMAYLGLVPTENTSSDRRRQGHITKCGNAHARWLLVECAQHYATPPKVSKELSRRQEGQPREVRALSWKAQNRLHGRFARLSARRLQRNKALVAIARELCGFIWELLHMQPCYQAQPPS

SEQ ID NO: 137120 - protein, 422 aa, unidentified
MMEETEDREEIIERVAALDIGKAELVACVRVPSPTTPGRRAQEISTHSTMTRSLLALSDRLRALGVTRVVMEATSDYWKPVFYLLEAQELEPWLVNAKDVKHLPGRPKTDKLDAVWLCKVAERQMLRPSFVPPVPIRRLRDLTRYRLDLVNTRTAEKNRVEKLLEDAQIKLSAVVSDIFGVSGREMLAALIAGERDPKVLAQLARARMRAKISVLEEAFVGHFTDHHAFLLHTMLARIDETSADIAAVEAKVEELIAPFAQAVERLDEIPGVGATAAHVMIAEIGLDMSRFPTAAHLCSWARLAPGVKESAGKKKGRGSTGHGNPYLARVLGEAAVAAAKTDTFLGERFRRIARRRGKKKAIVAVGRSILVIVWHLLSDPDARFHDLGSDFYDNRTGPDRKKRNHVRQLEALGYKVTLEPAA

SEQ ID NO: 137121 - protein, 409 aa, unidentified
MRRVKGKRSASSIVGCAPKCAEPHAETPEGVLPQTFRGGRPVSETITSFVGLDVHKDSTAIGEAEAGRENPRFIGTVGPDLGQLLKALKSLGKPETMLVVYEAGPCGYGLARQLRSRGYSCEVVAAGKIARRPGERIKTDRRDALTLARLARSGDLVKVIVPDEGDEAMRDLSRAREDGVRARLKARQQLKALLLRHGHRYGGKSYWTLAHERYLAAVSFAHPTQDIAFAEYRQAMREGHERVERLTEALRTQTEHWHLKPLVAGLATLRGFDFVAAVTLTAEIGDFGRFAHPTELMGFLGLVPSEYSTGDTRRQGDITKTGNSHARRVLVEAAWNYRFPARLSRVLQIRQEGQPKAVREIAWRAQLRLAHRYRRLSSRKLHPNKICVAIAQELAGFLWDIARQVKLAT

SEQ ID NO: 137122 - protein, 393 aa, unidentified
MYVCGIDVAKRKHMAAILSSEGQVTQAPFSVTNTRAGFDQLHQALAALDGPVQVGLEATGHYWLALYDDLTRQGYPVVVFNPLQIHAFRKSGVRKVKSDRSDAVWIAEYLRFGGHRPTNPTLPVWLQLKELSRFRYHLTDQIGDGKRKLLSVLDRVFPEYETAFSSVFLMASRRLLAEAASAQEIAEFDLDELAQLLQSASRGRFGQTQAATVQRLARQSVGVSFLANAAQIEMRCLLAQIDLLEEQRRQVDQAVEQLMAQVPQYLTTIPGVGPVTAAAVLAEIGDVHRFATVEKLVAYAGIDASVYQTGEFEATQRHMSKRGSPYLRHALWQAATAALLHNPELKAYYQRKRQEGKHHGTVLGAVCRKLLARIYVVLKENRPYRAQPPAAVH

SEQ ID NO: 137123 - protein, 374 aa, unidentified
MAKYKLAFVAFDSAKDKHAVAIAEDGRDGEVRYFGEIENSPDAVKKFVAKLSRRYDQLHFCYEAGPTGYGLHRQLTDLGYVCDVVAPTMIPKRSGDRVKTNRRDAVALVKLLRAGELRTIWVPDTVHEAVRDLARAREAAMRDLKVKRQQLLSFLLRHSRSFPGGKNWTKMHARWLTAQKFAHPAHQIVFQDQIEAINAAQVRLATLEQQLRDIVPTWTMAPVVAAYQALRGVSFLVAATFVAEVGDVRRFTTPQQLMAFLGLVPSERTTGDMVRRGSITKTGNGRARRVLVEAAWTYRYSARVSQTLQDRVKGLPLAVRTIAWKAQVRLCARYRRLIGNGKKPAVAATAIAREIAAFLWAIGHQVEPTAVNSN

SEQ ID NO: 137124 - protein, 331 aa, unidentified
MNKFNHFIGIDISKEYFDAFLLSANGNRKHNQFINSYKGIKDFLKWFKKENASIEDTLICMEHTGMYGKILSSVLAAHNCNLWIEMSLKIIRSIGIQRGKNDKIDSERIAYYAFKNHEQVKVFKAPKKSLEKIRAMLSLREKMVVFKASLVRNVNELKSFDKEICSITKKHQKQTVKGINTDIKKIEKELQVLISKDDELNTLFNNITSVPGVGKITALSLICFTNEFSTFEKPRELACYCGVVPFEYTSGKSVRAKPKVHYMANKKLKKQLHMCALSSIMHNPEIRTYFNRKVEEGKNKMLVLNNVRNKLIHIICACVRENRSYQIKETA

SEQ ID NO: 137125 - protein, 422 aa, unidentified
MYRIAGIDVHKKMLAVVVSDVEVDGEYQFERVRYSSSPEHLRLLAEWLTVQQVEEVVMESTAQYWKPVWEALERYWKPICQEREGAGPKSGTLHLAQAQSNRGRRGRKKDFPDAERLVKRLVADELVLSFVPDTEQRLWRTVTRRKYQLTRSHVRLQNQLEGLLEECHIKLSSLVSDLLGASARRMLKALAEGETNPVALAAMADRNLRATQAQLCDALGACTELKPIYRRLLKMLLEELQFIDQQISELDQELASLLSRHNDAVVHLAEIPGLGVDSAQQIIAEVGAGAATFPSAKQLSSWVGACPGEEESAEVSKSHRSPKGNRHMRRILNQAANSAAKSKGTIFEIVYRRLVSRLGHNQTIGAIAHRLCRLIWIVLHRGVRYEERGPSVSAKTRRHRTNRMIRELRSLGYRVEPSLTTV

SEQ ID NO: 137126 - protein, 431 aa, unidentified
MIKINYMSTLFVGIDVSSKSNVVCAMDFDENQYISSSFKNNQPGADELAKMILECMKTHSNLNTIVVALESTSVYSIHIANFLSTCEVLMPYKPYVFCLNPKATANYRKSYIAMEKSDPMDAYLIADFARCGRTKKCEPWRGGQFLALKRLTRHRLHLAECITREKTYMVSNLYLKFSELQLLDDDKQPFSNIYGATSSAVLTEFMSLQEIIDASEEDLLQFLSQKSRNRISDISKTSELLKKAARDSYRLDKCMYEPLNVSLASSFNCIQTYQKEMKLIDQAIEKCINGMNPNAFTILKSIPGIGPVWAGGILSEIGDINAFHSSDALAKYAGLIWLKNDSGDFVSEDNRVSKAGNTYLRYYLGEAANSVRHHIPEYKEFYSKKYAEVTKHQHKRALALTSRKFVRLVFGLLVKNQLYTGEKLDAEFNNE

SEQ ID NO: 137127 - protein, 347 aa, unidentified
MKEQNNRSEFTIGLDLGERRHRFCALNGKGEVVEEATVGNERASLARLTARYHGALAVMEAGAHSPWISRYLEGLGWEVIVSNPRKVRAIYQHERKSDQRDALMLARIGRMDRALLYPVRHGSEEAQQDLLRIKLRDSLVRARVALINSVRFSLKSLGYAVSHPSSERFHKVAMESLPEVVREMIAPSVQALAELSGRIAVLEREISLLARTKYPQTLWLQQVPGVGAITALYFVLKIEDPKRFKHVRDVGAYTGLCPRRDQSGDSDPQLRISKRGDAYLRRLLVSAAQYILGPFGPQSALREYGLRLAADGTTRAKKRAVVAVARKLCVLLLSLWKNQTAYQPYPA

SEQ ID NO: 137128 - protein, 375 aa, unidentified
MEKGIKFYVALDVHKDSITVAVAEAGSRASARLIGRTPHDVNKVLKALAKLGSPGEVLVVYEAGPTGYGLQRALAAKGYACEVIAPSLVPKRAGERVKTDRRDGVRLAELSRAGELRSVRVPQPRDEAIRDLSRAREDAVNERTQARLRLRGFLLRHDSRYPGKTAWTKSFHNWLATLNFGPDGSHTAFTEYQMAVQWADQRVERLTRALSESITGWRFEPVVQALMALRGVDVVTAVGLTAEIGDLSRFNHPRKLMGYLGLVPSEHSSGDKVQRGSITKTGNGHARRLLIEAAWHYRFAPRIGQRAHARQQGVAEPLQAHAWKAQLRLCRRFAALEARGVHRNKVCVAVARELAGFVWSVGRQAMDGVTTPKGF

SEQ ID NO: 137129 - protein, 361 aa, unidentified
MTKIIVAQDAPVLAAIDIAKARHEVLIAIPDKKRRRRLTVLNELADFNRLVSALKEYGRPVRVAFEATGNYHRALAYHLATAGFEVKLVSSVALARMREALTNSWDKNDPKDAQVILHMMEIGNEQYYHDPLVCGTNDIQELSKTHDIVSKSKTELWHRVLTHYLPLYFPEVDRFHRSSRSDWFFAFLERYPSPHFITAMGKDAFTADAWDVIGRKVAKERLLADIYETAKSSVGLPVAPDSDAIRMFRLVLGEGRSLIAQRNQIEDRAIALLKDLPDYQLLTSIPGIGPINALTILAEAGDLRRFGHHRQFLKFCGMDLATIQSGTFRGQTKLSKYGNARLRRTLWMAGQVAIRAMLEFG

SEQ ID NO: 137130 - protein, 371 aa, unidentified
MRDYNTYVGLDVHKDSISIAVAEGCRNGEVRYYGSTGGDLDSLDKVVKKLRSQGGELHFVYEAGPCGYGIYRHLSRQGLSCTVVAPSMIPKRSGDRIKNDRRDAESLARLHRSGELTAIYVPREEDEAMRDLTRAREDAVKAQRVARQELGAFLLRHGLRYTGKSHWTAVHRRWFAEIKMEHRGQQITFQEYIDTEREAGERIERLTEQIRQHVDSWRMAPVVKALQAMRGISLIVATTTIAEIGDMSRFANHRELMAYLGLNPSEHSSGDKIKRGRITKTGNGHVRRSLIEAAQAYAHPARISRRLVGRQESLPKAIRDLAWQAQLRLCGRFRHLIARGKNRNTVITAIARELCGFIWAMAKEVSLQPAA

SEQ ID NO: 137131 - protein, 322 aa, unidentified
MTPPGIYVGIDVAKDQLQVALRPDGEAWSVTNDRPGLRDLVKRLAVSKPALVVLEATAGMEMPVAAALAAAGLPVVAVNPRNAREFARATGRLAKTDVIDAHVLAQFAEGVKPPLRPLPDAATQELNALVTRRHQLVEMLTAEKNRLAQAVAKPVRAGIQEHIRWLERRLADIDRDLGETIRHTPVWREKDELFRSVQGVGPVLSTTLLAGLPELGALGRKQIAALVGVAPLNRDSGRYRGKRMVWGGRARVREALYMGTLVATRFNPVIRAFYQRLLDAGKPKKVALTACMRKLLTILNAMARHHTPWQIMHPTLVRQDGC

SEQ ID NO: 137132 - protein, 335 aa, unidentified
MDRQYVGIDFHRRRSVIVRKSGAGDKLGSVRVANDPLAIASAVAEAGPNPEVVIEATYGWYWIVDWLQVQGATVHLANPSGLNWGARRVKNDERDAVDLVDMLRLGRLPEAWIAPPATRELRELVRYRAKLVALRSGLKAQVHAVLAKEGVLPSVRDMFCGSGNAQLDALELGDAYTTRVESLRDLIERYDREVGMLERTIYQRVRDDRGYRAIQRIHGIGPTMAAILVAEIGDVSRFRSAEALCSWAGLTPKHRESDTKVHRGAVTKQGSRLVRWAVIEGTVRYHGGGKLAADWHRIAERRGKHKATVAVARKVLTLVYYGLRDGEIRCLAKAS

SEQ ID NO: 137133 - protein, 453 aa, unidentified
MTRKSKQNKKTNSAVLPVMRPDAAGIDIGATEIFVAVPADRAAKNVESFSTFTQDLYALAEWLGQCGIKTVAMESTGVYWIPLFQILEESGFEVCLVNARHVKNVPGRKTDVSDCQWLQFLHSVGLLKASYRPEQEVCAVRSLLRHRESLVQMAATHVNHMQKALDQMNLQLHHVISDIVGQTGLAIVDAILAGERDPVRLAKLRHERIKASEEVIVKSLVGDYRHEHLFTLGQSLAAYRSYQKLIDDCDHEIRQQLKDFQPPRLPADGEKAKLSTKVSPEGVLKAELRRVFGVDLTQIPGIRTGIAQTLFGEIGPDFTKFRSASAFASWMGLCPDNDISGGKVLRVGTRKVSCRAATALRMAAQSLHHSKSALGDFYRRMRAKPGAPEAITAAAHKLARIIFHLISTRQEFDDSKFAADQLRHQKRQEFKLRAKAKSMGFELIPLQPAGCVP

SEQ ID NO: 137134 - protein, 363 aa, unidentified
MSRIVLRARDDQHNDGMRPAAGEAVWIAIDLSRSKWVYCVRWGAQEQRRLSSPAGLEHLQALVDQYRDQRVTVVYEACGFGYEIVWFLQARKIEVIVVAPCKVERAPGRRVKTDRLDAATLARKLEQGQLKKIYVPPREIHEQRQAVRAYLQARKDRRRQQTRIRSLLQEHARLGPEPSRGWSVYAKWLAQQSLPVALSRCVEELLSLRQSADICARRLKADLLNYARLPHYAPIVNAITQQPGVGPFSAIWIVLELADIHRFRSGRALVHYLGLVPKEESSGEIVRRGHILKCGPATLRSLLLQCAWRSIRVDQGDPALRGHYQRLRTRLESKRAIIAVARCLTLKVHGHWRRSLSAKAATA

SEQ ID NO: 137135 - protein, 453 aa, unidentified
MSKAKPQVIDDEEHERVHERVAAVDVAKDTGMVCTRTPHPSRPGARRSMVWTVKARMGAVRQLGRQLKNDGIEVVTLESTSDYWRIWFFVLEACGLAVQLVNAAQAKNLPGRPKTDKLDAMWLARLTEMGLLRASFVPPRAIRDLRDYTRMRTRLVQERTRCWQRLEKLLEGALVKVSAVASKLTTVSAQDMIKAMIAGQRDPHQLAALARGRMRARHDDLVEALDGMFDDHHGELAQLLLDQIASLDAKIAQLSARAAELTAAMPAAWGVDADGTTGPGAGAGPDAAALNAVTRLAEIPGISEELARSIIAETGLDMSRFPTAGRLVSWAGLCPSARQSGPRTRAGKKGQGDTWLRGSLGQAAIGAARTDTFLGERYWRIARRRGKAKAQVAVARSILVIIWHLLADPAARFTDLGPGYYQARTDKDRKIKNHIRQIEALLGHPVTITPKAA

SEQ ID NO: 137136 - protein, 399 aa, unidentified
MFYCGIDIAKYKHEASVIDMSGKALSNSITFANDRQGCEKVLAIFEKSEITPDNVVIGMEATGHYWLSVYTFFLELGYTVKVINPIQSEAFRKMYIRQTKNDSKDSYIIAQIMCFGEYSATTLSEDNIIALRQLSRYRLALVDACGDCKRRVIALLDQVFPEYDKLFSDTFGKTSSELLLNCPTPEDMLAVSTRKLTNILNKASRGRFGKEKAEELKDAAKNTFGIAFAKDAFSFQIKQLMQQIIFTEKQLSELEEQIANLLHETNQYITTITGIGDVLGAIIVSEIGDINRFERPNQLVAFAGLDVTVKQSGEFSGTKNRISKRGSPYLRRAIWLAAQRAAFCDPILSEYYQSLKARGKHHLTAVGAVARKLCNIIFVILKENRPYLPIPPKKSQNLS

SEQ ID NO: 137137 - protein, 409 aa, unidentified
MIEAIVKRVAGLDIHKMVIVATVLLEQADGQVVQETRTFSSFRQDREALCRWLQESAVELVVMESTGNYWKSIYAALESARLQTYVVNARLVKQVPGRKTDVTDSQWLASLARCGLLNPSFIAPVDLQQLRLLGRYRMKLKGVAAGEKNRLHKVLDDAGIRLGGVVSDIQGTSAQAMIAGLVAGQPVATLLKQARGRLKAKHEQLAQALDEPLSERHRWLLQEIQSHLHYLEEQIHHLDEQLLAGMEPYRPAWQLLQTIPGIDIVSAAQIIAEIGVDMDSFGSAERLASWAGMCPGNHESAGKRKRVATRPGNRALRQILCEVANAACKTDSQFKGKYQALVIRRGHKRSIVAIGHKLLRVVYTVLREQQPYRDPAIDYEALVVAKNAPRWLKALQKYGYLAETQRVAA

SEQ ID NO: 137138 - protein, 364 aa, unidentified
MVKKATRIARFIAAVDNRPVFVGLDVHKNTYSVAIFEPQDGLVETWTCPAGEDALAAQLAGLGCRIEHVVYESGPTGFALARALERAGFAVSVIAASRIPRGYAASAKTDRLDAVKLASYFARGLLRPVAVPTVEQEGYRALVRRRKRIAESRAKIKQKIKGFLLASGITEPASLRSWTLAASKDLSALEIPPEHRTALASMVREYLFLLSEDKLLRAEIREATGRMHSERFKRLTAVAGVGETAAAHFLAEVFSPERFDRPEEVTSYLGLAPVVSQSGNGPARAKLRPVGQKRLRGILVEAAWQWSWRDPEAKAIYNQHFAKHGIGQKAIVAVARKLAIKLWRLSVETPSVPAEGAARGAWSG

SEQ ID NO: 137139 - protein, 403 aa, unidentified
MNNVAGIDVSKGKSMVSVLRPFGEVVAKPFSIGHTGSELKELADYLKSLDGETRVVMEHTGRYYEPVARFLHDEGVFVSAVNPKLIKDYGNNTLRKVKTDKADSRKIARYGIDNWAELRQHTPMDTIRMQLKTLNRQQSLYAKTKTMMKNNLIALLDQTYPGVNALFDSPVREDGSQKWVDFATTFWHVDCVRNMSLTAFAERYRKWCKRHGYNFSQSKAVEVHTGAQDLIAMLPKDALTKTMVRQAIDALNAVSASLERLKAEMQALAAQLPEYPVVMAMHGVGDSLGPQLMAELGDVARFTHRNAITAFAGVDPGADQSGTHEAKSTRVSKSGPPELRRALFLVMDCLLKTQPQDDPVYRFMDKKRAEGKPYLVYMTAGANKFLRIYYGRVKEYLASLEEN

SEQ ID NO: 137140 - protein, 351 aa, unidentified
MMIIGIDYHPSFQAIAFLMEETGECGEQELNHSDGQAEKFYRDLQQRGISVRVGMEATGYSRWFERLLAELGFEVWMGDPAEIKAKRVKKQKFDREDARLLLRLMRENNFPQIWVPGPENRDLRQLLWHRHRLVQMRTRIMNQLQALAMNEGYRWKKKLFSEQGRAQLEKLALAPWASRRRQELLELLDRMNPTIAELTAAVEREARKRPEVLRLMTHPGVGPLTALAYVLIIGTPTRFPRGKQIGTYVGMIPSEDSSAGKQRLGHISKQGNSLLRFLLVEAAQAAARIHPDWRRRYMRLAMRRHKSIAKVAMGRRLAIRLYWMWRNGCEYSPSLEFGSYAGQLGTGHGGK

SEQ ID NO: 137141 - protein, 332 aa, unidentified
MRYIGLDIHKKHTQACVRNENGKILSGERFKTEADDIASFFAKQEVHGPLSVTMEATGFYFWIHDLIVARGHRVIVVHPARIKPLMKAKAKNDRNDASMLAELLRTGCLEGIYVPPPEIREMRDLTRHRESLVRKKGDLKREIISSLDQHGVMKPLDYRISFTKKYIVWLRSLNDFVINEKLDLLEMTVGKIQNVERLIEEKWGEDEDVQIIQTVPGVGMVTATVIKAELGDVARFPSAENLAAYIGVSPTTFQSGEKEWGGPARHGNSRVKHVLIEAALVHTRSCPDSKISRYHFRKRDSIGGAKAAVATGRKLSEAIYFMLTRRQPFHAH

SEQ ID NO: 137142 - protein, 311 aa, unidentified
MVVLHHPPHICLGCDVAKDTIAVSCGGPATVIANRSRDIRRFLRNCEADLVICEPTGGYETVLIEECLRRGLAVHRADTRRLKAFIRSRGRVGKSDAIDAREMVAYGMERWASLSLWQAENPEEARLKALVRRRADLVAIRVAEQNRAMAPGGRELAVTFKAMLAAINRQIALLDKEIRMLMRSEAFAARASIAMAMTGIAETTAAALIATMPELGTLDRKKAAALAGLAPHPNESGNKIGYRRMRGGRPVMRTILFMPAMQAARGRGEFAAFYKRLVEAGKKPIVAIAAVMRKIVVTLNARFTEKVIQQS

SEQ ID NO: 137143 - protein, 435 aa, unidentified
MDEVRDEPLYRDRVCGIDIGKAGMVATIRVPSEKDPARRAAETRSFGTTKREVLALADWLRAWQVPAVVMESTGDYWKGPFYRLEAEGIECVLADARQVRHLPGRPKHDRGDSRWLAACFERGAITPCFVATPEFRVIRLHTRYRRDLVEERTREKQRAEKLLESAAIKLSSVVTDLHGVTGRDIMGHLITGERNPKVLAQLARAAARRKIPQLEEALEGAEFFTADHAALLQVMLERIDQLGTETARLTEVIERLLAPYEEQLQQAESMPGWGRRSAQDAVAETGADMSRFPAPAHLASWAGRTPLDNQSGKRKGRSKSKKGNRYLAAITGETAVAAGKTQTREGARYRRLARRRGKAKAQVALGNTQLKVYHALLSHPGTRYEDLGPDYYQRQASTRRQIAHHVGKLSALGFEVTPCRLPQSGQDDSTSTTAA

SEQ ID NO: 137144 - protein, 412 aa, unidentified
MEVVYERCAGLDVHKKSITACVLWALPKGKKRQEKRRFATFTQDLLAMADWLRECGVTHVAMESTGVYWKPVWNILEGHVEILLVNAQHIKAVPGRKTDQKDSEWIADLLQHGLLKGSFVPPTPVRELRDLTRYRVSLAQECNRIANRVQKVLEDANIKLASVATDALGASGRAMLDAMIEGQTDSATLSEMSKGLLRNKRAELRLALEGRMTEHHRFLLKQLMRHLRFTEARMDDVEAEIARRMEPYREDVKRLCSIPGVDKVTAWGLLAEIGFNMDQFPSAAHLASWAGLCPGNFESAGKRLSGKTRKGSATLRRCLSQAGWAVSTKKNNYLTAFYRRVAARRGAKRAIIAVAHQLLVIAYYLLKRKEDYRELGPNHFDNINADRVRHSLVKRLERLGHVVTLQPAAPSA

SEQ ID NO: 137145 - protein, 331 aa, unidentified
MYVLGVDVSKAKLDCALIVQAEPVKRRQKVVSNDAAGWAKLLQWASQSAGGCEASQLKVVLEPTSRYHEGVAHYAHEQGARVWVVNPKQLRDFAKGMGLRSKTDALDSEVLARFGLTGQAQEWMPAPRELRELQALLRRLEDLDKTRQAELNRVEAAQAGAAVSALVMDSLQRSVAFLDEQIRQLEAQIDQHIDGHPQLKADYALLRSIPAVGPCNARLMLAKLGAGRFDSAAQASGFLGLRPMHWESGSSVHRMPRLGKHGERLARRALYMAALTAKRRNPDARALYERLLAKGKKPMVALCAVMRKLVHICFGVLKHRRPYAPQIASGA

SEQ ID NO: 137146 - protein, 407 aa, unidentified
MGPVYERCCGLDVHKKTVVACVRTLGHAETRTFGTMTRDVLALADWLTACGVTHVAMESTGVYWKPIYNILEGNFTLLVVNAQHLKAVPGGKTDVKDAEWLSQLLQHGLVRGSFIPDREQRDLRDLTRHRTSLVRDRARVVQRIQKVLEDTNLKLASVATDIVGLSARAMLERLLSGERDPAVLAGLAKGRLRQKRQDLETALEGVLRPHHRFLLAELLAQLDYLEEATGSASKKIEECTAPFQEEIDLLDTIPGINRTQAETLLAEVGADVSRFPTASHLASWAGLCPGNDESAGKHRSGKIRKGSPWLRTTLVEAAHGAARTRNTYLEAQYRRLAARRGKKKALVAIAHSLLVIVYHVLTNKEPYLDLGSNYFDQRDRLRVEKRLSRRLERLGYKVTLEPMESTA

SEQ ID NO: 137147 - protein, 381 aa, unidentified
MEGITKLHALIAAHHLRASDPSNLAPASEVVIGIETDRGPWVAALMAAGYLVYAINPMSAARYRERHSTSRAKSDAGDAHLLAEIVRLDRDHHRPIAGDTAAVDAIKLLARAHQNAVRERARQTLRLRSTLLDFFPAAVQAFPDLTARDALALLERAPDPALAARLTTTRIVAEFKLAQRKNKEAKAVELQELFRAQALRQPTTLQGAYAQLVVSLVRLIRAVNEQIAHLAAAMDAAFSAHSASDIYLSQPGLGPVLGARTLGEFGDDPNRFVNAQARKNYSGQSPITRASGKKTVIMARRSGNRRLNDALHAQAFSALTSSPGARGYYDRLKARNIGHHAALRQLANKLVGILHACLKTGSPYDEDLAWQVHSAPGQLAT

SEQ ID NO: 137148 - protein, 344 aa, unidentified
MTTRLMAGIDLHSNNLFCGIVDMEGRRVFEQKLPCDLAAVLKALKPFKKRLEKIAVESTYNWYWLVDGLQDHGYEVVLANPAAMQQYDGLKHGDDKSDAFFLAEMLRLNILPTGYICEREWRSVRDLLRRRMGLVHKRTSLMLSLKSLHTRTTGRDLSLSRLKALEPSDAEKLFKHPADQLITRLDVQLVEQLSQSIEEIEKTILAEVKRMPNYQVLQTIPGVGRILGLTITLETVDPKRFAGPGDYASYCRCVDSRRLSNGKKKGENNSKCGNKYLSWAFVEAANFARRHDDRCRKFHDRKAAQVNGIVATKALACKLAKAAWHMMSQNTEYDAGRMFPGVKK

SEQ ID NO: 137149 - protein, 396 aa, unidentified
MISVGIDVSKGKSTVCIMKPCGEILESPFDIGHTADELDSLISLIKSFDEETRVVMEDTGHYHLPVATYLSSHNIFVCCVNALRMKKFCSQSIRRAKTDKIDSIKIASFGITYWNELVKAYPSNVIYDELKFLARQYYQVTGMLVKSKVNFSNLLDQVMPKINDVLSNQGENHKLTEFVNRYIHFQNILDMGEMKFTSDYCKWAKKKGYRLNERKAAEILALAQNGIPTLPNSQSVKIAVSEAVKLIHSIEESRNTILAQMQDLCNTLPEYSVVKEMDCIGDTLAPRIIAEIGDVRRFKNKHSLIAYAGIDAPPYQSGAFHASERHISKRGNSYLRKTGYEIMQSLIKHKPADNAVYDFIQKKRSEGKCGKEAMIAGLNKFLRVYYGKVMEFYSEH

SEQ ID NO: 137150 - protein, 344 aa, unidentified
MIGIDIGKNSFHIVGHDHRGAIVLRQKWSRGQVETRLANLPPCLIGMEACVGAHHLSRKLQMLGHDARLMPAKYVRPYSKGQKNDFRDAEAIAEAVQRPTMKFVATKTADQLDLQALHRVRDRLVGQRTGVINQIRAFLLERGIAVRQGLRSLRSELPGILATRTDVLSPRMLRIIEDLAGDWRRLDERIEGLSSEIETLARQDKACERLMTVPGIGPIISSAMVAAIGTGDVFSKGRDFGAWLGLVPKQISTGDRTILGKISRRGNRYLRSLFVQAAWVVLVKVKCWERYGLKSWIEAAKKRLHHNVLAIALANKLARIAWAVLNKGRAFECVKTEETASRPA

SEQ ID NO: 137151 - protein, 519 aa, unidentified
MFEIGYYKKRQPERGGRSIIGALCPVVSVVRELATLSLVKHLLSRLEESRYRQLPFRSCRLTMTEDRAMRTKKVSKGKMMKLPKHLQHINPYAAGIDIGSRSHFVAVPEGTSEQAVREFESFTDDLQRMADWLIACRVTTVAMESTGIYWIPVFEILESKGLDVKLVNARHVKNVPGRKSDVLDCQWLQRLHSYGLLEGALRPPEQICTLRGYVRQRMNLVRYAASHIQHMQKALAQMNLRLANVVTDITGKTGMRIIMAILNGERDPLVLAGMRDQRCKNSQETIVRSLHGNYRPEHLFSLKQAVDLYVFYQSQITECDQVILSQLATFDVASGSNNYSGTKPPNLDEALQRMSGVDLTRIDGIDTNSALKIIAEIGVDMSRWKSAKHFASWLGLCPGTKVSGGKVLSSKSKQVANRAAATLRMAAFTLFNSKSALGAYLRRQRSRLGAPKAITATAHKLARLVYAMLMHGTAYVDAGQDYYEERYRNRVIQNMKRKAQELGFEVVQIPGLQQKTATA

SEQ ID NO: 137152 - protein, 451 aa, unidentified
MRSKRQATTGLEPINANAAGIDIGSQTHWVCVPADRAEENVRSFGSFTTDLYALADWLQECKVESVAMESTGVYWIALFQILETRGFEVKLVNAHHVKTLPGRKSDVLDCQWIQQLHSYGLLSASFRPSDQICVLRSYIRQRDNLVRSACVHVQRIQKALTEMNVLLHQVVSDITGTTGMTIIRAIVAGEHDPQTLASLRHPRSRRNTTEIAQALQGDYRREHLFILQQEVLLYDAYQVQLAACDVQIEKCLSNFEVASEIELPVASSPRRKPQDNQPAFDLQTHLERISGVDFTEIDGMGALTVQTILSEIGLDASRFPTAKHFTSWLGLCPGSCITGGKVKNSRTRRVINRATNAFRMAAVAAGKTQSALGAFYRRLRTRLGAPKAITATAHKLARIFYQLWRNGGAYNDPGCNYYEQRYQEQIVKGLRKKAQAMGFELVATPFTQIVS

SEQ ID NO: 137153 - protein, 345 aa, unidentified
MQKISTMRTSGKNIFQGQLTIGLDLGDRSSSYCVLNEAGEIILEQKLPTTPEAMQQAFRRMARSRLAMETGTHSPWVSRLLTALGHEVIVAHAQNVRLIVKSRRKDDRLDARTLARLARIDPELLSPVQHRSAQAQLHLTEIRARAGLVSARTALVNATRGLVKSYGERLRKCGTQQFRRETTSGLSAGLREALEPLLREVESLNERIQEYDRRIETMAKETYPETALLKQVKGVGDLIALTYVLTIEDAHRFRKSRDAGCFIGLQPGRRNSGESEPQMHISKEGDEYLRTLLVQGAHYILGPFGEDSDLRRWGQKLAARGGKNAKKRAVVAVARKLAVLLHRLW

SEQ ID NO: 137154 - protein, 430 aa, unidentified
MGLIIPSAMHPQQDDPPMPYEWFVGIDWGSQQHQVCVLDRDRHRVGERAVDHDGASLAQLAAWLWTVSASQPQRVAVAIEVPRGAIVEGLLERGFHVFALNPKQLDRFRDRHSVAGAKDDRRDAFVLADSVRTDRPSLRRLQLDAPHLLLLRELSRAEETLLEAFRRRANRLRDQLHRFYPQMLQLCAAADEPWLWDLLQLAPTPAHAMLLSEEQVQRVLKAHRLRRLKAPEVLACLQASALPVAPGTAEAAQTHCGFLLPCLRVVAEQLQACSQQVDTLLRTLADEPGEGESPSDVAIVQSLPGVGRKITAWLFAEAAQPLTERDYQVLRTHGGVAPVTKQSGKRRQVVMRHACNPRLRHALYHMARVAMQRDAHFSSVYAALRAKGQRHGQALRNIGDRLLRILMAMLRHRTCYDANRIRCEPIGQMG

SEQ ID NO: 137155 - protein, 335 aa, unidentified
MENISVIGIDLAKNIFQLHGIDTNGKVILKKKLRRDRLVPFFSNLKPCLIGIEACSGAHYWKRTLDRLGHNVKIMAPQYVKPYVKTNKNDMADAEAICEAVTRPSMRFVPIKSERAQDIQSLHRARKRVVNCIVSLSNEIRGLLGEYGIVFAVGKKAFKDGVRKVVNSDQLSSHMKETLQDLFSEYLDHEIRLERYDERVKLHCNSSDSCKRLMKIRGVGPLTASILSTVDPNTFKNGREFAAWLGLTPKQVSSGGKEKLLGISKRGDSYIRQLLVHGGRIFIHYTDRKKDELSMWAKGVKERRGYNKASVAVANKLARICWSIMKNENEYQLSY

SEQ ID NO: 137156 - protein, 351 aa, unidentified
MKYYTSSTEFNCGIDLHAHQMYVCVMDRTGKKLVHTNIKHNDFDFFLKLVAPYQHDLTVCAECMFGWYWLADACEAAGLTFVLVHALYLKAIHGGKNKNDRIDSEKLAHLLRSNLIPPAYVYPAAKRPLRALLRQRLNFIWQRSQLLARVQSQQLAHNLPTLVTPNRDRWEEQLLAHETNPLRQLALQNNLALIRHFDVQIAAVESPLQKLTKTHAWRDYTLLQTVAGIGEQLGLTMLYEIGDITRFPTVKDFLSYCRLVKGTVASAGKIKGLRGAKLGNPYLRWAFGEAAISAKRDPLVIGPLYQRLEARMNGNKFKANAVLSIKLARSVYFMLKRHTVFDPERLVAALT

SEQ ID NO: 137157 - protein, 468 aa, unidentified
MENNYILYVGMDVSKGKADAAILKVSDRRSVKPKFLRKKLSFKFVKSEVASFLETVRNYSDVNCTSTSICFALEVTGIYSTNVYNYIKANLYENESIKFLNTDFVNQWRIAHNIAKSDPLDAQTISTIIGTDSDVQYVNDNVFENKNGYQDLKALVHRHYQIKKIYSQEINRLIAQCDCLFPELQYVFEPKSAAFIAVLSSYPTTHDIINASRVEVFDVIYEATKHRCSMDKVDKLFELCQDTLVPDDISSYGKSIILDLVENIKNIKGRLKSIERYIRDVASLNPAYKLLLTITGCGPVTAATVIAETGNIRRFKNADCFVSYSGTSPRNKRSGTSVETMGKISKKGSRYLRHAIYMIAEFARRHNPVLKHQFERIKNGNKKRHKLANIAIANKIARYIYSIMKNKSSFVISHDHIMRLPEETRDTFFNSISLDFPKNTRKQIYQYSDINGELHRFVYIKTDEMIPA

SEQ ID NO: 137158 - protein, 391 aa, unidentified
MTMYFVGIDISKYKHDCCIISAANQKVVSKFTFKNDKSGFEQLNLILNSLSTPEDIKIGFESTAHYALNLELFLENANHSFMEINPVLIKDFKKSQTLRRTKTDSIDYELIARWLMTVEYKPHSKGFYHAYSLKSLTRLRDRLVRQRSFYLVKITNVLDHTFPEFKPFFHERLSKTALYLLENYGSAEKIARMNSASYEKLRSISRGKFSPQQFIRLKELAANTVGVNNSIFDVELNSLLTLYKSLVDEIKTLESEINRLVDEVHPHYMSIPGIGPISAAIIYAEYGDISNFSSPNQMLAFAGIEPSVHESGTEAYNGKMVKHGSSQLRYVLINCCLPLIRFDVTFATYYARKRSENKPHRVAITHVAKKLVRVIYALESQDIDFDPKKLR

SEQ ID NO: 137159 - protein, 409 aa, unidentified
MDVVITRCAGLDVHQATVVATVRVPDDQGGRRVVTDTFGTMTADLLALRDWLHAYGVTHVALESTGVYWKPVYYMLEDAFTLLLINMQELKRVPGRKTDVKDSEWLAQLLECGLLRPSFVPPPPIRELRDLTRYRVQQVRDRSQEVNRLCKVLEDAGLKLTTVITDVMGKSGRAMLQALVDGTTDPAVLAELARGKLRKKLPELRRALQGRFRPHHAFLIGQIFAKIDFLDEALERLTTAIDQRLVPFEPMLTALDTIPGVDRIGAISIVAETGGDMTRFLTAGHLCSWGAMCPGQNESAGKRRSGKTRKGNRYLRGTLIQAGLGAMRKKGSALQARYHRVARHRGHKKAVVAVGHQILEIAFYIMRDGVTYEELGADYFNRRHAEKAVRRHVRQLEALGFHVTIEKAA

SEQ ID NO: 137160 - protein, 368 aa, unidentified
MDNDITAFVGLDVHKGAIAVAVADPGRDAPRFIGTTGPQLAELLKALAHVGQPQHTLIAYEAGPCGYGLARELGKRGYRCEVIAVAKMPRKPGERVKTDRRDALTLARYLRGAELTSVAIPDERDEAIRDLSRAREDAIRARLKARQQLKAMLLRHGYRYTGKCSWTAAHERYLARVRFDHPAQDIAYAEYRSAVREAHDRSERITAALREQVATWRWQSVVSALMTLRGVEFIAAVTLVAELGDLTRFAHPKQLMSYLGLVPSEYSTGESRVQGKITKTGNGHARRILIESAWTYRFPARMGPQLVVRNEGQPKLVRDIAWRAQLRLCSRFRRLQARGLHHNKACTAIARELAGFIWDIARQVPAAP

SEQ ID NO: 137161 - protein, 301 aa, unidentified
MAMRVTLEKPIIGVDVAKNELVIYHDQYDRLEAIPNTKVAITQWLKALASSCAIAIEATNVYHVLFADAAHEAGCDVYMVDGYQLSHYRKGVNIRAKTDAQDARLLARYLKNELDELRPWIPASPLYRQLLSLFRRRAALVQARTGLVQSWTNEPFLRTAFANQVNSMKRFEALVEKKIRDVLQEAGLMRQVNRCMKVEGIGFLTAARLVTSFQRGEFSGANAFIAFLGLDLRVSKSGQSDGPRRLTKRGDPEARRLLHNAAMSGSRTPAWKPFYEEQRKRGFSTTRGYVREPYAGLEAFL

SEQ ID NO: 137162 - protein, 366 aa, unidentified
MKKISTVAKRGNEIFKEPKLTIGLDLGDRTSHYCILDETGKVILEHSLPTTPKGIQQVFSRIPRSRIALETGTHSPWVSRQLTQLGHEVIVAHARNVRLIGESSRKDDQLDARTLARLARIDPGLLGPVRHRSAKAQIHLTVIRARAALVSARTALVNAARGLTKSYGERLRKCGTGQMNREITKGLSQELRDALEPLLQEIESLNERIAEYDRRIEQIGKEVYPEVALLRQVKGVGTLIALTYILTLDDPHRFRRSRDAGCFLGLRPGRRNSGMSEPQLHISKEGDGYLRTLMVQGAHYILGPFGEDSDLRRWGLKLAERGGKNAKKRAVVAVARKLAVLLHKLWVSGEVYEPLRNSHKVVSAVA

SEQ ID NO: 137163 - protein, 343 aa, unidentified
MKIHALGIDLGKTVFHLVGLDASGQVVVRKRCSRTQLLAFTANLQVRLIGREACSGAHFLGRALRAQGHEVRLMPAQYVKPYVHTNKSDYIDAEAIAEAVQRPRMRFVPIKTEEQLDLQALHRVRERWVMRRTAVVNQIRSLLLERGLTLPKGRSHLDEQLPRILEDAELNLSDSFRVLLAQLKLELEQLAARIEEMDRVIQKTARENEACQRLTEIPGVGPVTATALIAAVGNASAFGKGRNLSSWMGIVPGEYTTGGKQKLLGISKRGNKYLRRLFIQGARSVLQQRHKQVPGLSEWLAQLLARTHQNVVVVALANKMVRMAWAVLCKNERYRAPVLAITT

SEQ ID NO: 137164 - protein, 331 aa, unidentified
MHFSFFIGVDISKASLDVAIYPAIDKESDFIHIENTSKGLREMMSWLRKRGVRPKEMVICAEHTGVYTNQLIDFAYKKGLALSLNSPLDIKRSMGLARGKNDVIDSARIAEYAYTRREKLRLYEKPCKNIMTLQYLLTERRQYMRQRTALLNFKSSLVEYETASARHRNESAITGLDKLIKKTEDQMISIVYDSPELKHNYDLITSVMGIGLINALNTIVYTNNFRSFDSPRKYACYIGVAPFDHTSGTSVRGKTQVSKLCRTQQKSELTMAARSAIIHDPGLRKYYLRKMREKGGSHEMHGVVLNAVKFKLILRMFAVIKSGIPYKILNY

SEQ ID NO: 137165 - protein, 465 aa, unidentified
MKRHRRRPSPKPRTSPHALERLHPHAAGIDCGSAEHFVAVPPDRDTTPVRSFATFTGDLHRLADWLTACRVTHVAMEATGVYWIPVFEILEARGFQVILVNARHVKNLPGRKSDVSDCEWLRDLHILGLLRGSFRPADGIVALRGYLRHRATLIESSGALVQRMQKALVQMNIQLPLVVSDITGVTGLRILRDIVAGHRDPHQLAQHRDYRCRASEAEIVAALTGNYRAEHVFVLQQNLELFDRYQQQLTTCDAAIESHLAYLAATTPPRRSAPPAPRRREKPRRNEPRFDLRTPLHQLTGVDLSQIDGIGPYNALRLLSEIGTDMTRWPTEKHFTSWLTLAPSNKISGGRLLSSRTQPSANRAAAILRLAAMTVGRTQTALGALYRRLAFRIGKAKAVTATARKFAVLIYRILKEGLVYADPGAEAYDAQHRTHVVRRLRQRAANLGFALIDLSTGEVVEGAVS

SEQ ID NO: 137166 - protein, 343 aa, unidentified
MDHFAGLDVSVKETSLCIVDDAGRIVREVRVASEPEALLAVLTNPACHFKRIGLEAGPLSQWLFNALAEAGLPVICVETRHMRAVLKAQINKTDRNDARGIAQMMRAGLYRPVHVKTLRSQKQRMLLTHRKLLQSKAIAIENDLRATLRNFGLKVGVVGTVKFEARIKELVDNTPDLAVLVEPLLIVRRVLREQIGILHRRLLAIVRDDDVCRRLMTVPGVGPVVALTYRVTVDVPSRFRNSKAVGAAFGLTPSKHQSGESNRTGGISRCGDEMMRMMLYEAAHIMLVRSAKWSWLKAWAMKIARHRGLKKAIVALARRLAVIMHRIWVDGTEFRWTREVAAA

SEQ ID NO: 137167 - protein, 437 aa, unidentified
MGLELGWQIAVTALKGASSSFSKSVEVNNVSDMACGVDVHKDELVATIVGDSLKETKRCMNDVDGISSLEKWLKDHGCSRVVMESSGIYWVSLYLAFEDAGFNVFLANARQVKAIPGRKTDQISSEWLAYLLRSGLVKPSYVPEKRLRELRDLTRLRVKLVATGTAFRNRCHKVLNRVNIRLGSRLSDIFGKAGLEILEGLMDGKTIEEILERTENRWLRKREEEIREVVKGILSQSDIFILKQCVDMVRQVEAKVIEVDSRIEALVNERDVEIVASVPGVGRKSAAAITAEIGDPHRFEDGKKVVSAAGLAPSVYQSAGKNLTGGITKQGSKWLRRSMVLAARSAVKARDSRLRRYYLRLKARKGDKTAIVALARKMLVLVHHLLVNGEEYVEDGFEKRLKRGGSFQFAGVPLEEMAEVLRESGYVVTGPFSGSFR

SEQ ID NO: 137168 - protein, 356 aa, unidentified
MQEFSRGIPERTVGLDLGDRNSVYCIVDREGEVIERGQVATRPGALLERFSRMPASRVVLEVGTHSPWVSRLLVGCGHEVVVANARQLQLISKSTTKSDRSDAEMLARLGRMDPYLLHPIQHRGEQVQADRALLRARDALVRARTSLILSVRGQVKSFGERLPSCSAEAFASKAAAQLPEVLREALAPAVEQIHGLTQQIREYDRLVESAGRERYPETEGLRQIAGVGALTAVAYVTTIEDPERFATSREVGPFLGLVPRRDQSGERDPRLGITKAGDAYLRRLLVQAAHYILGPFGPDCELRRYGERILEQGGRGAKRRAVVAVARKLAVLLHQLWISGVTYEPWHRTEPSQRAA

SEQ ID NO: 137169 - protein, 394 aa, unidentified
MIYYIGIDISKYKHDFCIISNVGELIVENDSFENAKKGFQYFVDLLKSYDKSKVRIAFEATGHYSKNLELFLIDQGYSFMKINPLVIHQFLKARSLRRTKTDKADSIAIASYLMSVPYKPNSNLLYNIYTLKSLCRSREQLIKERSKFYVLLTNELDLTFPELKPFFKNDFSATLLYILDKYVNAEHISLMRDFEAIKKASHRRFSYAKFVSIKELAKNSVGHHDKNTDLLISTYVSIIQNFNDKIDPIDKQISTIIKELNPRMLSIPGLGEISAATILSEYGDIKNFSSSNKMLAFAGLEPSIIQSGTIENNGKMVKHGSGHLRYSIMNTAMIILRYSPTFYDYYHKKRSEGKCHRVALSHVCKKLLRVIYTLEKSNMDFNPSLLQWVLSDFL

SEQ ID NO: 137170 - protein, 341 aa, unidentified
MSVYVGIDVHRKRSRVAVVAGDGKVQLNRNVVNGQEPILRLIGGLPTGTPVAFEAAYGWGWLVALLEDYGFDPHLVHPLRCKAIASARLKNDKVDAAILAQLLRADLLPEAWIAPAPVRQLRAQLRHRASLVRLGTQLRNRIHAVAADFGYDRTGSYWTGPGRGWLAELDLPPVSREIVTDCLASIDALAPVIERLDGELHQRAKADPRVKVLRTLPGVGEFTALVILAEVGDITRFGSARKLASWAGLTPTVRGSDLTVRHGHISKQGSAWLRWVMNQAAQTAKRSPDFAATYAAIAKRRGKKIATIAISRKLLTRAYHLLAEQAAATPGTTTPHTSAAA

SEQ ID NO: 137171 - protein, 362 aa, unidentified
MEFFCGLDVAIEETAVCVVDDRGEVHLTVKVATDPDALFAVLKPFVARLRRVGHEAGALSPWLHPELVKRGLPAICLETQHVRAAMSAQRNKTDEKDALGIAHIMRTGWFRAAHVKTESCYRMRLLLTHRRNLKRKFLDLENAIRHSLKSFGIRLGGTSRGKFDQAVREAVADDPLTAELMDAMLSARAALWKEYCRLHDLVVKMVARSELCRRFLAIPGVGPVTALSFMTAIDDPTRFRRSRDVAAYFGLTSRRWQSGTSIDVKGRISKAGDADVRRALYEAASGLMTRFKGKDKVKTWGQQIAKRSCHRKAVVAVARKLAVIMHAMWSDGTFYVGDPMEAETDAARRAQIKVRKHLGALA

SEQ ID NO: 137172 - protein, 380 aa, unidentified
MQKPVLDSKNRIIYGALDVDDKHFNFSSYDVCTNEQIHLKCLANISKLIQKLKQYFKDLSQLKICYESTYLGFSLHRELNSKGIVCEVIASGKIPKLSQDRIKTDRLDALKLAKYYAKGLLTVIYAPTIEDENVREILRSRRLLITQSKKLKSHIINLCKRNRLDYKKEKNSLTVSYWTEPHKKWLQVKMNLLQKGSPLKFNLLSLNNLLTSQEIQIQQYNDEIKNISLTKKYNAPCRALECFRGIDTLTAMILASEIGDIKRFVHPRNLMSYAGFSIAEYSSGGKEKRFQITKIGNPYIRTAVVESCQFSFKPPQISRRLADRRLSGDSSYFYIADNCMNRLHKKSIRLLFNNKPKNKIKVACAREMLGFIWDVMHKVA

SEQ ID NO: 137173 - protein, 304 aa, unidentified
MTIQTQVSVYSQVFVPRDYDVFAGLDVDHHSIAATFTDHQRLMQSLRLPYSARQLLNYVGKHFPGQRLAFVYEAGPTGFGLYDELAAAGHACLVVAPPMVPRAPGQRVKTNRLDSRKLSTALRGGDLKSIHVPSAKYRELRHLVQLRDTHVQQLTATKCRIKALLLYEGIAFPSDQGKEKPWSAQVLNELLALQASESVRFKLDQLVGTLHFNYNSAAAAQKQIRHFCQRDPELRQAIAWLKSLPGIGDIIATHLVARLGDPVLITNVRQIAGFLGLSRASIRPATNRIAVRLPAWVTAGCATS

SEQ ID NO: 137174 - protein, 346 aa, unidentified
MMIIGCDFHPSWQQIAWLDSETGETGEQKLVHASGDAQRFYQGLAAPVLIGIEATGNSQWFIELVEDLGHEIWVGDAAQIRASYVRKQKTDKRDAAHILKLVVQGRFPRLWTPNREQRDLRQLVLHRHKLVEIRSRVKNELQHLAMNKGVQKKRTLWSQAGQTMLRELPLKPWASCRREDLLGLLAMLNQQVGELDGAVQQAAEQNPQAKLLMTQPGVGPNTALAYVLTIGDVSRFPRGKQVASYLGLIPQENSSGARRRTGAISKQGNRMLRGLLVEAAQIAVRFDPEMKKQYLHRCHQKPKGVAKVAAARQLAVRLYWMLRTQVGYPEIVRIESSPRVALVGAS

SEQ ID NO: 137175 - protein, 340 aa, unidentified
MTQVASIGLDIAKNVFQVYAADTSGDPLFNRKISRASLLEFFRKLAPCVVAMESCSTSHHWARSIGELGHEVRLIHAAYVKPFVNRDKTDANDAEAIHEAAFRKSMRFVPVKSTAHQASVMLFKTRSLLVKQRVRAINALRAHLAELGLVVRPGAANVALLIAAVRDRKNKALPPAAKTALKIVAKQIEALTRDIEALNSTLKAEAKADDEMRRLMTIPGVGPMTATAIRAFVPDASVFKSARHFASWTGLTPKSFSSGESVRIGGISKMGNPELRSLLVTGAMSVIRNTKVDTTNSWVASLKRRRPFKVASIALANKTARIIWALLVKGGSYGSEAAAG

SEQ ID NO: 137176 - protein, 372 aa, unidentified
MDAPTRDGIEVPKWKCLQPLEPKGASAMKITTVGIDLAKNLFQVHAVDERGRAVLRKQLRRDQMARFFANLLPCLIGMEACASAHHWARTLQKFGHTVRLMAPQFVKPYVKTNKNDVADAEAICEAVSRPNMRFVPIKSVEQQAVLSLHRVRQGFVRARTAQGNQIRGLLGEAGLIIPKGIVNVAKRVPALLEDAGDEVSASFRRLIQRLIEHLKELDRQVDELEAQIKAWHRGSELSCKLEKIPGVGPLGASALVASIADATSFDNGRQLSAWLGLVPRQASSGGKPKLLGISKRGDVYLRTLLIHGARSAILAAQRKAVNTNVWLASLLNRRHPNIAAVALANKNARTVWALLAHGREFRTDYAPEVSAA

SEQ ID NO: 137177 - protein, 391 aa, unidentified
MSMYFVGIDISKYKHDCCIISAADQQIVSKFTVKNDKDGFEHLLTTLNSLSNPEDIKIGFESTAHYALNLELFLENAHHSFMEVNPVLIKEYKKSTTLRRTKTDSVDCESIARWLMTVEYKPHSKGFYHAYSLKSLTRLRDRLIRQRSFYLIKITNVLDHTFPEFKPFFNERLSKTAIYLLENYGSAEKMAHMNSTSYDKLRCVSRGKFSIQQFLRLKELAANAVGVNNSIFDIELNSLLTLYNSLCKEIKTLEAEITKLIEEVHPHYMSIPGIGPISAAVIYAEYGDISNFSNPGQMLAFAGIEPGINDSGTESHGGRMVKHGSSQLRYVLLNACLPLIRFDITFETYYAKKRAEGKKHRVAITHVAKKLIRVIYALERQDVDFNVQKLR

SEQ ID NO: 137178 - protein, 392 aa, unidentified
MYIVGIDIGKNHHEASIVSPEGKQIGRSLRFATTHKGADSLMSFIFKNIGNSPCVFGMEATGHYWYPIYSFIKAKGYTIYVINPIQSDSLRKMYIRQTKNDSIDSFLIAEVIRFGQFGTTSLADENILAMRQLCRYRDSVISSRTEIKLRIGTIMEQIFPEYEKQFSSLWVSTSMGILEKYLTPDNIENAPIDELFEIIKDKSHNRLTRAKAISIKEAAADTFGIKIAQDAFSFQLKQLIDRMNFLDKQIEALDCQILEYYEKFDCYLHTIPGIGMIAAATILAEIGDINRFKSSSALVAFAGIDPTVRQSGEFSSTHNHMSKRGSPYLRHAIFLAATTCSFHNSPLNAYYKKKRDQGKHHLTATGAVARKLTTVIYAVLRDGKPYEPKSFC

SEQ ID NO: 137179 - protein, 345 aa, unidentified
MMVIGIDAHKRSHTAVSVDEMGRQGFVKTVGTTTQDHPRLLKWAVGLAEERLWAIEDCRHLTRRLERDLVAAGESVVRVSPKLMARVRDSARSYGKSDPIDDLAVARAALREPDLPIARLDGIEREIRLLVDHREDLVAERTRIIARLRWHLHELDPSWTAPTKLERHSAFDKVKAHLSGHNDGAMVRRLALRLVEHLRLLTDEINELTAEITVRVTTIAPSLLAIVGCGALSAAKIVGETAHAGRFRSKDAYARHNGTAPLPVWSSNKQRHRLSRTGNRQLNAALHRIALTQARCYQPARELLERRKNGGDGGMEGLRVLKRRLSDVVYRAMLTDETVPLRRTA

SEQ ID NO: 137180 - protein, 331 aa, unidentified
MDNFIGLDVSKSTVSVFIPQSELEIEIANTVKGFTQLFSKLKKLYKKEHDSLVFVYEPTSSYSSTLELFCANKHIRVFKINPKASHNFAKALSIRNKTDKVDARMLCHAGMLAKEEEIHIPVIDVIVEQINDLMSYYQLLVKQRVQTSNHLEKLQHKESTATLKKAFKQKEQHTIDEIKRLITKDSKLALKYQSIQTIKGLGDIATIALIHLFLKYPNANQKQIISLAGLDPIEKTSGTSVRGKTRISKAGNKLYRRSLFMGTMVTIRFNEEMKCFYDRLKEKGKHTTLIQIAVMKKLIIIARALFHSNQGYSSEIYQAHCGMVAQNSNVA

SEQ ID NO: 137181 - protein, 424 aa, unidentified
MKRTQNEKILQIKNDTLVVGVDIAKKWHYARSFDNRGIELGKLLRFENSAQGFVLFDAWVQEIQQKHGMTEAIVGFEPTAHYWFNLGDHLEARGHRLAILNPYHVKCARELDDNTPSKSDQKDPKTIAMLVKDGRYRDVYIPDGSYQELRELVRERERIQERLGSLSNQIVRWLDIHFPEFVTVFKNWRGKAAWIALRRFSTPERMAEAGAQEILLAWREEIKKPSLKRAQALCSAAEQSIGRTKGSVSAVMSLQNIMTEYELLMMQMEQVEEAMQESLIEIPHAAELLAIKGVGMVAVAIFVSEIGDIRRFKDPRQLIKYAGLNLRANSSGKYKGKTTISKRGRSRLRHALYKTMIPILATNEEFRSLHQRNLTRAENPLTKMQSLIALCGKLLRVIFALLKKGTQYDPSKIKVVTADAAQAA

SEQ ID NO: 137182 - protein, 360 aa, unidentified
MRVSIGIDIGKRKCDYCVVDSRGKVLERGHYINKPKFAAEVAKRLKAKYGKDIRAACETTGNMWNFTYDAFENAGIKILLANTYKMAIIAKTGKKTDKIDAEKIANIVRMDFIPECYVPGKKIRGLRALVRQRNSLVQDRTRYINRVHSLLDRHDLEIDASSMHSKKALIQLFAAKLDPIEDEMVLQRYARQIVNLTAEIEDMDEELADEAAQNEDAKLLASMTGIGPYTSLLLAVEIADVKRFAKARQMISWAGLCPMIVQSGDKTYSGKIKHMDINKRVRWAMSEAANTAVRFDTRMKAIYETARRRHAGLHGPAIIVVANKMINIAWYMLRSRTPYESRNENLYKRKLARLERKRKK

SEQ ID NO: 137183 - protein, 340 aa, unidentified
MTITTIGIDLAKNVFAVHGVDQNGKTVLVKSRVTRAALPGLIASLPPCVIGMEACSGAHYWARLFLQYGHEPRLMAAKFVSPYRMAGKSGKNDAADAQAICEAVRRPHMRFVPVKDESQQAMQCLHRTRQGFIEEKTATYNRLRRLISEFGVIAPQSTDALRRMVSVQKSSLPLQVQQCVDDLLEHVDRIEANITEYDRILSRIAKTDHRSQRLMKLKGVGPTTACALVACIGNAHDFKNGRQLAAWLGLTPSQYSSGGKSKLGRITKAGDSYLRTLLVQGARSVLIGAEKRTDSFSRWVCSLVERRGYWRAVVAIAAKNARLCWASLHYGDDFRLYSAS

SEQ ID NO: 137184 - protein, 401 aa, unidentified
MNKLVVGIDPHKDSLGICITHPDKDEVISSFSINNYSRVETKHLIGQAYKFAYELGTRPVFVIESTNVFWRPVFSFLKRFGAEVETVNSYQTKNLRKTLMRKTKTDTIDAKLICDLYKQGKAHKTTFPPEPLFSLRELTRLYKFLVDIKAMTLNRIQGYILQIFPELETILSKSCSHTLFSLCAEELVHPQIVSRTRIDKLTNLLSSASHGRLSRNFATILKSVAKTSFGLREGRIGFSFAIKALTLLYRQLENLLFNLEKERIEPLLSEVPQKFYSLKGLGTISAASYVSELGPPQRFNNANDALAWFGLDPSIAQSGRTKGTGRRISKSGTKYGRETMYLAAGSCLMHNSELKARYRQLKAKGRKPREAKTILAADLVKILYAMYRDNSEYNPNRIKSN

SEQ ID NO: 137185 - protein, 419 aa, unidentified
MSFKILKNNCCGLDVHKTWIYACIGITDSHSRTEYKQARFSSFTKGLQELCDWLAKYNCTDVCMESTGKYWIPVFNILEKNNVWVTLSHPKYTKPQKGNKTDRKDAKWICDLYMCGMVKPSFIPPADIRQLRDLVRYRFKLTCMITSEKNRAHNCLTVSNFKLDEVFSDIFGKSSRSITEQILQHPGETFDVAPFVDGRCKTPIEEIQAAIDGAISTEQAVKLRQCLDHIDELEKHQSEIEREIFRLSDKYEEVLNLIRTVPGFDKNPMTAIQVLSEIGGDMSVFPTAKNLVSWAGCCPRNDQSNHKIKSSRISRAGSYFKPVLVQVANALIKSKKNPEFTTRYRRIKARRGHKKAIIAICRMLLTAIWHILTDLKPYTPEGFLESRPVNEAKVLTTSQALNLLKQRGYVIKDDTVPVT

SEQ ID NO: 137186 - protein, 341 aa, unidentified
MKNKSFIGIDISKNVIDASIFCEGTPIKDFPHAVFNNSRKGFGEMCTWLKKNHVVLSNCLFGMEFTGSYSMELEKFLTARKYQFCMLSTHVVKHYPMGPKDKSDKIDSAKIADFLYRYNGTECVKPYKMPDKTMQRLKTLMNERKFLVEQRTCFMNRRQLCSTKEDAQLYDGYIRKLGHDIENIELEEQKLLATDDSLLTTYKNLLTIPGIGFVNAINAIVITRNFTAFETARQYASYVGVAPHSRTSGTSVRWRPRPSARCDGQAKADLSMAATVAVQYDAELQSFYNRKLGGKQDSDTKRKALNAVKFKLVLRMFAIGKQNRKWEPLDSKSSNEKLAIS

SEQ ID NO: 137187 - protein, 406 aa, unidentified
MPHYFAGLDWAARTHAVCVIDQQGSVVEHFEAAHDTAGLAELRRRLKRFAADAPVPVAIERPSGLIVDALVDAGHPVFPIHPNAVKAMRPRYRSHGAKSDASDAYLLADALRTDGHRFRVLAPQSEEIRALRALVRGRDDLVAARVELANQLRSLLESFWPGAATLFAEIDSPIALAFVQRYPTPQCACRLGEKRLAAFLAQHSYCGRRPVTEVLERLRCAPQGLAGELEADAKGELVRSLATVLERLVQQIASISSRIEHDVSQLDDGRVLMSFPRAGRICAAQILCELGNVRERFPSDALLAAEAGVAPLTYQSGKSRSVAFRWACNHRLRRAVTCLADNSRHASPWAARVYAQARSRGCDHPHAIRVLSRAWLRVLWRAWTDRKPYDPALHGALKAMLPVPVG

SEQ ID NO: 137188 - protein, 422 aa, unidentified
MEASGFRFVGFDCAEEEHSVVLLNEDGETELQRKVVNRRDRVEEALAELVLAIPEDLELVVVLESERSHGRVVADVARGLGVAIGKVNTVALNHFGDVEGPPRKDDDWDAYLAARMAYLRTKGCREVVEVSDEERALSKLSRSHASVTDDRVQFTLRLRAVLLELAPEIVGRSWQGPKIGSMAMELLLKRWPGFEGMEKARLLSIEKILRRCRYGARASDVAKDLRDMARRITFEKQERSAMTQEIEYLLRQIEVCNTTLESFKAEIAARVEPHPIGKKLLEMPGIGIIIAAVLLSELLPVSRTTTEAKSATYSGVTPLNRKTGKMPNRPRLARGTNKRILRALYLSSVASLRCSAIDKAYFTKKTQDYAGHPKPHVAAFIALSRQRHKVIFKLLTTEARYDKEKLFARHLERLEQNRGATA

SEQ ID NO: 137189 - protein, 361 aa, unidentified
MKKQTSRVWSLGVDLAGDSFEAALAPDGAEARDWRGFERRGFALAPASPQGAKELAAWARQRIGAGRCVRVVVESTGKISARFASALRGLGLPEVLVANPARIKMFAASQGVRDKTDPIDAAMIALWAAMNRPEPPEPPSETQGALREKTRLREAYVRDLNAWENRLGEMDNEDDQNVVTVTIEHLKKQIEKLESEIQRTIKHDRGMLRQARSIKRVKGLKDVAASTITAELGDLKTYTRTEAVSAVGLCPRQFTSGKQVLRPPRLAKGAGAEVRRVLYMSATSLYRSKGAFRAWIDQREAAGWKKMKIITALMRKLLLVARAVVVNDGHYDESLIGRATAQECSAEERALGGAGNRHILA

SEQ ID NO: 137190 - protein, 423 aa, unidentified
MMKLKYSICCGLDVHKNVIVATIVITNNDGISEYKQKSFSTINSDIQRFHNWLIENNCFHVCMESTGKYWIPIFNYLENDIDVCLTHPKYVKAIKGKKTDKKDSKWIADLYKFDLVRCSFIPPKDFRQLRELARYRFKLVCMKSSEKNRIQNCMTVSNVGIASVLSDPFGRTATEIMSYLLEHTADSMDEKAVRKLIKKGARAKSDEIIEAIRGYNIEADQAKKLELARGHLEYLDDMITQTEVELYVRIKPYYEFVEFVSTMPGMTELSSTIVLAETGVDMNIFDDAKHLCSWCGLAPANNESAGKKKSVRISKAGDYLKPMMVQCALAAVKNKKQPYFAIKYGRIKKRRGHKKAVIAIARMMMVCIYHMVSEKKPFSPTDYEELMDPRNHVERVVLNEDNVFAYLESLGYDSSKLVKRNDN

SEQ ID NO: 137191 - protein, 406 aa, unidentified
MELEAIHQRVIGLDVHQGQITAYAILTEADGTLRTEHREFKTFKRDRRALGQWAASLKPDEVVMESTGIYWRSPYAALEGQGIIAKVVNARHVKKVPGRKTDVSDAQWLAILARAGLLNGSFVPPAHMRELRLVARQRQQFVGQLSAEKNRLHKVLTDGGIRLSVVVSDLHGQSARAMIKALIKQSSPSEVLSYASGRLKAAREELFEAIQGELSASHLFVLEQLLSHIEQLEARIGDFDARLLAGLTDQAPILALLQTLPGIDRIGAAMLLVEIGEDMNAFGSADRLASWVGICPGNNESAGKRMSTKIRKGNPYVRRLLCEFAHAARMTQCAFRDKFQSLMPWRGFKRAIIAIAHKLLRTVFAMIKRREPYNDRSVDYLVLAAKRGAPRWAKALKRIGKKIVTA

SEQ ID NO: 137192 - protein, 375 aa, unidentified
MKEKLRFLGLDVHAQTIAVAVAEPDGEVRSLGTIPNRNESIRKMIKKLGPAEKLRACYEAGPTGYVVYWQLAELGIQCEVVAPTLVPIKAGDRVKTDRRDAEKLARCYRSGDLTAVWVPDAGSEALRDLVRTREAAKQDQMRARHRLSKFLLRSGQRPPSGVSPWTRPYLIWVAQLRFAQMAQEATRQDYLHEVEHMRERVARLEQAISEAVKLASPALQQVINDLQALRGIGDISAVTIAAELGQVSRFDSARQLMGYCGAVPSEDSSGKRTRRGGITKTGNAHLRRIVVEAAWSYRRPPCIWYGLRRRQESISEETKEIAWKAQHRLYKRYRTLSAAGKDQRKIVTAVARELLGFIWAIGTKAETVARQRVAA

SEQ ID NO: 137193 - protein, 526 aa, unidentified
MKKVEAAPHPGPDTTSVVIHNRPKRAAQISHREIVNNTAAAHDRTAGRSATPGIQTTWPRLSKAWERSLSQARASGPIAERTLPQEGLRIRLRPSRKPGGKGRAHKTMKPWNEIQHFAALDWASDHHDVIVVDRSGQIAADFRFDHSPTGWEQFDKAMASFTGAPIAVETSNGPAVDQLLNRNWQVYPVNPKSAERYRDRKLPSGTKTDHFDGWSLAEALRTDGGNWRKLLPQDPRVVELRLICRDEVALIEQRTALVNQLQAALREYYPAALEAFEDWTLPAAWAFVLAFPTPQELQKAGRRKWEKFLHVHKLWRTQTVERRLEVFARATALSGSAPVTAAKSRMACALARLLQSLEVQLEGFRRRIEQLFAEHPDHDLFGSLPGVAEKLAPRLLSSLGDNRAQFPDAESLQCIGGTAPVSFQSGQINKAHLRHACDDFLRSTVHLWANLSRRDCPWAEAYYRAHRAKGHSHAWALRCLGHRWLKILWKMWQDRTPYNPELHQKNQLAHGSWVLQMLNPATPHPV

SEQ ID NO: 137194 - protein, 428 aa, unidentified
MNETELSRVKEFRQLKNEIQASDTYLIVGIDVAKERHHAFFGTGTGKTLLKKLIFDNTSAGFSGLLARAEALRAQSGLSDIVFGLEPTSNYHKPLGSYLISKGCHVVLVGGKAVKNNRELLDERWDKHDTKDAANVADLVSRGKCFYYDTPSWEIEELRELHSLRTRLKKEEHSLSLRIRNNLLAKHFPELDSFYSACEREALAIVRWCLNPRKIAAMPFDEFFNRVAPNARGIAQKLRLQKIHRLAHESIGCPVGCAVELQAALLVEKIKQVREQISEVDHLIGQVCAQFPSYEYLLSIPGFGPYVASKVLATLADPRRFDTAKQVVRTAGYDLCADRSGKSSDQAVPVISKKGNSHLRYALYQAAMVASSRHRFFIAYFARMLQGRERERGIRTKMRVKLAAKMLVIAWTLMKKGEPFNPEYLNAQ

SEQ ID NO: 137195 - protein, 408 aa, unidentified
MNPLFVGIDVSSKSNVAYLMKPDGSKYSSFSVQNNLGGAKILSEKIVSALRSMQLSDVVIGLEATSIYGDSLVYALREDGSLGQFQRKIHVLNPKQVKKFKDAYPDLPKNDWVDAFVIADHLRFGRIAKEVYMDDYRYQALRTLTRARFDVIQNLTREKQRFANYLFLKCSGMAQDKDIQNTSATTIALMERFETVDDLANADLDELTTFVAETGHGRFVNPESTAKAVRAAARGSYRLPKTVNDTVNQAMSVSIASMRALKEQVKVLDKAIEQQFEIIPNTLTSIHGIGKVYSAGIIAEIGDIHRFDSQASVAKFAGLVWHKDQSGEFEAEHSRMIKSGNRYLRYYLLEAANSVRRCDSEFRRYYDLKFKEVNKFQHKRALAFTARKLVRLIFRLLKDNRLYIPPEG

SEQ ID NO: 137196 - protein, 361 aa, unidentified
MENVENVKNYVGIDVGKRQLEIIRILPDGTLQRHHTGTSHTALCGLMRWLRDDDMVVLEAGNLSFLIAKKIRDERNLPVTVLNPGDVATIYQSLKKTDKEDSLKLARLAQRHPLEELPTVRIPSDEEEAWRRLCSEQSYWSRELTKGKNRLHSLFVSAGLTHLTTKDMDSKKNRARAVGLLPQHCTAESIRITRHMDMIEENLSAIIAEILEVLKEHGGYANLVMSMPGIGPIAALTLLAYVGNCERFSHGKQLGYYVGMVPRVDISGDTVRYGRIITRGCAPLRRIIIQCANALLRAKDSGELGVFYMRLKERKGHNKAIVAVARKMLEVLYVMITSGELYRYASADFVEKKLKRYGIEA

SEQ ID NO: 137197 - protein, 342 aa, unidentified
MQTTSAKELYAGADLHGNNVFLSICDREGTEVFRRRVRTTLDAVNEAMDPYWPQVQAMGIESTFNWYWLVDGLREQNRDVRLGNPAKMKQYKGLKHADDASDARWLAELLRLDIFPESYIYPKEVRSIRDALRRRQLFVRRRTQVMLSLQSLLERYGFKAPGSRALQQWTQADAEATGLDPFVQLQLRTLLEAVQCSERLAGQIESAVLGFIEPNPSFEQVQTVPGIGKALGMTIVLESGNFARFPNAGCYASYCRAVKSERSSNSRKKGENNKRNGNPFLAWAFVEAASFAPRFYPEIQSWYDRKKKKRNAIVAKKALAAKLSKAVWHVMNGEEYVMGMLF

SEQ ID NO: 137198 - protein, 314 aa, unidentified
MTKTMKDSIGIDISKDHLDVHRCATGAAARFTNDPAGFRALKRWIGDRQPHLLIYEATGPYHGRFEQALAGKLPLVKVNPLQARRFAQASGTRAKTDQVDARVLAQMGAALDLVPDRPAIEGQSELKELQIARTALVKDRTRLKNRLKTQTLAMTRRHTKARLAQVERQLIALQGEIAIRLKASAKRARAYAILRSISGIGDVVAAAILIECPEIGTLGKKQAAALAGLAPMTRQSGKWKGKAFIQGGRKYLRDALYMPALVAIRFNPDLKDKYQAMIKAAKPPKVALTAIMRKLIELANALIKADRMWEPKTA

SEQ ID NO: 137199 - protein, 360 aa, unidentified
MKLGQEVVARSVVGGVDTHKDLHVAAVVDEQDRVVGSQCFAATRHGYKQMLAWMRSFGQLRRIGVEATGTYGAGLLRYMQSAGVEVLEVTTPDKHDRRKRGKNDDLDAQNAAHAAFTGRRAVIPKSRDGMIESLRVLKACRKTAVAARRVALQMIQNTIVSAPDELRETLRKMTRMQLVRTLAAWRPDLSDYRNLVSAYRITLKSLGRRYLELHDEIADLDTMIIGIIDELAPALVARNSIGHGCAGQLLLTAGDNSERLRSEASFAALCGVSPVPASSGKIIRHRLNRGGDRAANSALHIIAIGRLRTDPRTQAYMAKRIAEGHSKLEVIRCLKRYIAREVFALISHRRREINQIRLSA

SEQ ID NO: 137200 - protein, 354 aa, unidentified
MDKITTVGLDLAKQVMAVHGVDATGRMVMRKVLRRDQVLTGSAALPPCVIAMEACGGAHHWARELTGQGHTVRIIAAEFVQAFRKSGKNDANDAEAICTAARQPTMRFVAMKSVAQQAALCVHRLRQGLVEERTALINRLRGLLTEFGVVAPLSPEKLRRELARCLDPADLRVPAPVRALVADELTALDHLETRISTYALQIAAHARDDERAQRLLAIAGVGPITAAALVATVGQPQDFRNGRQFAAWLGLTPRQHSTGGKTCLGRITKRGDAYLRTLLILGAKSALQAALRKPPELRHALHRWIVAVHDRIGYHKALVAIANKHARIIWALLVKGEDFDVWRVTPKVVAVAAA

SEQ ID NO: 137201 - protein, 318 aa, unidentified
MNIIGLDISKDTIDATLHKTNGSIHYIKFKNNDDGLKQFRLWIKGNRIRKVYIGMEATGIYYEKAADMLSSYYTVYVINPLKIKDYGKSRFNRTKTDKADSNLIADYIKRHQDTLIPYQIPKNKALQKLINLKNQLQQQQKQIKNRLHSTEEDFIRNIHQDLIDTIQDKMEQVKIAISEQIKKQTDNNHYRNLQTIPSIGKDTASVLYAQLTEKHFKTANQFVSYAGLSPAIIQSGTSVRGRGRLSRYGNRRLKSTLYMPALCAYRFNAFPKLINNLKKAGKPKMVIIVAIMRKLAKLAYYIVKTGQPYDAERHRLNQ

SEQ ID NO: 137202 - protein, 315 aa, unidentified
MAAEVWVGIDVSKARLDVALGATGELFAVANDARGIAGLSARLVELGPELVVLEPSGGWETALVAELGAAGLPLAVVNPRQVRDFGRAGGQLAKTDTLDARLLARFGDRMRPAVRRLPDAQELELKALVARRRELVEMITAERNRLGTAAKVLRKEITAHIRWLEGRLKERDRELGRMLRSSPLWREREDLLRAVPGVGPVLCATLQANLPELGQLSRHQIAKLVGVAPLNRDSGAMRGRRTVWGGRAQVRAALYMATLAAVRCNPALKTFYLRLRHAGKPAKVALTAAMRKLVTILNAILKNRTPWSSPCAPTT

SEQ ID NO: 137203 - protein, 344 aa, unidentified
MTQLNTIGVDLAKNVIQVSVVTTRGKELCNKALTRKKFAEFLVLQPPALVAFEACATAHHWARLAKGAGHRIRILPAISVAPYRQGHKTDQNDALAVAEAAVRPHIKEAPLKSIEQQGLQAIQRSREMLIRDRTAISNHIRGLLLEFGIAIPKGFYHLHQAVPAILEDAENGVPDMFRPTLHLMHERLLQIKRDIDQLTQQIESLVKTNDACQRLLDIEGVGPISAVLLYATLGSGEAFHNGREFSAYLGLTPKQYSSGGKTNLIGISRYVANKRLRAVLIQGARAYIHRIKEPKTPKDKWLMAIVNRAGYGKAAVALANKNVRTAWAMLTRGTEYNRFEGLAA

SEQ ID NO: 137204 - protein, 420 aa, unidentified
MKAYNIDNFAALIGIDWADKKHDICEHPNHTDKYHYSIIKCKPEALHEWAMSLKKRYPNQQIAVACELKKGPIIYALAKYNHITLFTINPSTVAKYRKAFTPSGAKDDPTDALIQVEILTLHMAKLTAIEPETPAMRSLTQLVEYRRNLVQDSVDLSNKITATLKNYYPQALEWFKEKDTFIFCDFISKWSSLAKVKRVKKQTLLDFFNSHNSHYAHVNDARILSIKSAMPLTEDVGVIEPNKLLVEVLIAQFRVLLKGIESLDIAIKDAYKVQDDKVIFDSFPGAGPQLAPRLLVALGSNRDRYDDASELQKYAGIAPVIERSGKKMWTHWRYSCPTFLRQTFVEWAGFSIRYSFWAKAYYEQQKSKGKPHNSIIRSLAFKWIRIIFRCWKTSTPYDESKYLEALKRRGSPLLKFAINS

SEQ ID NO: 137205 - protein, 438 aa, unidentified
MRRKKSKASSKKVNLQSLPVIQPDAAGIDVGAKEHVVAVPCDRDERPVRTFQAFTPELHELAAWLKRCGIRSVALESTGIYWISLYEVLEQHGFEIRVVNARHVKNVPGRTKTDVLDCQWIQKLHSFGLLNGSFRPDQQIRKLRTYMRLRDNLVVNSTQAVHHMQKALFEMNVQLSNVISDIIGESGLRIIEAIIAGERDPEQLAALCGTRIKASRQTVAKSLHGNWDEALLFCLKAALETYRFNQVKIQDCDGRIERHLAEFESRAELPTLPKDLQAHLHRICGVDLTKIPGIKEQSAQIIISEVGLDMTKWNTEKQFSSFLGLCPNNSISGGKVLRRATRKVYNRAADSLRLCAQSLTHSKSALGAKYRRLRARLGAPKAIVAMAHHLARLVYRMLRYGDKYVEKGIEHYEQKFRLQRIKWLKKEADSLNLQLIAA

SEQ ID NO: 137206 - protein, 318 aa, unidentified
MSQHITVSAGIDTSKHKLDVALEGKNDRLQVDNRPEGHEWLSDWLRRHGVNRIGIEASGGYEFAVVATLRRNGFVVVVFQPAQVRAYATFHLQRAKNDKIDAALIASCTKDAKKIHAPPDPRLAAFAGPLTAIEQMTDDVARLKTRRESCRDAHFRQFWKDEIARVKKQQKAEFRALVAAIRQHQDLARRLALINSVDGIGLPTAVAILVRMPEIGQITREQAAALVGLAPYDEDSGTHVGARHIAGGRERLRSALYAAALPAAMRWNPQLIALYQRLTGAGKLHKVALVACARKLLIFANTVVARDAPWTSQQSAAV

SEQ ID NO: 137207 - protein, 405 aa, unidentified
MDIIVERGAGLDVHKHRVVACIMGVGMKKEIRAFLTVTNDLLRLKVWLREHSVTHVAMESTGVYWKPVFNILEDTFDVILVNARHVKNVPGRKTDVLDSEWLCKLLRSGLVRGSFIPPKPVRELRDLTRYKRKLIQTITAEKQRVEKILEDANIKLSSIASDTFGASGKKIIEELLKGKLRPDEMAELSKGRLRKRKEELKEALVGNVEEHHKRMIRTSLEHINAMEEILVTVEQKIQEKIDFHFKEEFELLKTIPPVKDSASVIIAEMGVNRGLFPTEAHLFSWAGMSPGNNESAGKKKSGTTTHGNLYLKTILTEFAWIASKMKGTYLWSKYQSLIGRKGKKKTLVAVGHKILISAYQILKYRVPYKELGANYLDQRKKARIAKSYVRRLASLGYTVTVTEAA

SEQ ID NO: 137208 - protein, 394 aa, unidentified
MFLVGIDIGKNKHSFCIIEKETGELIVKPKFFDNNNIGFEELISSIQNLSNQDILIGMEDTGHYHFALLKFLLDKKYQVALINPVTTNLTRKLQGGITKTDKLDTLTICDVLSSSQRVKSYRITKVDRFDMYEQKQLTREHHNLKEQLNILKNRLQKSIDIVFPEFNSLFDSKYGTVYVNILKEFGSADAVARADIRTIRKCFDIKGKGRRIALTAEKLKEAAKNSVGFPSTAEVVQIKHLINQVKLIEEQISEIDKKIEEFSISNNSPILSIPGISHFSGTSILAELGDIHNYSKPSQIIKFAGVAPITYESSQFTAQHTAITKKGSKYLRKTLYQIITPVINNNEVFRNYYQLKLSQGKGNRCAQGHCVRKLMRVIFHLLNTNTQFNPSLLV

SEQ ID NO: 137209 - protein, 416 aa, unidentified
MSSRTQSRPRIKADILVVGIDVAKRTHVAAIRKPDGTKEKPFPFGNDRSGFERLRARSERTRERLGLNGVVFALEATGHYGHALRQYLGLQGYAVLGINPAHTKKAKELEDNSPEKSDQKDARLISDLAAEGRGRLVRPVKGVFAELRRLGKLRERYVVERVRLSNRYSCLVDLVFPELVQEVRKLTIRSIRRLLAEYPTAREIAGLELEELEDRLGRWSRRRLRPDKIARIHRLARESIGIVEGLETARMEMRQLLESLELVEQRLQEVEAAQHAALEKVPYAELLLTVPQLGSVTVATILGETGDLRHYKNAEMVIKMAGYNLYTISSGMFRGKTRITKRGRPMLRRYLFLAACRLSKKGAPLREFHERLTARKAKPQVLVGSCRKLLRLLVAMVRDGKPYEPGRLAVPLGEAA

SEQ ID NO: 137210 - protein, 416 aa, unidentified
MEVIVSRCAGLDVHKNTVMACVRVPGPNGGRTSTVRQFRTFTAGLRQLRDWLVAEQVSQVVMEATGVCWKPVWHVLDATPGLELMLVNAYAVKNMPGRKTDVADAVWLAELGECGLLRPSFVPPPVIAQLRDLTRYRKKLIEERARETQRIQKLLEDAGIKLDSVVSDILGVSARQMLEALIAGVRDVAALAELARTRMRPKIPQLRQALEGRFGAHHALMLRMHLEHLDQLSVSIDRLDSEVDRVIRPFRSVLQRLITIPGVGRRTAEVIIAETGADMRRFRTAGHLASWAGMCPGNHESGGKRRSGRARKGNAALRAALCEAAWAASHARSGYLPAQYRHLLRTFGKKGQTRAVFAVGHSILVIAWHLMAHDRDYADLGGDHFTRATDAEARERYLVRQLEALGHKVTLEPAAA

SEQ ID NO: 137211 - protein, 404 aa, unidentified
MLFVGDDWAEDHHDVYLMNDAGDRLASRRLPEGLAGMRVLHELAATHSEDPTEVVIGIETDRGLWVDALTAANYQVFAVNPLAVARYRDRHHVSGAKSDASDAKLLADLVRTDRHNHRLVAGDSGDAEAIKVLARAHQNLIWARTRHTNGLRSALREYYPAALEAFADLADRDALTVLGRAPTPSDAQRLSLAKIRSALKAAGRQRNIDVRAQEIQAALRAEHLAAPAAVTAAFGASTRAAVAVIAELNHQIGDLEAELATHFETHPDADIYRSLPGLGVILGARVLGEFGDDPNRYTTAKCRKNYAGTSPLTIASGKKRAVLARHIRNRRLYDAVDQWAFCALTNSPGARLFYDQRRAAGDLHHQALRALGNRLVGILHGCLRHHTVYDEHTAWAHRQAPAAA

SEQ ID NO: 137212 - protein, 353 aa, unidentified
MLAELVDHVIGIDPDRDWITAAVLDANTTGIVATAKFAANNDGYDEAIEWAEIHTTVGDRSWVVEGSGSYGRGLTAALSRVGEWVIEFDRPHQRPTKDGAKTDELDAVRAAREALGRHRLHTPRTHDGHREALRVHTVTRAGVVRARTAAINELKALVLTSPDGLRSELRGLSTMALITRCATFRTTSKRPIAEQCVRNTMRVVARRIQHFNDEIDVHDVAMKQLVNDTAPQLVAEPGIGYVTAAMFIIAWSHPGRCRSEAAYARLGGVAPIPANSGQSQDRHRLNRYGDRQLNSAFYVVALARMCHHEPTKAYVARRRAEGKTDREIRRCLKRYIARKVWRLLEHQAPKIAT

SEQ ID NO: 137213 - protein, 375 aa, unidentified
MRKSTKIVAMDIHKDSITVAVAEPGRKPSRLFGDIPATSEAVAKLAQQLGGPSTRLRFCYEAGPCGYGVYRQLSALGHECTVVAPSLIPRRPGDRIKTDPRDAVSLAALHRSGELTSVWVPDEEQEAMRDLERCREDMKHAERRLRQRLGAFLLRYGRIYPGRSRWGQAHFRWLETQGFDHPTQQIVFQEYVDAVKQARERVEGLEKAMHEALADWSLEPETRGLMALRGVAEITAVTVMAELGDLTRFDTPRQLMAFVGLVPSEHSSGAHRRRGSITKAGNAHVRRVLAESAWCYRFQARKTACLQRRAEQTTPAVQAIAWKAQKRLCGRYHRLTARGMPKNKVCTAIARELLGFIWAIAWELRQPGSIVTRPA

SEQ ID NO: 137214 - protein, 410 aa, unidentified
MKKIKPKIKANTVQVDHRNIVGIDIGKRKHAATAVTPKGGVIASLKMFENHKAGIDLLERQVLVPATGRSKPLIAMEATGQYWNAIHDELLRRGYSCVVLNPIQTGNRGTKRIRKTKTDPVDSELIARTILAGDAQATLVPDESIYELRLLVRHRWRMIRVHGVVLRYAIGLLDRVFPEYEGVFCKPFLTSVRTLIREVGLTPKILVSKKAKVIQTLEKASRKRLTPEAIAELLKRAKYSIGTQQGEAVVNEQFRRIVDYLDFVEGQLQTINKELRDRMAVVNSPLMSLGIGAEVAATILAESGDITRFPGPDEYSAFCGLDPSVRDSGDSIRGISHISKRGSPLLRWALYVSAQTMVKKHRDFTRIYERHLNRNKGHRFATIVVAHKLARVIWRMMKDGRDFTKRPPKR

SEQ ID NO: 137215 - protein, 369 aa, unidentified
MKKLSTVRGSGSKIFKEHKLTIGLDLGDRSSYYCVLDEAGEVMQEGSVSTNKKAMAKVFGSIGRCRIALEVGTHSPWVSRILHALGHEVVVANPRQVKLISASSRKDDRVDAQTLARLAQIDPQLLRPIQHRSAKAQGDLMVIRVRSALVEARTGVVNTARGLAKSLGERLPICDTDQMGIEQTKSLPAELQRVLEPLLKEVVSLTEKIKEMDRTVEQIAREDYPETKLLQQVKGVGPLIALTFVLTLEDKARFQKSRDVGCYVGLRPRRGDSGESQPQLRITKEGDACLRKMLVQGAHYILGYRGPDTDLRLCGLKLAVRGGKRAKKAAVVAVARKLGVLLHRLWVTGEVYEPLRNAHTQQAMKEAAA

SEQ ID NO: 137216 - protein, 415 aa, unidentified
MTTNSPTNFNTSTFGLYMSLELSASIWKLGFADQLGRRVRVRSIVAGDLANLVAEIDSAKRIFGLPGDAPVVSCYEAGRDGFWIHRCLVSMDIESHIVEPASIQVNRKKRRAKTDRIDAEMIVSALMRFKAGDRFACRMIRIPDADDEDARHLNREMRTVKTERTAHTNRINGLLVTQGITENLIDRKFLQRLEELKTTEGKPLGLNLKTRLIREFERLALATEQIRSMQMQQASLIRKAAKEIEQSEKQSTRQAIIAEHLSQLCGIGPVTSWTLSTEVFSWRDIANRRQLAALVGLVPTPHDSGDEEREQGISKSGRGELRVLMIEIAWGWLTHQPDSDLSKWYRQRFADGTKRNRKIGIVALARKLLVALGKYVKQGEIPPGAKLKSERKFPYMTSLKQGRGSAGDARLSTVA

SEQ ID NO: 137217 - protein, 342 aa, unidentified
MSFYCGIDLGARESQICVINKRVKKVLEVKTTNKLEHIKQLLTPYKADLQIVVESTFNWYWLVDGLQAAGFKVVLAHTLGLHMITAAKVKTDRRDAFALAKLLLAGVIPTAYIYPAETRPVRDLLRRRGRLVQVRAGEYGSLRRLMLRQGILSRQQQEIKQAEEADLEKWFTHPLVRLHASQELERIGLYSQQLKELETTILEQAKKEWAFTQMQQLPGIGPIIALTIFYEMGELGRFATEKDFSSYCRVVPGVAQSGQMTKRGRGSKQGNPYLKWALSQAAVHAVRCYPGVRRYYERQLQRHRGRARQMVVYNIIAHKLAQGVYHVLKERTEYREELLFGR

SEQ ID NO: 137218 - protein, 353 aa, unidentified
MSNDKYIALDVHQATTVTSVLNAAGREVDQSVIATKSQPIRSYLEGFSGPLHVTLEEGTYAAWLYDLLEGRVAELVVCDPRHNALLKEGSKTDRNDARKLADLLRTGMLRPVYHGSRSVRPLQELVHSYEALVEDTTRAMNRIKALYRRRGIDCAGRGVYTQKQRASWLEKLPAGASRLRGELLHAQLDHTRSLRRKARLALLQESRKHLISARLREVPGLGPLRVARLIAWIQTPHRFRTRRQFWTYSGLGLVIFDSSEYRLVKGRVVRRAQPVKIRGLNRNHQPRLKEIFKSAALSAIRQPGPFKEYYDCRVQQGRDPALLRLSVARKLAALVLSLWKKGGRYRAEDVKQA

SEQ ID NO: 137219 - protein, 338 aa, unidentified
MKYSVFGMDIAKQIIQLHTVNPETGEVERHKLKRSQVLEFFVRREPALIAIEACGGAHWWARKLVEQGHEVRLLHPKSVRPFVLRNKTDAADARAIWTAVQQPEAHEVAIKTEVQQSVLALHRMRAQLMKFRIMQTNALRGLLYEFGVVLPQGHTALLKALPETLGALDAQLPAILLDSLCEQWARVQQMQVEIDHIERRLAFVLRDTPQCQQIAEIPGVGLLTATAAVATMGEAASFKSGREFAAWAGLVPRQRGTGGQVRQLGLSKRGDVYLRTLLMHGARSIVIRHRNLPWIAALLARRPYNVAVAAVANKLARTIWAVLAKGKPYDPAAFSAVA

SEQ ID NO: 137220 - protein, 411 aa, unidentified
MDYTLIECCCGLDVHQGFVMACLLRGPANSKPRKQIRRFGTMPADLVELREWLRAAGCTAVAMESSGVYWIPVYAALEGHFELFVANPQRIKQIPGRKTDVKDCQWLARLLRQGMMPQSFVPPKPIRQLREMLRFRRKMVERAASQRNRVLKVLEVAGIKLASIASDVFGVSGHAMLTALAQGTASPTEMAALAKGALRRRVTELEQALSVPLEEHQRMMLTLSLDSLDYDEAQLAQVERAIDRHLEPYRAQQQLLMRIPGVDRIIAATIIAEIGVDMSVFQDIDHLVSWAGICPGSNQSADKRFSTRIGHGNPFLKTALVQAAVCASRKNGSYLKDKFFRLKARRGFRRAAVAMARKILVIVYHMLKFGRPYQDLGDAYLDQLSHSRTKRNLVRRLQRLGYKVLLQPNPA

SEQ ID NO: 137221 - protein, 433 aa, unidentified
MAKVRPQVIDDEEHERIYERVAAVDVAKDSGMVCARTPHPSRPGGRQSAVWTVKARRNAIAKLGRQLSQDGIEMVTLESTSDYWRIWLYVLEAAGLAVQLVNAAQARNLPGRPKTDKLDAMWLARLTEMGLLRPSFVPPAAIRELRDYTRARTRLTQERTRCFQRLEKLLEGALIKLSSVASKLTTVSAQDMIKAMIAGQRDPQALAALARGRMKARHDDLAEALDGMFDDHHGELAQLLLDQIAFLDDRISTLATRIRQAVTAIPAAWGVDAGGATGPGAGTGPDAAVLPAVQRLAEIPGMSEDLARSIIAETGLDMTRFPDAAHLVSWAGLCPSARQSGPRTRAGGKGQGDSWLRGYLGQAAASAAVTATFLGERYGRIARRRGKAKAKVAVARSILIIIWVRREALSLRMEVKDRPSPCRRSGGVKLEAA

SEQ ID NO: 137222 - protein, 349 aa, unidentified
MTIVGCDLHTRKQQVAVLHTDTGEVVEQELLHAGDAVEQFYRTLPRPVTVGIESTGYALWFHELMQRLGHTLLVGEAAKIRAMVVRKTKTDRRDAQHLLDLLKHDRFPAVWIPDPATRDLRALVTHRMRLVRMRTMVKNGLHAIAMNRRLTLGPSLWSQRGLAQLQGLALAPHTTQRRDESLQLLTWLTARIEGLDDRVAAAAQADPGARLLLTHPGVGPLTALTTVVVLGPVARFPDSKHVVSYTGLAPAVHASADTCRLGQITKQGSPLLRFVLGQAALIAAHSEVDLKRHYRTLLRRRGRPKAIVAIARKLLVRLYIMLRDQIDYEEFRRRGRTPRGPEVPPPALA

SEQ ID NO: 137223 - protein, 449 aa, unidentified
MAKKKRKYRKLERSLPVMRANAGGIDIGATEIFVAVPADRDTESVRSFPTFTQDLHALADWLQQCRVDTVAMESTGVYWIPLFQILEARGIEVHLVNAQHVHHVPGRKSDVLDCQWLQYLHSVGLLRASFRPEHAVCEIRSLMRHRENLVQMACVHVQHMQKSLDQMNLQIHHVISDITGVTGLAIVDAIVAGNTNPKELAKLRDHRIKASIETVTKSLVGDYRPEHIFTLKQSLTAYRHYQKLIADCDQEVQQRVEAFQSNDDGPTAAADSSSATSPTAPSFDLHSHLERIFGVDLTAIPGFDVLRIQTIFSELGADMSPFPTDDTFCSWLNVCPKDGTSAGRRIRAPKVKTKNRVTQAFRMAALSLHNNKSYLGDYYRFQRARHGALKATKNAAHKLARIFYHLVKTRQPYDETVFAKLEARNQKHRLHKLQTLARQMGYSLVQANA

SEQ ID NO: 137224 - protein, 422 aa, unidentified
MKILALDLGKFNSMCCFFDTKTRKHQFLLAATERNYLTTVFKKHQIDLVVMEACGPSGWINDLAVSLGLKTLVCSTNEDAWKWSNVKRKTDKDDALKLARMAAMQELKAVHMPSAEHREFRALVKYRKTLDYRVNKMKNTIRAWFVNHGISIDAGAKAWNTGRAKIDSFRKPLAECQPDELWRGALDLELTQLDAVSEQLDLVIKKLEEIGKRDPRIGRIMTIPGVGPRTAEILVACLDDPHRFENGRQVSAYFGLVPRQYQSGETDRNGRITKRGNPLARTILVECAWVSLRYNPWAKAVYERISGKQKTRKKKAAVALARKLAVIAWALLRDDKDWDPKTMIAVTQSFGHMNPSLQETLQTMKPKENSDQRKKRRRKEARETKAAREAKAPAEPRVPAATTKAPSSKSQPRRARKPVSRG

SEQ ID NO: 137225 - protein, 321 aa, unidentified
MKTNTAPSVVSNSPTPGTVVPSGFTLGLDLGDRSHHVCVLDATGQVVRDGSLSNTRPALAKLMAEFPRATLALEAGTHSPWISRFLTEHGATVLVANPRKLHAISRSERKCDQRDAQMLARLARVDPALLHPIQHGSAQAQHDLLGLKLRDALVRTRVNLINAVRFTLKSLGHSVRNPSSESFHKTVLADVPADCLLVVQPLVTVLAQVSAQIKGMERDLVQRSKKDYPVTQRLQQIAGVGPLTALCFVLKIGDPQRFSRGRDVGAYLGLCPRRDQSGGTDKQLRISKCGDGLLRRLLVSAAHYVLGPFGPPCALRKRVSS

SEQ ID NO: 137226 - protein, 352 aa, unidentified
MEIIALDAHKRYSYVCVQKKDGRFLCEKRINHSKGAIKQFLANWTAGTDVALETVGNWYWIVDEIEQAGMEPRLVHAHKAKLMFGSINKTDKLDARGLNRLQQTGTLPCVWIPQGEIRDHRELPRTRMVFANLRTRLKNRIHSVFDKYGLHTDFEGTSDIFGSRGREQMALTIKQLPLETRYTLRCLLRELDMVESQIRRIEKRMEKVFSQTEQVKRLMTLPGIGFILASAIANEIGDISRFATPQRLASYAGMVPRVHSSGGHTRYGKLRSDVNHYLKWAYSEAGNSTAVNYKRFPFRHTSKLYKRIREKKGHAKAVGAVGRHLAEASFWVLTRNEDYKEPEVKSVSPTAV

SEQ ID NO: 137227 - protein, 342 aa, unidentified
MAEIVTIGLDIAKSVFQVHGVDAAGQVVVRRQLRRSHVLKFFAGLTPCIVGIEACATSHHWSRQLQGLGHSVKLMPPSYVKPYVKRQKNDMADAEAICEAVMRPTMRFVETKTPEQQSVLMLHRIRLMLVGQRTMLSNTIRAHMAEFGIVAPIGRRGLDQLLAVLSNLDDERVPALARDCLVAVAEQLMLVKSKILDMDRRIAACHRSSDMSRRLAEIPGIGPLLATALVATVPEPRAFASARNFAAWIGLVPKQNSSGGKERLGGITKQGNRYLRSMLTVGALAVIRYAERYGTKRPWIIKLLARRPTKVAAVALANKMARMAWAIMAKGERYREPGVVAA

SEQ ID NO: 137228 - protein, 341 aa, unidentified
MKKFIRTAIDLGKTYFQVHGLESEGGQSISRKMKRSKMREFYEQIEPCRVGMEACGSGHYWARELVAMGHEVVLIPPAYIKPYIKRGKNDAVDAAAICEAMSRPGMRFVPIKSADQQAVLMLHKSREMFVKQRTMSVNALRGHLAEFGIIVAKGIGRVDELLALAQSDTELPQIAKSTVAGLAQHLEGLDQSIEAVGDEIARAHKQNPTSRLLDEIPGIGVLIASVIASSVPDPSVFKTGRDFAAWLGLTPRQNSSGGKQKLGSITKQGNRYIRKMLVVGATSVMRVAGKRKGALADWINALQAKKPKRVAAVALANKLARICWAIMTTGEGFRVDTYVKA

SEQ ID NO: 137229 - protein, 346 aa, unidentified
MAIVETTRSITGGVDTHLDSHVVAALDPNGAVLGVAAFPATRSGYCSLSNWLGEFGTIGRIGVEGTGAYGAGVARHLRSLGVEVIEVDRPNRQLRRAQGKSDSIDAIDAARAVLSGRATGVAKTADGNVEAMRALLIAKRSGREARITCLNQVRHLGFTAPDELRERFGRVSRGMLAAQAAALRPRPDSDAVIYATKLAMRSLGRRVLGIDEEIARLDVVLGELVTATAPGLVGLYGVGVDTAAILCVAAGDNPQRVRSEAAWAHLCGVAPLEATSGKVTRRHRLNRGGNRQANHALWRIVFTRLGSDPRTRSYVARRLDEGRSRPEIIRILKRYVARETYRHLPR

SEQ ID NO: 137230 - protein, 365 aa, unidentified
MKKIAYVGIDYHLNSLSLAVVVKGKNEPVDMVRLKNDDKLIRKYMSKLSERFEIKTCYEASSNGYSFQRKMAAWGYPCEVIAPSLIPRKPGDHRKNDFRDARDLAQNYAHGTLSIVHPPSEEEEAVRSLVRCRFAFKEAAKRVKQQINSFLLAQDQHWNRSKWTSQHRKWLWEMRMPNACLQQVLDEHLAHLDYLEIRLAHLDGQIEQVATSPVYAPSVKKLAAMKGIKTLTAMLLIAEITDFRRFPNPRALMAFLGLIPSEDSSGDKRKDGAITRAGNKRCRSALIESVQHYARSPHMSAQMKSDLSQLDAHSAGVAVKCLKRLHKRFWALTLKGKLRPVAITAIARELVGFIWAMMQPQPAIA

SEQ ID NO: 137231 - protein, 366 aa, unidentified
MVYKRLNSTKALIQKITMEVPQDIMYYIGLDVHKKTTSYCVKDASGRIHDEGKIGATRNDLDSWMKILPQPWTVAMEATIFTGWIYDHLLPHAERVKVAHPLMLRAIAASKKKNDRIDAGKIADCLRCDFLPECHMASTEIRDRRRTLRYRHLLVRQMVQMKNRVSGLLMETGVSHNKQRLHKVGYFGELLSTNKEVHESIRPLLRLSRETIVRCQKTEYALVSSLQRDPLLAERIKLLRTVPGVGPITALTWALEMGNVSRFRSIKQAISYCGLCGEEKNSADTVLRTPLSKQRNKHIQHVLVEAAKLAPRQSHELALVYEKEKQKGNANRATLAVARKMVAYLLAVDRGKRAFVPLEDHSTTAA

SEQ ID NO: 137232 - protein, 353 aa, unidentified
MLIIGCDFHPGFQQIAIFDNQTGAYEERRLSQRAEAEQFYRSLAGQQVRVGMEACGHYPWFERLLAELGFELWLGDAAKIRASVVRQQKTDRRDAAHLQMLMREDGFPRIWVPSLEERDVRQLLVHRHKQVQARTRSKNQLHALALSQGVQKKWKLWTAAGRAELESLELLPYAAQRRRQLLHRLDALEAEIAALNRQVEEEVKGRPAAGKLMTHPGVGPVTALAMVLTLGPAERFRDGRKVGSYFGLIPSEYSSGGRQRLGHISKQGSSFVRFLLVEAGQSAARKDAELGRFYRRLGARKHRALAKVAVARKLAVRLYLMWREDWTYAQLCRAVVQASPSHSVAASQNRPLE

SEQ ID NO: 137233 - protein, 315 aa, unidentified
MKKLTTTMMQRLFNKQDGRLTIGLDLGDRSSCYCVLDEAGDVLLEQKVSTTPKAIKEVFGAIPRSRIALETGTHSPWVSRLLSELGHEPIVAHARSVRLIGESRRKDDRLDAMTLARLVRIDPQLLCPVKHRSAEAQADLTVIRARAALVRARTMLVNATRGLTKSYGERLRGCNARGMNPKAAQDLSPELKRALEPMMSEIESVSERICEYDQMLESMTRNRYPEAERLKQIKGVGTLIALTYMLTLEDPHRFRKSRDAACYVGLQPGSATRDRASRRCTSAKRAIRTYEHSWCRLRTTFSARGASTATCADGA

SEQ ID NO: 137234 - protein, 400 aa, unidentified
MLLFFEVITMIFVGIDVAKDTHYAAVSDNSGAVLVKPFAFQNNAEGFCLLLKKLSEFDRSKLLIGLESTGIYSENLICFLYESGFRLAVINPIQTATLRKTAIRKTKTDKVDTMLIIKSLMVNSYRLYSQRDADSLKLRTLCRFRQNLKNSKARLKIQLAGYVNLVFPEFGKFFKSGIHIAASYALLKKYSSPKEIAALRTSTLCTLLSKASHGRFGKDTAEALKSLALSSVGVKNPYISIQIAQTIAQIELLEQQIKDLNSAIEEAMESINSVLMTVPGIGAVNAACILGEIGDIKRFSKPCKLLAYAGLDPTVRQSGQFTAKSTRMSKRGSALLRYALINSAWQLTLNDTTFKAYYDLKRSQGLNHYGALGHVAHKLTRVIFKLLTSDTPFNPAKLVA

SEQ ID NO: 137235 - protein, 406 aa, unidentified
MEVVYKQCCGLDVHQKSVVACVMMPKGKESRTFGTMTQDLLELSDWLVSCGVTHVAMESTGVLWKPVYNLLEGLGLTLLVVNAHHIKSVPGRKTDMKDAEWIAKLLQHGLLRGSYIPDRPNRELRELVRYRRSLIQQRAQAVNRIQKVLEGANIKLSSVASDITGVSGRAMLEAISSGQDDPDTLVLLAKGRLQSKRVELKQALRGLTGPHQRLLIQSLLRQLDFLANEVTSLDKEIADRMVSCEEAINRIDTIPGVGRRTAEELLAEIGPDMSRFPSAAHLASWARICPGNNESAGKRKSSHIGQGNRWLRSALVEAARATAHTKNNYLSAQYHRLAARRGSNRATIALAHTILVIIYYMLVRGTSYHELGGNYFDERNEQAAIKRAVNHIEQLGYKVTLELAAS

SEQ ID NO: 137236 - protein, 347 aa, unidentified
MNITRIGLDLAKNVLQVHGVDERGKALLRKRLKRGEVVAFFARLSPCLIGMEACGSAHHWARELAGLGHTVRLMAPQFVKPYVKANKSDARDAEAICEAVGRPSMRFVPVKTLEQQSVLSLHRARQGFVAARTAQANQIRGLLSEFGIVIAKGIRQIEGRVPEILEEAENGLCGMNRALFQRLFEHFRQLDRQVKQLEEQIHAWHREQVDSRRLAGIPGIGPLTASALTAAIGNAREFAHARQLAAWLGLVPRQASSGGKDRLLGISKRGDVYLRTLLIHGARSVLRRTRACPDPAQGWLAQLVHRRNPNVAAVALANKNARIVWALLAHGREYQPGYVGARLPTAA

SEQ ID NO: 137237 - protein, 348 aa, unidentified
MDHIGIDVHKRDSQIYILAEGGEIIEQRIRTEPQRFAAVLGARPRARMLVEASTDSEWVARCLEALGHEVIVADPNFAPRYATRSRKVKTDRRDARALAEACLLGAYRSAHRLSDPQRHVRGRLGVRDALVHTRTRYISVIRALLRQHGYRVPSGSANSFIDRVQGLPLPGRLRSVVAPLLAVMRPLNQQLAYSDAAIEHLAVQDPRVPRLRSVPGVGPVTAAAFLAAVDDAQRFHHAHQLEAHLGLVPREYSSGETQHRGPITKAGHSRPRWLLIQAARSILRCRPPAAEALWTWALRIAARRGKHVAVVALARRLAGILYALLRDETVYAPRRPAALPDPAAALHA

SEQ ID NO: 137238 - protein, 343 aa, unidentified
MQDVATVGLDIAKQVFQAHGADASGETLFNTKIKRENVLEFFSKLKPCLIGMESCATSYHWARQLLEFGHDVRLIHTSYVKPFVKRGKTDANDAEAINVALTQKTMRFVPVKTLNQQAAITIFRTRSLFVSQRTQLVNALRGHLAEAGLIAAKGIQNYSKLVKLMDSAADTVLPTVMKKALTDICDQIHRLNDLVTKLDKEIERRVQHDENACRLLTIPGVGPKTAMCVIATIPDIHRFPSGRHFSSWLGLTPRTHSSGGRSVLSRITKMGNSELRTMLYLGGTVIMMRDKKTPIGRWASRLRARRPYKVAVIAVANRIARIIWALLTNGGVYDPTYGREASA

SEQ ID NO: 137239 - protein, 371 aa, unidentified
MGKSSKSLFIGLDVHKDTIAVAYAAEDRGTEVVSLGMIGTRQYDIDKLIRKLEAKGATLLFAYEAGPCGYWLYRYLTRRGLSCAVVAPSLIPRKPGDRVKTDRRDAVTLARLLRSGDLSSIYVPTVDDEAIRDLSRAREDAVRDLKRHKVRLKAFLLRQDIRYEGRANWNAAHLRWLARVVCPTPAQQIVFQEYVHAVSEQTDRLGRLATELQTAVTTWRLYPVVAAVQALRGLNLTGAVTLIAEVGDLTRFDTPRKLMSYLGLTPSEYSSGEHRHQGGITKAGNGHARRALVEGAWAYRYPAKVSRHLQLRLENVPAEVRAIAWKAQLRLCKRYRLLSARGKHVNQVVVAIAREMAAFAWAIARTVPIAA

SEQ ID NO: 137240 - protein, 354 aa, unidentified
MSQTQNAAIAVVGIDIGKNSFHIVGHDERGAIVLRQKWSRGQVEARFANMPPCLVGMEACVGAHHLSRKLNSLGHNARLMPAKYVRPYSRGQKNDFRDAEAIAEAVQRPTMKFVATKTADQLDLQALHRVRERLVSQRTGIINQIRAFLLERGIAVRQGQRFLRAELPRILATPPDVLSPRMVRIIEDLAGDWRRLDERVESLSNEIETIARQDAGCERLMSVPGIGPIISSAMVAAIGAGDAFTKGRDFAAWLGLVPKQISTGDRTILGKLSRRGNRYLRVLFVQAAWVVLIKPKIWERHGLKPWIEAARKRLHHNVLAIALANKLARIAWSVLARGRAFEARKIDQAANQSA

SEQ ID NO: 137241 - protein, 318 aa, unidentified
MELGNTQNINVGVDVGKSQLDIHVRPLGISFTLENSQDGIKQAIKLLRKHAPQRIVVEATGRLEMPFILACADANLPFVIANPVQIRRFAGAIGQRAKNDRLDAVLIANYAETIQPKITQIKAKNIRLMSELVILRNQLMNMQTMEKNRLQIMPKELHATIKVMLITMKKLITKIEEKLITLIEDCPEYQEKNEILQSVPGIGNIAAASIISNVPELGYITNKQAASLIGVAPITKESGRYKGKRVTQGGRAKVRTVLYMAMMSAIQCNPIFKATYQRLVACGKPKKVAIIACVRKMVVVLNTLLKNGTHWCAKSAVI

SEQ ID NO: 137242 - protein, 365 aa, unidentified
MPSTLRPSSKSQVRDGQEVVVGVDTHKDFHVAAVVTALGFLLASKAFPTTRAGYQALVRWARGFGPVRRAGVECTGSYGAALARHLAATDIEVFEVNQPDKANRRRRGKNDAINAESAARSVLNGQASALAKDGQGPVEMLRMFKVAKTSAVKSRTQAINQLKAILVSVDPVLRDELRDLSTAKLVQRCIAWPPATPCDTATAARFALRLLASRIDRLSQEIADLNAQTASVLAGHNPAMLDTYGVGPDTAATLLIAAGDNPERLRSEASFAALCGVSPVEASSGKTQRHRLNRGGDRQANSALRSIVLVRLRWDRRTRDYIDRRVREGKTKREAVRCLKRYIARELYRVITAPDPRTAPARQAA

SEQ ID NO: 137243 - protein, 444 aa, unidentified
MTIRQRSTSSSTDPPVRREVVLGVDTHGEVHVAAMISPLGKVLGTESFPATAAGYRQLLVWARRAGTVRRAGVEGTGTFGAGLSRYLLAQQVEVYEVNRPDRSARRLLGKPDPLDAQAAARAVLSGRARARAKSGDGPVHSARIFKLAKDSAVKARTQAINQLKAVLVIADPALRERLSSLGNAELFRTCATLSPPDGGGDEDAADQATHLTLRMLAERIEQLTGQINELNQRLTRLVERHAPQLLVPVGIGPDSAVTLLITMGDNPERLNTEASFAALCGVSPIEYSSGRRSTRRLNYGGDRQANAALHRIVFTRLRHDPRTQAYFERRTQEGKNPTRDRPMPQAIRSPRGLQPGQTGFPHPHAIGASVTRRSPAVAEDLDQAGEAGLAGLGEHHREDHGRAGPGRAEGAQTAGADPPGEAAGRPGPRAPALPRHPTCSGAGT

SEQ ID NO: 137244 - protein, 362 aa, unidentified
MSKASWLVSGVVPGVERQPLKKLEPDATALLRLIERWRNEAVRAGRPIRRIALAYEAGRDGFWLARWLIARGIEAHVIHSASVAVSRERKRAKTDRLDAAMLMRVFLGWLRGERGHCGMVAIPTMEEEDARRPNRERESLVNERSRIVNRMKSALARLGIRGFKPHLRKAPERLAGLRTAEGTGLPANIIEEFRRDMARLALVREQISSIEKTRAERLERAPDTGPHAMVRLLARVIGIGIETADMLVREILSRNLRDRRALARYAGLTGSPDESGLKSREKGLAKAGNARVRRGLIQLAWRFLMFQKDSALAQWYRTRTEGPSGARKTTMIVALARKLLIALWRLVTTGEVPDGVELRPAA

SEQ ID NO: 137245 - protein, 333 aa, unidentified
MTETTSIKFAALVGIDWADRKHDICLQVADTGEREFSVLEHGPEAIDEWANALRVRFSNQPVAVCLEQRKGALITAWLKYEHLVLFPVNPRLLAGLRRAFSPSGAKDDPTDAEIAVDILLQHRDKLRAWTPGDPRTRQLQVFVEARRRLVEQRVRVTNRLTANLKGYFPQALDCFESLDSVLACDFLTRWPSLGEAKRARAETLRAFFLKHNVRSQELIAARIALLKSAMALTSDAGVIVPALLATRTLVAELRTLIAGIERYDVAIAKVFNAHPDAFIFRSLPGAGPTFAPRLLAALGADRARFESVRAVQEYLGIAPVTERSGRSEWVHWR

SEQ ID NO: 137246 - protein, 374 aa, unidentified
MRVDKKRRVNVNGCGMNSIVAGIDLGDRESLTTVLSPIGDVTDTFTFPMTEEGYAYFANRVPHEARVAFESTIMAYPTLRALRNHGYGDITVAHPKTLAWIVKSKKKNDRVDSLKIAKLHMAGMLPESHLLDRDQQIVRDLLVQRAMLGVEIGRLKNSVIGYLKREGLHDTLPRTGDSFSAKRREAIRSLRFNDNRDLVLGTMMDRLAFLERQCLPLENSVKENAKLSEPVRLLMTITGVDFYLASLISSFIGDVNRFPSDDHLASFFGIVPTSRDSADVKRRGRMTKDGPSMARWALSITVDTVMHHNQPIKDYYTSVKKRTGSGKLAHVATMRKLIRMLYHMLKTKEHWNWENPQLTERKLSRLHMGGGVVS

SEQ ID NO: 137247 - protein, 337 aa, unidentified
MSVYVGIDVHRKRSQVAVVTEDGKVQLNKNVVNGSEPMLRLIGDLPSGTPVAFEAAFGWSWLADLLEDYGFDSHLVHPLRCKAIASARLKNDKVDAAILAQLLRADLLPEAWIAPAQVRQLRALIRHRISLVRLGTGLRNRIHAVAADQGYDRSAGYWTGPGRGWLAELDLPAASREIVTDCLAVIDGLAPVIDRLDGELHARAKADPRVKVLRALPGVGEFTALVMLAEIGDISRFGSARKLASWAGLTPTVRGSDLTVRHGHISKQGSAWLRWVMNQAAQTAKRSPEFAATYTAIAQRRGKKIATIAISRKLLTRAYHLLASMQADGTATPPPRP

SEQ ID NO: 137248 - protein, 419 aa, unidentified
MSETASWESITHYAGFDWAKDHHDVVLVNQQGKIVKDLTFEHSAEGWAKWKEMVAAYPHLAVAIETSQGAAIEQLLASGVAVYPVNPKSAERYRDRKAPSGTKTDYLDAWSLADALRVDGHGWRALKPLDPLIQELRLLCRDEVELIGKRTELVNQLQAALHEYYPAALQAFEDWTATPSWSFVQRFPTPELLRGAGRRQWEKFLHVHRLYRPELNEKRLDIFAKAHEFCGPAAVTRAKSRLALTLIKLLQALEKQLEDYRKEIRRLFNEHPDHDLFGSLPGAGEKLAPRLLSEMGSDRSLFESAQAVQCYVGTAPVSFQSGQVRQVYTRFMCNKSFRHAVHLWADLSRKFCSWAQVYYQQLRAKGKSHATALRCLGQRWLKILWKMWQTKTCYDPDLHMRNQLKHGSWILTVKPVDSK

SEQ ID NO: 137249 - protein, 351 aa, unidentified
MPRRSTVCAVTTIGIDMGKNTLHMVGLNSLGAIVLRERVSRGRITSRLANLPPCLIGIEAGMATHYVARELAALGHDAKQVPPAYAKPFRQGHKNDFRDAHAVAEAVQRPTTRFVPAKTDEQLDLQALHRVRSRLVSERTAVINQIRGFLLERGIIVRQGQRFLRHLLPDILAKRTDVLSPRMVRIVSDLAGDWRQLDGRIETVTDEIETLAKSDDSCRRVMTVPGIGPLISSAMVAAIGNGTAFAKGRDYSAWLGLVPRQKSTGDRTILGRITKRGNGYLRMLFMQAARVILLRPKNWPKHGFGAWLVRAAQRLHPNVLAAALANKLARIAWTVLAQERSYEARVTKAAA

SEQ ID NO: 137250 - protein, 398 aa, unidentified
MVLTKQSEAPEQVTERGRVAVGIDPSRSALQIALLFPERESPRNCRLPLEPASVNKLEELLEGRKATFAIEGAASVGQLFLLELLSKGHDIREVHPKVSKNVREVFTEDHTDIKDASGLAYAVRFVPSLPSIGLSSEQAAAKRLSRLRERLVRDRTRHINRLHACLTETYGYVYHEFFRELSSKKALRFFMQYPALNDALAHPKEVRREIGEQAWQALKSVGDWTDGVYMRILRQEVAVSVDMILELKRQVDEVEREMKASPWGRNIEVLTSMPGVGAIIASTILGNTGDLSRFKNQDTYAAYCGLAPASWQSGASETRNRRRNRYNRHLKRVFLSLALTQIRVSSEAREYYDRKRKEGKNHWRALRALARQLCRIVFLMLRKEQPYSFVNHHYKTIA

SEQ ID NO: 137251 - protein, 358 aa, unidentified
MSKVAQAKVDGKPLVVGPEDAVHVGLDVHKSSIHAAVWLNGRVVRHWVMPAESARVLRKLEPLRPALKRVVYEAGPTGYGLARRLRGAGLPVRVVAPSKTPHRTDASAKSDRLDCISLAEYSAGGLLHSVAVPTEAEEADRQVLRLRDQVMGKRRRVKQQIKSLLLQYGIAEPAGLTHWSRSGVAELAELALCAELRFCLDELLAELAESDRRLARVNQQIAELTREERHAAAATLLQSHPGVGPITSMTFLTELYQAGRFRNGGQVARYFGLAPRVRQSGASRRDGPICKTGRGHVRAILIQAAWRWIRRDPRAKAVFNRLVHNTGLSQKAIVGMARRLAICLWRMRLTGELYRTAA

SEQ ID NO: 137252 - protein, 364 aa, unidentified
MGTVSQTMGVDLAKHVFSICELDETGRVCQRRDLQRAAFAAWLTQLPAGTVVAMEACSGAHHWARRCLSHGLAPKLMAAQFVKPFRKSQANKNDRNDAEAIATAARQGNMRFVSVKTVEQQARLSWHRVREGYKTEALAIGNRLRGLLAEFGVVVAQRDEALRRALGDASIQASLPAMLGELLDALAGHWRQVHERLAECDARIAAHARADVRSVRAQRILGVGPLTADAVVASVGDGQDFRNGRQLSAWLGLTPVQRSSGGKDRLGSISCRGDSYLRTLLIQGARSSVQRAKAVAVEKATPEQVWIKDLSNRLPLGKVLVAIANKHARQLWAMLARQEDYDPDAWLKHPMVQRPASRKATMMV

SEQ ID NO: 137253 - protein, 359 aa, unidentified
MWPRLRSVRSPVASNGLEAMEMIVIGLDVHKQSVAAFAVDEAGRPLAEKAIQVGSEELLGWAAALDGERLWAVEDCRQLTGWIERQLVGAGEDLVRVPPKLTVPERRAGGTRGKSDPIDALAIARAAIREPGLSRPRPDERIYREIKLLVDHREDLLARRTRSQQRLRWHLHQLDPTYEVPLRRLDRATQLERVARWLARREQELQARLARDLVAIIRQLNRTISELDQELEARTTEVASALLEIPGCAAITAAKLLAEIGPIDGFKTDAQLARHGGAAPLEASSGKSQRHRLDRGGNRQLNAALYRIAITQAGYHAPARDYLERKRSEGKSRREALRCLKRLLVRVVFNTLKTSPALT

SEQ ID NO: 137254 - protein, 408 aa, unidentified
MEIMYPRCCGLDVHKRSVAACVRRLEAGGCLDQETRTFGTMTRDILEMADWLAAAGVTHVAMEATGVYWKPIYNLLENRFTLLLVNARHVKHVPGRKTDVKDCQWLAQLLQAGLLRPSFIPARPQREFRELTRHRSQLVAEKARVANRLQQVLEDANIKLGVVATDILGVSGRDMLRSLVAGEQDPGKLADLARRQLRSKIPELRRALEGKVTEHHRFLLGQLLAQVEHLEGQIEALSRRIEELSGPFAPAREAVVSLPGFEQRAAENVLAEIGADMSVFPSEHHLSSWAGVCPGSNESAGKRKSGKTTKGNRWLRSALVQAAWAATRKKDSYFQAQYRRLAARRGKKRAILAVAHSLLVVIYHMLKTGSTYQDLGGDYFDKLNKNRLVPYLVRRFKDLGFRVTLEAA

SEQ ID NO: 137255 - protein, 411 aa, unidentified
MAKLFCGIDWAERHHDIAIVDDSGTRVAKARITNDAAGLRELLNLLAKVGDHAGEQIPIAIEKPHGLLVASLRTTGRQVFAINPYAVARYRGRHGASGKKSDEQDALTLANILRTDMTAHRPLPADSDLARAITVLARAQQDAVWDRTQLGQRIRSLLHDYYAAALEAFGHLRNGGVTKAEARVILALAPTPARAATLTRGQIRAALKRAGRARKVEEDVERLHQIFRAEHMRLPDLVEQAMGDQLTALLGQLEAACAAEKNLANAVEEAFTQHPDAEIITSFPGVGPLVGARLLAELGDDRTRFADARGLKAYAGSAPVTRASGRSKHIMNRKVKNDRLAAAGYLWAFACLRPSPGARAHYDRRRASNDTHTAALRHLFNRLIGCLYHCLQTRRTYEETTAFPPRLAAAA

SEQ ID NO: 137256 - protein, 359 aa, unidentified
MVKNSMLIIGLDLGDRCSYLTILDQDGELIEESRLPTTKVSLQGKFSNLQPCRVAMEVGAHSRWASQLLKDLGHDVLVANARKLRAIYHNPRKGDRADAETLARLARLDPALLSPIHHRSPQAQADLAVLRSRDAVVRSRTLLINHARDIVKASGSRLPSCSADSFAHKVAPDIPESLRPALAPILDTIASLTQQIRAYDRKIEELCSERYLETKLLREISGVGPLTSLAFILTLENPDRFRRSREVGPTLGLVPRRDQSGDKDPQLRITKTGDPYLRRLLVGSAQYILGPFGPDCDLRRWGLRLAERGGKNAKKRAVLAVARKLAVLLHRLWKTGEIYDPSYHARKHDQALEAIAAVA

SEQ ID NO: 137257 - protein, 482 aa, unidentified
MKKRNIYQNQSQELLNLFEEAGSSAKVMCVPMDYAKKDHLVMFCNGHGDILRKPFSVMNSPEGIEYLLDQATRSSHRRGIKKKHVFFGGEDANSFAENFVSTLRYKGWLVAGVNAHDAKKQRANLQASTDRLDLMGIATMLLNCRANCCPAQSGIYRNLRTLVRHRRKLVVMSTEVKNRIHGVVDRLFPGFLNEGKTGIVPFTSSSLYLMEDRFSPKQIRRRKREKLIEILKRFGTSKVEETADRLQQYAAQVLHTPADYVDTLQLSLAQHVKHLRCLQESVNQLEKEIAVNLAQTQGAFLTSVRGIGIVLAAGATAEIGDPNEQKPLNNLVSYSGIIPRVKQTGGADGKTYTGKVAKRCNRILKDYVAKSALHIGLHGPEDLMADYKRRDASGQHADFGIGRRYLRMAMCLMRTSQIYLPHRLRKAEAKMEERAGYYLTTWPKLREKWLKYGALEFAFGKNRPLGQWRQIVQKLYDIKLKL

SEQ ID NO: 137258 - protein, 372 aa, unidentified
MKKRSSSRQNPKPAAKAKRAQQSVTIGMDLGDRNSRYCILSSEGEILREGQVATTKAEMIKTFSRLGRARIAIEVGTHSPWVTRLLQSLGHEVIVANPRQVKLITESSRKDDRLDAQTLARLARIDPQLLRPIQHRSEKAQTALMVIRVRAALLSARTSLVNAARGLAKSLGERLPKCDADQMGVPQGESLPPNVQGVLEPLLKEVESLTEKIKDRDQKIEQIAREDYPETTLMQQVGGVGPLIALTFVLTVENKDRFQKSRDIGCYLGFRPRRSDSGQRQPQLRITKEGDPYLRTMLVQGAHYIISRRGPDTDLKRWGMRLAERGGKRGKKKAVVAVARKLGILLHRLWVTGEVYEPLRNQNLRKERKQAA

SEQ ID NO: 137259 - protein, 399 aa, unidentified
MSYQTLFVGIDVSKFKHDIAIVNEQKQLVGRPFVIKDDLDGYQYLIGKLDDSMQRYHTQRCYIGLESTGDYWKNIYYFLKQQPQPFVVTVINPVQTRAHAKSELRRASTDAVNAKDIARFMAEKQPPASFDRAPMLDNIKDIDRQIYQLKKQQTMTVNKLRIELTKVAPEIEKNIANIQGKQILALLAEFPTAELIANSSCQQLATIRYGNNNWALSAPFIEKVKALSQHSIAYKTGLGAGYAVQSLVRGLRQFQREIDWLKSQLVKLYQRVTDQESLLATIPGISRETAILLEAYIGDVHRFSNAKKFVAYFGMNPTVCTSGTSQRASYLQKKGNALVRHKLFMAVLGMIRREIDPIHGYYKRLVDAGKPKLVAIGAAMRKLLVIIYYMLSKNEPFKN

SEQ ID NO: 137260 - protein, 358 aa, unidentified
MRQQSNEISFKGQNIYVGIDVHLKSWSVTILSETSVLKKMSQGADPDALHRFLTSHYPEAEYYSVYEAGFCGFWIHDRLTELGIHNIVVNPADVPTMSSEKLRKTDAVDSRKLAVSLRAKQLKGIYTPDSEALEIRSLIRLKNSITKDMTRQKNRIKSQLRYLGIEIPTEYLEPHSNWSKRFLNWLREVEMRTPSGRQTLDILIMQFEALRKQKAEMTRRLRALSHTDRFEEMLGLLMTVPGIGQTTGLALMAEIVDITRFDNAEQLAAYVGMIPMCHSSGEHEGVGDITLRKHTILRSNVIEAAWVAIRKDEAMQLCYLNNCKRMVPSKAIVKVARKLVNRIYFVLKRHQPYVNAVA

SEQ ID NO: 137261 - protein, 392 aa, unidentified
MYIVGIDIGKNHHEASIVSPEGKQIGRSLRFATTHKGADSLMSFIFKNIGNSPCVFGMEATGHYWYPIYSFLKAKGYTIYVINPIQSDSLRKMYIRQTKNDSIDSFLIAKVIRFGQFGTTSMADENILAMRQLCRYRDSVISSRTEIKLRIGTIMEQIFPEYEKQFSSLWVSTSMGILEKYLTPENIENAPIDELFEIIKDKSHNRLTRAKAISIKEAAADTFGIKIAQDAFSFQLKQLIDRMNFLDKQIEALDCQILEYYEKFDCYLHTIPGIGIIGAATILAEIGDISRFKNSSSLIAFAGIDPTVRQSGEFNSTHNHMSKRGSPYLRHAIFLAATTCSFHNSPLNAYYKKKRDQGKHHLTATGAVARKLTTIIYAVLRDSKPYEPKKFC

SEQ ID NO: 137262 - protein, 383 aa, unidentified
MTKSSNLYVGMDVHKESIDIALADEDGRQEVRHYGSIGGDLAAVDQAVRRLQATGKTLHFVYEAGPCGYVIYRHLAGKGLDCVVVAPSMIPKRSGDRVKTDRRDAEMLARLYRAGELSAVYVPHPEDEAVRDLTRAREDAKQAQTRARHQLKAFLLRSGIRYTGKTAWTPAHVRWIAGIKLDQPVQQIVFQEYVEAVTAASDRLERVEGNLRDAVAEWRLQPLVEALQALRGVQLVVAATLAAEIGRIDRFDNPRQLMAYLGLVPSEYSSGPSTRRGSITKCGNTHARRVLTEAAWAYRLPARITPIIARRQDKLAKSIRAIAWKAQLRLCKRYRSLRAKGKEQNKVITAIARELSGFVWAIAREVSAGATKDGLSTGATLRA

SEQ ID NO: 137263 - protein, 346 aa, unidentified
MKNYYFIGIDVSKKNLDCCLLHDGVVLKQDVIPNHQKSIESYLSIIREEQDIDAEQIIVCAEYTGLYINPLIIACQTDSYKLWMEDPTQIKYSSGLQRGKNDSIDAKRIALYAFRYFDRIKIYKKPSASIEAIKLLSTELNMLCVDKAKYQAQLSDQKEYMPNDIYKMKQKRLALLIKELEKAIKNIEDEIETTIKGDTLLSRQMELLLSIEGIGKKTSLKMILETQAFTKFSDSRKFCCHAGVAPFSYSSGSSQHSKNRVSQRANKSIKTLLHLAALSAIQNKNSELRKYYERKIAEGKNKMSVLNAIRAKLIARMFAVIKSDLHYDFDHINQYQNKNSVRSFAN

SEQ ID NO: 137264 - protein, 377 aa, unidentified
MYRIIKIGMDVHSKNYTLCAMEPLIGEEDRIFANIQVTADYKNILMFIEQLKMKLGMSDEYDIQCGYEAGCLGYSLYNQLTAAGVKCVILAPTTMLTQQGKRVKTDARDALMIAQCLSYGGYHAVYIPTQEDDSVKEYLRMRDDHKEALKKIKQQINALCLRHGHHYEGTTWTIKHVTWLRKLELPSLYRETLDEYMASFDEQTAKIERFDQRIEELSSQEQYWEKVKKLCCFLGIKTHTALSLIVETGDFSRFAKGNTYAAFLGLAPGEHSSGEKTNRTGISKAGNRHLRQLLIEASRGICKGAVGHKSKELRARQNGNTAEVIAYADRGNTRLRSRYYKFIRHGKKKNVAVAATARELACFIWGMMTDNISYRMA

SEQ ID NO: 137265 - protein, 356 aa, unidentified
MEKLTTVGIDLAKDVIAVCVLDVRGAAIERRVFKREAFERWAEQLPASNVAMEACGSAHHWGRWFAARGHTTRLIAAEFVVPFRKGGKNDTADAEAVAIAARQPTMRFVPIKTVDQQAILAWHSVREGWKEERTALLNRMRGLLAEYGVVIARSADRFLAALPKLSEDNRLPDPVRALVLEAREQFAALHARLARCDAQIAAHARNSPAARRAGELLGVGPVTSSALVATVPDARVFRNGRQFGAWLGLTPRQHSSGGKTRLGRISLRGNVYLRTLLIQGARSTLQAAINTQPSRASRLQRWIIELYARKGYYKTLIAIANKHARILWAMLAKDERYDAAAWQRHPMHQPPLAGNA

SEQ ID NO: 137266 - protein, 397 aa, unidentified
MIAVGIDISKAKSTVAVIDSDGTVLASPFTMAHTQPEMEAFVTYLKGLGEPTTILMEYTGHYHYPVLKKLQDEGFPVCIVNPYQMKKYGDVEIHKAKTDKKDALRIAAYALEKSYKLVPYSSMEQKYEDLKFLSRQYSQRITYVAKLKVQLIALLDQTMPGITRILPLNSRNPEKCALLLFIRRFKSFDEIHRIGKARFLASYDVLAKKTSERSASSKGLSIYELAVDSITTRGEDPYIWLSQNQCVDLLSATQNAADEIISQMRNIAETIPEYKVLRAMHGVGDRLGPIILAEIGDVHRFHSGKALNSYAGNDAPPYQSGQFESRNRHISKRGSSTLRKACYEVMQALKLTKPQDDPVYLFMLKKEQEGKPFNVAKMAGVNKFLRIYYARAMELYK

SEQ ID NO: 137267 - protein, 417 aa, unidentified
MVGKDDNGIVEVVHPICCGLDVHKQRISASLIISSVFGGQRVEVEEFGTFTDDLIRMRSWLVEHNCPIVAMESTGIYWRPVHNVLEGYMEVILVNARHIKNLPGRKTDICDSKWLAGLLRHGLLKGSFIPPKEVREWRDLTRLRRTYVESLSDYKRRTHKLFESANIKIDSVVSDLFGVTGRNLMQLLVQGTYEISQEQMESCLRGKLKDKREELFRSIQGFFTHHHRYLLSSLLRIIAGLEEEIEALNERLRKVMESRNPILERIMEVTGISEVSARAILAEIGPTMDPFRTSAAICSWSGLCPGNNESAGKRHSGRSPVRKHHLKTIMLEVGWAAVKTKGSYYLEKYYRLKARRGAKRAIVAIAHRLLKAVYHIIRDGVSFKDLGEGYLEQNQQAKLKRLNHQAHKLGYQLVPQA

SEQ ID NO: 137268 - protein, 327 aa, unidentified
MAPAYLGIDIAKAKFNVCLLQANGKLKHKVFLNSSVGFQQLSTWLQQHQQPQVHACLEATGTYGEALALYLYEQGQCVSLINPAAIKAFAASCLSRTKTDRVDAELIARFCQAQQPPAWRPPAAEVRELQALVRRLEALIEMRVAEENRLAAGPAMPAVQTSLTQMLNHLKEQIARTEKLIRQHLDQHPDLRQQRDLLTSIPGIGETTAALLLAEVPHLKQYRSARQLAAFAGLVPRERQSGSSLKGRVRLSKIGNARLRKGLYFPAVTALRCSSFFQQWASGLRERGKCKMSVIGAVMRKLLHVAFGVLKSGCPFAPELDQRVSLS

SEQ ID NO: 137269 - protein, 390 aa, unidentified
MIYVGIDVAKDKHDCCILGPDTEELFQVFTIRNNSDGYGELFHKIESVSKDKSQIKIGLEATGHYSYNILGSLLDHGYHTFVINPLHTNLYRKGQSLRKTKTDKVDARSIAEMLVTDKTLKPYTGTSYHSEELKSLTRYRFELVKERAKLKTSVSRLVNILFPELESLVPTLHMNSVYRLLQELPGAYFIASSNLTHLKALLADASKGHYGREKAIEIRETAKSSIGSLMPAKSMELRQTIHRIDTLTSDIKEVEQSIQKIMDECGSPITTIPGIKYRMGAMILAEIGDFARFSNADQVLAYAGLSPSTYQSGQLISSYVRMEKRGSKYLRYALFNAAIYVSGWDERFRLYLSKKRAEGKHYYVAISHVIKKLVRTIFRMEITHTSYQPL

SEQ ID NO: 137270 - protein, 393 aa, unidentified
MGRVIIGVYPHKLSATIEVLDGGENVLGGGRFGTDRDGYRQMLIVGRRWPDRVWAVEGSNGIGRHVAQRLVADGEPVVDVPAKLSARARVFSTGHGRKTDATDAHSIAVVAVRTPNLNQVGVDDELVALRLLADRRDELAGARTRTVSRLHRLLLELIPAGAPRFLSATQAKALLATVRPRDIAGRTRRQLATELLADLVVLDRKLKDSDRRLTEAVAATGSGLPDLYGIGPVGAARILGDVGNIARFPSKAHFASWTGTAPIDASSGQQQRHRLSRAGNRRLNRVLHIMAIVQIRHDTEGRAYYRRKLAAGKTPMEALRCLKRRLSDAVFRQLVADTNRPPEAGPGGHSGATLKSSAASPTPIADSSDKSLPGPATANATAPTHRLQNPALT

SEQ ID NO: 137271 - protein, 351 aa, unidentified
MSQPVSTTIAVMGIDIGKNSFHVVGLDQRGAIVLRQRWSRSQVERRLANMPPCLVGMEACVGAHHLSRKLKALGHDARLMPAKYVRPYSKGQKNDFRDAEAIAEAVQRPTMKFVATKTADQLDLQALHRVRERLVSQRTGIINQIRAFLLERGVAVRQGQRFLRIELPRLLTAPPDVLSPRMVRVIEDLAGDWRRLDQRIEALSAEIEAIARRDAGCQRLMSVPGIGPIISSAMVAAIGKGDGFGKGRDFAAWLGLVPKQISTGDRTILGKISKRGNRYLRVLFVQAAWVVLIKPKSWERHGLKRWLEAARKRLHRNVLAIALANKLARIAWSVLANHRNFETTRILVAAQ

SEQ ID NO: 137272 - protein, 337 aa, unidentified
MYLSVDTHLELHVATLINELGQVVKSKPFSVDLAGYRELLAWCKSYGFLQKASIEGTGSYGAELTKFLKKNSIDVYEVMRPNRMERRQKGKTDVIDSENAARSVLSGETAVIPKSHAGPVESLRSLLMTRNSAVKSRTQAMNQIRALLVSGPDELKQSLYRPKPSACATACLARCSNSREPLMISLVLLAQRWNFLNDQVKSLDNALKKLTLNTAQSFVSRFGVGTNVAATLLVAAGDNTNRLKKESSFSALRGVNPIPVSSGKTTRHRLNRGGSRSANNALWTVAMVRMRSDPRTKDDIARRTAEGLSTKEITRILKRYIARELFPLILKDLASLS

SEQ ID NO: 137273 - protein, 486 aa, unidentified
MKKRVANHKEEVIKLLKKQKIRNLKDLEDYKLSICHPYSAGIDIGSREIYVAINPEVAAELDMPIVRVFSTFTSGLQECRDWLKYCGIDSVSMESTSVYWKNIYDILENAGIEPCLVNPRKFRMVPGRKTDVLDCQWLQTLHMYGLLSGSFVPQGNIRQLRSYMRHRDCVLKERGKYIQRMQKNLIEMNLMLVNVVDDIMGMTGAKIITAILDGERNPNVLAAFRHGGCKRSEQEIAEALNGNYKEEQLYLLKANYEAYKFFNDQITDLDNQIEVLLDKFPLAQKKEPGTDTSNESGSMENYSPVKKKKQSKSKNDLRIKNLPDKLTEIIGIDLTTVTGLQANTILQIISEVGTDMSKFPSAKNFASYLGFVPHNKITGGVIISSSTDRVKSPAAHAFRKVVASVGQGKTALGAFYRRIAAKGSKAKAIIALCRKLAMIYYNTIVYGKEFVEYGAEKYKKQQELREKRLIAKLAKKHKLTVQAAVC

SEQ ID NO: 137274 - protein, 343 aa, unidentified
MSGAYEGRQIVGMDLHRRRSVLVRMSETGEHLETVRISNDPEYLREVMTRAGEAPEVVLEAAYGWYWAADALAELGATVHLAHPLGVKMFGLRRVKNDERDAADLADLLRMGRLPEAWIAPPATRELRGWVRHRAKLVALRSGLRCKIHAVLASAGMQVPMSDLFGVSGRELLTTATLTVESRSRVESLLRIIGALDFEIDLYTKLVASRLRTDPGYHAIQAIPGVGPVLAAAFVAEIGDITRFHRPAELASWAGLTPRHHESDTTVHRGRITKQGSRLVRWAAVEAVQRVPARTRLGQRRDRVAERRGHNIGVVAAARDLITLVFYGLRDHHVRCLPTKAAP

SEQ ID NO: 137275 - protein, 347 aa, unidentified
MRFYTKQHPFYCGIDLHARTMYVCILSQDGEVMLHRNMKASPDALLKAIAPYRDDMVIAVECIFTWYWLADLCAQEGLPFVLGHALYMKAIHGGKTKNDKIDSQKIAVLLRGGMLPQAYVYPAAMRATRDLLRRRTHLMRKRAELLAHIQNTNSQYNLPEIGKKIAYKANRDGVVERFPEPAVQKSIEVDLALIGHYDQLLRDVELSILKTAKQHNAQTLYLLRTVPGIGEILSLVLLYEIHDITRFPRVQDFLSYCRLVKCTKESAGKRYGTSGTKIGNAHLKWAFSEAAVLFLRANPAGQKYLTKLEKKHGSGKALTLLGQKLGRTVYCMLQRQTAFDMGKFLNG

SEQ ID NO: 137276 - protein, 444 aa, unidentified
MSPINTTLEPAYAAFVGIDWADRQHAWVLQSPGAPRVSGVLKQSAEDIELWAADLARKFYGRPVAIAVEQSRGALTYALCKYDHLVLYPVHPSTSHDFRKAMCPSGSKDDPKDAELLLDLLTRHRDHLRPLKPDSPATRKLLSLVEIRRGLVDQRTAAIQRITDKLKIYYRQVLGWFDRLDTPIVAAFLEQWPTVEQARKASENKLRKFFVAHHSRNPQKIEQRIDEIRNAKPAITDPAIVEPSVLLVQIELQVIAALREGIARLDAEIQTVFTAHPDSFIFSSFPGAGPALAPRLLAAFGTDRTRYTSASELQCQSGIAPVTEASGRKQIVHFRWKCPKFLRQTFHEYAAISVQFCDWARQFYDYQRNVLKNAHHAAVRALAYKWIRILYRCWKDCVPYDDSIYTNARRPPRATPSDSQPSGKPLKILLKTVDGFQRFAGIEA

SEQ ID NO: 137277 - protein, 346 aa, unidentified
MIIVGCDFHPAWQQVAWMDTETGETAERKLEHSNGEARGFYASLSAAALIGVEATGNCQWFLNLMTELGHQVWVGDAAQIWASYVRKQKTDKRDAAHVLKLLLEDRFPRIWVPNREERDLRQLLLHRHKLVEMRTRVKNELQHLALNHGVRKQRKLWSEAGQELLRSLALQPWAGQRRDDLFQLLAMLQRHIGLLDQAVKEKSQLDKMAQLLKTQPGVGPITSLAFVLTIGDVSRFQNGKQIASYLGLIPREHSSAGKQRLGGISKQGNRMLRMLLVEAAQTAVRSDPECRKQYLHRCHSKPKAVAKVAAARKLAVRLYWMLRTQTPYPEIVRIESSPRVPLVGAS

SEQ ID NO: 137278 - protein, 411 aa, unidentified
MIGVDIAKKKHYARAFDFRGMELDKVIKFKATSGGFESFIKWTQRVAETHGKKKIVIGIEPTGHYWYTFGWAVIDRGLTLVQVNPYHVKKSKELDDNTPSKSDYKDPKTIAFLVKDGRYQIPYMPDGKYAELRKANNLREEWVQKIIKAKNKITRWLDIHFPEFLNAFSSWEGKTALMTLEKIGLPERITALTAEQILCIWRQEVKRGVGIMKAERLLKEARNSVGIKEGAQMAEYEIKLLVREYREIRKVLEDMERMLEENVLTIPGANRFLEIKGVGIKTVAGFFAEIGDIRRFTSAKQIIKLAGLNLKQSSSGQHKGETTISKRGRSRLRALLFRAILPVVATNEVFNKLHHYNIKEKEKPMKKMQSLIALCCRLIRIVYTLITKEQKFDADKLLSDIHRNNTLQEAA

SEQ ID NO: 137279 - protein, 369 aa, unidentified
MKFFIGVDLHKTQFTVHVRTEEESESLDQIRQYPTTPDGYAEFLARISRYKETGSDVKIGVESTGNTRFFKNQVEKAGAEVTVINTLKFKVINESTKKTDKHDASTISEFLSKDMLPESYLCGKETENIRRLLKSRERLVRSIVGQKNEIHALLVSLGLSDELRSLQSKKGRQRILDTLESNNDYVLEAQSVKLMFEIIERIEESVKIIEKQLAELTKEDEMVNRLMTIRGCGKITAWTIRAYTEDISRFASAKKYAAFCGLVPWVQDSNETIHHGKITKRGPQELRTCFVQLVLGIRRCKDTSNWRMMQRYEYMKTNKGSGKSIVAAARKMAEIVWAMLSDKKDFDVQKMIGQYKPMSLAEEALTAIN

SEQ ID NO: 137280 - protein, 416 aa, unidentified
MKIYPRTRPIQRYIALDIHKEYVVAGGMSARQEWVLPPHRIEMSKFGEWAKKNLCEADAVVIETTTNVWDIYDIVQPLVGHAVVAHAGAVRQIAEARVKTDKEDVKRLIRLLIADILPEVWVPSTPVRELRGLISYRQRLVKTGSMIRNRLQSLLHRHNLLLPEEGLADGDWWEQQEKIPALEKLQIRQELAMLERIEKYKVEVDQELGRQSLGEMWGQQALRLTQLPGIGMVIAMTILSAIGDIHRFEDARHLVGYSGLGAGVHDSGKEHIEKRITKSGRRELRWALVEAAWRVVRMSPYWKEQYEKFLKRMRRPNQAIVVVARKLLVAVWHVLSNEETDERASEEDLAYKMLLWSWSLSAEARQGLTHKQFAKYALMRLGVQTDLTRFVRGKVPRRIASREEVLVRMAELGLNG

SEQ ID NO: 137281 - protein, 385 aa, unidentified
MVKGSIVDAFSGKASVASRAAKRRRREIGRVLVRETVTKRDPRRHCGTNPNSRMNRRPMRPASSHLQDWEKTMAEPLFIGIDVAKETFHVASCPAAINISLPNCLSGTKQLIKTLQPHNISLIVLEATGGYERPIVAELLEADFKVVVASPRQVRDFARGIGEFAKTDPIDAAVLARFAQVVQPKPKPPVSPQTDELADLVRRRRQLTDLRTQELNRSETVRHPKVRKSVRKMIKTLDYQIAELDELIRQHIKSDDDFRKKDEILRSTPGVGPHTSATLLSQLPELGQLNRQQIAALVGVAPYNFSSGRFVGKSRIWGGRKDVRCVLYMAALTAIRCNPAIHRFAERLLEQGKVFKVVITACMRKLLIILNTMLRNQTLWRPEKN

SEQ ID NO: 137282 - protein, 351 aa, unidentified
MDTMPQIPGDVTVGVDTHRDSHTAAVLDAQGRLLGTAAFPTTPAGYRRLIEWAGGWGTVTAAGVEGTGSWGAGLTRHLQETGITVIEVIRPNRQHRRRHGKSDTTDAVAAARAVQSGEASGTPRGGGATEPLRMLRVARNSARKAKTQVANQIKAVVVTGPAELRQELRDRPTTELAKLVARFRPGPDLADPSTAAKTALQALGRHWLFLDTQIGELTAQIADLTTATAPPALLDEKGIGPIVAADLLITHGTNPDRIGSAAAFAALCGSSPVDMSSGQQLRHRLNRGGDRQANAALYRAVIVRLRYHQPTRDYMQRRLAQGKTKKEVIRCLKRSLARKVYKILRDHQPPT

SEQ ID NO: 137283 - protein, 338 aa, unidentified
MSIFAGLDVSDKTTHVCVVDANGVVLKRDVLTSDPEVLAKWLTRHCPDLVRVVLETGALSTFLYHGLAERHVPVECICARHAKGVLSARINKSDVHDAEGLAQLARTGWFKRVHMKASATHIDRAALRIRMQLITTRVAMGNQLRGLLKLFGLRLGAARTPGKRAERLAALYCQRPDLEPLFAPLVASMEVIEEQLRASNRLLEERATADPVCARLMSVPGVGPITALTFTASVEDPRRFARSEDVGAYAGLVPRRSQSGERDVNGYISKAGDPMLRRSLYEAANIMLCRVQRPFALQLWGQRIAETKGNKRARIAVARKLAVLLHSLWLNEAEFRWA

SEQ ID NO: 137284 - protein, 359 aa, unidentified
MVMLAEHYDFVIGGDPDRDTIDLAILEAGTGRVRAQTADRTDGPAYSRLLAWARQHAPGRRVWALEGTSSFAAGFVTILAEAGEDIVEIPGQKRSRRPKNDRIDAIQAARTALAQTQQAAPRERGLREALRQVLVTRQGVLVSRTKAINELKSLIVVAPEHLRSQLRGLPVAKQLDRIDRLTSPVGATIEHRVTISTLRSIAARIRFLINQAAELDVELLVLVPQHPAGPALLAEAGVGPVVAAQLLVSWSHHGRVRNEAAFASLAGVAPLEASSGQRTRHRLSRMGDRNLNRALHTVAITRLRCHEDSRNYETRRSAEGKTHRDVRRSLKRILARRFYRLIQAATLPANTADTLAKAA

SEQ ID NO: 137285 - protein, 426 aa, unidentified
MTKIEPGTPQFFAATVGWDWADKKHDLWLCPSHGAKVEHIILAQEPEALHEWIAKLRGRFQGQSVAICLETSRGPVISALLAYDFIVLFPINPKALKSYRAAFCVSGAKDDRSDAMLLEEYVRLHRDKLRALEPDTVLTRTLAGLVETRRQLVDERTRLVEQLHSVLKTYYPLAETLLGAQMTQLMAADFLRRWPDLASLQKAKPQVLQAFFYKHNSRSRKAIQERLEAVATAKALTADPAIIGPARLRVSALAAMLKPLHQMIARLDQQIQTHMDQHPDAALFRSLPGAGPCLAPRLLVAFGTNRDRFHSATEVAQFYGIAPVVRQSGDTRTVHIRTRCPKFGRQSFHENAGCALREEDWASCFHSQYKKKHLGRHHQANRSLAFKLIRIYYACWKNRQPYDAQRYLRALEKNGSPLHAALQTQN

SEQ ID NO: 137286 - protein, 318 aa, unidentified
MRESVVVGIDVSKAEFCVAIDPSGETWTSATTPAAIDALVERLRAVTPQLIVLEATGGYELALAGACATAGLPIAIVNPRQVRAFAQALGRTAKTDAIDAAVLALFGARVRPEPRAVPDAATQALADLLTRRRQLLEMLVAERQRLAQAPPTGPVTRDLRTHIRWLDRRITEVDDDIGQAIQASPVWRVHEDLLRTVPGIGPTTARTLLAELPELGRLDRRAIAALVGVAPFNCDSGQQRGRRRIAGGRASVRASLYMAALVASRRNPILTAFYQRLRAHGKPAKVALVAVMRKLLTILNAMIKQRTPWTLHPPFVNA

SEQ ID NO: 137287 - protein, 355 aa, unidentified
MTDEKYIGLDVHQATISVAVVDSQGKVVMESILETKASTLLEFFAGLRGSLFVTFEEGTWAAWLYDLLKPHVTEVLVCNPRKIPLLKQGNKSDKIDARKLAERLRLHDLKPVYHGETGIRMLRELARSYLTVVKDLSRVMNRLKALYRSWAIPCAGRDVYYRRHRSEWLEKIPEAGTRRRAEQLYQQLDLLQHLRQQARRELLAESRKHAITAKLRKIPSLGPIRSALAVALIQTPHRFRSKRQLWTYSGLGLETRDSGEYHFVKGQVRRRKKQATIRGLNKDYNHDLKGLFKGAATRASVKPGPFQEFYQRSLAKGIKPTMVRLTLARKIAAITLTLWKKGEDFDIHKLNSQAA

SEQ ID NO: 137288 - protein, 428 aa, unidentified
MTIRDYTSAKDFLQFKKEIRGSKTHLIVGIDIAKDDHRAFFGTAYGKTLLRRFKFKNDIEGFRKLLEHVKLVKQKHGLSEVVLGMEPTANYHKPLGDYLIRCGYRVVLVSGVAVKRNRELLDGRWDKNDTKDSANVADLISQGKCLFYDYTPVLIRELRNLLSLKRRSKKQEHGLRIRIRNNLLALYFPEIDRYYSKWETEILSVVRWCLDPSVIAGLEYDQFADLVYPGNKTVRRQGRLEWIWKKAVDSIGCTAGEAAEFEAEVLVEELRHIREVIKETDAKIKDVCKRCPEYDYLLTIPGFGPDVSSKVLAAIGDPFRFNSASQVLKMAGMDLNAERSGKGSNTAVPIISKKGSGHLRYALYQAAFIASCRPKLFKKYYTNILTGREKEKGIKTKMRVKLAAKLLVIAWTLMKKREPFDPEHIPIG

SEQ ID NO: 137289 - protein, 348 aa, unidentified
MEHHVGIDVSLQLSSLCVLNADGKVVREAKVASEPEALVGFLRGLGLPIARVGLEAGPLSQWLYDGLREASFDAVLLETRHVKAALSAMAVKTDRRDARGIAQLLRMGWYRPVHRKSVPSQEVRALLAARKQLQIKAMDLEQTLRGLLRGFGLKVGDVSRGKLPARVRELAAGHAMLERIVEPMLTAGEAVWREFAKLHREVLAVVKEDQVCRRLMSVPGVGAVVSLTYRAAVDDPARFKKSKSVGAFFGLTPKRYQSGETDVTGGITKVGDAAVRTALHDAANVLLSRVTRFSALKRWAMDVAKRRGMRRAKVALARKLATVLHRIWADGTEFVWGKDPAVSAAAAA

SEQ ID NO: 137290 - protein, 350 aa, unidentified
MTTLARSITGGVDPHLDVHVAAALDERGTLLGVESFETSTRGYRKLLAWLASFGHLELVGIEGTGSYGAGLTRHLHEAGVAVVEVDRPNRQRRRRKGKSDPEDAVSAARAAQSGDATGEAKTRDGNVEVMRVLRIARISARKSRTQAINQMRSLVSTAPEPIRAELRDLSVYHLLERTAAYRPGTKRDITSVTKLALRMLAHRAQDLEVEIKELDAILKSLVKETAPALIARLGIGTDAASALLIAAGDNPGRLRSEASFAHLCGASPIDASSGKSERHRLNRSGDRQANSALWHIVLTRMVYDPNTRHYIERRMKEGKTKKEAFRCLKRYVAREVYNYLPREQFALDSP

SEQ ID NO: 137291 - protein, 337 aa, unidentified
MNVTTIGIDLAKTSFSLVGMDKHGKIQFRKSLTRNKLAEFIAQHPECVIGMEACSGAHYWSRKFRELGHEVRIIAAKFIQPYRIGGKNDNNDAQAICEATMRPNIWYVPIKTAEQQATLCVHRIREGLIKDRTGMINQLRGLLSEFGIVMAKGRYPFQKEIPFILEDAENGLPDLARKMIDYLWQRIKQANEEILSYDRELSRLARRDKVAQRLMTIPGVGGQTATGVVASMPDAKQFKDSRQFAAWLGLTPRQFTTGGVVRLGRVTKAGDKYLRTCLVHGARSVIAMLKDKQDRVSCWIRELVERRGYNRAIVALAARNARMIWTLMIKQEDYRVM

SEQ ID NO: 137292 - protein, 391 aa, unidentified
MFYVGIDIAKNNHEASIIDSNGKLVSGSFSFSNSVKGLEKFKRIISSFLLSSNNCIIGMEATGHYWVSLYSFLVDLGFTCVVINPIQSDAFRKMYIRQTKNDSVDSFIIAQILRFGEFSVSHFSDEDTFALRNLSRYRFALVDEVTDWKRKLVAILDQVFPEYSSLFSNIYGVTSKELLSKYPLPEDMLSISANELAELLSRCSKGRFGIDKAKEIQDKASNSFGIKFALKSFSFQIKQIINQISFLEDQISDIEAEISSMLNSLCPVITTITGIGDILGAAIFSEIGDISRFEKASQLVAYAGLDVAVKQSGNFNATDTKISKRGSPYLRRAIWLAANVAAFKDPALSLYYQKLRQRGKAHGTAIGAVARKLTNIIFAVLRDNKAYVPNI

SEQ ID NO: 137293 - protein, 345 aa, unidentified
MFYTGIDQHRRSSVLTTYTEDGRVVGHATLPNEPRRVRHYFAQFPGSHRAAVEATGRWYWLRDLLVANGIDLRLAHAKFLKAIAYAKVKTDAIDAGTLGQLLRTGFIPEAHMISEELRGPRDVLRTRLRLVQRRTSCQNSVDRLLEKFNVASVDQLPPLYQAQAAVHAGQIALLTDQIRQLERLVQPALLDCPDIQRLLWIPGIGRLTALTIYLEVDGIARFPTVRHFWSYCRLVPGAANSAGRTRHRSGNKDGNRYLKLAFSHATVRAIQYFPEIRAWYQRWKRKKPLPVARTLVAKELAKSVYVVLTDQVDFNQQFKGTPLTRQKQARWPRRVSPSALYLASH

SEQ ID NO: 137294 - protein, 341 aa, unidentified
MNHYAGIDVSLKDSSVCVADANGKIVRESTVASEPEALITWFSELGFAVTRIGLEAGPLSQWLYAAMQKAGLAVELLETRHVRDAFKAMPVKTDRKDAQGIAQLMRLGWFRPVHCKSIEAQETRAILSARKLVQSKLHDVEMSLRGTLRGFGLKVGKTTPNRFAARIKELVEEHPTLRIIATSLLAVHAALLREFKVFEKQIRIMARDDERARLLMSTPGVGVLVALTYVSAIDDPGRFTSSKRAGAHFGLTPKKYQSGETDITGRISKIGDKGVRTALYEAANIILTKPVKGSALKSWAARLAKRAGMKKAKVALARKLAVIMHRMLVDKTPFNPAAAAA

SEQ ID NO: 137295 - protein, 346 aa, unidentified
MKFYTNQHKFYCGIDLHAKTMYLCILNQEGKIVLHRDIKTSPDIFLNTIAPYREDIVVAVECIFTWYWIADLCSEEDIPFVLGHALYMKAIHGGKAKNDKVDSHKIAVLLRGGMMPMAYVYPSEMRATRDLLRRRNHLVRKRAELLAHVQNTNHQYNLPDTGKLAYKSKRKGVAERFQDISVQKNIELDLSLLDHYDQLLLRLEHELSLIAKVHDADSYFRLRSVPGIGRILGLVILYEIHNIDRFPRVQDFVSYCRLVKSAKESAGKKLGTSGKKIGNAHLKWAFSEASVLFLRRNTQAVKYRENLMRKHGKAKSLSILAHKLARAVYYILKRKEVFQPEVFFAK

SEQ ID NO: 137296 - protein, 312 aa, unidentified
MTQDAVFVGVDVSKARLDVAATTGEVWSVGNDPAGWAELVDRLREAAPHAVGLEPSGGYERGVIDALVQAGLPVRRVDAARVRQFAHALGLKAKTDAIDALLIARFVQTLPGRIVEPDARARALAELVEARRALCEERVRVRNQAEQVRDPMLRRMAARRLKRLGGDVVLLEKRLAEVVAADPDLADRDRRLRSVPGVGPVLSWTLLAHLPELGRLGHRQIAALVGVAPYDRQSGTLKGRSMIRGGRAVVRTVAYMAALSGARSNPVLAAMRQRLADKGKPGKVILIALVNKLMTLLNAILRDQTEWRAATT

SEQ ID NO: 137297 - protein, 350 aa, unidentified
MQGTGRWIGLDLSKETYEMCYFDQKGKVGRSGGETTKAGRSKLYAKLKAEDIVAMEVNSLAFVMEKEMRTIGCAVVILDASQLSIIYSSTKKTDKEDALKLARLVKIYEKEDLPIVDVPTEKEYYRRKLTKECKTLKDDRTQEINRLHALFLQCGITTMKRSNLQTDANRQKVLPQLFGYEVGQAKRVCERLTLLEAQIKELEQTITKECKADKDIERLKTIPGVGDKTALAFTAYVGDGKRFNNGDEVANYLGLVPRVDCSGSINRYGHITKKGNRIVRALLYQAAWAIVRSKHGGALKAKYFYMTEHGKGKKISITAIARKMAKLLYLVMKNKQMVYQELPFPDLQAG

SEQ ID NO: 137298 - protein, 429 aa, unidentified
MSKRRGKAKRVQKASNQEPENLPVLNRDAAAIDIGSEEHLVAVPPGRDTESVRSFAAFTIDLHAMAGWLKQCGIKSVVMESTGVYWIAPFQVLEQYGLEVLLIDARLAKNLPGRKSDVLDCQWHQQLHTFGLLRGCFLPVAEIVPLRSYLRLRDELVKASTQSIQHMQKALFEMNLQLANVISDITGETGLAIIEAILAGERDGKKLAELKHRRIVASKETIAKSLEGNWRPELLFALQRALDRYKFYQQQLAQCDGQISQALAQLPTRELQVQTEPEKKTEPSARGQKLTPLEAELQRIAGVDLTSIDGIGQQIAQIILSELGPDLQKSFQSEKHFSSYLGLCPGTKISGGKVLKRKSRKVKHRVATALRLAARSLHSRPSPQWQINSPSWSIAYWFTAKTTSIAAPKSMSKNSVSSRFVDCKNKPKC

SEQ ID NO: 137299 - protein, 444 aa, unidentified
MIGPQVSKVKLSTQPFGDRPTMTKRSSNPTDAVLVAIDMSKHRQEVLIERPEGGPRRRMTVMATKADYDRLATDLSDIGRPIIVGFEATGNYHRTLAHRLLSAGFELRLISSVALARTREALHNGWDKNDSKDAQVILHMLRIGATQRYVDPLAAGINDLQEMSKTHEAISKAKTQTWHRILTHYLPLYFPEIERFAGNSRSDWFLALLERFPTPASMTVLGQETFSREAWDLVGRKVSKARLINDIYETACASVALPVDEDSVSIAMFRMVIAQARNLIRQRDEIERTAHAMLAENRDYQLLRMIPGIGPINALTILAEAGDLRRFSHHRQFLKFCGLDLATRQSGTFRGRTMLSKYGNARLRRTFWMAAQVAARQRNNSFRDKLGRYTAGHADDADRRRKAMTALTAKMARVAHAVIKTGTEYRPFLERSDARWKAPSLQVP

SEQ ID NO: 137300 - protein, 361 aa, unidentified
MTDHLSSPEVFGGVDTHALTHHAAVVDRLGRELADREFPATPVGYESLRSWLLGWGQLVSVGVEGTGSYGAGLTRVLTGAGIPVVEVDRPDRSARRSQGKSDPLDAYAAARAAASGRAAGTPKSRDGIVESIRCLRLAQRSAIKARTQCINQIRALLVNGPANLREQMQPLPTAKMIKSLARLRPGADLTDPGIACKQALRSLARRHADLDEEIKELHRGLTVLTQQAAPDLLERPGVGVQVAAQMLITAGDNPDRLGSEASFAHLTGVAPVPASSGKRHRHRLNRGGDRAANNALYTVALVRMRYHEPTRAYVQKRTAEGLTKKDIIRCLKRAIAREMYRLVTHRTDPLKSSAASLETAA

SEQ ID NO: 137301 - protein, 507 aa, unidentified
MAKQAKSRSVSTGQIQPAKQMPTVHPHAAGIDLGNAAHFVCVPADSVPAGQSPVRQFGVFNPQLDEMVEWLKQCQVQTVAMESTGVMWIPVFQKLETAGLEVLLVNTKRLKHVPGRKSDVLDCQWIQQLHSYGMLNGSFRPADIICRLRTLMRQRENLIASAAVETQHMQKAMQEMGVHLHVAVSDITGDTGLRIIDAILAGEREPKELVKLRDQRVRKSTVKEMEAALQGDWRDELLFVLRQSRQAYAFFQQQLAALDNQIIALLAEIPPAPQPPTDGVQPPSAPALESSTPPPQESGSSGTAAGGENSGRGDQKPSTAAAVQKAKRKPSKGGNPLPKDIRSQLTGIFGIDLTLVPGLNMVGVLIILSEIGTNLKRWRDGDAFAAWLGLCPGSNISGGRVLSSRTPHVVNRVAVLLRLAALAIGRTDTCLGVFYRRMKAKHGAPKAATATARKLAVLIHHILTRGEEYQEPDPKQYDERVRKDKIIRLMRQAKALGFDLVPLEQVA

SEQ ID NO: 137302 - protein, 341 aa, unidentified
MSKRLVPNCAVLHCGIDVSAAMLAVAVQPEGSDGFELREFANSTAGCRQLVAWLDRWQAPVRVSLEATGIYSLDVALALDRAAGIEVAVLNPRTVHRFAESLRRSKTDAADAVALAEYSRRMPFVAWVRPPEAALELRAISRHSATLTEEHARLKNRLHAACGSTSTPRCVREDLRRSMAGLEKRLLRLRREALAAIAKDAGLEQKFQHLTGITGIGEASAVQLLGELAGLDPEMTVGQWVAHSGLDPVHEISGTSVHKPSRISRRGSRHLRRALYMPALSATRFDPYMKAFYTQLQARHKTKLQALTAIARKLLHAIFGIFKTGTPYHPEKLFPQLLLIS

SEQ ID NO: 137303 - protein, 428 aa, unidentified
MNYNQNEKIAQISSQTLIVGVDIAKYKHVARAQDFRGIEFGAPCHFENTKSHFDLFLGWIKHLMEQHGMDKVIIGMEPTGHYWLNLAHFLKEEEIKFVVVNPMHVKKSKELDDNSPTKNDVKDARVIAQLVKDGRYAEPNIPQGVYAELRVARKIRDLLFVDLQAVQGQIHNWLDRYFPEFLTVFKDWEGKAAIQILKLNVLPHELEIVEEQEILIHLRKAVKRAVGLSKIQELKRVAKDSIGIREGSRMAKLELRTLLDKYELINEKFEELESDIDGLLERIPGVQQMLAITGIGKDTVAGFFSEVGNLSYYSHPRQIIKLAGLSLKENTSGKHKGQTKITKRGRKTLRALLFRVAMPLVAKNTAFKALHEYFTTRKTNPLKKMQSLIAICNKLIRILFTIGTKQCEFSEDRMLKDIPHMAPLQKAA

SEQ ID NO: 137304 - protein, 368 aa, unidentified
MKKNNTCPKSSKRSQARKRSITIGMDLGDKTSHYYVLDSEGEMMREGKVATTKKGMKQRFGSLPKCRIAIEVGTHSPWVSRLLSSFGHEVIVANARQVKLISASSRKDDRLDAQTLARLARVDAELLRPIRHRSEKAQGDLMQVRVRSALVDTRTSLINTARGLAKAMGERLPKCDADQMGVEKMQGLPAVLVEALTPLLETVEALTQQIKASDQKLEQLAGREYPETELLRQVSGVGSLISLTFVLTVEDPNRFRKSRDVGCYVGLRPRRSESGESRPQLGISKEGDVYLRKLLVQGAHCILSQKSPDTDLKRWGLKLAGKGNKNAKKRALVAVARKLAILLHHLWVNGEVYEPLRNSKALEQKAVA

SEQ ID NO: 137305 - protein, 401 aa, unidentified
MRIWCGIDWAERHHDIALVDDNGKLVAKRRIADDAAGFRALLTLLTDHGAGPDHPVPIAMETSRGLLAAALLGAGYPLYPINPLAVARYRDRYSVSRAKSDAGDAFVLANILRTDPDAHRPLPADTELAKAVRVLARAHQDAVWDRQQITNKIRSLLREYYPTALAAFPDLSLPVAVEVLLLAPTPTATATLTMPRVRAALRRAGRQRNLDVAASTILTNLRGEQLHQPPLIEAAMGEQAAGLLRFLGAALNNLSRLDDALTEAFTAHPDAQIITSMPGLGTVLGARMLGEVGDDRERFTDARGLKAFAGTAPVTRASGTKSVVSARIVRNKRLGQVGYLWALSLLTTSPGARAHYDRRRERGDNYSAAARNLANRYLGILYHLRCPVVLGPRSNRIWPGR

SEQ ID NO: 137306 - protein, 309 aa, unidentified
METIVGIDVSKNRLDVAVIPQGEAFAVVNDDAGIDELIGRLKAIGADAIALEATGGFETLAVAGLSSAGLTVLVVNPAQVRSYANAIGRRAKTDPIDAAVIAAFVLATKPEIRPLRDAQTQALSELVARRRQIVQMIVAEENRLRMVLAKQAQKSVKRLLTALRRELESLDADLDDHIRKSPIWRVRETLLVSVPGVGPTTARTLLAELPELGSLDRRQIASLAGLAPWTRQSGTWKGKSFIGGGRGKVRAVLFMAALVASRHNPSLKAFRDRLVAAGKPKIVAIVATMRKLLTILNAIIRDSKPWQNA

SEQ ID NO: 137307 - protein, 346 aa, unidentified
MSESYAGQQIVGIDLHRRRSVIVRMTETGEHLETVRILNDRERLAAVMAEAGESPEVVLEATYGWYWAADALAELGANVHLAHPLGVKMFSYRRVKNDQRDAADLADLLRMGRLPEAWIAPPATRELRHLVRHRAKLVGLRSNLKCQVHGVLAGAGVQVPMSDLFGLQGHQLLTKARLSPAERARVDSALRLVTALDFEVELFAKLVAGRLRLDPGYLAIQAIGGVGPILAAVFLAEIGDVSRFAAPAQLASWAGLTPKHRESDTKVHRGRITKQGSKLVRWAAVEAVQRVGAHTRLGQIREQVGERRGRNIGVVAAARELIVLVFYGLRDHHIRCLTQPSPSPAA

SEQ ID NO: 137308 - protein, 413 aa, unidentified
MEVLHARCAGIDLSKRDAKVCVRIVPSGRSRASEEVTTWSSMTAGILALRQKLIEAQVTCVVMEATGDYWKPFYYLLEDAPFEVMLVNAHDAKNLPGRKTDVSDAAWLAQLGAHGLLRASFVPPQPIRELRDLTRTRTAITRERVREAQRLDKVLEDAGIKLSVVASDITGVSGRAILAAMTAGERDPAVLADLSVRRLRVKIPALTQALVGRFTEHHAFLVELHLKLIDQHTAAISTLTHRIEEAMAPFREARDLICTIPGIGVSTADVIIAETGGDMTVYSSPGKLASWAGVCPGQHESAGRVKSARTRPGNRWLKGALGAAALSIARHRGTFLNAKYQRLVKTRGRAKAIVAIEHTFLTLVWTMLTTGTLYNEPGPDYYARRDPQRAKKHAIQQLQALGYDISLQPRGAA

SEQ ID NO: 137309 - protein, 318 aa, unidentified
MIKYHKHIGIDIGKYNFVVGIEGIKDTKEYENTSSGIFEFINDNKDILANSLTVVETTGGYELELLYSLCERGYVVHRADARKVKNFIRSYGNSAKTDKLDAKALGLYGKERADKLEVFKPESKQNIQLFRLVQRRNDLKQMLVAEKNRLQQANTDKFVKNSCINMIDVLSNQITEITNQVEVIISSDQLLKAKHEILKEINGIGNIVAFELLILLPELGKLTRRQIASLAGLAPKANDSGKYQGYRKVGHGRAGVKPILFLAAMSARNSKTSGLRLFYERLINNGKKKMVALTALMHKIIVIANAKLKSLLFNLKHS

SEQ ID NO: 137310 - protein, 412 aa, unidentified
MEILYAIYCGLDVHKDSITACLRRLGAAGQVTKGLRSFGTTTGALLTLCDWLVEAGCTHVAMESTGQYWKPVFQILEGHFAQVLVVNARHIKALPGRKTDMLDAEWIAQLLQHGLLRGSFIPPAPIRELRECARYRTQVIRARADEANRIQKLLEAANLKLGSVASNVLGVSGRAMLAALVRGETDPTALAGLAKGRLRKKQDQLVAALTGRITPGQRALLGQQLAHVEYLDRAIAELDALIATQMAPYQAEAARLQTTTGIDTRTAEALIAELGVDMAVFPSDRHCASWVGLCPGNNESAGKRKTGKTRKGNKWLRSALVAAAWAATHTRTYLGAQYHRLARRRGKKKAIVAVAHSLLVIAYHILKEGTVYRELGHDYFDKRDTVRLQRRLITRLESLGLRVTVEPLPQAA

SEQ ID NO: 137311 - protein, 331 aa, unidentified
MYYIGLDVHKKTISYCVKDAAGHVHREGKIGSTRRELDAWIKTLPQPRMIAMEATIFTGWIYDHLLPHAEKVKVAHPLMLRAIAASKKKNDQIDARKIADLLRCDLLPECHMASTEIRDRRRTLRYRGLLVRQMVQMKNRVSGLLMETGVSYNKRRLHKVGYFADLISTNEEVNQSIRPLLKLSRETIVRCQKTDYALVSSLERDPLLAERLKRLRTVPGVGPITALTWALEIGDVTRFESIKQAISYCGLCSAEKSSADKIMRTPLSKQRNKHIQRALVEAAKLAPRQCHELAVIYEKESNEETATGLHSPWPGRWSPICSRWNAGNRIS

SEQ ID NO: 137312 - protein, 396 aa, unidentified
MSVVVGIDVGASQHVAAVCRRDRQRAERSLLRYRNNRSGFEELDHWLQSQGRVEQVVMESSGHYWLPLASHLRQRGVPVAVVNPLEAKYFAKSRLRRTKSDPADARTLAELGVRDQPPAREALVGVEVREAARFCIRLVEDQARVCQRIRRLVEISFPELGELFEDPTCETALAVLRHSPTARSAGRRHLNTLANSVRPGGRRRLGQVKAKRLQELARETIAPPELDAQAALEVQLLIEQYDLLGRQIEVAEQRVAEMLDGELARRLQTIPGVGPATAATLMAEIGDIRRFDDVDQVAALSGVHPAEKSSGRKGAREGTSWHMAKTGNPYIRAALYRIAVSGLKHNPVLRQHYAKKRAAGRSPMNAIGHCMGKALDLVWGVWRSDRDFDPNYRART

SEQ ID NO: 137313 - protein, 401 aa, unidentified
MDPHLCVGVDVGCRSHRVGIALPDGSILEEFDISHSDAGFQEFFHRVEEHRERMALPVAVAMEGYNGYARPLDRLVKDKGYRLYNVNNLKLARFKEVFPGAAKTDPIDTRKILELFQLKDQLPLAKDVIQEVVSAPAVNEKLKRLSRRRRHLVTEKMRVLNRMQADLQAVCPELLAATNDADNLWFLRLLTFRDDLQQLARLRRSTILQIPGVGQKYARLIRDWQAKAQFSGEVEYVGPMIIQDAKRILELRVHIHTLDEAMADLAEQSKIARRLATIPGFGKTSIAELAGEIGTMERFTSEASLALYLGMCPLTRQSGQMCTARIPRQVNTRCKAAMMTTVARHIGCVPQSRAYYDRKRAEGKAHNQAIRSLGRHLVRVIWAMLRDGRDYEIREDHHPTA

SEQ ID NO: 137314 - protein, 365 aa, unidentified
MQKAELSDEADSENDLGGSSETMYYIGLDVHKRTISYCVKDAAGRVHVEGKLGSTRRELDGWIRTLPQPRMIAMEATIFTGWIYDHLLPHAEAVKVAHPLMLRAIAAAKRKNDKIDASKIADCLRCDFLPECYMTSTEIRDRRRTLRYRELLVKQMVQMKNRVSGLLLEKGVTHTRQRLHKVGYFAELMSKNEDIDASIRPLLKLSREHIVRAQKLDYALVSSLERDPMLVDRLKRLRTVPGVGPITALTWALEIGDVARFRSIKQAISYCGLCGAEKSSADKVMRMPISKQRNKHIQHVLVEAAKLAPRQCHELALIYEKEMQRGNRNRATLAVARKLVCWMLAVERRKQDFVPAEEFAGTTAA

SEQ ID NO: 137315 - protein, 370 aa, unidentified
MTRISAGVDVSKNRSTVCIMDQDGKFIMRPFLVWHSTEELDFLADTLKRLNGEVRVIMESTSVYQYPIALQLKERGLFISIVNAYEMKQFANIDFRGGKTDKKDSRTIASYGISYWDKLVEWQIPKDTYFNLDLLNRTYMNAKKHRQIILQELQHYIDCAMPGMDKELHSLNLSTKKDFMLDFVEKFWHRDEIVNMTEAEFTEVFTAWAKKKGYRPVEGKAAKIYAIAKSCIPYYPANPTVKTILQCIVDKLSGVNRTLVTIVTQMIEEAKKLPEYQIVREMPGVGDPLAARFFGSVGDIRRFKNSKALVAYAGIDSPPDESGDFSSTHRHITKKGSKVFRDTGYEIMMALRAQKRTWEKVADCIIKLNT

SEQ ID NO: 137316 - protein, 326 aa, unidentified
MPVVGIDIAKLTFEAAWWVDGRWKTQSFKNDTEGFAKLKNLLGEKHHVCLEATGRYGSSLALSLFEAGHDVSVVNPLRIKRYSESRLRRTKTDRADAILIAEFCDKERPGPWMPLATEVEELRELVRRREHVLGMQQMERNRNLAGPVSASVAASIERSLVFWREELERVEKAIEAHFKANSDLNDQRKLLVSIPGLGSLSAAILLAEIGDISQFASAKHLAAFAGLVPNERSSGTSVRGRAGIGKMGNPRIRRVLYMATLSAKRCNPPIREFCENLLKTKPGRVVHVAAMRKLIHQAYGVLKHQRPFDPNAANPPRREERELPSS

SEQ ID NO: 137317 - protein, 523 aa, unidentified
MSRSRTRRRPGRRRPDAVQKPRGTFHPRVQKVGPEHFGIVAVDCAKARSKWMLTDFYGTILVPPTVVAHNRPAFDEAIARLRQAVRDHDLRDVLVALERTGRYHHAPRRAFAAAGFETRIVHPFATSCLRQPADPGNKTDDTDLHAIQRAAIHGFALIEQELDEQGTTFRLLIRHRRDLVRKAAALRTQIREHLDAAYPGFAACFADLWERPCAWHLVRHFVTPADLDAAGRAGLCHSLDAAAVRYHRPTIDTVLAWAAQAASPDRGGATHRRFALALDDDRRQKVQEIQALERDIAAALARTPYVLLLSFPGVNVVSAADFGGEMGPIGDYASARNITGRAGLRPTRYQSDAVDRANGPLLRCCNRTLRAAILRVADNLIKCNHHCNALAHRWQVQGKDPRHTRVKIALRFCRIAYQMVAGRQVFRHPGLQGRHYILDKLCAFHRAHDTAVPALLHDLQAAVAQLPRPEYRAEAAPLHEELQRIQQGRRRGPQVLGDILPIVLARLGVGGVQSPASGAADPS

SEQ ID NO: 137318 - protein, 336 aa, unidentified
MEVTTIGLDLAKHVFQVHGVDAFGSVVLKRRLRRREVLTFFASLKPCLVGMEACATAHFWARELRALGHEVRLMPAQYVKAYLRRGKSDAADAAAICEAVTRPSMRFVPVKGEAQQAALMLHRVRDLLVRQRTQLINAIRGHLAEFGVIEAQGPWNVGRLLAGLEQDGSVPGLVQELAHLLAAQLQEAEERIAEVDARILAWHKADAVSQRLAAIPGIGPLVATAIAATVPDASAFRSGREFAAWLGLVPRQNSTGGKTRLGRTSRQGDAYIRRLLVIGAQSVLYCSKAARANPWIQGLLAKRPRMVVAVALANKTARIAWAVMARGTTYRIAAAA

SEQ ID NO: 137319 - protein, 354 aa, unidentified
MRIIGAFDVHRKQITYKWLDTETGEIQRGRIMPGVRKAVREFLVPFEGLDAHFALEATTGWRFVAEELSRVGLVAHLAEPADTAALRGSKRRAKTDRRDCDHMMDLLGTGRLPESWLPPAHVLEIRTLVRLRKALTDTRREWQQRVQAQLFHQGVPRIPAITTQGRAQLAAVDLSAAGRQVVTTGLAVIDHLDYQLAPLDTYLVRFAKVQPGCRALKQRLFGVGDLTAVFIWAELGDCVRFSSSDDAVRYAGLDITVYESADKRPPGHLSRQGPEALRWALYEVAQSAARSTSPDYAYYLAVKRRLNHKRACLSVARKVCRRAHHLLRSFGDDAFAPVKGSVLPSFDRPAMATA

SEQ ID NO: 137320 - protein, 358 aa, unidentified
MYPFYLGIDLHLKRTYMVLMNQSGQVIDERRISNNEIEEYLVEIVPKNTHAVMEATRNWAFMYDQLSQHVERVDLAHPKELKAISAAAVKADHIDAKVLANLARMDFLPTAYAAPKDIRDLRMYNRHRDQLVRMRTQVKNRIHAILASYNLAAPVSDLFGVEGGEYLEEVMETKLRTAAKRVIQDQLVLINQLSEQIGAIEAETTLSPEQKQMVRLLKTVPGIGKVTATTIMAEIGDIHRFHSAKALCNWAGLTPKIHSSDVIVRHGRISKQGSSLLRGAMTRAATVASRRSKRWYVVHENLLPRCGKVAAKVAVARRLLTVVFYMLKRMEPYQEDYGRNIQRTGEPAALHGSLKPTK

SEQ ID NO: 137321 - protein, 349 aa, unidentified
MLADELDYVVGVDTHRDQHTLVVVVAPSGGVVAECSVRASARGYAQAVRFADKHALGVRVWAVEGAGHYGAGLARHLSGRGETVIESGRGPRDERRLRGKDDPLDAVRAARAALASKTLVVPRMGQRREALRLLLVARRGAVEVRRRTLVQLRSVIVTAPDRLRAQLQALPERRLLERCSHLRRSSSCPVDELATKLVLRTLARRIEAATAEAKQLEREILGHVRALAPGLLDEPGVGPIVAADVIVAWSHSGRVRSEAAFARLAGVAPVPASSGQTVRHRLSRGGDRQLNRALHTVVLHRRQHDPTTRAYIERRLAEGKSRREATRLLKRYLARHLYRALQQTEPLMT

SEQ ID NO: 137322 - protein, 422 aa, unidentified
MRKLVTTLANTFQRSIFMNAVGIDVSKGKSTVTIRRPGNEVLLPPCDFPHTQSCINGLIEQIKSLDGETKVCMEHTGRYYEPVASWLSDAGIFVSAVNPILIKEFGDDSLRTPKTDKADAKKIARYTLDRWANLKQYNHMDEIRNQLKTMNRQFGFYMNHKTAMKNNLIALLDQAYPGANDFFDSPARSDGSQKWVDFVHTYWHVDCVRGRSPEAFAQHYQDWCRRKGYNFSASKAEAIYSRSSDLIAVFPKDNTTKMLIRQAVAMLNATSATVESLRQKMDETASALPEYPVVMAMHGVGPTLGPQLMAEIGDVTRFTHREALTAFAGVDPGSRQSGKHEQKSVRTSKKGSPNLRKTLFQIMAGLIKRSPADDPVYAFMDKKRAQGKPYYVYMTAGANKFLRIYYGRVKEYLSTDTEADNV

SEQ ID NO: 137323 - protein, 489 aa, unidentified
MRLNPNPGLGDGGGRTMSLRPSRAEKSLSAAAVSRFSHDQMPRFERRSIRLDVTGTDRPNRNQSEVIMNEKNAKKQEEKRCWVGLDWGQESHAVAVVDDDRTILQRFKIGADLDDLKQLADRLHGCGAVAGIAIEATCNPVLGYLHSQGFTIYPVNPKLSKNWCESNSVAGIKNDERDGLVLAVELARRHESLRTLKEDEPTLAELAGLCHKLRDLIDQRTALLQRLKATLRQYYPGVMGFFSDWSSPVAWRFIKRFPMPETLAKARKDTLIKFLKANRIGLKPIWLERIDDRKTVTQWPVPADSLALEAMALATIAQLQALQPHIDKCDRLIAERTQNMAQAQLLRSLPGAGDRLVPALTAITALTLNEENSIEALRCISGIAPVEHQSGKRRHIRIRRRCNKHWRNIMHMFARCSTVSCPWAKAFYDMHREQGDRHATALRKLADKWIKIINRMLATGEPYDDARYVEALRKHGSPVYSRLCEKPCG

SEQ ID NO: 137324 - protein, 418 aa, unidentified
MAFKIFRKNCCGLDVHKTWIYACIGITDTNGLTEYRQARFSSFSKGLRELADWLAKYSCFEVCMESTGKYWIPVFNILEKSCFVTLAHPKYTKPQKGNKTDRKDAKWICDLFMCDMIRPSFIPSPEIRQLRDLVRYRSKLTNMLVGEKNRAQNCLTVSNLKLDDVFSDVFGKSARSITQYILDHPGETFDVAPFVDRRCKAPLEEIQAAVDGAVSPEQAVKLRQCLAHIDELEAHRKEIEQEIFLIAEPFSAVLDLLRTLPGLDKNPMTAIAILSEIGPDMSVFPSSKHLVSWAGCCPRNDQSNSKVKSRRISTAGSYLKPLLVQVANALIKSKKHPEFKERYHRIKSNRGHKKAVIAVCKMLLTAIWNMLSKLEPYNPSGFLEHRPVNEKKVLTKSQALELLRLRGYTIADDTVDVA

SEQ ID NO: 137325 - protein, 347 aa, unidentified
MKKIFIGIDVSKEKCDATAISAEKGLTEVEKLDYLVFENRPKGFRSLLSWAKRLKPDVAMEDILFICETTGAYDRALCDYIYSKGLDIWRESALQILWSSGVRRGKDDKTDSLMIAEYALHHIDKVHLYESPDSRILEIRALFLYRRKLEQEKTSKLVRIKELEVTAGKSKTLTFIIRDAKKSIRQLEKSIKECENKILELVEADEALSKSYQHLDSVKGLGIVNITALIVYTNNFKAFKTSRKMATYWGVAAFRSKSGTSVDKRADVRNLSSSMLKSYLTQAAMHTIAKGGIYHDYYQRKIAEGKTHSVALNNAKNKLLHLAMSLVTHDMDYEANHEFLRTQRVAN

SEQ ID NO: 137326 - protein, 423 aa, unidentified
MDLLHPRCAGLDVSKRDAKVCVRVASGTRAAARSTVTTWGSVTNQVLALREHLIAEQVTLVVMEATGDYWKPFYYLLEDAPFKVELVNARHVKNIPGRKTDVSDAAWLAQLGAHGLVRGSFVPPEPIRQLRDLTRTRTMMVRERAKEIQRLEKLLEDAGIKLSSVASDISGVSGRLMLDALIAGQRDPGALADLAKRRLRSKIPALTEALTGRFTEHHAFLARVHLDLIDQRSHAIAELTARIEVMIERFRGARDLIVSVPGISVLVADVIIAETGADMSRFPTAGHLASWAGTCPGSNESAGRVKSTKTRPGNPYLKGALGIAAMSAARSHDTYLAAKYRRIASRRGPVKAIVAVEHAMLIAIWNMITNGVFYDDLGGDYYTRLNPEKTKQRALNQLRQMGYDVTLNPPPSSWVRGNLRVSN

SEQ ID NO: 137327 - protein, 356 aa, unidentified
MKAKVTKQHIGIDISKDDFQVCFMQRLGTDKIRIKGSRSFKNTLIGYKNFKTWVFKKASSELLVSYSLEATGVYHENLAHYLYEQKYPVSVLLANTVKAYSKSLNVNTKTDKSDAKSIAQMGIERSLKLWSPISPQMRQLKQLTRERGSIQTSKTALSNQLHALNHAHLANKEVLKLIKQRIKLLDKQVLTVNQYIEQAVRKDDFLKERIEKICVLKGLGLITVVTILAETNGFQHFSSKAQLVSYAGYDVIENQSGSSINGKTRISKRGNSRIRKALYFSALTAKKYEPVFTSLYNRIFERTKIKMKGYVAIQRKLLVMIYSLFKNNVAFDPEFHKKLTNIKEKCRQDTMPAYSG

SEQ ID NO: 137328 - protein, 331 aa, unidentified
MYVSIDYHKRYAVATSMDDKGQVVETVRLKNEPGDLIGFVDRLPEDSKIAIEATGNWYDFFELLEGKSPEIHLAHPLKTRAIAEARIKTDKIDSTILAHLLRTDLLPESYIPPREIRDIREVLRYRASLVSLRTALKNRIHAILSKNGIIVEYTDILGKGAKAQLKALEVRSCYRLGIDGYIRLTETLQQLIDEVTKTIEGIVENNPQAKLLTTIHGIGYYSALLIVSEIGDITRFPNAKKLCSYAGLVPSVYSSGGKTRHGNITKLGSKWLRWILIELSQHFSKSYNRLERMYARIAYKHGKNTARVAVAREMLKIIYSMLTHNRPFLKE

SEQ ID NO: 137329 - protein, 342 aa, unidentified
MEHFAGIDVSLEESSICIVDATGRIVREGKVETTPEALVQFLTSSGVKLGRIGIEAGPLAPWLFEGLAAAGLPAICIETRRMKVFASVSPVKTDRKDARAIAQAMRMGFFRTVHIKTRASQEARLLLVNRGLMQRQRLQIQNTIRGTLKGFGVKLGKVSQGRFLARVRSVIEPLPVVQAAILPLLGAWQALRLALLQLERLVRRAAAADPVCRLLMTAPGIGPVVALAFRTGVDIANRFAKSRLVGAHFGLTPRKYASGRIDRDGRITKCGDAMVRAYLFEAANSILSRLKKPCELRDWALKLAQRTSAKHAKVALARRLASVLHRMWVTGEPFRWPAAAAA

SEQ ID NO: 137330 - protein, 355 aa, unidentified
MNQEKYIGMDVHDATISAAVKNAQGKLLMECVLETKAATILEFIQGLRGTLAVTLEEGTLAAWLHDLLKPHVSRLVVCDPRKNALMRDGNQNDRVDARNLAELLRTNQVKAVYHGKHGTRALKELGRSYLTLTKDSTRVMNRIKSVYRSWAIPCGGTSVYSRRHRAEWLAKLVEPGVRIRAEHLYQQLDSLEPVRQAARRELLRESRKHAAVELLRQIPAIGPIRSALLVAILQAPHRFRTKRQLWAYCGFAVQTYDSGEYRVVRGKLQRNRERITVRGLNRNHNHDLKNLLKGAAISAIERPGPLQDFYAARVEKGMRPSMARLTLARKIAAITLTMWKKGVSFDPKQLQRQAA

SEQ ID NO: 137331 - protein, 361 aa, unidentified
MEKVHFANWQRQPYSLEVTMTTIKYFVGVDIASSTFTACVGATPWKVILKAHTFENTEDGYQTFSDWLVSQQIGAKQSVICMEATGVYSEGLAYFLFATGYQVAVQSPLEVKRTFKPYGPKTDAVDSLQIAEYACRHIDKLSFWQPRNEILEQVKALLATREQFVSQNVAHKNALQAIQRKPIRTLFAEQAHTQMIEQFKKQIQAIDHEIRRLIESDPTFKEMLLLLLSVPGVGLLLASHMILLTQISLDHKELASYLGIAPNEHSSGTSIFKHATSRHFGPAAVRKLLYLASCSVRTHQTQFTSYFARKTREGKPAKLVLNNIANKLIKIICAVLTTKTAFIKNYHSVQPLTFQNTLTGS

SEQ ID NO: 137332 - protein, 343 aa, unidentified
MMRVATIGLDIAKTVFQVHGVDAAGQVVVRQRLARRRVLAFFEKLAPCLVGIEACSTSHYWARELIARGHEVRLMPAQYVKPYVKRGKNDAADAEAICEAVARPTMRFVPIKTPEQQSVMMLHRVRLMLNRQRTQLSNAIRAHLSEFGIVAPIGRRGIDQLLAIVADEIDTRLPACARLCLQMLAAQLAVVKEQILENDQRVRASARATELGRRLMEVPGVGPLLASALIATIADPSAFKTGRNLAAWIGLVPKQNSTGGKERLGSISKAGNRYLRQMLVVGAMAVIRYAERHGTRRPWLLQLMQRRSTKVAAVALANKMARMIWALMTSGERYREPAAAIAA

SEQ ID NO: 137333 - protein, 363 aa, unidentified
MSDGICFAGLDVHARKTAAAAVRLGSGEVWKAQLPGSSVAAIEWLQALPGPVRAVYEAGPTGFELARAARAAGVEVMVCAPGAIPRQPGDRIKTDTRDALKLARLHAAGQLRPVVVPAVELEALRDLVRAREDLRGDLMSARHRIGKLLLRRGLIWTGPGEAWARRHLEWLSKVRFEQPLLEVVFGEYLAHHEVLLARRDRLDGLIFEQSIQGSWAPTVARLRCLRGIDTLTAVGLVTEIGEIAAFSHPKHLASYLGLVPSEHSSGTKRRQGSITKAGSSHARRLLVEAAWHYRRAPSVSLTLKRRQKGQPSDAIEAAWRAQLRLHRRWSHLDTTRAKKRTTVAVAVARELACFVWEIARQPD

SEQ ID NO: 137334 - protein, 326 aa, unidentified
MGKSIKNLSSVTIVGLDIAKNVFQVHGVDAGGALVVAKAVRRGQLLSFFASLPPCVVGIEACSSAHHWARSLIDLGHQVKLIPPAYVKPYVRRSKNDAVDAAAICEAVGRPNMRFVPVRSVENQAQLMRHRARELLVGHRTRMLNALRGHLGEIGVVAAPGAQNAYALKRLLADGCDDNGEVIVPDCVRQALAPLVHQIDAIDAEIAAIDEEIKTLVKADETARRLMTIPGIGPITAQAIVATVRETSAFAGGREFAASLGLTPRQNSTGGKERFGRITKMGDRYLRNCSSSGPARRFVIARGTTTRYACGPIDCWRARLSSISSS

SEQ ID NO: 137335 - protein, 400 aa, unidentified
MSHYVGVDISKDNFHFCILTEDSKILSSGEFPMSSQGFSDFFNLLKSLTDTIVVMESSGRFHIPLYCFLVEKSIQTFILNPKIIHRFFEFISANNPSKQDKKDAKILALFALNNPQMLKSYPEDPELRSLARLIQKLKNELAEAKTQIKYCLTVLFPEAERFFNIYSHSFLHILHKYPSAKALKKAKPEWLSEIIKNSISRGKPASFTPQEVIQTAKNSIGVDNPYLSETLIFYIDKLFFLEPRINKFEEILMDKIDKDQQEQIKLISSIKGISQRLAGLFLAEIKDIRNFPNAKKLIKYAGTDPVVKQSGKYKLRMSISKQGSSFLRNILFQMAVGVVKWNSYFRDYFVRKKRDFGSYKKAMIAVVNKLIRVIHALCIKRTFFVHSFSKSTLPLEVSHV

SEQ ID NO: 137336 - protein, 388 aa, unidentified
MQFVADQSLAPTTIGADLCAIFISLELSRSTWLVTSLSPGGGEKMSKHSVPAGDIAGLLARFSELRRKACARTGKSFPIIVIQEAGLDGFWIHRVLLSEGIESHVVDAASIATSRRRRRAKTDRIDGETLLRALLAHKRGEPRVCSMVRAPTPEDEDRRRICRERKVLIMERVQHVNRIKGLLFSQGASGYEPLRRDRRARLDALQTGDGRRLPQHLKAQICRELDRLELLLEQIKAVEAERDALLNAEQTKASAPPPMLLGVRGVGPEFASVLWSEGLSRHFDNRRQVAAYAGLAPTPWQSGSVNREQGISQSGNPRLRTTMIQLAWLWLRHQPGSALTLWFKDRMERNGGRRRKTTIVALARKLLVALWKYVSAGVVIEGAMIRPA

SEQ ID NO: 137337 - protein, 369 aa, unidentified
MKHCTEGLVGIDVSKARNAIALADGERGGEVRYLGEIDASVENMRRFVKRLAAKHERLYFCYEAGPTGYGLHRLITEMGYDCIVVAPSLIPKKPGDRVKTNRRDAVSLAKLLRADELTAVWVPDAGHEAMRDLVRARTAAVECLRVHRQQVSAFMLKHGRIYPQKTGWTMRYLRWLQEQRFDHPAHQIALQEMVDAVRVAKGRMIRLEEAIAEFVASWSLGPLVVALQALRGVNLIVAVTFVAEIGDVSRFDNPRQLMGYLGLVPGERSTGDTIRKGGITKAGNSRVRSLLVESAWTYRHPPKIGKTKLYRLEAAPPKVREIAWKAQTRLTARYRALSARGKKTTVVCTAIARELAGFMWSVAREIKAA

SEQ ID NO: 137338 - protein, 437 aa, unidentified
MTATASECPPPPFQAPALPVGEFAALIGLDWGDRKHAIALRPRSVGPAAVETLDLEHSAENLHAWIKEIGERFGHQPVAVAVESSKGAVVAALMEYPWLVLYPIHPSTSRRFSTAFTPSGAKDDRPDAQILLEIIESHRQRLRALVPQDAATRRVAMLVEVRRKLVDSRTHATNQITSLLKNYYPQALELTGESLCAPMAMDFLGRWPELAVLQRAKAQTVRDFYRAHNVRRPELIEARLALIKTACPLTEDRALCEVSVLHLAALVAEVRALSAHVAKADAAIATAFASHPDAQIFQSLPGAGPALAPRLCVLFGANRERWSNASELQKYYGIAPVTERSGRQKYVHWRWSAPVFARQSLVEWAGQSIKWCEWAKAYYLQQKERKNPHSSILRSLAFKWLRILWRCWRDSKTYDDALYVAHLRERKAPLLAFLPAA

SEQ ID NO: 137339 - protein, 317 aa, unidentified
MTAMRTFVGIDIAKADFVVTSRPEGGTWTAPNDPAGIRTTCERLHGLAPTLIVLEATGGYEMALAAALVAAALPVVVVNPRQVRDFAKAMGQLAKTDRLDAALLALFAERVQPMPRPWSDEARQRLEALITRRRQLLDMLTAERQRLEHAPAPIRRDLVRHIRWLERRVMDVDRDLDDTIQKSPVWRAKDDLLRTVPGVGPVVSRTLLADLPELGSLNRRQVAALAGVAPLAWDSGLRRGQRRVWGGRAPLRAVLYMGALVATRRNPVIRAFYRRLVQAGKPKKVALVACMRKLLTILNAMMRTQTTWQQLSDPESA

SEQ ID NO: 137340 - protein, 309 aa, unidentified
MMKLKYSICCGLDVHKNVIVATIVTTNKDGISEYLQKSFSTINSDIQRFHNWLIENNCYHVCMESTGKYWIPIFNYLENDIDICLTHPKYVKAIKGKKTDKKDSKWIADLYKFDLVRCSFIPPKDFRQLRELARYRFKLVCMKSSEKNRIQNCMTISNVGIASVLSDPFGKTATEIMSYLLEHTADSMDEKAVRKLIKKGAKAKSDEIIETIKGYNIETDQAKKLELAQGHLEYLDDMITQTEVELYVRIKPYYEFVEFVSTMPGMTELSSTIVLAETGVDMDIFDDAKHLCSWCGLSPANNESAGKKK

SEQ ID NO: 137341 - protein, 387 aa, unidentified
MESVTPSTAVATTVRSNDITLFVSLELSRSKWLVTINSPGSEKFSRHTVEGGNGVCLLDLLSRSRAKAEQRYGVAIKTVVIQEAGLDGFWIHRLLLASGIESHVVDAGSIAVARRHRRAKTDSIDGETLLRTLMAWARGERRVCSMVQAPSPEDEDRRRLTRERGTLVKERIQHTNRIRGLLSGQGVRDYNPLRRDCLERLEALRTGDGRPLPPMLKAEIRRELDRVAVVTTQLAAVERARDALVCTPAEESNTPASVLLKLKGIGPEFASLLWLEALFRSFANRRQVGAYGGLAPSPWQSGAVERDQGISKAGNHRLRRTLIELAWSWLRHQPNSALSRWFQARVGAAKGRIRRIAIVALARKLLVALWRYVTQGVVPEGAELKAA

SEQ ID NO: 137342 - protein, 350 aa, unidentified
MVVVGADVHKRTHTFVAVDEVGKELGHKTVDATTAGHQAAVRWAWDRFGRQLRWAIEDCRHLSARLERDLLTAGQSVVRVPPKMMAEQRRIARTRGKSDPIDALAVARAALRDPDLPVATHDEASRELKLLVDRRDDLVKYRTATINRLLWRVHELDPAWAPPARSLDVAKQQQILAERLAGIDGIVAELARDELADIIGLTDRVNGLERRISALSAAAAPTLLAMPGVGALTAAKLVGETAGVTRFKSEAAFARHAGIAPIPVWSGNTAGRVRLTRSGNRQLNAAIHRIAITQIRMDSLGKTYYDKKKAQGMSTPEALRCLKRRLARIVFHHLTTDQTTAPANRLAHAA

SEQ ID NO: 137343 - protein, 404 aa, unidentified
MDVVYSHVCGLDVHKKTVVACIITPDEKEIRTFSTMTDDLLQMVDWIKSKGCTHAAMESTGSYWKPVYNLLETEEIQTLVVNAQHIKHVPGRKTDVKDAEWIASLLRHGLLRGSFIPPRDQRELRELIRYRRSLIEERAREVNRIQKVLEGANIKLSSVASDILGKSARAMIEALIAGNVDPESLSELALRRLKNKKADLQRALKGLIGPHQRLMLQTQLRHVDELDALIQQLDEEIKRRMLPFEEDLERLDTIPGVARRTAEQIVAETGTDMSRFPSAAHLCSWAGVAPGNNESAGKRKSGRTTKGNPKLRSALIEAARAAVRTKHTYLSSLYHRIAARRGANRAAVAVAHRILTIVYHLLKEKQVYNELGPHYYEERRREQMARQAIRKLEMLGYDVMVLIP

SEQ ID NO: 137344 - protein, 308 aa, unidentified
MTTIYTGLDIAKLNLQLHLAGRIHDLPNTAAGHRRLCKLLAAQPGGHVVCEATGGYERAVVTALQAAKVPVSVLNPARVRNFARAQGQRAKTDDIDAAVLTAYGQALQPKPTAPRTEQEQQLTELVRRRVQVLEVLVAQRLQAERLTLPALRRQAQSLIHRLERDLKQIEAQLATLRAQTAVLDARVQKLEAITGVGQLTALSVLAELPELGTLNRHQAAALAGLAPHPRDSGQWRGQRHIGGGRAPVRRALYMAALVAARSNHVLKVFYQRLRAAGKPAKVALTAVMRKLVVLMNHTLKHPNFVLQN

SEQ ID NO: 137345 - protein, 407 aa, unidentified
MQEATQHDAVDVFVGVDVDVDVDVGKGRHHAVALRRNGKRLYNKALPNDEVKLRALIAELKTHRRLLFVVDQPSTIGALPVAVARAKGVLVAYLPGLAMRRIADLHAGEAKTDARDAAIIAEAARSMPHTLRSLRLADEQLAELTMLRGFDDDLAAQVTQTSNRIRGLLTQIHPALERVLGPRLDHPAVLDLLERYPSPSALAAANEKTLANRLTKLAPRMGKNLAAEIVQVLNEQAVIVPGTQAATIVMPRLAQQLAALRKQRDEIAADVERLVLAHPFWPVLTSMPGVGVRTAARRLTEAAPKALATAAHLAAYAGLAPVTRRSGSSIRGEHPSRRGNKVLKRALFLSAFAALRDPVSRAYYSCKIQQGKRHNQALIALARRRCDVLFAMLRDGTIYPPKSAPNA

SEQ ID NO: 137346 - protein, 427 aa, unidentified
MNYTQNEKIMSITERTLVVGVDIAKSIHYARAFDYRGIELGNVFKFENTREGLEAFKEWMDGLAKDTGKSSSIVGMEPTGHYWFNLGHFLKDEGIRLVLVNPFHVKRSKELDDNSPTKSDRKDPKTIAKLMIDGRYSEPYIPKGIYSDLRIAMDVRDSISKSLIRIKNRVIKWLDKYFPEFFDVFGDWEGKAALITLREFPTPEKIIAIGIDDIVTTWRKEVSRAVGVKRATKLMEAAKRSIGIKEGLRMAQKELRAIIEQYDLYMAQLSEVEADMEELALQVPGVKEMLTIKGVGIATAAGFIAEVGDIRRFSHPSQIQKLAGLNLVENSSGKHKGQTTISKRGRSRLRSILFKVMMPLVAKNDEFKMLHKHYTTRRENPLKKKQSLILLCCKLIRIFYALINKRVAYSPERLLKNISYLQLQDAA

SEQ ID NO: 137347 - protein, 395 aa, unidentified
MNKIVHYIGLDVHKDSIAVAIAPQNSTEVRRYGIIGGTLEAVDNLLKKLAKPGLELRLVYEAGPCGFVLCRHLRSKGIHCDLVCPSLIPKKASDRVKTDRRDADQLARLYRAGELTPIRIPDQEDEAIRDLIRARTVAVCDQRRARNRLKGFLLRLGFRYTGKTSWNDAHKRYLSGLLMPQPPQQIVFQECIHAIDDAAARVARLNTAVLDALPGWKWKPVVRALMTLRGLQELSAMTLIAEAGDLSRFENPRSLMHFFGLTPSEHTSGDKRVQGPITKCGNTHCRHVLTEAAWHYRLRPLVSEAMQKRQERQPKEVQRIAWKAQQRLHKRFKALVVRKKSVVAVTAIARELVGFVWAIACQVKPAQRPPAPEVIRTCRGKVYQLNPDKKMAKAK

SEQ ID NO: 137348 - protein, 392 aa, unidentified
MQAAADRAEAPTAIQTDLRAIFVSLELSRSTWLITSLSPSGGEKMSKHSVPAGDIAGLLRRFAQLKEKARARTGRDFPIIVIQETGLDGFWIHRMLQSEGIESHVVDAASILTSRRGRRAKTDRIDGETLVRTLMAFKRGEPRVCSMARAPTPQEEDRRRVCRERRTLVGERVTHVNRIKGLLFAQGVFGYQPLRKGRREQLEELRTGDGRPLPVHLMAQIVRELDRLEVVLEQLKTVEAERNALLKPATGAAASPPAMLLELKGIGPETAAVLWSEGLFRQFDNRRQVAAYAGLAPTPWQSGSIDHEQGVSKAGTPRLRTTMVELAWLWLQNQPASALSLWFHERVRRLGGRMRKTTVVALARKLLIALWRYTTAGVVIEGAVMKAAPATI

SEQ ID NO: 137349 - protein, 432 aa, unidentified
MRSKAYRAVAVNQIDLKRLLQRQEAVVHAGLDVGKDYVLCVLRWASADFERPWRCRNPADLVRLAQRLQRVGQGRRLVVALEPTGTYGDALRQALQQAGLAVHRVSPKAAADYAEAFDGVPSQHDGKDAAVVAELAAQGRCWPWPLVLPGDVEQELAYQVDWLEGQRRQTQAWYGRLEALLSRHWPEATGLLPLTSGVLQRCLARYGGPQGLAEDPQAVDRLYQWGKGLLSRDKAQALVAGARQTAGVPLGHWDEERLRRYAQELQGGLRHQRQARRRLRRLASLQPVIRAMGEVVGPVTACVLWVELGDPRDYPCGPAYRKAMGLNLKERSSGRWQGRLKLTKRGPSAVRRWLYLAALRWVRQEPVRSWYLRQKGQRRGAAKPALIGVMRKLALALYRVGGRGEPFERARLYPSHMAQDTAAAATGVPTRR

SEQ ID NO: 137350 - protein, 274 aa, unidentified
MPPVTAIDVESRITVIGIDTHACTHTYAIINTTTGAHAGCEAFPVTSAGMSRAIAWIRRNTGGAILAAVEGTSSYGSSIRRALHAEDVAVVEVKPPKKPARAGVGKTDQIDAAAAAMSVLGRDTANLLQPRDDGERTAISVLLDARGRVEQQRTANHNALNALVRQLELGIDARRALKALQSQLADLGEQLAPGLQSQPGFGPVTVGIILATYSHSGRIRSEAAFAALAGAAPLQASSGNTIRHRLNRNGDRQLNMALDVIAKVRMRFHEQTKA

SEQ ID NO: 137351 - protein, 342 aa, unidentified
MHYVGLDVHKKSIAYCVKQADGVIVREGAVEARREDLCAWAAKLPQPWTGAMEATLFSDWVYDQLTPYAAALKMGHPARMRAIATSKKKTDQIDARTICDLLRCDLLPPAYVMPPDLRQLRRVLRYRNLLVRAGVQMQNKIAGLLLEMGVEYDTPRLHRKKYFGQLLKEKETEIPASARRLLAFSREQYETLHRMELQLLSGLEQHPDIAERVARLMTIPGVGPVLGLTWALEVGPVERLGNLSRAISFCGLCSALRESAGKQTRGPISKQRNVHLQTVLIEAAHLAPRWNPLLAEVREREIQRGHRNRATLAVARKLVAFLMAADRGHQPHPRPASVSAAA

SEQ ID NO: 137352 - protein, 371 aa, unidentified
MFKNSTLFVGLELGDRQSLVYVVNGEGEVVEESRLATTKPALKRKFAKFPRCRVAMEVGTHSRWASRLLQELGHEVLVANARKLRLIYANPRKQDRVDAEVLARLARVDPKLLSPIRHRSPEAQADLALIRSRDSLVRARTLLINHARGLVKSSGQRLASCSAPAFSHRALAHIPQDLRPALLPLLENIAVLSGRIRVYDRQIERLCQDRYPQTGLFRQVGGVGPVTSLAYLLTLEDPARFAKSREVGPCVGLVPKRDQSGEHDPQLRITKTGDSYLRRLLVGSAQYILGPFGPDCDLRRWGLRLAQRGGRNAKKRAVVAVARKLAVLLHHLWRTGEVYDPFHQVEAQPARRTSRSVAGGGRAIQRHATVS

SEQ ID NO: 137353 - protein, 355 aa, unidentified
MTTKFIKQTVGIDISQKELDVSLGNMDAEASTRICAYKTFQNSEKGFTALLLWIKKQVDVESPIRFVMEATGVYHEALAYFLSNKNYSVSIVMPNKITNFFRTLEGKTVTDKSMSAAIAQFGLEKKLEDWTPPKKVFRELRQITRERDQLICERTMLKNQLHAEETEAYPSAHTVKRIKVRIKLMNSQLKETLDEINGHIRNDEDIAESIKLITTIPGIGILSGAIILAETNGFELIRSKKQLTSYAGLDVKEKESGTSVKGKSRISKRGNRHLRKAMYMPALAAIRHSERYQAIYVRIVSRTGIKMKAGVAVQRKLLEMAYTIFKNKTPFDPIYLQKKEEVVEDNEEIMVVELV

SEQ ID NO: 137354 - protein, 415 aa, unidentified
MIFVGIDWSEAHHDVCVLDDQGTVLAKGKVSDDVSGVGRLHAMLAEHVEDPSEVVVGIETDPGLLVGSLVQAGYHVYAMNPLAASRYRDRHAVSRAKSDPGDAKVLADLVRTDRQNHREVAGDTELAEAVKVLARAHQNLIWSRQRQVNALRNTLREFYPGALRAFSTSQLATVEACGVLAMAPTPTWARDKLTLQRLRRSLAASGRKRNLDRRAGQILQALQAPELSAPPLLEQAYGEVVGALVVVIDGLTHQIMGLEAELSERFEGHPDAEIITSLPGLSSVLGARVLAEFGDDPTRYVDARARRRYAGTAPITRASGTRLVVLARVARNRRLFDACYWWACSPPSTPPPEPAATTTPTAARARPTTRRSVQSPTAGSGSCMAASSGKSSTERTSPGSRLLRLPLDNFEPWDV

SEQ ID NO: 137355 - protein, 308 aa, unidentified
MATSSYVGIDVSKDRLDVAELGGHVWQADNTPDGIAHLVQQMAERQPELIVVEATGGYQRNVVEALFHAGLCVAVVNPARVRQFARACGLLAKTDKLDAFVLAVFGQRVQPKRYESKSEAEKQLSALLVRRKQLEEMLKAEQNRLRTISPSLRSSVERILALLKEEKKHLEEQIQMFLNEHKAWQEQREILSSAPGVGRVTTATLLADLPELGKMDRKKIAALVGVAPMNYDSGKKRGYRKTKGGRTDVRSVLYMSTLVATRYNPLIRTQYQHLLKRGKEKKVALTACMRKFLTILNAMVRDQQPFCV

SEQ ID NO: 137356 - protein, 383 aa, unidentified
MRAVCGLDVHKDTVYLCILCSDGEIIERVFGVLTFQLRDMRRLMQSHGVTEVTMESTAMYWIPIWRVLEPHFRLKLVNPYFIKQLPGRKSDVKDAQWIAECTMKDLVRGSFVPPERIQQLRQYDRRIFDLDAEIVRKLSKLDGIMQRCNIRLSNYVSNTDTKSYKAVVDMLCEGITDAEELIRKVHGRIVNKHGRETILASLTGVVSDAEKDTMRQLREEIALAETHKRECLDKMLQICRTYYPNELRRLMTIPGIKERAATSLIAEIGVDMTKFLTAAHLASWSGLKPRNDVSNGKFKSRRITHGNAYLRKTIIECAWAASRTKDCFFSRFSYHQTVVRKKNKMKVLVAVARKLLIAVWHVLHDATDYVDFNPDCKSPANNG

SEQ ID NO: 137357 - protein, 351 aa, unidentified
MAIAVAEVGSAAPRFIGTVGARFAELSKALGKLGKPSDLQIVYEAGPCGYSLARQLRQAGYRCEVVAPSKVPRRAGDRVKSDRRDALTLAGLARSAILSFVVVPDERDEAMRDLSRARIDAVRARHKARQQLKALLLRHDRRYTGKSSWTAAHERYLARISFDHRAQDIAFVEYRRAVSEAHARVQLLSEAMTQELEHWRMRALVQALMTLRGVDQQLATSLVAELGEFKRFAHPRELMSYLGLVPSEHSSGQKRRLGAITKTGNSHARRMLIEAAWNYRFPARISLRLQRRQEQQPAAVRDIAWRAQLRLHHRYRRLTARALQPNKVCVAIARELVGFIWSIGQQVIVSH

SEQ ID NO: 137358 - protein, 346 aa, unidentified
MRIVKQVVGIDVAQKELVVSLGKMHEDWTPQLYARKAFENSKKGFVALVSWTKKLTAQDCPVRYVMEATGVYHEALAYFLEAADHEVTIVLPNKISNYFKTLKVKTITDKTAADTIATFGLEKKLELWKKPKPIFKRIRQLTREREQLIQIRTIAKNQLHAEQSEAEPGKKTLERLKKQIEFLKKQEKEIKEELQALQQTEEHVHKSIKLISTVTGVGKLTAATVLAETNGFEQVRNKRQLSSYAGYDVREKQSGTSVKGKPRISKKGNKYLRKAMHMPALTAIRHDDRFKAVYARLVAKHGIKMKAAVAVQRKLLELIYTIYKTQVPYDKNYLMKNGIQANIEID

SEQ ID NO: 137359 - protein, 397 aa, unidentified
MYIVGIDIAKRKHEAAVIDGEGAVIIKPFSFTNNCSGYNRLLAMLAKAKLPLDEVSFAMEATGHYWLALFTRLQKEGFRVQVINPVQTNSIRSFYIRQAKTDPRDALLIAEVIRFGHFSESTLHPENIYELRELCRGRHAIVSMQADVKRKVVALLDQVFPEYETAFTNMFGDTSMAILQTCPTPKELSEMPFEELCHLIEVSSHKRFRMAKAQELQALARNSFGFAMAGDVFSTMIRLYAKHLDFLKQQVREMDRKIAEIMETLDTPITTITGIGPTLGAYILSEIGDISRFSSAAKLAAYAGIDPTMRQSGEYNGVRNRMSKRGSPYLRHAIWLAASSAVLHDPALKLYFQKKRDEGKPYMASVGHACRKMVSIIYAVMRDNKAYTPCIPNEISA

SEQ ID NO: 137360 - protein, 346 aa, unidentified
MKYYAGLDVSQQTTSICIVDDEGKIVAERKVASCPDAIAEAIEPFTVARAGLETGPLSVWLWNGLKERGVPIVCMDARHANAALKMMPAKTDRNDAIGLAQIVRTGWCKSVHVKSTASHEARALLATRSQLVRTRCDLENQIRGVLRTFGILFGKRVGGFAKRAEEIIDGELHASPTIQAVVEALMRARANILEQIRHLEAKVRSIARQNNVVRRLMSVPGVGVITALGFVATIDDPGRFKRSSSAGAYLGLTPRIYASGETMRSGRVSKRGDDFLRRSLYEAANALLTRIPRFSALKSWGLRIARRGGYRKAKVAVARKLAVILHAMWVSGEPFRWSSQGPKELA

SEQ ID NO: 137361 - protein, 418 aa, unidentified
MRATVRYVGLDVHKDSIVIAVAEDGVQPAEFLTKLPYDVPRLLKQLRKLGSAVRLRCCYEAGPTGYGLYRALAEAGFACIVVAPSLIPVKSGNRVKTDRRDARKLAHYLRSGDLTAVWVPDEASEAMRDLERARDDAKRSERTARQQLGKFLLRHDRRFPGKTSWTLRHLAWIATQKFAHEAQQQVLTDYLHTVEEATARVQRLSEQIAKLVEGWALAPLVKALMAMRGVQLITAVTVAAEIGDLKRFRTAGQLMSFVGAVPSERSSGGSRRQGRITKTGNAHVRRVLVEAAWTYRHRPRMSDAIRKRNEGLPPQVQAIAWKAQVRLNQRYRGMLAAGKAPNVTVTAVARELAGFVWALGQQVESPKAHGSRAATTLSPDVYGTCPPKSSSGVSQAQAARSARRKPRASAALRSTATQ

SEQ ID NO: 137362 - protein, 386 aa, unidentified
MQTLNDLSRSLIALEPTSTLIAVIEMGLSSWLVAGIVPGIERQPLKKLAVDESALLRLLHRWREEAEKAGCRIERIVVAFEAGRDGFWLARWLKARSIEAHVIHAASVAVSREHRRAKTDRLDAELLKRAFLGWLRGERDHCKVVAIPTLKEEDAKRPSRERQSLVGEQSRIVNRMKAALTRLGIRGFNPKLKRAAGRLDTLRTPEGEPIPPNTLAELRRDMERRRLISNQIRQIEEARLNHFKQASNDGPHAMVRLLARVIGVGIETADMLVHEVLSRNMHDRRAIARYAGLTGSPDESGRKRREKGLARSGNGRVRRGMIQLAWRFLTYQKESALAQWYRTRTENALGARKPMIVALARKLLIDLWRFVRQGVVPDGVVLRPAQ

SEQ ID NO: 137363 - protein, 352 aa, unidentified
MTENPPDVSLAVIAGIDTHKDTHHAAIIDHLGRKICDREFPATGAGYRALLAWLIGTGIVVRVGIEGTGSYGSALTTVLLAAGLEVVDVDRTDRRSRRFHGKSDPLDAYSAARIAAAGLARTIPKTHDGDVEAIRFLHNARRSAVKARAEAITGLKSAVVNAPEPIREQLRGLTTVALIDACAALRPTAVTPGALTAAIKTALRSVARRIQLLDTDIKALDKNLAVLIDDAAEDLVGRFGVGYETAAQLLITVGDNPHRVSSEAAFASLCGVAPLPASSGKTTRHRLNRGGNRQANRALHVIVMARLKYDTRTQQYRDRRLAEGKSKRDIIRCLKRAVAREMFQHLTQKTAT

SEQ ID NO: 137364 - protein, 302 aa, unidentified
MTYIGIDVSQGTLDGADATGAAWQHANDAAGIAATVALVGARGPTLVVLEATGAYHVPLTAALAAAGVPVAVVNPRQVRRFAESVGQLAKTDRLDAALLARFAATVQPAARPLPDAATQELAALVDRRRQLVEMLTMEHNRLAVARRSVQPSVRQTIRALDRALRALEAETDRWIQGSPLWRAQEELLTSVPGIGPQTARMLIARLTELGALSAKEIAALVGLAPFAQESGRWRGVRRIRGGRADVRTGLYMATLAAIRCSAVVRAMYRRLVAAGKPKKLAITACMRRLLVIVNAMVKHQTR

SEQ ID NO: 137365 - protein, 313 aa, unidentified
MKMAQSEVFVGIDVCGAMLDVSVRPSGEAFQATNDRRGREALVARLKKLCVSVVGLEASGGCERDLLKALFDAGLPVRRVNPWRVRRFAEGCGVLAKNDRLDARVIAHFVEVVPDRLTQSNPQAEALAELVTARRQLTEDLTRAKNQAAHVSQPLLKRLAKRRAERLKADIAALDKAIADFVDQDAELARKNALLRSVPCVGPVFAHTLLAQMPELGQLTNRQAASLLGVAPYDFQSGKFKGQRRIFGGRKTVRDVAYMAAITAGRFNPVLKQVRERLRAAGKKPKVVIVAVMRRLITILNAMLRDNTPWRTA

SEQ ID NO: 137366 - protein, 368 aa, unidentified
MGSIEAFVAFDVAKLKHAVAVAEGGREGEVRFLGEIENKPLAIERTLKKLGKRYDRLRVCFEAGPTGYGLYRQVRDLGHDCTVVAPALIPKRSGERVKTNRRDAVTLARLHRAGELTGVWVPDAVHEAVRDLVRAREGAADDLRRKRQQLLSFLLRHGRIYDGRSHWTLAHRRWLAGQAFEHAAQQIVFQEKIDAIEDAAQRLHRLDEQLAIIVPSWSMAPVVEAYQAMRGASFLVAVIFAAEIGDVRRFDSPPQLMSFLGLVPGERSTGETVRRSGLTLAGNRRARRALVEAAWTYRYPARVSEALRARLEGQPKAVRDIAWKAQVRLCARYRRLSAAGKKLPVVVAAIAREMAAFLWAIGREVAPA

SEQ ID NO: 137367 - protein, 374 aa, unidentified
METIYIGVDFHARQQTICYLKTETGELVTCELKHQDKAAVRAFYAQFRGRVIVGLEASGYSPWFERLLEELGCEVWLGHATEIRRRARWRQKNDRRDAELILDLLLHDEFPRLHRPAVQSREVLRMLRYRQKLIKIRTMSKNSLQALALQSGLAKGSRLFTQAGQQELSAAVMSPVMHWQREHWLQLMEPLNQQLLETMVWFKAQSKDDVCIKRLRTHPGIGLLTSLCIVHSLQPVSRFRNTRKVAAYAGFDPVERSSAERKCFLGISKAGSRVLRFLLVEAAHTAIRKDEDLKRFYKRLAERRGRPKAKVAAARKLLIRAYIMLRDEIDYAEFRRRAVAARLARRSQGPNVPEVLIGQPVSADHRDELTSESQ

SEQ ID NO: 137368 - protein, 346 aa, unidentified
MTIVEAARTVTGGIDTHGDVHVAAALDQVGGLLGTESFEASPDGYSALLSWLSNFGTVTKVGVEGTGSYGAGVARFLARAGVQVIEVDRQNRQARRQSGKSDPIDAVEAARAALSGRAHGQAKSRDGSIEAIRVLVVAKRSARAARVKALAQMRQLTYSAPDQLQCRLKGLPIPQFVSVAQGLRPTRSKDPVTAATKASLSSLAHRVADLEDEIAELDAMITPLLQATAPQLLAVYGVGIDTAAALLVAAGDNPERLRSEAAWAHLCGVSPLQASSGKITRHRLNRGGDRQANRALWHIVMSRLASDPETQAYMERRVKNGRSKREAIRMLKRYVAREVYHHLPRG

SEQ ID NO: 137369 - protein, 396 aa, unidentified
MAQAAVQNTTATPVLYVALELSKDTWKLGITLDRVSKAKIRDVRARDLDGLLAEIEAAKKHFNLPENTLVKSCYEAGRDGFWIHRFLLAHGIENVIIDPASIEVDRRSRKVKTDRVDAQKMAQLLARHGDGERVLRVVRVPPLESVDERILPRDLKALKKRREQAANKIQASLFEHGVDLNPRLGSFKDKDFLTALKAARQWDGKRLPPECLRSVKRSWQLYSLLTKQTKELEQRQRQVLREARAEPEKATSAARKAAILSQLRGVGDIGSYVLTTEFFGWRDFDNRSQVGALAGLTGTPFQSGNMGRDQGISKSGNPRVRTLMVELGWLWLRWQPDSRTTKWYHEHVGKGGSRAKRKAIVAVARKLLVEFWHFVEHGVVPTGAVLKTTNAEGSPA

SEQ ID NO: 137370 - protein, 417 aa, unidentified
MNEFAAYIGMDWSDQKHDVCLVDAATGDKEFLVLRHTPEAIAEWAASLRQRFGGKPLAVCLEQSRGPLIYALLKYDFLLLYPINPSTLARYREAFSPSGAKDDPTDAEFLVEIVSTHRERLRAWQPDDEKTRTLAYLVEQRRKLIGERTRISNRLTALLKGYFPQVLQWFPDLRTLLVCDFLSRWPTLESVQRAQKRTLEKFFREHNSNRQEMVERRLSAIKAGVPLTTDQAVVRSSTLMAQALAAQMKVIIEALKQFDHEIEELCNSHQDYHLFEALPGSGTVYAARLLAAFGSNREKFASADELACLAGIAPVIERSGKSKWVRWRYFCPKFLRQTFHEYAGESILHSFWAKAYYESQRAKGKNHAKAVRALAYKWIRIMWKCWQTNTEYDEVKYLEGLRKKNSPLMKYAASNPG

SEQ ID NO: 137371 - protein, 347 aa, unidentified
MVTLGGDCHKRTHTLVAVDENGQQLGIKTVSAVQAGHLEALDWGRQWPQRRWALENCRHLSRRLETDLLLAGELVVQVSPKLMAGTRRSAREWGKSDPIDALAVARAALRESDLPVAQLEGASRDVKLLLDHREDLVAERTRVQNRLRWHLHELEPGFDVAERSLDRKVVLKQVRNVLADHHGVAAGIAVELLEWVSQQTQRINELEHQISALVTELAPNLLELDGCAALSAAKLIGETAGITRFTTSARFAMHNGSAPTPVWSGNAERHRLNRGGNRQLNVVLHRIALTQMRVGGRGYDYIQHRRASGDTKKEAIRALRRRISDEVYRRMWQDSMRLTSERTQAAA

SEQ ID NO: 137372 - protein, 360 aa, unidentified
MEVYVGMDVHRKRSQVALLDEHGAQLANRNLPNDPAELVPILGTLAPRTPVAFEAAYGWGWLADLLDELGLEPHLVHPSRCKAIASARLKDDKVDARTLAHLLRADLLPEAWIAPQQVRDQRALLRHRAALVRAGTALRNRIHAVLADRGVRVQQRLWSQAGRAWLADLDLPPAPRVIIDDCLGLIDQLTPIITRLERDLLARAKPDPRVAALMALPGIGRITAMTLVAEIGDITRFPTARKLCAWAGLTPQVRNSDRTIRHGHITKQGSAAVRFVLEEAAERAKTRPPFAGFYAQCAARRGRHIATVAVARKLLARCFHVLIQVDNHQHDAADHAAEKEQVTSPGALEVPHAPATRPIN

SEQ ID NO: 137373 - protein, 370 aa, unidentified
MNQSSTLYVGMDVHKESIAVAYAANDLHTEVIYLGAIGTRQCDIDQLVRKMQSKSKHLVFVYEAGPCGYWLYRYLTHKGHVCWVVAPSLIPKKAGDRVKTNRRDAIQLARLMRSGDLTPVYVPQVEDEAIRDLSRAREDALQDLKTAKHRLKAFLLRHDIRYTGRATWSPAHLRWLSEVVCPTPAQQIVFQEYVRAVNEPTERLQRLEKELRDQVKTWRLQPVVEALEGLRGVQFTVAVTIVAELGDLTRFDKPSQLMRYLGLTPSEYSTGDHRRQGAITKTGNAHARRALIEGAWAYRYPAKVSRHLQLRLEKLPKPIQDLSWKAQVRLCTRYRHLLARGKHVNRVVVAIARELSAFMWAIAQQLAVTP

SEQ ID NO: 137374 - protein, 400 aa, unidentified
MRYFAVDIGAEHHVVAAVDDDDKVIVRPFRFAEDAEGYRQLRERLGDVGEVQIAMEATGHYWQNLFAFLVAEGFKQLVLINPLRTRRFAEEDLQRTKTDSIDAVGIARFLRQKRPTPLAMPDEATRHLRELVRLRDQLMAQQQEQVNRLHRLVDLGFPELTRHIDDLSGALATTLLSHYPTARSLAGQRPARLAKLRYGARHLLGEARATAIIADAKRSVGAHHGEVYQTEVRYACEDLELLRRRLSSIDHDIDQLIAEHKIGKLLVTIPGVGPLTAARVMAEAGNLGAFKDGNALASYTGLVPGLRHSGKHTPARGALSPLGNTRLRRALYMPTLTAVHGANPWLTDFYQRLVARGKPKKLALLAAARKLLLAIFSVAKHQRPFALPPTFRAAGAGSSA

SEQ ID NO: 137375 - protein, 326 aa, unidentified
MEHELHYIGIDTAKEKLDVDVLRPDGRHRTKKFANTTKGHDELVSWLKGHKIDHAHICIEATGTYMEPVAECLYDAGYIVSVINPALGKAFAQSEGLRNKTDTVDARMLAEFCRQKRPAAWEAPHPLERALRALVVRHQALTDMHTQELNRTETAREVQKPSIDAHLLWLEAELKRLEKQIKDLTDDDPDMKHRRKLLESIPGIGEKTSAVLLAYIGLKDRFAHARQFAAFAGLIARRYESGSSVRGASRLSKAGHVSLRRALYMPAMVATSKTEWGRAFRERLTANGKKGKVILGAMMRKLAQVAYGVLKSGVPFDASRHNPVAA

SEQ ID NO: 137376 - protein, 315 aa, unidentified
MQTVLNVGVDIGKDEVMVACADASFAPRPVANRRTALLAWLKSLPAGSRIAVEATGRYHALLVHLAHSQGFSVFVLNPRDLRHYARAVGLRGKTDRVDAKLIARFLAHEYAKLHAHIPLSPAQRALERLLKRRAKLVAIKGALRQTLRGVPGLGNEAKALLTQLQALLDKIDSQLEALSRQQPAHQALRERLQTIVGVGPLVSTSLANVFQHIPFPNSDALIAHTGLDPRPADSGRKIGRRRLSKRGPSELRRLLFNAAMSAAKTKLWRPVYEHYRNKGLPSTAALVVIARKIARIAWSLFKYQTVFDPKRVATA

SEQ ID NO: 137377 - protein, 363 aa, unidentified
MNYVGVDVHKRYSVLCALDGSGRKLREARVEGNAPSGFGQFFACLDGPSKAVVEACWNWGLIHDELEELEQVEEVVLAHPHKTRLIADAQIKRDRLDAHALGTLLRGNLVARAHVPSRQTRARKNLLRQRLYWARLRTMLRNRMHALLDRQRRLELPQCSDIFGVRGLSFLRALQLAQPDATLLREQLALHDLIAQQMKAQEKRIALDFAQEAMHRRLKSVPGIGVTLAAVIACEIDNIARFSNAEKLCAYAGVVPTTRSSGGKTMHGSLLYFCNKWLRWALVEASWVAIGCSPYFGTLYKQHRARGKKSNTAILIVARRMCRIIWQLLHEKRDFEKRPLSPKLNSFPGCSVVRLTAVKATSP

SEQ ID NO: 137378 - protein, 427 aa, unidentified
MNQLNNDETQNDYAAFIAIDWADRQHVFSLQVAGQTTKENGTLEQKPEVIGPWVAKLRERFGGRPVAIAVEQSRGALIHALMTYDFIVIYPLHPTTVAKFREAFKSSGAKSDPLDTDQILQILTKHRELLKALNPDTEQTRLLARLVEDRRKAVDLRTSQVQALTAALKEYFPQALELVNGNLTSCLACDFLIKWPTFEAFQQAKPSTIKRFYYGHNIRSPELMEKVLDLARRAQPLTTDSAIVQSGSRLSQMYAQMIRTLNPVIVDYEQRIEKVFHDHPEVNLFNKLPGAGPALAPRLLSFFGTDRSRYEAAGNVQSFSGIAPVTKSSGRTRVVYFRHACPKFDRQTFHEFARLSVAKCQWARNYVEYYTAKGKKFHTIIRALAFKWIRILFRCWKNRTPYDETKYMDNLKKRGSIFATLHLEQKS

SEQ ID NO: 137379 - protein, 328 aa, unidentified
MFAVHGVDEIGKAVLVKPKVPRDQLADLIANLPPCLIGMEACSGAHHWARLFRQYGHTVKLMAPKFVTPYRMSGKRGKHDAADAAAICEAVTRPSMRFVPIKEEHQQIILCLHRTRQGFVAERTAVYNRVRGLIAEFGIVLPQKVTHLRQDIGACLEDLPGYANQCIGDLLAHADQLDQRIDGYDRIIAQAARDDARSKRLMHLPGIGPTTASALLASIGGGHDFANGRQVAAWIGLTPGQYSSGGKARLGRITKAGDPYLRSLLVLGARAVLNSLGEKQDRFSRWARSLQERRGYWRAVVAIAAKNARLAWAVLHYGEDFRLMPSAD

SEQ ID NO: 137380 - protein, 346 aa, unidentified
MTIVEDTRVITGGVDTHADMHVAAALDPLGGLLGVREFPATAAGYAGLLGWLEKFGDVALVGVEGTGSYGAGLARHLAAAGIRVVEVDRADRQDRHRQGKSDPLDAVSAARAAQSGRAAGAPKGRDGAVEAIRALMVAKRSARAERTQAINQARALIVTGPDELRARFARHSAAALAEGIAALRPRPGDAAGYAVRVALRELGRRVEFLDGQLERLDDLIVPLVTARAPGLLSLYGVGPDTAALLLVAAGDHPERLRSEAAWAHLCGAAPIPASSGKVRRHRLNPGGNREANHALWRIVITRMSAHPATRAYVERRTKEGLSKKEIIRCLKRYVAREVYHHLRAGG

SEQ ID NO: 137381 - protein, 349 aa, unidentified
MLYAGLDLSRKRLDFHLLDDEGETVEVGAAPPDADGLRELSERLGRHAAPIRAAIESMNGARFVHDRLEVAGWQVEIADAQKVKGLAPLACKTDRIDAWVLAELARRDLVPAIWLPDPRVRAERERARWRLHLVRHRSSLKQRVHAVLLTHGKPCPVSDLFGARGRQLLSQLGLPEPWQGTIEASLRLIDELEREINECERELRRLGADHRYVPLLCTVPGISWVLAYTIAAEIGDIDRFSTPRKLTGYSGLCPRVYQSGDRDLRGPLSKQGPRYLRRALVEAATQPAPQRPIATAANRPRHASVSSAAPRSPRSTSPADSPKRSGTCSAAAKHSLPKAPPTPWPPDGP

SEQ ID NO: 137382 - protein, 299 aa, unidentified
MVVASTTEVGCWSVSNDETGLAVLVQRVSVLDPALVVLEATGGYELAAVAALAAAALPVVVANPREVRDFAKALGRLAKTDQLDAHILAQFAERVQPELRPVVDGATQGLRALVTRRRQLIEMLTAERSRLALASPGVRPSIEAVIAALEASLAEIDQNLDHTLRSSPLWHAKDRLLQSTPGVGRVLSSTLLAHVPELGRLNRKQIAALVGVAPFNRDSGLFRGRRTVWGGRAPVRAVLYMSTLVAVRYNPVLKAFYTRLRTAGKPPKLALTACMRKLLTILNAMARDSLSWQQRPTHP

SEQ ID NO: 137383 - protein, 345 aa, unidentified
MEHYVGLDVSLKLTAICIVDQTGKIEREGVVPSDPEAIAAFIKSHAPHVARVGLETGATATWLWTELNKLGLPVICIDARHAKAALKMQINKSDRNDAVGIARIMQCGWYKEIRVKDLDSHAVKALLVSRALLVKIKRDLENQIRGLLKNLGLVIGRAKMNVFAVRAAELTEHRPELAAAVAPLLNARAAIELQIADLDRKVMRLARNNAQARRFMTAPGVGPITALCFLATIDDPTRFKRSRSVGAYLGLTTRRYASGEIDWTGRISKCGDKMLRSYLYEAANVMLTRVARWSALKAWGIRVAKRTGLRKAKVAVARKLAVVLHRMWIDGTEFRWSKEAANQPA

SEQ ID NO: 137384 - protein, 356 aa, unidentified
MSRDIKYIGMDVHKEAVVIAVLNNSGKLVMESIVETKASSLLQFIHGLQGELHVTWEEGTWAAWLYDLLKPHVHQVLVCDPRRNALLKEGNKSDKIDAQKLANLLRTGMLRPVYHGEHGLRTLRELARSYHTISQDLIRVMNRIKALYRGWGIACGGTQVYAPRYREEWLGKIEHVGVRRRAELLYQQLGDLQTLRRTLRPELLAESRKHKATKLLRQIPCIGPIRAARLLALMQTPHRFRSKRQLWTYSGLGIETRDSAQYCFVRGKLQRVKKPQQIRGLNRNHNHEMKDIFKGAATRASCGVGPLRDFYMALLDKGMKPEMARLTLARKIAAIALTLWKKEERFDAEELKTQAA

SEQ ID NO: 137385 - protein, 377 aa, unidentified
MKKELYLGLDVHKDCIVTAVAEEGRKGEVRQSGAISNDLHAVEKWMARLRREHGRQTRLHTCYEAGPCGFGLARRLEQLGVECQVVAPSLTPRRSGDRVKTDRRDARKLARLLRAGELTPVYIPEATDEAIRDLCRGRTDAVDDRRRSRHRLKGFLLRHGYRYQGKSSWSAAHERYLRELVLPHPAMKVILEEYLQAIAAAGERINRCEGAMRELLEKWRLAPAVRALMAMKGFQTVAAMILISELGEVHRFSHPRQVMAYLGLVPTENTSSDKRRQGHITKCGNAHARWLLVECAQHYATPPKVSKELSRRQEGQSREVRAISWKAQNRLHRRYTRLLARRLQRNKAMVAVARELCGFIWELLRTQPCYQGQATSV

SEQ ID NO: 137386 - protein, 351 aa, unidentified
MAAKKKPVTGGVDTHKDFHHAAAVDQAGRLLGDQQFAADAAGYRLLLAWLGTFGPVVKVGVEGTGSYGAGLARYLAEQHIEVVEVDRPDRKTRRRKGKSDPIDAIAAAQATVSGRASGAPKARTGPVEAIRAMQVARRGAVKARTAALNQLDGLIISAPEQLRAQLRKLSGAKLLAACMNLPVDEKHLSHPVHATSTALRALAARIHNLTAEIDQVDKCLRPVVAKAAPRVSALFGVGPEVASRLLATAGDNPDRLRSEAALAHLCGVAPLPVSSGRKDRHRLNRGGDRSANCALYTVVLSRLRHDPRTRAYMDRRTKDGLSKKEIIRCLKRYVVREVHTALLADFAVLNA

SEQ ID NO: 137387 - protein, 323 aa, unidentified
MQGKVSFQEDAMPVVYAGVDVSKEWLDVHLHPLGESRRFSNDKTGIRQLKRLLARHQPKSIVMEATGKFHRPAHRSLWLDGFAVAVVDPLRARMFARACGYLAKTDRLDARFLALLAESLRPPADTPPSPHIEALQELVNARSAAKCDITALQNRSKTATTALLRGELNRLVRRLEQHVERLDKEIERCVGEDPQLCRKAEILTSIPGIGRVTALALMAGIDELGSCSGKQAAMLAGLAPIANDSGARTGRRSIRAGRPAPRRALYMAALSARRYNPALARFADTLKAAGKPAKVILVAIMRKLLVLANCLLAHDRIWTPNPP

SEQ ID NO: 137388 - protein, 321 aa, unidentified
MQKDLLYCAIDVSKDRLDVDGAALALPAQLGNDHAGLRQLIKAAKKYPGAVQFVFEATGPYHLGLALALWEAQIPLSVLNPARVRYYAKAQGKAKTDPLDTQVIGDFARSFRPQPTPAPDPVRRELTELLQRRDGLISSRAAEQNRLSQCRHKIIKGQIRRMMAQLAEQIDQIDGLMKKLVNSSEELKAKVKALCQVKGVGHLTAVTLLITLPELGTLGRNRIVRLVGLAPLNDDSGTQKNKRYIQGGRARPRCALYMPALSASRHNPVLKEVYERLLKAGKLKKVALTALMRKLLICLNALLRKLADQHPSPQGLCLAKP

SEQ ID NO: 137389 - protein, 414 aa, unidentified
MEQNCRIAGIDVHKKMLAVVAAEGSSEGQLRFERAKFGTTESELRRMGNWLKERNVGEVVMESTAQYWKPVWQQLEGQCQLYLAQAQSNRGPRGRKRDFVDAERLVRRQMAGELILSFVPDGEQRLWRIMSRTKYQLRRDRVRLQNQLEAFLEEARIKLSGCVSDLLGTSSRRILEAMSKGESDLGKLAAMVDANLRATPEQLQDALQGAQRLSEPHRQVLGLFLARLKLIEEQIEALNGNLGQGLRPYNDAVVRLAEMPGLGVDSAQQVIAEVGPTAATFPSPQELCSWVGTCPGKEESAEVSKSDRSPKGNRMMRRLLNQAANAAVKTKGSIFQNLYRRWVPRLGHNKAIWAVANRLCRLVWKILHQGDRYIEYGDRPNPKTVKQRAKRMIRELQALGYQVQTVPPAEPLLA

SEQ ID NO: 137390 - protein, 352 aa, unidentified
MSEKIIPEIAVVGIDIGKNTFHVIGLDRRGAVVLRQKWTRSQVAARFANMPSCLIGMEACVGAHHLSRQLRALGHDARLMPAKYVRPYSKGQKNDFRDAEAIAEAVQRPTMKFVATKTAEQLDLQALHRVRERLVSQRTGIINQIRAFLLERGIAVRQGYRFLRTELPGILAAPSDVLSPRMARIIEDLAADWRRLDERIERLSIDIELLAHNDAGCERLMSVPGIGPVISSAMVAAIGTGEAFSRGRDFAAWLGLVPRQISTGDRTILGSISKRGNRYLRVLFVQAAWVVLIKPKSWERHGLKSWIEAARKRLHHNVLAIALANKLARIAWSVLARGRGFEATFAASARAL

SEQ ID NO: 137391 - protein, 444 aa, unidentified
MDVIFTHCAGLDVHKKTVMACRVKPDPTGQQADGIMELKEFGTMTVDLLALSDWLAEAGITQVAMESTGEYWKPVYNLLEGDFTVFLVNAAHVKQVPGRKTDKADARWLAKLMRHGLLQASFIPPVEQRELRDLTRYRTKLVQERGREVNRVQGVLERANIKLASVATDVMGVSGRAILAALIEGRADPATMAELAKGRMRSKIPLLEQALTGLVREHHRQLLALQLAHIDFLDEQIDTLCSEITRCVTEFSAGDPAAPPGIAGVTGSAGDANAPAAPLTFTRAITVLDTIPGVDQRGGELLVAEWGIDMARFGTAARLAAWSGVAPGNDESAGKQRSGKTRKGNRALRTGLTQLAHAAARTKDTYLSALYHRLAARRGKKRAIMAVAHSIVVSAFHMLSRNEPYHELGANYFDEHQREHLVDRLTRRIERLGYRVSLEPVPAV

SEQ ID NO: 137392 - protein, 400 aa, unidentified
MRSIGMDVHRSFAQVAVLDRGKVIEEFRVDLDYDAVVAFGQNLRKDDEVILEATGNTSAIVRLLTPFVAKVVIANPLQVKAIAHARVKTDKVDARILAQLHAASFLPEVWAADDDTLNLRRLVSERAALVRLVRRVKSWVQAVLHANLVPKYSGHLFGKGGRDWLSTAPLPKAERDLLARHLDELDWLKGKLEKLDGAMARIALDDTRTRKLMTIAGINSVVATAVIAAIGDISRFPTPDRLASYFGLTPRVRQSGDRGAIHGRISKQGNTIARTMLIEAAWSAASVPGPLRAFFLRIKDRKGLNVAAVATARKIANLIWQLLTKEAPYRWARPAFVAMKMRKLELRAGAAKAHGPAGPARDYWIKEIRHREMELVAQAEAAYAAMVEAWRDRPPKPQKG

SEQ ID NO: 137393 - protein, 335 aa, unidentified
MQFEFFVGIDVSKNELDFSIQQGKCFLFHREIANKPVEINAFIKELGKLPGFTLSKAVFCMEHTGIYSNHLLGCLHKKKANICLEAATQIKKSLGNIRGKNDKIDSVRIAEYAYKNREELRLWAPKRDVVQQLAYLASTRSRLIKIQKIATTPLNEYGDFISKKVAKQNIGICQRTINATKADMDKVEKAIAAVIAADPELKRLFDLATSVCGVGKVVATQMLVTTNEFKDITDPKQFACFAGVAPFTSESGLFKGKGRVSHMANKKMKTLLHLAAMVAIQYSPELKLYYERMVKQEKKNKMSVINAVRNKLILRVFACVNQNRKYEKIYSRLVA

SEQ ID NO: 137394 - protein, 383 aa, unidentified
MKSVCGLDVHKDSVYLCILSEFGELIEKVFGVLTYQLEEMRDLMLHHHVVEVSMESTSVYWIPIWRVLSPHFKLNLANPYFIKQLPGRKSDVKDAQWIAECTMKELIRGSFVPPETIQQLRQYDRRIFDLNEEIVRKLSKLDAVLQRCNIRLSNYVSNVDSKSYKAVVRAISQGITDPEELVKLIHGRIIKHHGMDVITASLKGVVSLAEIDMISQLRDELDMAEAHKEKCQARMLEICEREFPEELKRLQTIPGIKERAATSLIAEIGTDMNKFETANHLASWSGLKPRNDESNKKIKSRSITHGNVYLRKTIIECAWAASRTKDCFFSRFSFHQTQVRKKNKMKVMVAVARKMLIAVWHVLHDNTIYIDFTTDRKTSRTKG

SEQ ID NO: 137395 - protein, 411 aa, unidentified
MDVVVERCCGLDVHKATVVACLWVREGGKVHKESQTFGAMTADLLVLADWLKANQVTHVAMESTGVFWKPVFNLLEADFQVLLVNAEHIKRVPGRKTDVTDCEWIADLLAHGLLKGSFIPPPPIRELRDLTRYRKSLIDERVREVNRLHKLLQAANLKLSSVASDVLGLSGRRMLEALREGTTDPAVLAELAQGKLRKKLPALRQALQGRFSPHHRVLLAHILGHLDFLDEAIEQLSAEVAARTAPFDDLIQALDTIPGIDRKAAEGTVAELGVDMERFPTHRHLASWTGLCPGNHESAGKRKRGKCRKGDVWFRRYAIEMALAASRTKGTYLNALYHRMARRKGHKKAIVAVAHAILVIIYHVLKHRVPYRELGPDYFDKLNSTQIQRHHVRRLEGLGFKVTLEPLEAAA

SEQ ID NO: 137396 - protein, 411 aa, unidentified
MEIVAYIGLDWADAEHSVHLQAVDGRVEHQTVAQRPEALQAWVADLQRRFPGGPIAVAIEQRKGAVVHALLQYDCFVLYPINPKALARYREAFVTSGAKDDPRDSELLLDLIVRHRAQLRAWVPDTVESRLLLALCEQRRKLVNHRVALTNRLTSLLKQYFPQALEWVGDVNSLQGCDFLARWPTLAAVQRARPTTVRQFYRTHNCRTANVITTRLAAIARAVPLTTDVAVIEPLRLSVQAYATQLRTVLAHVATFDDRIAALFATHADRAVFVSFPGAGAVCAPRLAAVFGTDRTRWPSAAALQAHAGIAPVTVRSGKSVWVHHRLACPTFVKQTFHEFADQSIRFSRWARAYYDQQRARGNDHHAALRALAYKWMRILFRCWTERRPYDEDTYIDALRRHGSPLAKNIA

SEQ ID NO: 137397 - protein, 360 aa, unidentified
MRSRLSKKESWFTENNLTTEDEIYVGVDVHKVHYHVAIWHNGRIGCVYSMSSDNNKLLRDLKRIRGSLKNIVYEAGPTGYSLVRLLRSARLPAEVVAATKTPRMVDSAGKTDRLDCQQLAEYAAKGLLTYITIPTEQQESDRQVVRLRDQLMSKRKRVMQQIKSFLLQYGIAWPGGGWSKVVLCKLRKMDIGSELRFALDQYLDEYEFFSWKIAQTKSKLHQIFSSERHSAAIKIFKSHPGVGNIVAWEFRAEMLDITRFSQPKQVSKYLGLCPRISQSGNTCRHGPITKTGRRQLRAVLIQAAWAWHRSDPYARQIYNRLLRNTGNGNKAIVGLAKRIAIHLWRMLCDGCLYDANIVKV

SEQ ID NO: 137398 - protein, 414 aa, unidentified
MRILYEKVAGMDVHKRTVVVAVSVKQDDGSWFSETRKFSTMTGDLLSLSDWLLKLDISHVAMESTGEYWKPIFNILEENFEVILVNAQHLSRVPGRKTDQSDAAWICELMQYGLLKASFIPPKGQRELRDLVRHRTSFVQERAMLVNRVQKVLEGANIKLACVVTDIMGVSGRAMLEAIVAGEASNQEIAELAKGSLRSKREELLKALEGRVKSHHRFVLAELLCQIDSLEESIERFDREIGDYCRPFEEAIVLLDTIPGVARQTAEVIVSEMGVDMSRFPTANHLASWAGVAPGNNESGGKRRSTRTRRGNQSLCSVLVQAAQAASRTKGTYFQAQYHRLAGRRGRKRAIMAVAHSILVIAYYLIVRKEPYRELGGNYFDQIHPERTANRLLNRLEQMGYQISVIATPAPAAT

SEQ ID NO: 137399 - protein, 402 aa, unidentified
MNCVGIDVSKGKSMIAVMRPFGEVVVSPFEVRHTASELSELARLLKSLDGETRVVMESTGNYHAPVARLLHDAGLYVSVVNAMLVHDYGNNSLRRAKTDKKDAVKLANYGLDRWLTLPRYVPEEDTRLMLKTCYRQYQQYSKVQTMLKNNLISLLDTAFPDVNRLFTSPPRADGSEKWVDFVATFWHCECVCGLSEKAFTAKYQRWCRKHRYNFSEEKALDIYASACGHFGVIPKTDTAKLLVEQAIFQLRATSAALAALKQEMQSLAASLPEYPVVMEMFGVGPTLGPQLMAEIGDVRRFHSKKALVAFAGIDAPPYQSGQIDVRSRSISKRGSASLRRALFLVMGVILQCAPGDEPVYQFMNKKRSEGKPYRVYMMASANKFLRIYYATVKAYLDALETA

SEQ ID NO: 137400 - protein, 394 aa, unidentified
MCQQYKTEASMTKHNILFIGLDTHKTFTEVAYIEDQRGAKSIHLGKILSNKAAFKKLARQLQSKYPDATLHFVYEAGPCGYWIYRLLTSLNHCCYVIAPSLIPKKPGDKIKTDKRDALKLAKLLKSEDLTPIYVPEPEDEAVRDLSRARETAMKDLKDAKYQLKALLLRNNINSKVKDNWSLQHLRWLAELILPHPCQQIVLQEAVSTITERLKRLKRLDNELTHQVKNWRFYPVVKAVQAMRGVRLLVATGVIAELGDLTRFDHPRKLMSYLGLVPSEHSSGGKRHLGAITKCGNSRARRLLVEGAHSYKHNANISKEMQLRQEGLSKEIIEMAWQAQLRLCRRYNRLMQKGKHRNVVVTAIAREMIAYIWAISREVVLSKIDVKLRMSRVPA

SEQ ID NO: 137401 - protein, 344 aa, unidentified
MDYYVGLDVSLRSVAVCVIDADGKHIFERSMACEVEDISACLRDVPAGQCRVGFESGAMSQHLYFGLRAAGFDVVCMEARQVNAALSAMRNKTDKTDARGIAQVLRSGWYGKVFIKSREAHALRALLSSRKAVQKKCIDLANEVRGLFRVFGLRLPPRVDQGSFDERVRPLIEADPDLSHALLPLLDARAVLYKTYRELDRRVKQAASHDEICLRFMAIPGVGPIAALTFRAAVDDPARFASSRTVAAHFGLTPRRYQSGEMDNPGRISKAGDRDVRATLYAAANAMMMRSVASSEIKSWGLRLMRRKGRRRALVAVARKLAVIMHRMWADNTEFRHGKMEGIA

SEQ ID NO: 137402 - protein, 356 aa, unidentified
MQLHDALTIPKIFIGLDIHKKSWTVSIQTDLFFHKTYSMPSESEDLYQYVERTFPGHEVHLVYEAGCCGFSVARHFLNLGWHVLVVNPADVKTGDKERYQKTDALDSKNLSNQLKQGVLKGIYIPTEEHEQFMTLARHRTQITKKLRQTKSHIKSMLLFHGIKIPNQFDNSNWSQDFVTWLEQLKFSTACGDLALQGKIRLYKFIKSEYLEIANQMRRHCRKNTKKDYYLLKSIPGIGGYLASVIIAECGDLRRFNNERQFSSYIGLIPGIYNSGDSEKCLGITPRSRSQLRSYLIEAAWVAIRKDTEMQHYYRKHHGKNVKSIIVKVAHKMARRILSVIKTETPYQINKNLIVQN

SEQ ID NO: 137403 - protein, 312 aa, unidentified
MTSGRCVGVDVSKRWLDVAVHESGQAFRVSNDAKGFARLIARLKEIEPSMIAFEATGGYERRCVKALGEAGLTVAVVNPTRVRRFAQAMGIAAKTDKIDAKVIAHYASVAPLNPQSAQTPLEERLAACVERRRQLLTVVVAEKNRLTSSPECMLTDIEEHLAWLEERVTKLEKDIQDCIWQKEEWRERSQIIDSVPVVGPVTATTMVAELPELGQLNRQKIAALVGVAPFNKDSGPKKGKRKIYGGRAGVRGTLHMATLSAVRCNPVMRAFYQSLRNRGKEKMVALTACMRKMLVTINVMVRDGKRWRYLPA

SEQ ID NO: 137404 - protein, 475 aa, unidentified
MNIKGTKKKNQVVKANIMEQQELLKKAEVIKSNLTASTWRELETKGKFDKNEKLSFISDDMLILGCDVGSETHYLRAIDTRGRELSKSAFAFSNDSEGFQSAKEWAVKIAAEHDKKQIVLGLEPTGHYWFCLATWMISNGISVVQVNPYAVKQTKEIEDNSQLKDDTKDPKLIANLVKDGNFGMPYLPEKLYAELRRLSMFRDQLNEDRIRAINRMHREMKIYFPEYKDALGKVDGAFSLELLKSAPFPDDLKALDEDGIRQIWHEAKLRGRGYSRSGEILGYARSSVGIKEGADAAKMAVQWFVKKIMELDEELAVIENLINQKCKKIPHTGNILEISGIGENTLSGILAEMGDISRFDEVKEIQKLSGLGLVACSSGKHKGETKISHRGRKRLRYWLFQAAKSAVAHADDFKELHLYYTTRTKNPLKKMQSLIVIACKLLRIIYTIMKKGTAYDPKKMLTDIKRQEKQEALAA

SEQ ID NO: 137405 - protein, 343 aa, unidentified
MQVHSVGIDLGKTTFHFVALGASGKVLVRKKFARKQLLAYTANIPASLIGLEACSGAHFLGRALRKQGHDVRLIPAQFVKPFVKSNKNDFIDAEAIAEAVERKNMRFVPIKTDDQLDLQGIHRVRDRLICRRTAVINQIRAFLLERGMVFAQKPANLRAAMADILENAEADLTPQMRSLISMLWDEWKLVEEQIKKLDLELERISAADAGCTRIRQIPGIGPVVATAIVAAIGNGAAFRKGRDFAAWLGIVPRQYSTGGKAKLLGISKRGNVYLRKILIHGARAAVLRIKRDRAPIGPWLDALDARAPKNVVVVAMANKLARIAWAVLSSGEDYRPKLNAIAG

SEQ ID NO: 137406 - protein, 398 aa, unidentified
MLSIGIDVSKGKSTVCGMKPGGEIVYTPFEIQHTREGMSELVSLLRGSGEEVRVVLESTGSYHCPVVAALLENGIFVSVVNSLRMKRFCSQSIRRVKTDQIDAMQIALYGLAYWQELQPTRLPENTYRELQLLARQYYQMTSMLIKAKVDFNALCDQVLPGMQELMSDHAGRHKLSDFVLRYRHTTHILEMGETRFRKDYCKWAEKKGYRNHERMAALIFATAQNGIPVLPNAPSTQIVITEAIRVLHTVEASRDAILTQMQALAKTLPEYSLVREMPCIGDTLAPRLIAEIGDVRRFHSKRALIAYAGIDAPPYQSGKFSANNRHISKRGNRYLRKTGYEVMQSYVMHKPANDPIFTFIEKKRSEGKSGKLAMVAGLNKFLRVYYGKVTELYRSLPQ

SEQ ID NO: 137407 - protein, 363 aa, unidentified
MMVIGVDTHKSTHAMAGVAAATGLLLGEREIAASDDGHRQALRWAREIAPERVWAIEDCRHVSRRLEQALIAAGERVVRVPPKMMGVSRRSEREPGKSDQIDARAVARAVVKDGVERFPAAFLDERALEIRLLADHRSDLVAERTRQINRLRWHLVDLCPELEARIPPRQLDSATMLERIARRLRRQQRSARARVALELVAGIRAISRQADALQRELRSLLMGYRPALLGEQGLGVLTAATLIGRTAGAERFPTDAHFARQAGVAPVPVSSGRKDRHRLDRGGDRQLNRALHVIAITRARIDPQTRAYLERKRAEGKSNREALRCLKRHLARHVHHLLSMPPVHPDRRTRIQLNSAISVPCLT

SEQ ID NO: 137408 - protein, 342 aa, unidentified
MTKVSMIGLDLAKNVFQVHGIDASGKVVVRRQLRRSQVEKFFAGLPPVVVGMEACGGAHHWGRVIEKLGHEVRMMSPAYVKPYRKRNKTDGRDAEAICEAMGRPTMRFVPVKSLERQAVLVLHRTRRLLVRQRNMSGNALRSGLAEFGIVAAQGLKGLRTLMQLLDDPTTPIPDIARMALQVLARQWEGQNAQACRLESEIVRATRSDAVARRLMQIPGVGPIGASAILAAVPDASLFKSARDFVAWLGLTPRQFGTGGTQRSGGISKQGDRTLRTLLTLGATAYLRHERARGPRDPWLRELLARRPFKVVAVALANKMARTAWALLAKGGTYRAPALAAAA

SEQ ID NO: 137409 - protein, 370 aa, unidentified
MGKSVLYVGLDVHKMSIDVAIAEAGPGAEVRFYGQIGGDLDSLDRVIRKLRATGAQLQFAYEAGPCGYVVYRHLTAQGWPCLVAAPSLIPRRPGDRIKCDRRDALSLARLFRAGELTAVKVPDADDEAMRDLTRAREDAVSVERRAKQRTGALLLRHGRRYPGKTTWGRGHWRWLTQQVMDHPAQQIVLQEYLDAVREANTRVQRLTGQIQELLPQWRRAPFVAAYQALRGVSLIVAATMAAELGDLGRFKNPKELMAYLGLVPSEHSSGASVRRGRITKTGNGHARRVLVEAAWAYRLRARVTRPLLQRQEGLPEKIRQISWQAQLRLCARYRRFLARGKAKQTIVTAIARELAAFIWAIGQAVEPRTA

SEQ ID NO: 137410 - protein, 299 aa, unidentified
MLQAHTLSVGMEGPTEAIAVASVAQEQGADVIALGTLGTRPGASDPLIRPLQSQSTPRVCVDDAGPCGAGLSRSLTQTGAVGWVVAPSVRPTKAGDRVTTDRRDARPLARRMRSGDLTPVAVPAVHEAAIRDLRRAREATLRDLQAAQVRLTAFGLRQDSRSTGQAPWSPAPRRWRSAGGCPTPAPPMVWQEAVQTVTAPTARWPRREHARHAQVPPWRCAPVVEALQALRGVQCPVAVPPVAALGDLTRCETPRHLRHDLGLTPAESSRGARRPQGRMPQTGQTHARRALVAGAWASR

SEQ ID NO: 137411 - protein, 324 aa, unidentified
MKLSIGFDVSKATLDVAIFDGERTDHFAVENGEKGFAEVLRTIKGNLAAEIVITMEATGVYHQRAADYFYKRGFNVQVVNPLIIKRYSEMKMLRAKTDAVDSRIIAKYGYYEAGTLYKKKPEKNLKIQGFLKAIDDLCQMKVQNKNRLEALNQCSVEMKDIELMYQRIENQIEGEILLMERELLLLAKEISFETYQNLLSIPGIGKRIAPAIIGFFGQMEDFETAKQLVCFIGINPSPKMSGTSVRGRGSISRKGNGYLRKLLYMAALSACKHNVSCNALYHRLIGRGKAKKVALIAVSNKLVRQIFAVTKFERRYDPNFCAIS

SEQ ID NO: 137412 - protein, 375 aa, unidentified
MTNTAARSDILFVGIELSKKTWRLAFSNGSKIRQRTLPAGDQAGLQQELAWSKQKLGLSADCAVHSCYETGRDGFWVHRLLSSWSIENVVVDAASIETARRGRRAKTDRLDAEKLVRKLMAWVGGEKRVWRLARVPSVAAEAERRPLRERQRLVGERTAHRARIASLVALHGVAAKLNGRQNFAVAVEQLRDWQGQPLSLELVAELQRELQRLAMVHQQILLLDRQQQAALAAPQTKAQEVARKLMNLCGVGPISAGILAVEFFAWRQFRNRRQVGALAGLCGTPYNSGDTDQEQGISKAGNTRVRWVSAELAWSWLRFQPHSELTKWFGRRFGFGSKRVRRIGIVALTRKLLVALWKYLEWDELPAGATLRVAR

SEQ ID NO: 137413 - protein, 342 aa, unidentified
MNHYAGIDVSLECSSVCVVDASGKILREAKVASEPEALIAWFRQSGFEFERIGLEAGPLSQWLFAGMKAAGLAVELLETRHVRKAFEAMPVKSDRNDARGIAQLMRLGWFRPVHCKSISAQETRSLLTARKLVQSKLLDVENSLRGILRGFGLKVGKTTGQTFAGRIEELVHGHPHLQMIAKALLAVPAVLRTEFAAFEKQTRRMVRSDMQARLLTSVPAVGPIVALTYASAIDDPTRFKSSKQAGAHFGLTPKKHQSGETNYTGRISKIGDASVRTALYEAANVMLTKPLKGCSQLKSWAMRIKKRAGMSKAKVALARRLAVIMHRMLADGTPFNAAAAAA

SEQ ID NO: 137414 - protein, 474 aa, unidentified
MKKQKHTLPEPKPASSRQENLQVINPAAAGIDIGSRSHFVCVGSHAVAEGESPIKEFGTFTENLDELTQWLRAHGVRTVVMESTGVYWIPAFQKIEQAGMECLLVNARDVRHLPGRKSDVQDCQWLQRLHTYGLLRGAFRPSDGICRLRAIMRHRGNLVSAAGEQVQLMQKALQQMNVLLHHVVSDIDGATGLRILEAIVQGERDPQALVSLRDERIRRSTPQEMEAALKGDWRPEHLLVLEQCLRAYQFFQKQMEQCDEHLQKTLEELVAEMNLTMPVAQEPLASLPSPPEAKKKRRKNKHAGNAPKIDLTPQLQALAGTDLTQTLGISVLSSLIIISEIGTDMGRWRSDKAFTSWLGLAPNREISGGKILRNRTRSVVNRASNVLRMLALAVGKTDTVWGHFFRRIRARAGAPKAITALARKMACLIYALLKYKRPYIEPDLDIYLKRFEKQRITNLARHARTLGFELVPAK

SEQ ID NO: 137415 - protein, 433 aa, unidentified
MPTTHPYDLVIGLDRSDRKADLNLIDTRTGNAQKQSVATSPEDLHDWLARLRQDHPQASVAICLEQPAANLILFLETYSWITLYAINPISLQKFRETFVTSRAKDDGKDAEYLAQLLLNHHDKLKAWQPDDTQTRQLQQLVSHRRAVVDERTGLTNRLKALLKQYFPQALDLCGEDLWRPLATAFLLKWPTLQSLKKARKESLKEFYYLQGSRSQKLIEQRLERIEKAVPLSDEFALLQSYTLRVQLICQELQLLLKTIEQFDQEIANVFQQHPDREIFEALPGAGPVLAPRLLASMGSERERYARPENLQCFSGVAPVTQQSGGKCHIHHRYLCPKFLRQSFHEYAKESILHSRWAAAYYGQQRNKGCAHHTAVRALAYKWQRVIWKCWQTRTIYKEEIYEAALKKNKSPLSGLLDQIELGKSPVKTRAKKS

SEQ ID NO: 137416 - protein, 400 aa, unidentified
MRSIGMDVHRSFAQVAILDGGRVTEELRVELELDAVVAFGQALRKDDEVVLEATGNTSAIVRLLMPFVARVVIANPLQVKAIAHARVKTDKVDAKILAQLHAAGFLPEVWAADDETQNLRRLVSERAALVRSIRRVKSRVQAVLHANLVARYAGHLFGKGGRRWLSTAPLPKAERDLLARHLDELDWLDGKLQKLDAALARISLDDARSRKLMAIAGISSVIATAVIAAIGDISRFASPDRLASYFGLTPRIRQSGDHAAVHGRISKQGNTVARTMLIEAAWSAASVPGPLRAFFLRIKDRKGMNVAAVATARKIAGLIWQLLTKDAPYRWARPAFVAMKMRKLELRAGAPRAHGPAGPGRDYWIKEIRHRELELVAQAELAYAQMVEAWKERPPKPQKS

SEQ ID NO: 137417 - protein, 397 aa, unidentified
MSTRSVYDMVAAGGMDVHYKFSQVTMRDEQAQVVRRERLDHPDRQAMRERLAQWPKGVPFVMEASFGWGWVADLMNELGLNPVLSNCLKVEQMRKARGEAKNNKKDADLLSLLPSEKSDWWKVWLAPPEVRDQREWMRYRSGLVAIGTQTQNRIHAVFHRHGIFHEFSDLFGAKGRVFLADLCKNGRTPDVQLAPGALAALRGQVRLLGHVRTQLAEIAKKLRGKLNRSDLAKRLDGIPGFGLILSHTLMSEIGEIERFCNHRKLSSYSVLAPIADDTGENAPGRPPIGRRIGKRGNLTLKWAFIEAAHGAVRSGGKWRKIFDRYTDGGKKDRNRGYIKVARELVKVVDVVWRKGVEYTDTPPARPGASRRDKMREFFGSTRSGTGQPYPAMAAAQS

SEQ ID NO: 137418 - protein, 400 aa, unidentified
MISVGVDVSKGKSTVCILKPYGEVVSSPFEIHHVEKDMEDLDNLLSKLDGEVRVVMEATGIYHLPIVTFLHDKGYFVSVVNPFAMKKYAKDNSIRGAKTDRLDSIMIANYGIEKWFKLQRYEGTEETYAELKLLGRRYRYYMELHVKALQELTHVLDYVLPGIKKMFNSWNEANGKDKLSDFVERFWHFDLITSMSLEKFTEEYIAWAREKKYHRSRSKAEAVYELASSGIPTLSSSTPSTKMLVQEAVSVLRAVDSSLSLILTRMQELAKSLPEYSVVREMGGVGNVLAVKLIAEIGDVRKLHNAKALIAWAGIDPPPYESGQFIGSKRRITKRGSSTLRKVGYEVMRVLKSHSAPKDDAVYNYILKKESEGKSKKHAKIAGLNKFLRIYYARVMEVYQ

SEQ ID NO: 137419 - protein, 397 aa, unidentified
MSMFFVGIDVSKDYSSVQGLDQDGKKLFYVEFGMNGEGFSRLLDMLKTHCGDLSGVTVGMESTGCYHINLFAFLCSEGIVCVVINPLLISNFARLSLRKTKTDKKDALTIAQFLLAHRSKLSQVSYSQSSQDLKDLARERESVAGMIAGLKNDVRRLLQMTFPELEHRCKLFTETMLRFLIKFPSARTIRTAKPKEISKALIHAEGKRKRVFISAEEIISLAKTSVASDSVAKEWILSEKIQTLLYLEEKKGRITEALVEACRSMRVDELDILTSVDGISAITGSTFLAELGNIETFRSYKHVIAFAGLDPSIHQSGQYEGISRLSKRGNRHLRRVIFLMTLCAVRSHNVFREYFLKRKEEGLPPKKAILATAHKLLRVLFAMLTTKSYFRKEVVKV

SEQ ID NO: 137420 - protein, 411 aa, unidentified
MRRVIGMDIHRTFAEVVFWEAGKLRPAGRVGMTRAGLEGFGRSLHKDDEVVIEATGNAMAVVRVLSPYVGRVIVANPLQVKAIAHAHVKTNKIDAGVLASLRAANFLPEIWLPDADTERLRRLVARRSQVVRHRTRIKNEVHAILHAHLIPSCPHAELFGRLGRIWLSRQDVPDDERAAIDRHLRELDRLGEDLAALDREIAQAAVDDPAVKRLLTITGVNLIVAAGLVAAIGDVGRFPDPEKLVSYVGLNPRVRQSGLGLAQHGRISKRGRSHARAMLVEAAWAAAKAPGPLRAFFLRIRARRGHQIAAVAVARKLAVLCWHLLTKKTDYQWARPALVANKLRTMELQAGQPSSKGNKRGAAYAYNVKELRDREIELARHAEQAYERFVSQWQRRGNPKQRTGAAKEERR

SEQ ID NO: 137421 - protein, 347 aa, unidentified
MAHFVGLDVSVKETAVCVVDDAGRVVSEQKVATEPDDIVTLLTSIGGDYARVGIEAGPLSQWLVNGLAEAGLPVICVETRHMKSLLKAQQVNKTDRHDARGIAQMMRVGLFKPVHVKTLAAQEQRMLLTSRRLLQRKMLDVECELRGTLRNFGLKVGAVSTRGYDARIRELVEDYPRLAAIIEPLLTVRRVMREEFARLHKMLLHVARHDAVCRRLMTAPGVGPVVALTYRAAVDQPQRFVHSRAVGASAGLTPKRYQSGEIDYDGGISKCGDLMLRTMLYEAAQSLLVHSGRWSWLKAWGIRVAQRRGMRRAIVAVARRLAVILHRMWIDGTDFRWSNQPTPAAVA

SEQ ID NO: 137422 - protein, 339 aa, unidentified
MQVTTIGIDLAKHVFQVHGITEDGEVVFNRAIRRAQLMQFFINLEPCLIGMEACGSSHYWARELTKLGHDVRLIPANYVKPYVKRGKSDANDAEAICEAVTRPTMRFVAPKSEEQQAVLFLHRARDLIVRQRTQLSNMLRSLLAEFGVIIPQGTGAAVKYAKGVLEGEKPALPQIAIDVLKQLSHQLVAMHLRFRWYEMRMRLHSKLDKRVMLLRTIPGVGPVTASAIVATVGDAKQFKNGRQFAAWLGLTPLNMSSGGKERLGRITKMGDRYIRRLLVTGMTARLRQMKVNPDRVDPWAIGLLERKPARLATVAMANKTARIVWAVLTKNEYYRPHTA

SEQ ID NO: 137423 - protein, 455 aa, unidentified
MSIRIIGIDLAVNAKHKAMILDPAGNKFIGKPITFRSRHDDLERLLKRARAGAPEEVQLVAIMEATGMAWYPVGVYLHRQGVVVYRVNGQKTKDLRKVLWKHAGSDLIDSQILAHLYQLAPSRLERWWPADGDQLALQRACRAYARWRELDVAEQNRLQSYDQWAWGGLHKLVPAVARDWMRLHWYNPWRVFEAGVDRLSDAWQAAAPKAAGSDWIAPWVDRARQMTLLYGSEEMVGYDDLQAITREGLRLRNHYAQEQACLTNQLIRPLYRQLYPDCFLESIRGIGLQSAATYMAFIQDIARFPTIEKFRLWCGIVPASKQSGGAEAKGLRITQAGPNLVKATLFLNAEVARQWDAQIAAIYHQQMVNYGKHHNQAVCACASHLASRIYAILKQQRPYQLRDLQGKPVSAAQSRALCKKLRVPEEVRKRNTKRFRRAQAVVQKEAGFNSQRLLK

SEQ ID NO: 137424 - protein, 449 aa, unidentified
MISAIVERGAGIDLGKRFLKTCVMVGPLSEEPRWEIRRIENTMSELEVMREWLKAEGVTHVVMESTGPYWVPVFNMLEKEFMVVLANPVEVKNRKGHKTDAKDCWWLAHLLRHGMVRPSFIPPQPTRELRELRRRRKKLVEAAAQERNRVQKQLEYGNVKLGNELSDVFGLSGQRMLKALVDGGHTPEQIAALAQGTLQRKTAAIAEAVRGARLSEIQKEIIRSSMRHLIFLEMEIAQIDEQTNQQMQASGQDTARQRLQTIPGIGPEAAANLLAETGVDMSQFPDPGHLSSWGGVCPGNNESAGKHKSRHTTHGNPWFRRTLTECAWAASRSKGTIFQAKYQRLQGRIGHQGALVAVAHELVEAIYWVLARNQDYRSPVPPPLDEVQRQRLIRHHTRRLRRLGGWLPAEKLEPLKEWYVSHCVPMVESPPARRRGRKKSGVKSHGRQP

SEQ ID NO: 137425 - protein, 356 aa, unidentified
MMEIKGTDFRNQDFHIGIDVHRKNWLITIRNNQMELRTFSMNPSPEELHQHMEHNYPGGRYISAYEAGFCGFWIHRKLQELGFKSIVIHAADIPSTNKERSTKTDKIDSRKIARELENKSLNSIYIPNEFHQQLRSLCRLRHRAVQSQTRVKNRIKSHLYFYGTVIPSHQEMPHWSGRFINWLKSQKFSYYSAKDYLLFCIEELTQHRHRIAEIIRALRRHIKEQGQSEQIDLLRSVPGVGPIIATSFYTEVMDINRFRTFDHLASYVGLVPSVHSSGDKSIEQGLTKRRNSYLRYLIVEAAWVAIRKDPALLLAFNQLTRRMKKQDAIIRIAKKLLRRIHHVWKNQTTYVTAVVK

SEQ ID NO: 137426 - protein, 403 aa, unidentified
MPIFVGFDWGGSNHAVCIVDAAGKSLEHFAVAHDREGLDHLVARLRRHGPPAETPIAIERPSGLVVDVLIEAGFLVTPVHPNIVKACRPRYRAVAAKSDPGDAFILADILRTDGHRLTPLKPQSDAIKALRALVRGRDDLVATRLVLANQLRALLDGFWPGAAMLFADIATPIALAFLQRYPSPEAAHRLGEKRMAAFLAQNQYCGRRAASDLIARLRSAPAGMAAEAEADAKGELVRALASALESLVAQIAKLSSRIEHAVAELPEGKIVMSFPRAGKICAAQITAELGDVRDRFQSEDHLAAEAGVAPVTYQSGKSRGVGWRWACNKRLRAAITCFADNSRHASPWAARIYFEARKRGCRHPHAVRILARAWIRILWRAWQDNLPYDVQKHPAAKALLSSG

SEQ ID NO: 137427 - protein, 377 aa, unidentified
MTLQNNDNAAEGVLYMAMELSDKRWKLVFSDGSEKHRHEAIEAGRRMELVEAIWKAKVKFHLSPEARVVSCYEAGRDGFWLHRYLLSLGIENVVVDSSSIQTNRRERRAKTDRLDGVKLLRMLLRYWAGERGLWSVVRVPKVEDEDARRLHRELGSLKKERTRHRNRIRDLLVAQGLRLEPNRGFLQRLETLTLWDGTSLPAELKGALEREYARLSMVEQQLCAPEQTRAERIASADSHPLQQVVRLMRLRAIGPNCAWLLVMEFFAWRGFRNRRELGACAGLTGTPYASGGRKRDQGISKAGNARVRTMMVEIAWLWLRYQPSSKLSRWFRERFAGGGARMRRVGIVALARRLLVALWRYLEGGELPEGAELKAAG

SEQ ID NO: 137428 - protein, 395 aa, unidentified
MFIVGIDIAKRSHEAIIIAEDGQVVRKAFSFRNNCTGYNLLLEQVRRLTLVKSQIVFAMESTVHYWLALYARLLKDGYAVMVLNPIQSHSLRELYIRKAKTDARDSLIIADLVRFGRCKASNVPQDKILALRELCRSRAYLVDMAADLKRKLIALLDRIFPEYESLFDSVFSKASIAVLSKYSTPQKVKNANLRKLTDILMESSNGHFGEWKAHQLKEAACSSFGIDDSGGVYSTLLGMFLEQILSLTAQADSLEKQISIFFQEFNNPLTSIPGVGTVLAATILSEIGDITRFSSADKLLAYAGLDPSVKQSGEFKSNQNRMSKRGSPYLRRAIWLASTVAVHRDPMFQTYYEKKISEGLHYMNVIGHVSRKMTAVIFAVLRDGQPYQPILQSAG

SEQ ID NO: 137429 - protein, 531 aa, unidentified
MYSSLLSLLADTVFKLNHSDSSEPGAVNKFAAAEAKTVNKSSDIAKTLRPVKAVTGRMPHDSPRSLCADPARVYRRKPAEPRGPVQKSERTSPHEGFCISVTGDRTFGGRQKPPMKNWNEITHYLGFDWAKDHHQVVIVDRQARIVAEFQFEHSLEGWNTWRERIRDYPALAVAIETNQGAAVEQLLQSSVSIYPINPRSAKAYRQRKVPTTNKTDRLDAWSLAEALRTDGQSWRPLQPLDPLIQELRLLCRDELNLIAQRTSLINQLQQALMEYYPSALEAFDDWTVPATWKFLERFPTPDALTAAGLQKWNAFLHCHKLYRQNTHERRIAAFSKASQWHIAPALQRAKSFLVLSLVQCLIVLEKQLQQYRKRIEELFASHPDHDLFGSLPGAGPKMAPRLLSELGDDRTLFPDADSLRCYAGTAPVSYQSGQVHKVYLRRQCNKPLRCAIHLWADLSRRWCQWAQTYYQQLRKRGKSHAQALRCLGHRWLKIIWKMWQTRTPYDEALHTRNQTEHGSWVLQLMDQKPSE

SEQ ID NO: 137430 - protein, 321 aa, unidentified
MNKSKQICGVDISKNVFDVADSQGNHSQFKNDGKGFNSFLKTLSSESLVVMEATGYYHYRLAQFLYEQGIQVSVVNPLSVKRFIQMKLAKIKTDKSDAKAICEYATINEVPLYTAKDKNQAECLQLMRLIDIYLKQSTALKNKLHGEKTLGKPSKTVYHSLNRSLKAVQKEIQILEDRLMEIVKEEQQKQLTLLKTIPGLGSKTAIMLIVLTDGFSNFENARQLCSYSGITPTLRESGTSVRGRSRISKIGNTKLRNLLFMCSFSACKHNKACREIYERIIAKGKSKKLALIAVCNKLLKQAFAIAKSGLPYQENFVSKLA

SEQ ID NO: 137431 - protein, 338 aa, unidentified
MEYGAIDLHARSSWIRIVTADGAPVLEQRVRTTREGFAAVFAGRSAVRVLVESSTESEWVAQTIEGYGHEVIVASPTYALMYGHRDPQIKTDRRDVRALAEACRLGIYRRAHRVSAGQRQHRRELRVREQLVRTRTQLINLVRAQLRQEGLRLPTGASHTVPRRYATVAVSETLRAALAPVLTLLETIGAQLRACDAQLTLVASADAVVQRLMTAPGVGPITALTYRAVVDDITRFGDARSVAAYLGLVPSEHSSGARQRKGGITKAGPTGLRVLLIQASWAIWRQRTGRGALHTWVEHLAARRGRRIAVVALARRLGRILYAMWRHEQDYRAVPVQR

SEQ ID NO: 137432 - protein, 413 aa, unidentified
MDVMVERCAGLDIGKDEVVVCVRTPGERGRRRSEIRTFTTFTAQLEALADWLAVERVVQVVMEATGQYWKPVWHVLAERGFELMLVNARHVKIVPGRKTDVADAAWLAELLEHGLLRGSFVPPAVIAQLRDLTRYRKRLVQTVTAEGQRIEKTLEDAGIKLDSVASQLLGVSGRAMLRALVAGEGDPEQLADLAQGRLRNKLPVLVEALRGRFADHHALLIGLALDHVEHMEAAIEALDTRIDELMSPFAQARDRLDTITGVGKTSAEIIIAEIGADMSVFPTAAHLASWARVCPGNNVTGGKRKSGTTGGGNRWLRATLVECAWAASRSRDTYLSAQFWRLARRIGKKKAAMAVGHSILVIAWNLMSSDKDFTDLGGDYFTRSVDNTERRRDHLVRELQGMGYRVTVDKPAA

SEQ ID NO: 137433 - protein, 414 aa, unidentified
MTNPLIVGVDVHRKSNTFCLMDAGGGEVLSRFTLDNNRPGTQAFIRRVTELMEASGFTELQVAAEATGWYWFHFFQTLHNEALLSQWPLDLYAFNPRLTANFKKSYLDLDKTDPIDAYVIADRLRWGRDIGTPFDFDEQHLALRFLTRYRYHVVHNLAREKAYCTALLYLKASEYTRQDKQAFANLFGAASRAVLQEFASIEEIAAMPFDELVEFIDVQGKRRFADPAENAQRLQQIAQDSYPLPEALQQPINLILGLSLKQISALEQQEERTNIAISERMLALPNTLQTIPGIGPVFAAGIIAEIGNLQRFNFDQAKVAKFAGFKWRKTSSGDFTADDTRLTRTGNPYLRYYFCEAAFAVQRCDREYAAYFQRKFSEARTHQFKRAQVLTARKLVRLVVRLLATNQTYRPRRL

SEQ ID NO: 137434 - protein, 358 aa, unidentified
MKKNSKVENRRGLTIGIDVSDRSSCYCVLDGNGEISAEGKVRSTPEAFRQEFGGREPARVALEAGTHSRWMSALLQECGHEVVVANPRRLRLLTESDKKNDPQDARTLAEMMWAKPGLLGPIRHRSAEAQRDLNLVRSRDLLVEARTKLINGVRCMVKGLGGRIPKCASLQFTQQAHEHLPEEARQAAAPLLETIDELTLRIREYDEVLEHVAQTRYPHTELLTQVEGVGTLSALAFVLTIEDAGRFSKSRDVGCYLGLRPRQQDSGERTPQLRITKAGDQYLRRILVSCAHYIVGPFGPDTDLRRWGLKLCERGGKNAKKRAVVAVARKLAILLHRLWVTAEVYEPLRNSKPIPAVA

SEQ ID NO: 137435 - protein, 360 aa, unidentified
MTDASIAQTEPVLVAIDIAKSRHEVLLSIPGRKRRRRLTVLNQLDDFNRLIALLRDYGRPVRVAFEATGNYHRALAYRLGSAGFEVKLVSSVSLARTREALNNSWDKNDPKDAQVILHMMQIGNEQFYHDPVLCGTNDLQELSKTHDIVSRSKTELWHRVLTHYLPLYFPEAERFHRSSRSDWFFAFLERYPSPHFISAMSQEAFIADAWEVVGRKVSKERLLADIYETAKTSVGLPIAPDSDAAKMFRMVLAEGRSLIAQRNQIEGLAEALLKENADYTLLTSIPGIGAINALTILAEAGDLRRFQHHRQFLKFCGMDLATIQSGTFRGQTKLSKYGNARLRRTLWMAGQVAILSARSS

SEQ ID NO: 137436 - protein, 384 aa, unidentified
METLQKVSHIGCDLHKKFTMATARDAHNRVVWRQRLEHADRPRLLAQLDTWPKGTPVIFEASFGWGWFADTVQAAQLEPHLASSRKVAAWRDARGLPKSNRVDADLLSELWGQQPRWWEVWLVPPVVREQREWLRHRMALVRIQTGLKNRIHAVLHRHGVVHEFSDLFGRDGRRFLSLLVSPRDVTLPESARLTLKSQLQLLDRVRQQIAQATRVFRRTVRRSVVAERLRRLAGIGYVLAYTLVAEIGRIERFPNAKHLASYSLLAPRAYDSGEPEDGPPLGRHVGHVGRRTLKWAFIEAARGAVRHGGRFRQLYDRRTDGGRRNRNRGYIAVARQLARVVDMVWRKGVVYTEDPPPRPGSRRRAKRSRPGTGQPVDAMVGVVQ

SEQ ID NO: 137437 - protein, 414 aa, unidentified
MQQIHDRVAGLDVHRDSVVACFRHLGPRGGVVREKERFTTTTAGLRVLEAWLADREVQLVAMEATGVYWKPVFYALERRFTVWLCNARNVKKVPGRKSDLSDAEWLADVAAHGMVRPSFVPPLPIRELRELTRYRKTQIDARVAEIQRLEKVLQDAGVKLTSVASKVLTQSGRSMIEALIAGEQDPAKLAALAKGKMRPKIPALTEALAGHFGPHHAVACRRILGHLDFLDETILALTEQINARTAAFDAVYKSLLPVPGLDRLTIDVIIAETGADMTRFPTAGDLASWTGVCPGSHESAGKRRRVSTTPGNQWLRRALIEAARAAVRTKGSYFGAQYRQIARRRGPNKAAVAVAHSLIELVWHLLSTGEVFKDLGDDYFTNRQDPERRARRLVAQLQELGYAVTLEALPATAA

SEQ ID NO: 137438 - protein, 351 aa, unidentified
MSQTFNAAVSVVGIDIGKNSFHVVGHDERGAIVLRQKWSRGQIEARFANMPPCLIGMEACVGAHHLSRKLNSFGHDARLMPAKYVRPYSKGQKNDFRDAEAIAEAVQRPTMKFVATKTADQLDLQALHRVRERLVSQRTGIINQIRAFLLERGVAVRQGLRFLRAELPRILATPPDVLSPRMVRIIEDLAGDWRRLDERVEGMSNEIEAIARQDAGCGRLMSVPGIGPIISSAMVAAIGAGDVFTKGRDFAAWLGLVPKQISTGDRTILGKISRRGNRYLRVLFVQAAWVVLIKPKSWERHGLKSWIEAAKKRLHRNVLAIALANKLARIAWSVLAHGRDFEASKFNEAVT

SEQ ID NO: 137439 - protein, 328 aa, unidentified
MENVGIDVSKAKLDVLWLRDPQRNKIKTRVFRNHAREMPALIRWLQEKTGAPPQAVRVVLESTSVYHETVAYALHEAGFVVIVANPKWVHHFAKSEGQTHKTDKQDSGVLARYGLEKGDRLSRWQPEPEEIRHLRGLLGRLRALEKDRDREQHRLEKALATTTPARVTASIRDMITALEAEIRRLKEDIDDHIDGHPHLKRERALLESIPAIGEASSRVLLCSYHSRTFRSARQWAAFVGLVPRHHQSGTSVDKPSRIGRGSAGLLRKTLYMSGVTAQTYTPEVRALKHRLAARGKAGLSIVVAAMRKLLHIAYGVLKHQQEYRPQTT

SEQ ID NO: 137440 - protein, 367 aa, unidentified
MKKVSIAAAKASRNIFQPKLTIGLDLGDRNSWYCVLDEAGQIQLEQRVRTTAKALREVFGTMPRSRVALEIGTHSPWISRLVNELGHEVIVANARQVRLIGESRKKDDRLDAQALARLARVDPELLSPVKHRSAQAQADLMMIRARAGLVRARTGLVNAARGLAKSYGERLRGCNVRNLNPEKAKALSPELQRALEPLLAAIEELSERICEYNEGIEGLAQASYPQVALLKQIKGVGTLIALTFLLTVEDPHRFRKSRDVGCYLGLQPGRRNSGQSEPQMHISKEGDPYLRTLLVQGAQHILGPFGIDCDLRRWGLKLAERGGRNGKKRAIVATARKLAVLLHHLWVSGEVYEPLHNSSRMPVAAAA

SEQ ID NO: 137441 - protein, 473 aa, unidentified
MRKAQRNVKSRAKAKSKGLRWNKQSSLLEQINFHAAGIDIGSREHWVAVPADCDSQPVRCFGTFTSDLHALADWLLQCGVKSVAMESTGVYWIPVFQILESRGFEVLLVNARQVKNVSGRKSDVSDCQWLQQLHSYGLLAGSFRPAAQVCVLRSYLRHREHLVQQASTQIQLMQKALTQMNVQLHHVLSDVTGVTGMAILDAIVDGERDPLKLAQLKDPRVRSSVETIAKALTGDYRPEHLFVLKQACESYRFLQAQIAECDVEVDTVLSGWDAKVDLEQQPLPPTRKQNRRKSKHKPLSFNLREQLYRVTGVDLTEVDGLDVLSVQALISEIGLNMHRWPSEKHFASWLGLCPDHRISGGQVLHNRTRCVINRAANVLRMAAQSLKDSQSALGAFFRRLKARLGPAKAITATAHKLARIVYQLLKYGQNYVDPGAQYYEQRYRENVVKSLKKRAASLGYTLVENAAVNVHVS

SEQ ID NO: 137442 - protein, 297 aa, unidentified
MHSTTIAVDLAKNVFELAVADATGKIVDRQRLNRVRFSSFFVQRAPCRVLMEACGSAHYWARRIAEHGHSVQLLPAQYVRQYVRRNKTDRADAAALIEAARCADIRAVPVKSLEQQQVLALHRLRSQWMGTRQRYLNTLRGLLREFGIAIPLGARVARSHIAQHLAQSRRDLPAAIRPLLEQMLSDVDQLERLTDQVERQLAGLTHADPVVQQLRQIPGVGLLTSTALRASVGDIQRFPCARRFASWLGLTPREYSSGERRRLGSISKRGDVYLRTLLVHGARSALMAAHRQQRTVH

SEQ ID NO: 137443 - protein, 433 aa, unidentified
MPTEFAAMIAIDWADQKHAWAMQTATSKVETGAIDHTPEAIDVWAAELRMRFGGQSIAVALEQSRGSLVFMLTKYDHLVIFPVHPTTLVNYRKSFRPSRAKDDPSDARLLLDILMLHRDKLRRFNPDTPETRTLQFLVEERRKFVHEKTRYSNRLTAHLKMYFPQVLDWFDEIGSNIAAEFLERWPSLEKLQRARPSTIERFFIDHNSRDPDRIKERLEQIRKAVPATTDLAVATSSSTAVLGWAALLKQVLVAITAYDQQIDDLAQAHPDYALVKSFPGAGPAMAPRLIAAMGSQRERYQSAAEIQRYSGIAPVVASSGKLRWVHWRWACPKFLRQTFHEWALHSIAYSDWAREYYEQQRAKGKRRNTAIRALAFKWIRILFRCWKDGTSYDEAAYQRCLAARRPDQQPITPTVELQWKNVAGFSKISLAGA

SEQ ID NO: 137444 - protein, 346 aa, unidentified
MENIALDVHKHYTWARVENPEGKQLYENRLAHAHGTIKNFVRRWTPGSLVAVETVGNWYWVVDEIEAGGGKPQLVNARLAKLMMGSVNKSDKLDAKGMNRLQRTGTLPTVWIPSSSVRDARELPRTRMVLSEQRTQLKNRVHATLSKYGYVVDEVSDAFGKRGRQIIKELLTQLPPHTRQALQHVLDQLDHVMENLKAIEADMISTFAPCPQTTWLKSLPGVGEILAVVIWTEIGSIERLDRAEQLASYSGLVAREHSTGGKFHYGAVRRDVNVYLKWAFVEAANSSILNRERCGYHHISRLYQRIKARRGHNRAKVAVARHLSEASFWMLKKGELYREPVLSTQR

SEQ ID NO: 137445 - protein, 309 aa, unidentified
MDLFVGIDVSKDRLDVHVRPDGEAFAVSRDGKGLEQLVERLLAVSPTLVAVEATGGFETIVAAAIAGAELPLAIVNPAQIRHFAQAVGKRAKTDPIDAGVIAHFAEAVRPAPRTLPDETSRLLAELVGRRRQIIEMMVAERHREKRATNVRVRKGLARHIAVLERELNAIDQDIDTLVRGSAVWRAKEDLLASVPGIGRTLARTLLANLPELGTLGRREIASLAGLAPYTRQSGRWRGKSMIGGGRSTVRSASFMAALVASRHNVPLKAFYQRLLAAGKPKMLALIAVARKLLTTLNAILRDNRPWQNA

SEQ ID NO: 137446 - protein, 414 aa, unidentified
MKLFVGIDVSSQELEACFMNADGDNFESFTVPNNLHGASHLRDRIVVAADKLAVSEIHIGLEATSVYSWHPAMYFHQDPALRERKTKVFTLNPKLICKFREAYADMDKTDRLDAWVIADRLRFGRLTTTLVMQEQYIALQRLTRMRFHLVHNLAREKQYFLQNLFYKCNAFTTEVDSSVFGHALMEMLSEKFSLDDIAEMNVTDLADYLRDKGRNRFPDPERVARCIQQAARASYRLSKVVEDSIDLVLGTSIESIRSIQKQLKDLDKAIERILDGIPGAQCLLSVPGIGKVYAAGLLGELGDIERFKDQAAVAKYAGLTWRKHQSGAFEAEHTARIKSGNRFLRYYLVEAANSVRLRDEEFGEYYRKKYNEVPRNQHKRALVLTARKLVRLVDVLLRNGQLYTPRRKVNDAKN

SEQ ID NO: 137447 - protein, 353 aa, unidentified
MLAELVDHVIGIDPDRDWITAAVVHAKTTGVVATAKFAANSDGYDEAIEWADTHTTAGDRSWAVEGSGSYGRGLSAALSRVGEWVIEFDRPHQRPTKDGAKTDELDAVRAAREVLGRHKLHTPRSHDGHREALRVHTVTREGVVRARTAAINELKALVLTSPDELRSELRGLTTTVLIKRCAAFRTTAKRPVAEQCVRNTMRVVARRIQNFNDEIEVHDVAMKQLVDEAAPQLVAQPGVGYVTAAMFIIAWSHPGRCRSEAAYARLAGVAPVPANSGQSQDRHRLNRYGDRKLNRACHMVALARWQYHEPTKAYIARRRAEGRTDREIRRCLKRYIARQVWRQLEHQSPRMAT

SEQ ID NO: 137448 - protein, 356 aa, unidentified
MKYVGIDVHKKMCQAAVLDDEGELLDQIRFLNKKEEIKDFAFKLLTFRDDVKAVVESTGNLWIQIHDILEEFGIDVVLSNPTKTRLIAEAKIKTDKVDAKILARLLRADMLFTCYVPGEEIRNRRELLRHRLDLVKMRTQVKNRIHSLLDKYTLKSPYNSRTKKHVAWLRKQDLGFIDNAIVKGQLALLDTLDEQIRVMEDKIAAIAVEDPQVRLLMTMPGIGYFTASLLVAEIGDINRFSNDKKISSWAGLAPRISQSGDKTRIGRVGKGNKRVSSMLVQCAHTARRHDARFSRAYKRTERRGGKGKAIVAVAHEMLRIVYFMLKRDEPYRDENVELTTKKLKRMEGRASIGLRI

SEQ ID NO: 137449 - protein, 411 aa, unidentified
MEVVYRRCSGVDVHKESISVCVLLMEEEGVKKQIRRFGTMTRDLLELSLWQQQLGVTHVAMESTGVYWKPVWNLLEGQFELLLVNAQHIKQVPGRKTDIRDCEWIADLLQHGLLRGSYVPKQEQRDLRDLTRYRVRLNEDKTRLANRIQKMLEDANIKLASVATDVLGASGRTMLQAIAAGEDDPEKLAQMARKGLRKKLPQLRLALQGRIRDHHRFLLRQLLEELRFTEEKINELDQRIQQCMLPHHHAISLWTSMPGIRMTTAWSLVAEIGTNPEQFPQGSNLASWAGMCPGNNESAGRRKSGKTRRGNRWLRRALNQAAWAAARTKNTYLAARFHRLAARRGSKRAIVAIGHKILVLAHYMLQRNTPFRELGAEYYQRLRTPSISQSLVRRLQRLGFQVTLTPTQQVG

SEQ ID NO: 137450 - protein, 427 aa, unidentified
MSEAESVKQEPQFAAFIGIDWADKKHVWRLQAVGSEKRESGELEHTPEAVEAWVGQLCQRFANRAIAVAVEQSRGALVFMLSKYEPLHLFPVPSTMAANMREALYPSGAKDDPRDADLLLDLLLQHRDKLRRLSPDTEATRRVQNLVEERRKLVDEKTEQTNRLMSHLKIYFPQMLDWFERLDTELVCALLERWPTLEELQKVPPAKLRAFFQKYHCRDQELIERRIVAIRQAIPAIRDRAVIEAKSTVVKVSVQVIRSLVEGIANLDEKVEEAAAAHPDFFIFDSLPGAGQTLAPRLLAAFGSQRERYSSAREVQSYSGIAPVMESSGKKKWVHFRWACPKFLRQSFHEWAGHSIVSSVWARSYYQQLRSRGKGHHAAVRALAFKWIRVVFRCWKDGVAYDESKYLASLARRGSPLSAILGTGKTL

SEQ ID NO: 137451 - protein, 395 aa, unidentified
MDHVGIDLHKVESQICVLRQEGERVDLRIRTTHERLRQALAPYRGSPILVEASTESEWVARWLEELGHPVVVADPNYAPMYAHRSRRIKTDRRDAHTLAEACRRGTYRPAHRTSEPQRAVRSLLTVREVLVRARVRAIVVVRSLYRQQGWGIRTGLAESFTRRIAEVAVAPALAGTVAPLIEMIDQLTTRIRGMDRQLEQQARDNPVVERLRTVPGVGPVTALGFVAALDEVGRFDSAHRVESYLGLVPRERSSGEKQRRGRISKAGSSRVRWLLVEAAWRIQHYRRDDLRSLQLWTQGIRLRRGKKIATVALARRLAGILYALWRDGGTYDASRLERTRVVQPFRPVQNVGEMSATPSLAVVEAVSHVAPLTFEPPHARCPQRHHRTEREQKGE

SEQ ID NO: 137452 - protein, 330 aa, unidentified
MKTILVGIDVASKTLAIALEHPGRSSRAFEVPNTPGGHRRLIRRITARKIPARVCMEATGVYGFELAWTLHRTPGIEVQVANPRAVRDFSRAWLQRSKTDAIDAQVLLEFARRMPFASWRPPSLRILEIRTITRRIEVLTRARTREKNRLHMVDRCREISAVVRQDILQHIEHLNHSLRHLQQVASSLVRKDPVLARRFEFLQSVRGIAETSALHILAELATLPEDMSPRQWVAHAGLDPRQYESGSSVSRPARISRVGNSHLRRALFFPAMVSARSEPHVRAYYEHLLARGKKPLQANVAVMRKLLHAIHGMFSSQSTFRGEKFYAIST

SEQ ID NO: 137453 - protein, 356 aa, unidentified
MGKDITSVGGLTIGLDLGDKHTVGCVLTGSGEVEETFSVATTMSALGRTMAGFESSRVVLEVGTHSPWVSRLVEQAGHEVIIANPRRVRLIAENDSKTDEVDAELLARLGRIDPGLLKPIVHRRERTQHDRILLLARDGLVRSRTQLVNQVRGFAKSLGHRMPSSSTEAFPRRVREQFSKDLFPGQSVMLEMIDRLTQEIRSMDREAEKLCNDRYPETGVLRQVKGVGALTALGFVLTLEDPSRFAKSRTVGAYLGLRPRSRKSGEQQPQLRITKAGDELLRRYLVGAAHYILGPFGPDTELRRFGLKLAERGGKAAKKRAAVAVARKLSVLLHRLWVTGEEYQAIGYGQPTQEAA

SEQ ID NO: 137454 - protein, 355 aa, unidentified
MDSVKYIGMDIHKEAIAIAVLNFSGKLVMECTIETKAITILEFLKGLRGSLHVTLEEGTWAAWLYDLLKPHVTELVVCNPRRNAYLKEGSKSDRIDARKLAELLRSNMVRPVYHGEKGVRTLKELARSYLTISKDLGRVMSRLKAIYRSWGIPCAGKQVYAARYRAAWLAKISEAGVRRRGEFYYQQFDALRVLRQEVRRELFAEAHQHDAWKLLRAIPFIGPIRAALLIALIQTPHRFRTKRQLWTYSGFGIETHSSAEQRFIQGELKRAKKPASIRGLNRNHNHDLKNLFKSAATAAAAKAGPFQEFYDALVAKGIRPEMARLNLARKMATITLIVWKKGVRFDAKHLKPQTA

SEQ ID NO: 137455 - protein, 335 aa, unidentified
MYYSGIDLHSDNCYITTVGESDVVIKQQRVENIPELVVDYFRSLPGPHSAVVESTTGWYWLNDLLEANGIELVLAHAKYLKAIAYAKVKTDKVDSQTLATLLRQNLIPRAHKISRELRGLRDTMRIRLRLVQQRTACLRRIESIAGKFNTSSDLPDPYRFQLSVLHHLRDTFTAKILDLEKSLHGVLIPNDDVQRLLYVPGIGKLSAFTIYLEIDGIERFISDRHFVSYCRLVPGADNSNRHHHHRSSKDGNKYLKIAFSDAAVHAIQYYPEIKAFHQKLARRSSKAVARTVVAKELAKIVYYILKHKEPYRGFKGQPISRRKSQQWPRLPNPDA

SEQ ID NO: 137456 - protein, 340 aa, unidentified
MRALYAGSDLHGNNNLVGIIDGEGKRVFKKRVPNDPQLVLEVLKPYNGEIAGIAVESTYNWYWLVDTLMEAEYKVHLANPSAIQPYSGMKHADDKHDAFWLAEMLRLGILPEGYIYPKQERPLRDLLRKRGHLVRLRTSLVISLQNILSRNLGRNVIVNEVKCLREDRITPLFGESEDLALAGRVSKETIDFFTHQIRRIEGVVEKRVELQEGYRYLLTLPGVGKILALTIMLETGPIGRFETVGDYVSYCRKVPSEWTSNGKKKGSGNKKNGNKYLAWAYSEASDFARRYHPEPRAYYNRKLQKTNPAVAHSALSHKLARAGYYIMRDQVTFRPEKLFG

SEQ ID NO: 137457 - protein, 400 aa, unidentified
MLLFFEVITMIFVGIDVAKDTHYAAVSDDSGAVLVKPFAFQNNAEGFCLLLKKLSEFDRSKLLIGLESTGIYSENLICFLYESGFRLAVINPIQTATLRKTAIRKTKTDKVDTMLIIKSLMVNSYRLYSQRDADSLKLRTLCRFRQNLKKSKARLKIQLAGYVNLAFPEFGKFFKSGIHIAASYALLKKYSSPKEIAALRTSTLYTLLSKASHGRFGKDTAEALKSLALSSVGVKNPYISIQIAQTIAQIELLEQQIKDLNSAIEEAMESINSVLMTVPGIGAVNAACILGEIGDIKRFSKPCKLLAYAGLDPTVRQSGQFTAKSTRMSKRGSALLRYALINSAWQLTLNDTIFKAYYDLKRSQGLNHYGALGHVAHKLTRVIFKLLTSDTPFIPAKLVA

SEQ ID NO: 137458 - protein, 388 aa, unidentified
MFFLGIDIGKNTHVASLLDEKAKIIFKAYSFANTLDAAEALLVKLEPYKDSLEIGMEATGHYWLSLYSFLAEHKFIVHVLNPIQTDGWRKGIEIRKRKTDVIDSVLIADLIRYGNFLETSLADEDILSLRNLSRFRVYLVNSVSDLKRKAIAVLDQIFPEYASVFSNVFGQTSKELLKSLSLPSDYENLSATKIEEVLSNITQKKKASKTISTLSDKASRSFGISFCKDSFAFQLKLIIEQICFIEEQIASVELEIDQLMSKLGTNIKTIPGVGSVIGAVILGEIGDIERFDNPSKLVAYAGLDASVSQSGEYEVSSGKLSKRGSPYLRKALYMAAQRAEFCDPVFHAYYEKKRNEEKHHLVATNAVARKLCHTIYAILKKDVPYEVQ

SEQ ID NO: 137459 - protein, 385 aa, unidentified
MTVRIVSRAATHGETVRCLVAIELSKQSWVIGFITPLSSRISRRILSGGDWKGLLELIEEVRARVSREMGRTVEVMSCYEAGYDGFWLHRQLEAHGVRNYVIDPASLQVDRRVRRVKTDRIDTERLLRSLMAYLRGEPKVWSVVRVPSVADEDARRLHRERDRLICERVQHVNRIKGLCALQGIYDYHPLRPQAVARLEQLRTAQGGALPPRLKSEIKRELHRLEVVVEMITTLEAERDAIVEDEASTHVNAEKIQALHKLKAIGPEFAAVLVGEIFHRDFNNRRQLASYVGYAPSPFQSGNVAHDQGISKAGNRKGRTTGIELAWLWLRYQPDSDLSVWFRARVGTVKGRIRRIAIVALARKLLVALWRYLETGLVPRGAVLKG

SEQ ID NO: 137460 - protein, 316 aa, unidentified
MAKLVSKITLGIDVAKDQHIVFNWQTQEITTLSNQHSAIKDWLKSFPGPLQIAIEPTSHYHLQLIDEALAQGHEVYLIDQRQLVHYRQAINVRNKTDPLDAWLLARYLQHEGQMLRPYRPQAPRARRLWALILRRATVVQSRQQLQQSFRELSLSIKALLSEMSRLLLRIDQEMKRLIRELGWWNDYQRCCSIPGIGPGNAAALVTAYWRGAFSGSDAFVAYMGLDVRIRESGQFKGKRKLTKRGEAELRRLLFCASHAARTDQRFADYYQKQLAKGLSKIAARVALSRKLARIAFTLMQNKENFIKQEKFYCTAP

SEQ ID NO: 137461 - protein, 337 aa, unidentified
MTTHRIAGIDVHKKMLAVVVLDAAEEGEWRLHRRKFLTTGEDLDALAVWLASLEVREVVMESTAQYWKPVWRVLEPQCHMELAQAQSNRGPRGRKNDFADAERLVRRYVAEELILSFVPDPQQRLWRALSRTKQTLTRDRVRLQNRVEGLLEEMCLKLSSVVSDLLGVSARRMLTALSEGETDPAKLAAMAEPGLRATPERLCDALRAAPSLYPGYRHLLKQYLERIQLQDRHIAELDRELGVALKEHEDAVVRLADVPGLGADSAQQIIAEVGPQAAPFPTAANLCSWVGSCPGQEESAEQSTSDHSPKGNRSMRRILHQAANAAIKTKGTVFEAH

SEQ ID NO: 137462 - protein, 426 aa, unidentified
MIPAVLERCAGIDVHKRFVTVCVLIGAAHLNPEPKVKRYGTCNADLRQLRDWLKQENCWQVAMESTGPYWKPVFNVLEEAGFKVILANPQQVKNLRGHKTDMKDCRWLAHLLRHGMIRPSYIPSRAIRELRDLTRRRKQLIRNGAMERNRVQKVLEEANIKIGSVLSDVFGASGQDMLLALVQGQATAQEIAQLAKRQARKKIPALEAALEGHCMSESQRQLIRQCMSHLAFLDKQVEEINGQIQDKIGAFGFQESYELLQSITGIKREAAATVLAEVGDTVAAFPSSSKLSSWAGVCPGNNESGGKRKSTRTTKGNPYLRDVLLECAWAASRTKSSQMQRLYQRLERRLGHKRAIVAVAHALVEAIYFVLSQRRRFVDIVEPPHSVVRIKRLVRHHTRRLHKLDRWLEQLTEGSEGSTMQSQPLT

SEQ ID NO: 137463 - protein, 411 aa, unidentified
MVKENFIYVGIDLHKETHTAVMIDCYNQKLGEITFPNRPAAFPKLVTKVKKCNTDGKEVVYGLENAYGYGRALAVWLIDKGYLVKDVNTAISHRQAKHRGAMYRKSDSDDAEAIALATLNMLDKLPDAYPNDAYWSLGQLVHRRDNIMKQRTRLVNQLHEQLCIAYPSYKQFFNDISRPTALYFWEHYPSRKYLKGKSVEDLRAELVPVSHNKCSTKTCEKILDAVASDKVKNNAYQDARDMVTLSIVSDLQYYDKQLAEVDKMLEQMYKMLGCTLTTIPDVNVITAVKILAEIGDIKRFSNANKLAQFAGIAPLHLSSSGKGKDVATKQGNRRLQATIYFLAIQMVQVSSKGTPRNSVVRAYYEKRKAEGKTSQQALICISRRLISIIYGMLKHGTEYRMPVVESAGENR

SEQ ID NO: 137464 - protein, 366 aa, unidentified
MRKPSTTTLRRIRKLQDGRLTIGLDLGDRSSFYCVLNGAGEVVLEAKVATSPEAMKKTFEKMPSSQIALETGTHSPWVSRLLTELGHEAIVAHSRNVRLIGESRRKDDRLDAQALARLARIDPQLLSPIQHRSAQAQADLAVIRARYALVRARTALVCAARGLTKSFGERIRGRNPKGFGSATSEALSPQLQVALAPLLSALETITARIGEYNAQIEKLAEESYPEVALLKQVKGVGTLIALTYILTLEDPRRFRKSRDAGCYVGLQPGRRNSGQSEPQLHITREGDSYLRMVLVQGAQHILGPFGEDSDLRRWGLKLAERGGKSGKKRAIIAVARKLAVLLHHLWISCEEYEPLYNTRRRRLAAA

SEQ ID NO: 137465 - protein, 343 aa, unidentified
METYVGLDVSLKNTSVCVVDKAGDVVKEGVVASDPEAIAAFIKAQAPEVVRIGLESGATSAWLWRELKRCALPVICIDARHASAALSMQVNKSDRNDALGLARIMQTGWYRQVQVKSEASHTIRALLTSRALLIRTKRTLENHIRGLLKNAGLVIGRAKGGVYSVRVRELLADEPELAAIIRPLLETRTTIDAQLLSVEKQVRRCVKAHRQVQAFMTVPGIGPITALAFMATIDDPTRFKRSRTVGAYCGLTSRRHASGEVDWSGRISKCGDALLRSYLFEAASVLLTRIQRWCALKAWGLKLARRTCMKKAKTAVARKLAIILHRMWCDGSEFRWGAETASV

SEQ ID NO: 137466 - protein, 414 aa, unidentified
MLYIGIDWAADSHTVTFLAPSGEVLESLAIDNRLAGFLKLLEAIRKHLRKLEPAATSDAVSFAIEDQNQRLTDFLLAQGFQGYLIEPSRMKGYRLRYRSSGNKTDPDDAFVLADVLYRDHDQLPRIAPDSDVVRALKTLLRDRESFVHDQTRLTNRLTACLRQYYPEALDFFEDVAGKTVLDFIAAFPDFAAASRLSRREVKRFLVEHHCHREAQLERIMTVLGSSPTPVPTVVVRTKRQQALAIIQQLRMVQTTVAGYDAEIERLGKENDEVKRFRGMPGGGPIIGAGLTSLFGDDRTRFNSAMAVQSLVGTAPKTIQSGQFRTVCFRYGCNRFYRTLLQQMALCALRSSAWAKQYYRRKREEGKTHQHSLRCLANLLLKIAYAIWRDRTEYSEDRHLAQIMRHHLRSTSCSV

SEQ ID NO: 137467 - protein, 353 aa, unidentified
MKTYYVGMDVHRASIVIVVLNGAGKIVMQAVIETGAERVREFLKQLRGRVYVTFEEGTQATWLHDVVRPLVTEVVVCDPRHNKLMASGNKSDRIDAQKLAELLRLGSLKAVYHGNNGVRSLKELVRTYDCLVSDTTRVMNRLKAIFRGRAIACGGHEIYREDRRGQWLEKLKEPGARQRAGFLYQQLAALKPLRHEAKRLMVKEARRQAAYPWLLSVPKLGAVSVAQLIAVVGTPYRFRSKRQFWTYVGLAVVTCTSADHEVVDGVLRRSRRPIATRGLNRNHNHLLKRVFKNAATGACHGGPFKAAYELRVRQGMAPSLARLTIARQLAAITLAVWKRGEQFNPERMKQQAA

SEQ ID NO: 137468 - protein, 315 aa, unidentified
MATIRQAYVGIDVSKDILDVAVLGEKKIKQVRNNRSGIGALAKVLGRRDPRLIVVEATGGYEELVVRGLHQAGLPVALVSPQRVRQYAKARGLLAKTDKLDAQNLAEYGAQIQPRKYEGKSEAGKELSGLLGRRRQLGDLLKAEKNRVWRAQGEVRRSLEVVIECLKGELKRMDKDVERLMQAEASFREQEQLLRSARSIGRVTAATLVAELPELGKLDRKEIAALVGVAPMNQDSGRRRGYRRTKGGRPEVRCVLYMATLTAIQSNPVIKPHYEQMVKRGKEKKVAITACMRKMLTILNAMVRDQQPFRASVIA

SEQ ID NO: 137469 - protein, 372 aa, unidentified
MNYNTVYVGMDVHKESFTFCAYTIDAEKGSRFQRTEADYKNVLRYLEFLRTVYGNDVNFICGYEAGCLGYTLYHQLTEHHVNCVILAPTTMLEQRSKKRIKTDKRDAEIIAKCLAQHNYSPVHIPTAADEETKEFLRMRDDHKLALKKVKQQILAFCLRHNYRYDGNSHWTAAHIKWLKSLKPEALYKEILDEYLLTYTALSDKLERLDKRIEELASKDEYKESVKKLCCFIGVKTHTALSVLVEVGDFHRFASAQNFASYLGLVPGEDSSGDGQTRLGITKAGNRHVRMLLTEASQCYARGQIGFKSKKLKSRQAGNSPQVIAYADKANERLRRRYYKMVLGKSKKPNVAKTAIARELACFMWGMMTDHVA

SEQ ID NO: 137470 - protein, 403 aa, unidentified
MEGPLISLDVSKGKSNYRFFENGTDRKGKKGVIRHDIQGFDSIRDEAEKMEERLRIKPSVIFESTGVYSDVVEKYFTDKGFDVYVISPLLSASMRKEGVRPAKNDSLDTLSIAKVFYSKDDLRKCSENDKKAERLREMSYELDMMNRRIRPMKCQFLRLLDKVWPCLDEVSDYSSRFMLDFIIAFGHPENIKTVKGVLSVIRKSEMGTAGRKDKIAQDLFDYCHTHLSAVSKDSSYVELLKRMAIELKAMAKKKSELIDRMAEEARNKDEFARLLTIPAVAKTTALKIMARVGDISRFRNAEALVAYCGLDPRVYQSGKMTGEHRAITKKGDCILRSTLFLAVKLMVMLYPDTKVARFVAAKAKNGLSYKQAVVAGSAKLARIIYSMLTHHENYVEFNADIVA

SEQ ID NO: 137471 - protein, 406 aa, unidentified
MDVVYSHVCGLDVHKKNIVACTITPEGKEIRTFGTMTDDLILLVDWLKVKECTHVAMESTGSYWKPIYNLLELEEIETLVVNAQHIKNVPGRKTDVKDAEWIAGLLRHGLLKGSFIPNREQRELRELIRYRRSLIEERAREVSRIQKVLEGANIKLSSVASNVLGKSGRAMIEAMIAGETDPEALSDLAKRKLKSKKADLKRALNGLMGPHQKLMLGAQLRHVDYLDEEIGRLDEEIKKRMLPFDEDLELLDTIPGVARRTAETILAEIGSNMNQYPSAAHLCSWAGLCPGQNESAGKRLSGKTRKGNKKLRSTLVEAAKAAARTKETYLSSQYHRISARRGANRATVAVAHSILSMVYYILKRKQPYIELGPTYYEERKRDVIIKHSIKKLESLGVSITVNTAAS

SEQ ID NO: 137472 - protein, 312 aa, unidentified
MTRAQVFVGIDVSKAQLDMALRPEGRFSASNDEAGYTQILERLRGVSPTLVVLEATGGLEIPITGILAAAGVPVVVVNPRQVRDCAKATGRLAKTDAVEAQTLAHFAAVLRPEPRPLPDEQTQALAAILARRRQLVEMLTAEKNRLSSAHKPVRTSLRTHIAWLERALSHTDRDLAHAIRESPVGREKDDLLRSVPGIGPVVTSTLLANRPELGTLTGKQIAALVGVAPLNRDSGTWRGKRTVWGGRAQVRAVLYMAALVAARFNPVIRAFYQRLCAAGKAKKVALTACMRKLLIILNAMMKHRTRWEHTTG

SEQ ID NO: 137473 - protein, 476 aa, unidentified
MEAQKQGARRPDERSWHEMNRKQRREIARRMQAEDLRLEVVHPDAAGVDIGNESHYVAVPATRDRQPVRRFGCTTAELKDMATWLKQCGILTVALQSTGVFWIPVYDILEEAGLEVYLVNARDTKNLPGRKSDVQESQWLMKLHTYGLLRNSFRPPQEVRRMRTYWRQRNDLVRSAGRQIQRIQKALTQMNLRLANVLSDVSGVTGQAIIKAILTGERDPRKLAAFRDKRVKASEEEIARGLEGNWQEDLLFMLKQEQEGYEFCQKQIAECDARLEQYLQQTPDRSQGASLPEEKRKGRLQKKAKNPQFNLRTALFRITGTDLTQIDGIDVRTAATVISEAGWDMSKWENENHFVSWLRLCPDNRISGEKVIGKGRLRTNNRLATALRMAASTLRESDTYLGAQFRRLRTRLEAPVAIKAMAAKLARLVYRMLRYGMQFVDRGAMFYDARHRQRQINSLKRKAAKLGFQIVLAPAT

SEQ ID NO: 137474 - protein, 446 aa, unidentified
MMGLSTGKYPHHQGGALIMKFKQSDGQNQRIERITTSHLVVGIDMAKETQVAQATNYRGIVLTNQHLSFKNTIQGFEKLLRWMEGLQQKHRLKNIIIGMEPTGHYWYSLANWLAQKDLNVVLVNPATTKRNKENRDNCPSKSDPKDALVIADVVSRGYYYEYIRQATHFQRLRTLMNDREFWVTNSVRMQNRIIRWLDIRFPEYASVFKDWTCPRSIATLKEFPSPLDLKGQSTSEVITGWRKYMKRAGGSTGIHKAAELLSKAVQSVGETVALNEAKQDLQRLLEEFERIDGILNEIAQEIEGLLGEIPIASQLRSVKGLGTIYIAAILSSAGDLKQYAHGRQLLRKAGLNLAESMSGKRKGQIILSKRGDSTLRKYLYLATLTLVGTNPIFKQLHENNVQVKHMSKQKSIFKLLGKLARILVGMVHSEESFTPEKTVLQYTQAA

SEQ ID NO: 137475 - protein, 377 aa, unidentified
MMGTVRCLMAIELSKKSRIVAASTPLSEKISRYSLTDCDGKGLLDLIEKIRTRVGRELKQPVEIICCYEAGYDGFWLHRLLEQHGVRNYVVDPASVQVDRRARRAKTDNIDVAQLLRSLMAYLRGDPNVWSVVRVPSVEEDDRRLHRERDRLINERLQHVNRIKGLCAVQGIYDYQPLRADRQRRLEQLRTADGRELPPRLKIEIRRELQRLELVLQMIKAIEKERNIMALGEAPSTHGSAKMVQELVKIKSIGPETATVLTGEVFYRQFNNRQQVGSYVGLTPSPFKSGRMNRDQGISKAGNPKAHTLMLELARFWVRYQPHSPLTIWFRERVGTAKGRIRRIAIVAVARKLLIALWRYLETGVVPTGAKLKVSKA

SEQ ID NO: 137476 - protein, 414 aa, unidentified
MPLTRWVGRAIGLDVHRDFLVIAICEDGKVRSAGRVPSTPEGIGMLAGSLRPSDRVALEVTGSCWEVARLLEPHVDRVVVVSPDDTGITSARAKTDRLDARALATLLWRGELEAVWMPDERCRILRRRLARREQLVRSRTRSKNEIHAVLQRRLQGKPPCSDLFGVKGRQWLAGLELPLEERETVDAGIRHIEFLDAEIAAVERLIAQQALSWPEIRRLMTVPGVNLICAASLIAAVGDPRRFITSRKLVAYLGLDPKVKQSGEAPARSGRISKRGSTSARWALVEAAWTAVLQPGPLHAFYERTKARRGHGKAIVATARKLTVLFWCMLTRGEDYAHQQPTLTNKKLRRLEITAGAPKYTRKAAGTWSTNVMMRDAERALAQQAETSYKRIVQDQLAGAPARKAGASVTLERA

SEQ ID NO: 137477 - protein, 454 aa, unidentified
MKPRRNSRRKHLTSPILEPIQPNAAGIDVGATEIYVAIPVDRDPQPVRCFLSFTDDLQTLADWLQKCGIQTVAVESTGVYWIPLFQILEARGIQVCLVNARHVKHVPGRKSDVMDCQWLQYLHSVGLLRASFRPEQAICMIRSLLRHRDGLVEMAAVHIQHMQKALTQMNLQIHHVISDITGITGMAILDAIVMGQHDPQALARLRDPRVKAPEKTIVKALVGDFRREHLFALRQSMEAYRSYKNLMAECDLEIEQYLVALDAKVDVKKKPLPAAKYPHKARGNEFRFDLRSHLYRIFGVDLTAIPGMDAITAHTILAEIGADLSKFHSAAAFASWLGLCPDNRVSGGKVLSVKTRKVASRAAAALRRAAQSLHSSKTYLGNYYRRMRTRLGAPMAITAAAHKLARIIFHLLTTRHGYDESIFAVEETRQHKRTELRLRRQAREFGLQLIPLEL

SEQ ID NO: 137478 - protein, 400 aa, unidentified
MHGDYQVFLGLDVGKDGHHAVALDPGGKRLHDAALVNTEARLRQVFDKLARHGRILVVVDQPASIGALPVAVARACGHQVAYLPGLAMRRIADLHPGSAKTDARDAYVIADAARTLPHTLRRVDVGDETLAELEVLVGFDDDLAGEATRISNRIRGLLTQIHPALERVLGPRVQHKAVLELLSRCGGPAGLRKAGRSKLLEIASKNAPRMGEHLVGQVMAALDEQTVTVPGTTAAEKILPRPAGSLRDVLQQRDQVAGEVEGILDAHPLARVLTSMPGIGVRTAARILLEVGDGTAFKTPGHLAAYAGLAPVTRRSGISIRGEHPPKGGNKQLKRAFFLAAFASLAHPPSRAYYDRKRAQGKRHNAALICLARRRCDVLFAMLRDNQPYQTRPSQHALAA

SEQ ID NO: 137479 - protein, 367 aa, unidentified
MKKISTVVAKRSKNFREQKLTIGLDLGDRSSWYCVLDEAGEVVLEQRLGTTPKAMKEVFGKMPRSRIALETGMHSPWVSRVLSELEHEVIVAHARNVRLIGESRRKDDRFDARTLARLARIDPQLLAPVQHRSAQAQAHLMVIRARAGLVRARTSLINTARGLTKSYGERLRGCSPRNMNAEKAQQLSPELQTALEPLLAAIESLSERIYEYHQQIEKIATESYPQAARLKQVKGVGTLIALTYILTLEDAQRFRKSRDVGCYVGLQPGRRNSGQSEPQLHISKEGDPYLRTLLVQGAHHILGPFGADSDLRRWGLKLAERGGKNGKKRAVIATARKLAVLLHRLWVSGEAYEPLRNSRPERLPAAA

SEQ ID NO: 137480 - protein, 485 aa, unidentified
MAERKMSTFERLQQGKLSRKQRRELGRRLHSADAGLQVVHPDAAGIDIGNKSHFVAIPPDRDTTPVREFGSWTADLHEMASWLKENGITTVALQSTGVYWIPVLEVLEQAGLEVYLVNARGTKNLPGRKTDVQECDWIRKLHTYGLLRNSFRPPEEIRSVRTIWRLRDRLVKDAGRAVQHMQKALTTMNVQLANTISDISGATGQAIIRAIVGGKRDPWQLAELRDRRIAASKEEIAHSLQGHWQEDVIFELRQAVESYDFLQKQMAACDQELIKYMAAIESRGITPKQDLPKDAAPLPCPKRARRSKTRRKNQPGFDLATELERTLGADLTRIDGIDVITAQVILSEIGPDFSAFPDENHFASWLTLAPKRDISGGKVIRHIPAAGRNRVADALRMSAESLSRSDSYLGARYRRLRARLDGPVAVKAMARYLACLVYRIVTKGQAYVDRGAAHYEKKREERERAALQLRAANLGLKLVPVALTK

SEQ ID NO: 137481 - protein, 339 aa, unidentified
MTTPTIIGLDIAKSSFQIHGVAACGRTTLRKKLRRGKVLEFFANLPACLIGMEACGGAHYWARELTKLGHEVRLMPPQYVKPYVKTNKHDAADAEGCCEAVQRPGMRFVPVKSETQQSLLMLHRIRDRLVAERTGTISAIRGHMAEFGIVAARRGLGMKELLAIISDVDDARLPSMARELLVLQVEHLRAIERRIADLDGRLLQQARNDEAARRLTAIPGVGPVIATAMVATVVDAQIFPNGRSFAAWLGLTPRQHATGGRERLLGISKRGDGYLRRQLMHGARSLVRLAPGRKGRFWTWIDGLVARRPFNVVVAAVANKLARIIWAMLGRDETYHALA

SEQ ID NO: 137482 - protein, 343 aa, unidentified
MEIAVVGIDLGKNKCSVVGLDAAGKVVTRRRMQRESVLKFTASLPPCVVAMEACCGAHHIGRIVLSQGHQVRLMSPEYVKPYVKAQKNDDRDAEGTAEAATRPTMRFVELKSQAQLDMQTLHRARDRLVGERTALINQLRAILLERGIVVAKGRRKLEMALDAMLTEPDGLQLTPRMLELVQDMRAEWRTLDQRITAFGDEFAARARTDEPARLLSTIPGIGVINATALVAAIGRGEAFERARDLPAWLGIVARQDTTGGKPRLLGITKRGNRYLRKLLIHGARAALPSLSQSNTPLGAWLRGLLARRHHNVAVVALANKLARIAWAVLRTGRPYHTNAAVSA

SEQ ID NO: 137483 - protein, 350 aa, unidentified
MLIIGCDYHPGFQQIALVDTETGELGERHLVHREQAEQFYRELKQRDGTVRVGMEASGHARWFERLLAELQFELWIGDAAEIRTKRVRKQKTDRQDAQLLLRLMMEDRFPRIWVPDAANRDMRQLLWHRHRLVQMRTRVMNQLHVVALNEGLRRKKALWRPAGRNELESLKLAPWASRRRQDLLDLLDQLTPKIQDLTRELEEEVEKRPVARRLATHPGVGPLTALAYELVIGRPERFHCGKQIASYVGLVPTEESSGDRRRLGHISKQGNALLRFLLVEAAQVTVRSLPEWRSRFFHLAMRRGRKIAKVAMARKLAVHLYWMWRKGWDYEQVRKLGSHAGEPGNRHGEQ

SEQ ID NO: 137484 - protein, 356 aa, unidentified
MAMLAELVDGVIGVDTHRDTLTAAAVTNLGGVLAQTTTSADAAGYQQLLDFADRHVVGRRLWAVEGAGSFGAGLTVALQQCGERVVEAGRPKRPASRSGAKSDALDAVRAAREALSQNRPASPRRRGEREALRALLTTRRCATLARVAGIGQLKALIVGAPEDLRAELRGQPTSRQIAYCASLRERPARSLEHRATVRALRATAQRIQLLQAEADQLQAELTVLVSAVAPWLLEVPGVGPLSAAQVLVSWSHAGRFRSEAAFAALAGTNPIPASSGQVTRYRLNRGGDRQLNRALHTILLVRLRTDPDTRAYMARRTAQGKSRRDAKRCLRRVIARQLFRLLERYDHPGVEILRTA

SEQ ID NO: 137485 - protein, 433 aa, unidentified
MLKLNYMSTLFVGIDVSSKTNAVYAMDFEENKYISSSFGNNQPGADQLVNMIAECMQKHKNLDTVLIVLESTSVYSVHISNFLSTSEVLMPYKPYVFCVNPKATSNYRKSYIGMEKTDPTDAYLIADFGRVGRTKKLEPWRGGQFISLKRLTRHRMHLSECITREKTYMVSNLYLKFSELQLLEGDDKPFGSLYGATSSAVLTEFLSPQEIIDMPEEDLLTFLAGKSRNRISDLSKTSELLRKAARDSYRLDKCMYEPLSISLASSFNCIHAYQKEIKLIEQAIEKCINGMNPNALLILQSIPGIGPIWASGILSEIGDITVFHSSDALAKYAGLYWPKGDSGDFTSEDNKMSKAGNPYLRCYLGEAANSVRKHIPEYADFYARKYAEVTKHQHKRALALTSRKLVRLVFGLLVKNQLYTGEKLDTEYNIESN

SEQ ID NO: 137486 - protein, 373 aa, unidentified
MPDVSSNQPADVRLWVSLDVHKLSIVAATLPPTGGQPEVQRIETTRVAIRRFIERLGGPEGLAVCYEAGPGGFDLLRVLTELGVACDVIAPSLIPVRAGDRVKTDRRDAKKLVRLYRAGELVYVQPPTPETEGLRDLMRCRDDLRRARTAARHRVSKQLLRHGRIYRDGKSQWTKMHRGWVARQRLDDEFAQAALEQMLIHLDGLDRQLDALDRDLEQIARTGRWAETVQILTRFRGIATRTALGLISEIGDFHRFGHPRELCAWLGIVPTEYSSGDQRHRGHITKTGNHHARRLLIEAAWSYQHRPRRPDRGPEPDARAWQAQIRLHRRYRHLTTERGKRSTVATVAVARELAGFLWAAATNQPFALEAAAA

SEQ ID NO: 137487 - protein, 263 aa, unidentified
MKESCVVGIEVSQAELVVACQPDRAPLALPYDGPGIERLIAELKQLEPNWVVMESSGGLEAALAAELHGAGLRVAVVNPRQVRKFAHSMGYLAKTDRIDARAIAQFGDSAAQHGRLYQARIPDAAEAELKALVARRHQLVELLKGESQRRLRAPSKAVRKSIVQTIKGLKKQLGEIEQQLEQAVESSPIFRGKAQQLVAVPSIGAQVSRVLIADLPELGSLTRRKISTLVGLAPLADDSGKRHGRRAIYGGRAWVRSTPASCW

SEQ ID NO: 137488 - protein, 371 aa, unidentified
MKSIIYIGMVVHKKTYSLCALLKETGEIIGETKIPADVSLIIKFIENAKKSVDSDDVQIKTGYEAGCLGYSLYWQLAAKDIECDILAPSTMHRSAKNKVVKNDRRDAKNIAANLANGTYKSVYVPTDEDVEIKEYIRMMHDFKIELKKVKQHINAFLLRFGHHYPGKSKWIPAHIKWLKELELSDMYREILDEYLSQLEILSEKIERFKHRLEELSQKETYNEKIGQLRCIKGIDTTAAMTMHAETSDFDRFPTANAFASYCGLTPGEDSSGESYHRLGITKQGNSMIRTTMVEAAQVLVRGTIGKKGKKVKSKQKDQDVKVIDYADKAVVRLQKKYHRMIFRGVKRNIAITAVARELACFVWGIETGHIS

SEQ ID NO: 137489 - protein, 383 aa, unidentified
MKSVCGLDVHKDSVYLCILSEFGELIEKVFGVLTYQLEEMRDLMLHHHVVEVSMESTSVYWIPIWRVLSPHFKQNLANPYFIKQLPGRKSDVKDAQWIAECTMKELIRGSFVPPETIQQLRQYDRRIFDLNEEIVRKLSKLDAVLQRCNIRLSNYVSNVDSKSYKAVVRAISQGITAPEELVKLIHGRIIKHHGMDVITASLKGVVSLAEIDMISQLRDELDMAEAHKEKCQARMLEICEREFPEELKRLQTIPGIKERAATSLIAEIGTDMNKFETANHLASWSGLKPRNDESNKKIKSRSITHGNVYLRKTIIECAWAASRTKDCFFSRFSYHQTQVRKKNKMKVLVAVARKMLIAVWHVLHDNTNYIDFTTDRTTSQTKG

SEQ ID NO: 137490 - protein, 388 aa, unidentified
MKVGADKSEPLTAIHTDLGAIFVSLELSRSSWLITSLSPGGGEKMSKHSVRGGDFAGLMQRFAQLQEKARLRTGQSFRIIVVQEAGLDGFWIHRALQNEGIESHVVDAASIATSRRRRRAKTDKIDGETLVRALLAYKRGEPRVCAMVKVPTPGEEDRRHLCRERKALTAERVRHVNRIKGFLFSQGISGYQPLRRDRRQRLEELQTGDGRAFPQHLKALINRELDRLELLLKQIKTVEAARDALLAVEQAAKPAPAAMLLDIRGIGPEFAAILWSEGLFRHFENRRQIAAYAGLAPTPWQSGAVDREQGVSKAGNPRLRTTLIQLAWLWLRNQPRSALSVWFHERVSRNGGRLRKTTIVALARKLLVALWKYVTAGVVIEGVTMKVA

SEQ ID NO: 137491 - protein, 340 aa, unidentified
MPVIRIGLDVAKNVFQAHGVDEQGTVVLRKQLRRREVLSFFASLPPCLIGIEACSASHYWARELTALGHQVRMMPARYVKPYVQRGKSDALDAAAICEAVSRPTMRFAAIKSVEQQSALTLHRAREILVKQETMLANLIRGCLGEFGIVAPLGIRRMAELVGIIRDEADSRIPPNARIAMTAVADQLGDLQRRIKEIEQAIRAWHRNNDASRRLATIPGVGVITASAIAATVATPTEFKSARHFAAFLGLTPKQHSTGGRQRLGRISKQGDGYIRRLLILGGTALVRYARGAGGTVWAKQLLARRPARVVTVALANKAARIIWALLVRGGVYRSAAPQAA

SEQ ID NO: 137492 - protein, 349 aa, unidentified
MKQNEVILGVDTHLDTHVGAVIGEAGRLLGTRSVSTDTAGYLDLLTWANSFGHLRRAGVEGTGTYGAALARVLRDHEIEVLEVNRPDRAMRRSKGKSDPTDAENAARAVLSGRATAIPKEQSGAAEAMRAVSVARRSAVKAKTQAINQLRALLVSAPQDIRDRLLKAKTAECVERCARVRSLGKTLMLQTLTATLRLLAKRWLTLAEELKALDTMLDGLTTQHARRLRERFGVGPQTAAVLVAVAGDNPERLKSEAALAALCGTSPLQASSGKTVRHRLNRGGDRSANNALWTIAMVRMRSDPRTRAYVERRTKEGMSNKEIHRCLKRYIVRELYPLILADLADSTASA

SEQ ID NO: 137493 - protein, 379 aa, unidentified
MFDVLKAQKRRPAMKKISTMQVFGNEIFKEQKLTIGLDLGDQWSCYCVLDEAGKIILEQKVAMTPEAMKQTFAKIPQSLIALETGTHSPWVSRLLTELGYKVIVAHAQKVQLITKSSRKDDRHDARTLARLARIDPELLGPVRHRSAQAQIHLTVIRARAELVRARTALVNAARGLVKSYGQRLPKCGTQQVSRELGAGLPAELREVLEPLLKEVESLNERIQEYEVRVEKIAKESYPHVELLKQVKGVGTQIGLAYVLTLDDPHRFPKSREVGCFLGLCPGRRDSGESQPQMNISKEGDRYLRTMLVQGAHYILGPFGEDSDLRRWGLKLAARGGKNAKKRAVVAVARKLAVLLHRLWVSGEVYEPLRNSQKAMRTAA

SEQ ID NO: 137494 - protein, 417 aa, unidentified
MNATPKTIPIERYLAIDIHKHYVMVGGQNRPREWTLRPRRVPMDRFREWAAKNFKAGDAVVVEATGSVWDIYDLVAPLVSQVVVANAHKVRQIAEARVKTDKEDIKRLITLLIADIVPEVWVPPQHVRELRSLISFRRRLNKQLTMSKNRLQSVLQRFNLQPPRGGLLADKNRSWWEQQTFTELTAFQVAHDLEIVAHLEAQKAAVDQKLAELSNTEPWASQIVYLLQIPGFGLIFSMIVLSAIGDIRRFAHPKKLVGYAGLGAGVHDSGEKHQEKSITKAGRKELRWAVVEAAWVAVRSDPYWKMHFQRLAKRMHRNQAIVAIARRLLVSVWHILTKREPYRHFNDETIAYKMLIWAWSMDETARQGLTRAQFAKYGLLRLGIGQDLERIEQGGYPRRLAPAEEVLILKPELGPPR

SEQ ID NO: 137495 - protein, 427 aa, unidentified
MSQTTSHQDSLMNQEYSAFIGIDWADQKHDIATKIAGQKHATLKTIEHSPEALSQWVNDLRRRFGSGKIAICLEQSKGALINFLISHDFITLYPINPKTLAKFREAFRPSKAKNDPTDTELILEILLKHLNQLRPWKPDSALVRTISILAEKRRNAVDQRKEISNQLKSLLKGYFPQALDLVSEDLYTELSCQFLLKWPTLQVLQKAKKNSIEKFYRTFHCYKQDVINRRLEIIEKTTALTTDSAILDTSPIELKMLVKVLQQLTSSISEYDKQLATLYPSHPYANIFSSFPGAGPVNSARLASAFGTDKDRYQKPEDIHVYSGVAPITVQSGKSHWVAARYFCPKYLRQTFIEYAGQSIKSSIWAKAFYTMQQKKGKKHHVILRALAFKWIRIMFRCWKNNKAYDELAYLKSLKKRGSEVLKHLAT

SEQ ID NO: 137496 - protein, 431 aa, unidentified
MSKQNIPTTPLPVEPYAALVGLDWADEVHALSLCAAGSTEVERATLEQTPEALADWANGLRRRFPNGKIAVAVEQARGALLAGLSQFEHLVLFPINPKSLARFREALYPSRSKNDPVDANLLLELLGKHRDHLRPWQPDTVATRQLALLTEQRRQFVDQRTALTNQLLAHLKGIFPQALQFVGDLGSRLATDFLAKWPTLQALQQLPPAKLRQFYYGHNSRAQKLIAQRLELLKQAVPLTNDPALLGAHSLAIQTLTAQLAALRPFIEQYDTDIAQLFERHPDAPIFDSLPGAGPVLAPRLLASLGTDRRRFEKAVAVSCYTGVAPVTESSGKNQYWVHVRWSCPKFLRQSWHEFANASIKFSAWAAGAYAQFRQKMDHHEAIRKLAFKWQRIVWRMWQQCRPYDEEQYLASLRKHQSKLLAAPATQPSNR

SEQ ID NO: 137497 - protein, 412 aa, unidentified
MQAIIERCCGLDVHQETVVACLLIGAPGAQPTKEVRTFRTVTRDLEALRDWLRAAAVTHVGMESTGVYWRPVYAVLEGHFELIVGNARHIRNVPGRKTDVKDSEWIADLVRHGLIAKSFVPPRPLRELRELLRYRRKLVESQAAERNRLLKLLETANIKLASVASDVFGVSGRAMLRALIEAVASAEAMADLARGQLRRKRGDLILALDGRVGEHHRFLLAMQLRRLEAIEADIAALDLRISERLEPYRVQHALLMQIPGVDWLVAAVLIAEIGVDMSVFLSVYHLAAWAGVCPGNHESAGRQKSGRARKGNIHLRTILVGAAISAAKTKGAYLKDKYHRLKARRGALRAALAIAHKILVSAYHMLAKNLPYRDLGEAYLDQIGQARTVANLKRRLERLGYRVSLEPAVQPT

SEQ ID NO: 137498 - protein, 400 aa, unidentified
MRAVFGIDVSKTSSEVAILVNGEKVHGYTILNDAIGFNRLLGDLKTVHNPEIIFEATGVYSRRLQAFLEEYSYAYTRLNPLEAKKQLDSLRVRKTDKIDAEKLAKSQLVHNRKPTYVQEEVYQHLRDLSRFYQNMTEDLVRTKNRLHKVLQVTFPELENLLSTPTGEQYWNLVMAFPCNEFVLSLSQSNLCEIIRQSTSKRISEKRIAYLTDKLVELANRSYCAVKKTSPMMEEVRYYAQELLRLSERRQVVLNDMVALAQPLPEYDILRSIPGIAETTATSIIGKLGDIRRLQSTNQINAFIGIDLRHYESGNFLAKEHITKRGNPYARKILFKCIHNIASASHTNPCHIADFYEKRKRQSTIASTKPHTIASIHRLIRTMYYLITHNKLYDYSLAQNR

SEQ ID NO: 137499 - protein, 340 aa, unidentified
MGNVTTIGLDIAKNVFQVHGVDADGAAVVRQRLTRGRMLKFFAKLPRCLIGIEACATSHFWARELVALGHDVKLMPAQYVKPYVKRGKNDAADAEAICEAVTRPTMRFVGIKSPEQQSAMMLHRVRLILNRQRTQLSNAMRAHLAEFGIAAPIGRNGIEQLLDVIADPTDERVPADARFCLEMLAAQLRIVKEQILENDRRILASARETELGRRLMEIPGVGPLLASAIVATVPDPAIFRSGRNLAAWIGLVPRQNSSGGKERLGSITKAGHQYLRQMLIVGAMAVVRYAERNGAKRPWLVQLLARRKTKVAAVALANKNARMIWAMMASGERYREPQIA

SEQ ID NO: 137500 - protein, 315 aa, unidentified
MEPTGVCVGIDVAKAHLVIAVHAQPDPWQVPNDDAAFPALIAQLQTLAPALIVLEATGGYEHAVLGALAAAGLPVVAVNPRQVRDFAKALGLLAKTDALDAHLLARFADRVRPDVRPLPSADTAELTAVLTRRRQLLDMLTAERHRLAQARPPVARDLRQHIRWLERRLTDLDDDLTRRIHRSPVWRAQEDLLRSVPGIGPIVARTLLADLPELGRLPRRQLAALVGVAPFNDDSGRHRGRRRIWGGRATVRAVLYMATLVAARRNPRIAAYYQHLLAAGKPKKLALTACMRKLLTILNVMVRTRQPWQPLTTAE

SEQ ID NO: 137501 - protein, 397 aa, unidentified
MPRYSTAFGMDVHLRSTTVCALDAETGEAVTRRFRGNPWGEVAEWMSGFPGPSLAAYESGYLGFAPQRELSGLGVDCVVAAVSRVPRSAADFSSKNDRNDAARMAKAILSHDISPVWVPSPEIEGLRDLAGAHDAATARLAAAKQRLLAFLARRGYAYGGTTPAGNPRRYWTYDFLRWLDKVRPADDGGIRALAALRSEVEAAAETRDDLLAEYRAAVAAGPPPAGGGGPRDALLAEYRAAVAAGPLSAEVEALQSIKGCGFALAAAFASEVGDFSRFRSGRQVTSYFGLAPKQRSSADSVRLGGISGAGNALVRRLAVEGSWSYVQASHQPKLMPKGSGVPLEVRMHGRKGSERLLRRREEMLARGMPQAKANAATAAELVRWLWALGAMCREATE

SEQ ID NO: 137502 - protein, 318 aa, unidentified
MLIHYIDIAKRNFVIAVSSLSKTKTETNNPKGIAHTIEYLKKHKVALVVTESTGGLEIPAAKAIRRAGIAVIIANPRQTHQFAQSQPLTKTDAKDAKMPAFFAQMTAQKEDSQTMPYQPPTEAEEVLEALVNRRNQPADMRTAEKNRLHQVHETQVGSVKQLIAHFDRLIDESDKQIDDHTRTHFDGKDQVAEQIKGIGSITTATLMAMLPELGRLSHKRIASLAGIAPHPRESGETKFKSRCFGGRSAVRKALYMATVAATRFEPLIRDFHQRPPSEGKPYKVAVTACMRKLLTISNARMRDYFAENDTAENGIRTA

SEQ ID NO: 137503 - protein, 340 aa, unidentified
MQITTIGLDIAKNVFQVHGIDAAEKVVVRKQLRRGQVLKFFAALPPCLIGMEACATAHYWARELTKLGHEVRLMPAKDVKAYVKRNKNDAVDAEASCEAVRRPTMRFVTVKSAEQQGRLMQHRTRDLLLRQQTQVTNALRAHLAELGIVAAQGREGLKQLLAIIADEKDERLPIDARASLIVLAAQLQALHTMIGSIEKRLTVQHRANEASKRLQSIHGIGVIGASAIAATVTDPKAFRSGRDFAAWIGLVPRQDSTGGKHKLGPISKQGDRYLRRILVVGAHSVLRRAKHNPQKYPWLTQLLARRPFKVVAIALANKMARIAWALLASGGHYRPRLAAA

SEQ ID NO: 137504 - protein, 457 aa, unidentified
MGNARARKVPAQVVEDEDYQLRHERVAGIDIAKAKADVCTRLPPAREGGRRASRVEASVPATAAAIVALAAQLLADRVQLVVMEATSDYWRIWYYLLEGAGLNVALVSPSQARQLAGRPKTDRLDAQWIARLAEMGLLRPSFVPPPEIRALRDLTRTRLQLVRDRTREWQRLEKLLEGILVKLSTALSSLARTKSARAILEAVADGERDPKALAALADPHVKGGRAAVEESLAGITLAGCHPMLIRLHLDHITLLDRQIAALDDEIGAALAQIPAARGIGADGVPSADPGPGAAVLPADRRLAEIPGVSPELARSIIAETGLDMTRFPTAGHLVSWAGLAPAARQSGPRNRKPKKGQGDAYLKGYCTQAATGAARTDTFLGERLRRLSRKLGGTRARCAVGRSILVIIWHLLANPEARFADLGPDWHDRKTDRDRKTRSHLRGLKDLGYEVIITPAA

SEQ ID NO: 137505 - protein, 350 aa, unidentified
MELHTIGIDLGKTVFHLVGLNQRGEVVVRKKFSRKQLLHFTANLQVKLIGMEACGGSHFLGRALREQGHEVRLMPAQYVKPYVKTNKSDYIDAEAIAEAVERPKMRFVPIKSDDQLDLQSLHRVRERWVMRRTAVINQIRGLLLERGITLRQGRRHIDAALPGILEDASAKLSGALRVLLAQLRLELDHLQMRIDEADAVINKIAGDNEACRRLVAIPGIGPVTATAIIAAIGNGAAFKKGRGFSAWLGIVPGEYTTGGKQKLLGISKRGNSYLRRLFVQGARAVLQQSAKQSSGLSAWLAQLTTRTHSNVATVALANKLARMAWAVLAKNEPYRPPMLAGAATECLACR

SEQ ID NO: 137506 - protein, 446 aa, unidentified
MSRKKRTHLRGKRGQAFADKIRGIPLDCILCVSIDIHKYFHMVMMHNALGEIVTPTFEIDIFQTGFDRLCQAVDEAVERTGTELVLTGMEPTSHYFENLARHLRHRPQPVTLINSYAVKENRNQQMMHHEKDDEIDTAAIGDLLKRGEGTPFNPAVGVYLEMQHLDRVRLSKVKIRSMLKNQVIGHLDRIFPGLVIIGETAKARYEPLFATDFWLCQTMQHLIRVCPNPRKLAAMSVQDLIDAFHDHGYAMGPKTARKIIAYAHKVLPPAPELIAIRGELLSHDLALLDEVQSHITQLEERLCTLLAQTPYHIWVRLKGLSAVQVASLAAATGDPTHYEYAGQVFRRSGLVSGRNDSGTRKRKGKGKRVTKAGDVYLRRSLIGAVSTLMLHQPVLYQYYTELKLSKPAGVARVATARRAIGILWAIQRDQRSDSLCFKKGQQDVDK

SEQ ID NO: 137507 - protein, 360 aa, unidentified
MIRQRTSVGLDVHARSVFGCALDGETGEIVERRMTPDYGEIVGWLRSLSGPVSAVYEAGPTGFGLARALTEAGIDCSVVAPSKLIRPSGDRVKTDARDARHLARLVHLGEITSVAIPSVEQEAARDLVRARDDCRGDLMSARHRVSKLLLRQGIVYYGGDTWTVKHEQWLRQQRFGAPALRWTFDAAFDAMLATVDRRDRLDAAIAELAADSSFTAVADRLQCMRGISTLTAFGLAVEIGDWHRFTGRSIGAYLGLVPTEYSSGASRSQGGLTKTGNGHVRRLLVESSWHHRKPYRPGTRLRRRWETATPAVRARSHAANRRLHTRWVRFDQRHKRPVVANAAIARELAGWCWSLAVLED

SEQ ID NO: 137508 - protein, 330 aa, unidentified
MKNYKEVVGIDVSKKTIDAYCHQAQVHKEFKNDIVGYKSLLNWVLKVSKGVLVFYCFENTGYYSLKLALYLNSQKIVYVEESPLKIKRSSGIVKEKTDRLDASLIARYGWIYREELSPSTVKSTAHLELGRLLALRDQLVRNNAGLKGTLKEMKVFLTSSTTDAGCISLKRSIDYLSKQVKAIEIRIEALIFDDVLMQKNYELLSSLKGVGFVVACQLIYHTGNFTRFDTWRSFSSYCGTAPFAHESGTSIKRRKQCHYLGDRKMKSLLSMASISAIQHDSELRIYYKRKLAEGKDKMLAINNVRNKLIARAFAVVKRGTPYVVLQNYAA

SEQ ID NO: 137509 - protein, 424 aa, unidentified
MLPGAFLILNVKEAVMDQHRLFVGIDISKFKHDVAVIDEEQHCITPGFVVGENAEGYRMLFERLDNVRRSSKAEDLFIGMEATGSYWKNLYHFLHRKTSWHVTVINPIQTRRFSQSRLRRAVTDPVDALEIACYMQERKPAPTALPAPSLQIIQDIDKQILSLVKERNADIYRLRLELGKTFPELEKQAPLMTSQRLLALLSLYPTAEVIRNTSPEELQQLTADKKGRRISAAFITGIRKLAENSIASSTGPDSGIVVQTLAVRITEIQTHICRLKKELLRVWCCHTAQPGILMTIPGIGPLTAALLEAYIGDVNRFPEYKRIVAYFGLDPRVCTSGISKRGHGNLQKKGNPRMRSILFMNVLAMIRFRVEPIYGFYQCKVAEGKPKLVAIGAAMRKLLVIIYTMMKKNEPFQPKDIKNDVKEQ

SEQ ID NO: 137510 - protein, 417 aa, unidentified
MNSAEKTRAIERYIALDIHKEYVMVGAMNSSQEWMIRPKRVEMVHFRSWAASNLRVGDAVVIETTTNVWDIYDIVAPLATRTVVAHAGAVRQIAEARVKTDTEDIKRLLRLLIADIVPEVWVPPTHVRELRGMIAYRNRLVVNGAAVRNRLHSLVHRHNLQLPKGELTDANWWDSQPLSALEKLQVRQELALLAQVEKNKAELDQELGKMSVAPTWGKQATRLLQLPGLGLIATMTILSAIGDIRRFEGPKQLVGYAGLGAGVHNSGKEHKDKGITKSGRKELRWAMVEAAWRAVRSSPIWEKRFQELAKRKGQHKAIVAIARKLLVTLWHVLTKEETDRNASEEDLAWKMLLWSWTLGSEARLGLTPKQFAKYSLLRLGVKSDLKEFMRGKVLRRIAPAEEVLACISELGLPHLDT

SEQ ID NO: 137511 - protein, 485 aa, unidentified
MAKRRMSTFERLKAGRMNRAQRRELGRRVAASDPELAIIHTNAGGIDVGNESHFVAVPPDRDENPVREFGCWTRALNEMAEWLTSCRIDTVAVQATGVYWIALYDVLEQHGIRVVLVNAQHTKNVPGRKTDVQECQWLMKLHTYGLMRDSFRLQQDMEYVRTIWRVRDRHVKDAGREVQHMQKALTKMNVQLANVISDISGLSGQAIISAILRGERDPYALADLVNYRVKASREEVARSLEGNWRADVLFELQQAVDSYHFAHGQMQECDDKLTLYLASLPARTLEIPAPSITAETVVQKRKKARKPRDNEPRMDLRAELKRICGVDLTSIDGVNVMTAFTVISEVGTDMSRFEDEDHFASWMGLAPSKDISSGKVVGRGKKKVKNRVAVVLRTAATSLLESDTHLGARYRHLRRQLPTFKAAVKAMARYLAVLIHRLLTHGQAWIDQGAAQFERKRLNRELANLHSRAKAQGFALVPIAENPLH

SEQ ID NO: 137512 - protein, 421 aa, unidentified
MKFKAQDKQNQLIENITSNHLVVGVDIAQEIHVARAVNFRGIALGNPLEFSNDEVGFRSLNRWIRDLLASYKLSQVIVGMEPTGHYWLNLAHWLKDTKIEAVLVNPHLVKKNKENRDNTRSKSDKKDALVIADMVKNGYYSPVRFHSTEYEELRVLMANRETVVKRLVSTVNQIHRWVDIVFPELRQVFKILTCKGALVTLRLFPVPADLCKLEPTDVIAGWKTSMKRHSGARRAKLLIDLAKKTVGSTQATHAYKLHLEHLLEEYDLANIQMQRIEAEVKTVLERIPYAGKILAITGISAIALAGVLGESGDLSGYIHGNTLLRHAGLNLTEASSGKWKGQMTLSKRGRPRLRHFLYLITMCMVMTNKEFKALHQHNVQVKKLKRMKSIMKLCGKLARILVGLARSNQAYKPEKVFVLAA

SEQ ID NO: 137513 - protein, 356 aa, unidentified
MQKNTKLDFTGQEIYVGLDTGKKSWKVCILTEGLEHKAFSQPPQPGLLVGYLRKHFPGAKYQCVYEAGYFGFWIHDALKKQGVNCVVTHPADVPTKDKERRNRNDQVDARKLARSLRNQELTSLYVPTRSALEDRSLIRARMDMVRKQTRCKNQIKAFLSFYGYPIPDGLVESHWSRRFIDWLEDISFEGDSGKQSLETLLGELKHLRQSIAHLTRQVRTLARQESYRTQVELLCSIPGISTLSAMVLLTEIVDINRFKNLDQLASYVGLVPGEDSSGEQERTTGISHRRNSHLRNTLIECSWVAVREDPALLMAFSKLSKRMPKTRAIVRIARKLLNRIRYVLKHQETYETCVVM

SEQ ID NO: 137514 - protein, 420 aa, unidentified
MEDLTEEPAELTERVAALDIAKASLVCCVRVPHESRPGARRQEVRTYATTTPELLELRDWLTCQGVTRVVMEATSAYWKPPFYLLEDDIECWVVNARDVRNVPGRPKTDKIDAVWLAKLAERGMLRPSFIPARPQRQLRDLTRYRRTLVHERIREKQRAEKLLEDAQVKLSSVISDIFGASGRDMLAALIAGQRDPYALAALARGTMRAKTSVLRRALTGHFTGHHAFLLAMMLARIDALTAQISALTTRIERAIAPCARQAARLDEIPGIGVTAAQDIIAEIGTDMSRFPTPGHLVSWAKFAPKARQSAGRSKAAATGKGNPWLGGTLGEAAAAAARTSTFLASRYKRIARRRGKQRALVAVGNSILTIAWHLLADPDAHFTDLGPDWHDRLAPQRRKRQLISELERLSGKKVTLHDAA

SEQ ID NO: 137515 - protein, 353 aa, unidentified
MNKLCKAKSDGNVCKKSMFVGMDVHKNYLQVAVLDEKGKVLDNSRVDNDLTKLNEFFDSLHPNSKTKVVMESSGMWYNIYECLNKRHLDVRLSNPAKTRAIASAKIKTDKLDAVKLADLLRGGYVAECYVPNKRIMGLRDIVRHRAALVRMRTKLKNKVRCITVMKGIDDASNVERTGTFTRRHMDKLEEYDDYRINGCLRVIKSLNDEINTVSKKILLLAKEDELAKLLMTIPGIGYYSALLIVSEIGEINRFPDSYHLCSYAGLVPSTHSSGGVTHYGSSITKAGSRYLRWIMLECVHAHIRTEKNSNIAQFYYRIAKKKGNSKAAVAAAAKLLKVVYWIMKERRTYARLG

SEQ ID NO: 137516 - protein, 419 aa, unidentified
MAFKILRRNCCGLDVHKTWIFACIGITDANGRTEYKQARFSSFSNGLRELAGWLTKHSCADVCMESTGKYWIPVFNILEKTCWVALAHPKHTKPQKGNKTDRKDAKWICDLYMCGMVKPSFIPPADIRQLRDLMRYRTKLTNMLTSEKNRALNCLTVSNLKLDDVFSNVFGKSSRSIVQHILEHPGEQFDVAPFLDRRCKHSVEDVQDAVDGAISREQAAKLRECLLHIDQLNGHRETIETEILRLAQPYSHQLELLRTVPGFSAAPLTAVALISEIGVDMSVFPSAKHLASWAGCCPCNDQSNNNVKSTRISRAGCYLKPLLVQIANAVIKSDKYPECKERYRRIKARRGHKKAIIAICRMLLTAIWNVLSKLEPYSAKGYLEDKLTEHSVVISKSQGLELLRKRGYIFKDEVSADSG

SEQ ID NO: 137517 - protein, 371 aa, unidentified
MKKKILYVGLDVHKKSIDVALANGRANGKVRSYGKIDGSLDALDKLIGKLQSKDCVLEFVYEAGPCGYPIYRHLESKGHKCCVVAPSMIPKRSGDRIKTDRRDAINLVRLYRAGELSCIYVPSQEDEAMRDLVRSRDDFKRFERKARQRLLAFLLRHGLEFAGKKNWTKTHMNWLAGLKLSHRSQQIVLQEYVDAVKDCTQRVERTTEQIRQLVPDWSRADLVKAYQALRGVSLIVAVTVVAEIGDMGRFKNPKELMAYLGLVPSEHSSGSRLRRGSITKTGNSHVRRVLTEAAWTYRMRARKTTTILKRHQGLPKSICEISWKAQTRLCTRYQRLFAKGKSKQTIITAIARELSAFIWAIDKELQQKTTT

SEQ ID NO: 137518 - protein, 344 aa, unidentified
MTSNDYIGLDIHKKTISFCAKAQDGTILDQGTIVARRDTLLAWAKARPRPWIGAMEATLFTGWIYDLLKPLAQELKVAHPAMLKAITAAKKKNDQVDARTIADLLRCNLLPECYMAPSAIRDLRRVLRYRNLVVRQATRMKNRIAGLLMETGTPYNKERLHGRAYFSELLGGLREVPRSVVELLQLSRGQLEFFATIQRRLLKGLCQNPDLSERVARLQTIPGVGEIMALSWALEVGEVKRLPSIAQAASYCGLTSAQHNSAGKEQRGPISKQRNKHLQTILIEAAKLAPRHNPQLAVVHERELQRGDRNQATLAVARKLVAYLMAVDKSGKPFAMRASGEEVA

SEQ ID NO: 137519 - protein, 355 aa, unidentified
MIIIGVDFHPEFQQMASVDTDTGEFQEKRLAHPEEAEKFYRALAASGQKVRVGMEASGHARWFERLLGELQFELWIGDAAEIHSKRARKQKTDRQDAELILKLMLKDDFPRIWVPSWENRDLRQLLWHRHRMVQTRTRIMNQLQAVALNEGLRCKKRLWRAGGRQQLESFRLAPWASRRRHDLLELLDQLNPTIAELSQAIEREAENHPEARRLMTHPGVGALTALAFVLIIGNAERFRCGKQVASYLGLVPLEKSSGNRRRLGHITKQGSSMLRFLLVEAAQVTVRSLPEWRSHYFGLVMRRGRKTAKVAMARRLAIRLYWMWREGRDYEQRRGSVRTQDSPEQAMVCSRTPSN

SEQ ID NO: 137520 - protein, 310 aa, unidentified
MSISPVCVGIDVSKAHLDIFDPLEGSSRIDNTTSAVTVFAATQLVRGRFVVFEATGGYDRALRRGLEAAGVPHARVNPEQARDFARALGRRAKTDAIDARMLADFGRALTPNPRPPSDLARESLALRHKRRDQLVAMRQQEVVRRSECPDAAMADSLARHIAWLDREIEALNADIRAAIAADDALRAADRRLRSVPGVGPVAAATMLALMPELGQRSPKAIAALVGLAPFNNDSGKRHGQRMIRGGRARVRRALYMAALSAANSKTRLGDFARKLRAAGKPPKLVLIALARKIIVILNAICRDNASFACQ

SEQ ID NO: 137521 - protein, 324 aa, unidentified
MILGIDISKAYFDVTLLTRAGAKQHRQFTNDEPGIAALLTWLKRQGVAELHACMEATNLYWEAVAEQLHEQGYTVSVVNPARIKGFAQSQLRRNKTDKQDSEVIADFCAALKPAAWQPPSPLQRKLRALERHREALQKTLTQQKNRLASSKDPDVIRSLQKVINLLQQEIEQLDQQITDQIESQEDLATQKALLLSIQGIGERTAHKLMTELYDLAHYASAHAAAADAGVTPAHHESGTSVRRTPKLSKVGKASVRTILYWPAISAIRYNPVVRALAERLRARHKPNKLIIAAAMRKLLHLAYGVLKNQKPFDPNYASATPVPT

SEQ ID NO: 137522 - protein, 410 aa, unidentified
MAEGAVAGVDWAKDAHEVLVADGEGERLWGQTVAHDEAGIARLCQTLVTLGVIRVAVERPDGLLIERLLDAGLTVLAIHPNMVAATRDRFRAAGGKSDQFDAFVLCELARTDSHRFRALSPDSDQTKALRALTRGREVLVEQRVALCNQLRAELERFWPGAAQIFNDLDSPISLAFLERYPSPIDAHRLGEKTLARFLARHHYCGRKHPGELLAKLRAAPAGRAGELEADARRGLVLALVAALRPIVEQIRQLTSEIGHALHAHPDGAIFASFFKSPDSVICAATLLAEIGDDRARYPTAEHLATDAGMSPVAVESGRKKVACFRRGCDHRLRDATSTLADATRHWHPWAQDHYLRARGRGHDHPRAIRTVGRARTRVLWRCWQDGLAYDPARHHALQKHTEIAIPNLRG

SEQ ID NO: 137523 - protein, 471 aa, unidentified
MKQRVFVGIDLGGKFHEVQVTAAGGERLGKSFRIGRGRAGLAELEQGLRRVGGTDAEPVYTIEATQNFWLELVHPLKRSGAAVYLVSPSKSTALRTFYRRHTKNDAIDAESMSRLPLVDIHLRPARVSEPRWDMLRRLVRQSWLVKGQMANRKRRIMTRVLMVYPGYEEVFRDRYCGASLLFCRRYLDPAKARRLGRRRLSTLLCKRAWGKFDETRAGRLWRVIENAPELALSYDDLQLLVNQDLDLLGAEERSQQALKERIAELYGELDPETRLTSVPGLGDFLAAAITAFIGEPGRFRSADEVVALSGLCPRLKSSAGTDTANQPITQHGDPVLRGCAYLAAEIARHYDPELQAFHRRLTARGKHYKQASCALGAKILRRCFALLREGRAYEVAHREQLTRHQTEEGKTVRASVHEVAERLNDGGGPSSLESQAYAPGPGGSRSDRTPRASASGEGRREPLCGKGAESA

SEQ ID NO: 137524 - protein, 338 aa, unidentified
MPTDQTGQTYALFVGVDIAAQTAMVATQRPGAKASRSLTIEQTPEGYTSLLRQLQATGFVPCQVLVVMEATGSYWMSLATRLVHEGFAVSVINPAQAHHFAKALLKRAKTDAIDAQTLAQLAMILQPEPWTPPPQIYYALQQRLAQRDDLLNLRQQVRNQLHALVQHPEVIAEVRARMESLLATFESQLTEVESEITAALSQDSAWAAAATRLQSIKGVGWVTAAWTLVTTLNLTSCDTVDALTAYAGLAPMPRQSGSSVWHRPSIGHTGNGRLRTAFYMATLSAAQHNPVIKAFYTRLREVGKPEKVARCAAARKLLHIAWAVVKKDQPFDPNYALG

SEQ ID NO: 137525 - protein, 403 aa, unidentified
MRMFVGLDWASAEHAVCVVDERGGVRAQFTAVHSATGLAGLVAQLQRFGEPATLPIALERPTGLLVDTLVDAGFPVYPVHPNVVKASRARYRAAASKSDPHDAYVLADLLRTDGHRLRPLRPQRDATCALRALVRGRDDLVATRLALANQLRALLESFWPGAAAIFADVASPIALAFLARYPTPQSATRLGPKRLAAFLAQYAYCGRRAPAELLARLQQAPAGRAAAAEATAKGEVVRALVAALMPLVAELQRLTAAVEHAVATHPDGPLVMAFPRAGRVNAAQILAELGDDRARFTSDDHLAAEAGVAPVTYRSGKQHGVGFRWACNKRLRQAVVCFADNSRHSSPWAAAVYTRARARGCDHPHAVRILARAWLRVLWRCWRDRVPYDPAKHRAAKQMLDAA

SEQ ID NO: 137526 - protein, 401 aa, unidentified
MPELWAGTDAGKAEHHCVVIDADGQRRLSRRVANDETTLLTLMGDVLALSGGEPVTWAIDLNAGGAALLIAVLTDNGQQVLYIPGRTVHHVSGSYRGDGKTDAKDAFVIADQARMRRDLQPMHHGDDIAVDLRISTARRLDLAADRTRAINRLRARMLEYFPALERAFDYKTSKASLVLLTGHQTPAALRRIGRNRLAAWLKNRRVRNSQLVAATAVQAAEAQHTAVAGEKLAATVVSKLAREVTALDEEIAETDALIESRFRDHPHAEVILSMPGLGPVLGAEFIAYTGGDMSIFGSPDRLAGVAGLAPVPKDSGRISGNMRRPRRYCRRLMRVFYMSAQVAAQHCPVSKAFYERKRAEKKTHKQAVIALARRRLNVLWALLRDGRLFESSPPTHAASPA

SEQ ID NO: 137527 - protein, 343 aa, unidentified
MQMVTTIGLDIAKSVFQVHGVDAGGQVVIRRQLKRRSVLAFFQKLPSCLVGIEACASSHHWSRELQALGHTVRLMPPAYVKPYVKRQKNDMADAEAICEAVTRANMRFVLTKTPEQQSCLMLHRTRHLFIRQQTAVINSIRAHLAEFGIVAPVGRKGVTELLHIVADPSDKRVSEVARACLAALGSQLLSLKQQIVEFDRMILAWHRSNQTSKRLHYIPGVGPMLATALVASVADPSTFRSARNFSAWIGLVPKQHSSGGKDRLGSISKQGDRYLRSLFVAGALAVIRYAKIHGTGHRPWLTALLARKPTKVAAIALANKIARMAWAMMAKGERYKEPIALAR

SEQ ID NO: 137528 - protein, 317 aa, unidentified
MTAPEIFVGIDISKKRLDVAVTPGEQTFICPNTETGIRKLVCRLKELNPQIILLEATGGYEFLLIAALREAELPACFINPKLVRNFARGAGIAAKTDRLDAQVLALYACRMRPQPRILPSQQQQELKLLLTRRRQLLEMIQMENNRLDPAPLPRIAQSIQQTIQLLEAQLAALNREIDDFFRLHPLWLGLERTLTSVLGVGHLSALILIAYLPELGRLNRKEIAALAGVAPYNRDSGQWRGQRHIEGGRRLLRHGLYMATLVATRFNPVIRACYQRLLAKGKAKKVALIACMRKLLIILNAMVRKQQLWCPAAPLNT

SEQ ID NO: 137529 - protein, 340 aa, unidentified
MGQNCEAVVGMDIGKERSYLKAIETKSQKVISEGFVENTPVSLRNFFNEVPGTVRVVMEATGNFGYLHDLMEDWVDDIQVAHPLMVKAIAAAKIKTDKIDAGILAKLGAGDLVPEAYCPPREVRDQREVLRHRAFLVAMQTRIKNRIHGSLWKLGIHPPEVTDLFGTAGREWLNGLTPRKPHDEILKEDLRLLDALKEEIRGATRGIEKMAKTDERVDWLTPIRGMGVYSALLTLAEIGEIDRFNDPKKLVAYAGLCPSTYQSGRILKHGAITKQGSKWLRWVMVECCQRYAKVPGRLGDFYRRMAKRSGSRTARVATARALLTGIYHCLKRREPFREKG

SEQ ID NO: 137530 - protein, 408 aa, unidentified
MAVIWIGCDGATPDATGGVSLAAEAAALRPRPTDTVRYSTLLAIGTLARRVAYRNQSLQPTNDRSNIMGWVVGLDVHKDTIAAAALNPTGETVAEASFINTCAGHAELHEWISANSAGARCGLEASGGVGHGAAAFLQRSGLEVVLVPSRLSAREANRNRQRGKSDPGDALAIARVVQREPRLPGFNHGGPHEDLRLFGDYREQLHSERTRTTNRLHADLAIAYPGYQRGIGKALTSRRSLNKATALIADDHSVRADLCRQRLGRLHDIDLELKQIETQLETLVEASGSTLTTIVGISTIVAARLIGETGDPRRFPTSSAFAAGNGTAPIGRVVGKERTAPTQPRRQPSRQPRALHRRDHPDPPRAARRRLPRSPTRSRQDTTRSTPLSQTEAFRRHLPHHARRRRPT

SEQ ID NO: 137531 - protein, 405 aa, unidentified
MEVIYERCCGIDVHKNMVMACIFVKGKKEIRKFGTFTEELEELITWIREKACEVVAMESTGVYWKPVYNLLEEAGVKAIVVNAQHIKGVPGRKTDVKDAEWIADLVRHGLVKESYIPNRAQRELREMTRYRQDLIEEKAREINRIQKVLEGANIKLASVISDVSGKTGISILKAIINGTTDAETLSQLAVGRTIKKIPLLQKALKGSAGEHQRQMLKHQIRHIEFLICEIERIDEEVQKKTKYAEKEIELLDTMPGIGRRSAERIIAETGIDMNQFKSAAQFASWAGLVPECNKSAGKKKSVKIRKGNKTLKTTLVECACSAIRDKNGFFHARYKKISARRGGKRALIAIAHSMLLSIYAMLRDKQAYRDLGSNYFYEIDKHKIMTKNIKSLQKLGYSVTLNQTA

SEQ ID NO: 137532 - protein, 424 aa, unidentified
MATRLRFVESNGIFGPQPIKQFRAENMNLNIGIDIAKNVHEVCFVDENGKQIGNFMKLKNSRKSLEKFRNKIESISKELNAKPRIGIEATGIYWYSLYSELSKYYEIQVYNPSQISGFRSVNIRVSHNDKIDSRTIANMLRFGEAPKTDYSDKQILEMREYCRFQFKLTTIKTNLKKRFRRNLHLIFPGYDMVFKNVFTKTSRGILTEFPTPDDILEMGTEKLRELMKELSRNHINPDKASELIEIARDTIPSEIIKESALFELQMLLDLIETLEKQIEEVEFKILIIWNSVKDRYYTQTITGIGVIRVATICAEIGNFENFTHPDKILAFAGLDPKVTQSGNKEIVGGPNKRGSKMLRWALGWAVEEAKRTNPVIGSCFQKKLDEGKHYNTARCATAKKLVRIIWSVENNKKPFQIPPNYLSS

SEQ ID NO: 137533 - protein, 338 aa, unidentified
MKAYAGIDLHSTNNFIGIMDEQGHRLFSKRLVNDPDRVIEALNPYKKDLAGIIIESTYNWYWLVDALEAQGYRVHLANPSAIKQYEGLKYTDDQWDSFWLAEMKRLKILPEGYIYPKEQRPTRDLLRRRILFVKHRTAQTLSLKSMITRNLGITLGGKVVQRLKNSDAADMFTSQDLYLTAKHHISAINSLGKIIKEIEKEVKSKVELKEEFKMLLTTPGIGDVLGLTIMLEVGDITRFPKVGNYSSYCRCVGTKRMSNNKKKGVGNRKNGNRYLSWAYAEAATFAIRFCPAAQKYHQRKKAKTNGFVATKALSNKIARATYYMMRDQIPFDVKKLFS

SEQ ID NO: 137534 - protein, 433 aa, unidentified
MKVMYERVAGIDVHKDMIKVAIRSPGDKPWTRKTEILEYRTFYGVLQEMARELRRRGVTHVVMEASGVYTEPVYYALCEQDFTEVAVINPVHAKALKGHKTDAKDCARLAELFECGLLRGSYIPPAEQKEVRDLTRYRIKTVQARTSEIQRLAKALESAGIKLGSVASEITGKASTAMIEALIDGERRGGVLADLAIGRMRSAGKLADLSMALTGRFTGHHATLCRLHLDRIKVLDDAVDGLDDRIAAGAARWQREAGLLKSVPGFGDVVTCAWLAEIGPAPHKWFSRHEKLASWVSLCPGNNISARKRKHGRTGDAGTYIKPMLIQAAWSAIRVRGRLQARYNRLVRRFGGQKNPAAKKKAITAIAHTLLKIAYQVLKSGTPYQDLGADFYTRRNSREEQQKYLERQLQRLHPGCTITITISPPEAALPPGE

SEQ ID NO: 137535 - protein, 352 aa, unidentified
MSELSVGCDAHKHYSQVEVQDRKGQVLRRARLNHAPGALRAFFSCLPQGTPVALESVGNWYWIADEIEGSGCQPLLTNPAKAKLLMGHVNKTDKLDANGLATLLRLGSLPSVWLPPAELRDQRELPRTRMALCTWRTSIKNRIQSVLAKYALTPDDGERLFSQKGRSWLDEARERLPSETSNCLGEQLQLLDALSQHIGKLESRIREQIALTPRMQLLKSLPGVGDILAIVIEREVGSIERFPGPQQFSSYCGTTPRVSSSGGKTHYGRMRTQSNQYLKWAFIEAANVVSAHHAQQGWATRHCARLYLRVRARKGGSVAIGAVARHLAESAFWVLKKNETYKDPEKVSPKQV

SEQ ID NO: 137536 - protein, 344 aa, unidentified
MNQIIRIGMDTSKHIFQLHGVDAAEQVGLRRKLRRHQMLEFFAKLPPTVIGIEACGAAHYWARELRKLGHEVKLMAPQHVKAYVKRNKNDGRDAEGLCEAMSRPTMQFVPVKTEEQQAVLMLAGVRQQLIARRTQISNAIRGYAAEFGLIAVKGLDKIEALLARIGQDQTVPAMARELFALHGRDYARLQVEMKAIEAKLMAWHRANATSRRLAQIPGVGPIGATALVIKAPDPRLFRSGRHFAAWIGLTPKDHSTAGKTRLGKITRAGDEMLRSVLVAGATAVVKQAKHGRGSPWLLALLKRKAPKHAAVALANKIARIAWKLMVTGESYDGARTLGASAIAA

SEQ ID NO: 137537 - protein, 451 aa, unidentified
MGKQRRKVAVLEPDAAGIDIGAEEIYVAVPPDRDLESTRKFGTFTRDLNALAEWLGLCRIRTVAMESTGVYWIPLFQILEERGFTVYLVNAHYLKSVPGRKSDVSDCQWIQYLHSVGLLRTSFRPPDHICAVRALWRHRASLLQMAAEHTMHVQKALSQMNLQIHHVLSDITGTSGLAILDAIVTGERDPVALAKRCHARVRSPRETVAKALEGDYRPEHLFTLRQSLDGYRFHQKLIVDLDCEIASLMQTLPSATQKAAVPTTRTKPTAYRRQGNDPSFGLRGELYRIAGVDLTDIPGISTVTAQVIVTEVGPDVTRFRHASAFASWLGLCPEKRVSGGKVLSCRTRRVAHRAATALRLGAHSLSRAEGYFGDFFRRMRSKLGTASAITATAHKIARVIYHVLLTKEPYNETVFYQCEEQSRQRAQLRLHRYAQQLGFQLVPIASQSSND

SEQ ID NO: 137538 - protein, 313 aa, unidentified
MSQNNTSIIYAGLDIHKATLQLHLLGRDDELPNTPAGHRKLLALLKVHPNPHVVCEASGGYERQIVAALHVANVPVSVLNPAQARHFARALGQRAKTDPLDARLLSLCGDALRPGPTPPCSPQQRQLVELVRYRQQLMEKWIAERQQADLIEHPALRRQSLALVRRMESDIAKVDALLIKLREESSELAAKAQRLTSVIGVGDQTAFSLLAEMPELGTLNRRQAASLAGLAPHPRQSGQWVGKSSIGGGRHQVRRALYMAALCASRLHPALSAFYKRLRANGKPGKVALTAVMRKLLVLLNLALKNPDFPLAA

SEQ ID NO: 137539 - protein, 320 aa, unidentified
MHVVADRSAAPAAIRTDLGAIFVSLELSKSTWLITSLSPGNGEKMSKHAVCGGDITGLLARFAQLQDKAQVRTGRHFALVVIQEAGLDGFWIHRILEAEGIESHVVDAASIATSRRRRRAKTDKIDGEALVRALLAYKRGEPRVCAMVRVPSIKEEDHRRIGRERKVLVGERTCHVNRIKGLLFAQGITGYEPLRRDRRHRLEELRTGDGRVLPEHLKGQNRRELDRLDLGDSPDQRGAGRARRSAGKRNRRDSAATLLDLKGIGPEGAAILYAEGLFRHFDNRRQIAAYAGLAPTLGRADRSSTSKASRRPATPGCERR

SEQ ID NO: 137540 - protein, 351 aa, unidentified
MTCKKDVAVVRTIGIDTGKNTLHMIGLNEKGAIVLREKVSRDRIAARLVNLPPCLIGIEAGMATHYMSRDLLALGHEVKQVPPAYAKPFRQGHKNDFRDAHAVAEAVQRPSTRCVPIKTDDQLDLQALHRVRSRLIGDRTAVINQVRGFLLEHGIAVRQGPRSLRQQLPQILATRTDVLSPRMLRIIGDIVGDWRYLDDRIERVTDEIEGLARTDVNCGQLISVPGIGPIIASATVAAVGNGTAFAKGRDFAAWLGLVPKQMSTGDRTILGRITKRGNRYLRMLFVQGARAILLRPKSWAKYSFGPWLTAAARRLHRNVLTIALANKLARIALTVLVQGRSYESRIVPAAA

SEQ ID NO: 137541 - protein, 355 aa, unidentified
MTSAKYIGMDVHKESISIAVRNAAGKVVMECVIETKASMILQFFDGLRGDLHVTFEEGTWAAWLYDLLKPHVTKLVVCDPRRNALLQDSNQNDRVDARKLSDLLYMNKLNAVYHGDHGLRTLKELGRSYLTITRDQSRVMSRIKAIYRSWAIPCSGKQVYGSRHRAEWLGKIGEPGVRRRAELYYQQLDALRTLRQEVRRDLLAESKKHKVWKRLCAIPSIGPIRAAELLGILQTPHRFRTKRQLWTYCGLGVVTSSSADHEVANGQLRRKKKHVEIRGLNENCNHDLKNLFKGAAVVASIKPGPLAEFYAVLVAKGMRPEMARLTLARKIATIVLIVWKRGVCFDAHHLKPQTA

SEQ ID NO: 137542 - protein, 403 aa, unidentified
MNAVGIDVSKGKSMVTILRPFGEIVSSPFEIKHTSSDIHSLIKLIHSIEGESRVVMEHTGRYYEALAHQLSAADLFVSAVNPKLVKDFNNDSLRKIKSDKADPVKIARYALDKWQSLEPYSITDELRAQLKVMNRQFHFYVKQKTAMKNNLIGLIDQTYPNANTYFNSPTRSDGSQKWVDFVSTYWHVDCIRKMSLNAFVEHYQNWCKRKKYAFNKSKAEEIYTKTKELVPVFPKNEITKHIIRQAIDQLNSTSVTVETIRTLMNETASKLPEYSIVMQFKGIGPSLGPQLMAEIGDVTRFTHKGALTAFAGVDPGVNESGSYAQKSVPTSKRGSSNLRKTLFQVMDVLIKTMPQDDPVYQFMDRKRTQGKPYYVYMTAGANKFLRIYYGRVKEYLSVLPDPS

SEQ ID NO: 137543 - protein, 337 aa, unidentified
MNYSGIDLHSNNSVVSVIDETDRVVAEKRLPNDMAKILAFLAPWRAGLAGVVVESTYNWYWLVDGLQAAGFVVHLANTTAIKKYDGLKHSGDETDARYLAHLLRLGILPTGTILPAKPREVRDLARKRMQLVRSRTSHILAVENTTARQSGTRITSNQVKQLDEAAVDKLHLPADVALAVRANVAVITTLSAQIAIVEKRLQEKVAPLADYALLTTVPGIGQTLATVIVLETGTIERFATAGNFASYARCVDSQRMSNGKKKGEGNTRNGNPYLCWAFIEAANFAMHFSAEARQFYERKKARTNSVIARKALAHKLARACFHMLKERKPFDVTRCFA

SEQ ID NO: 137544 - protein, 353 aa, unidentified
MKCDKYMGMDVHQAMTVVAVMEAEGKVILETMVPTEASAIIRLLQSLSGPLHVTFEETTQAEWLCDVVRFFVADVVVCDPRHNKLLGEGSKADKIDARKLADLLRTGMMRRVYHGHEGHRKLKQLMRGYETLSIDTRRTMVRIKAIYRGRGIRTPGRNVYQPKQREQWLQLLTEPGLRERVGWLFEELDHLKPLRRQAKQAMLTESRKYQAVKLLRTIPQLGPIRAALIAATIDTPYRFRTRHQLWSYSGLAVVTHMSSEYEMKDGRVVRSRKPIATRGLNRNCNRRMKEVFIGAAAAAGHTAMYRDYLEALEKRGVRKEMARLTLARKIAAVALTIWKKGEAFDPKKLNWTT

SEQ ID NO: 137545 - protein, 331 aa, unidentified
MNFNLFIGIDVSKSTLDVHLKPIGCYKAFSNDPHGFIAMVEWIMDQAGKFCHKELVFGLEHTGLYSENLILFLDQHDFAFTVIPGLELKRSLGIRRGKSDKADARTIAEYIYEKREKIKLYKLPSQTLDRLKKLASLRERMVKERAAYQVRMEEYLEQFPDSTFETYLQTQQELIHCFNSQIERVEKDIERLIKEDSSLSDQYKLINSIKGVGPQTAIMMIILTNGFSSFDNWRKFASYAGIAPFPNQSGTFNGRTKTNKLANKRIKSLLTMCASTAIQFNPEMRKYYENRVQLGKNKMSTLNIIRNKLLARIFAVITRNTPYVEIHKYAA

SEQ ID NO: 137546 - protein, 386 aa, unidentified
MIYVGIDIAKETHVAAAVNADGVVLIEPFAFQNDHEGFKLLKSKLDTLKGNILIGLESTAHYAENVIFFLHSQHYNLAVINPVQTAAMRKTGIRKTKTDKVDSLLICKTLACNSFRPYTDTDVKTLQLKSLCRFRQNLKKSKARLKIQLTSYVDTLFPELQYFFKSGLHIKTCYELLKSYPSPDDIAALHLSKLSNFLSKASRGRFEKQDAKSLKSLAKSSVGVKNTYISIQITQTIAQIELIESQIDELESIIENAMDELDSVIMSVPGIGKINGAMILGEIGDIKRFSHPSKLLAYAGLDPVINQSGKFNAKHTKMSKRGSKMLRYALINAAWNVSLNNDTFKAYYDSKIAQGNSHYSALGHTAHKLVRVLFKLLNDNVEFALV

SEQ ID NO: 137547 - protein, 349 aa, unidentified
MTLVGCDLHTRQQQVAVLDTETGEMDERQLSHTGDAVEQFYRALPGPVTVGIESTGYALWFHELMQRLGHTLLVGEAAKIRAMVVRKTKTDRRDALHLLDLLKHERFPLVWIPDPATRDLRALVTHRMRLVRMRTMVKNGLHAIAMNRRLTLGPSLWSQRGLAQLQGLALAPHTTQRRDESLQLLTWLTARIEALDDRVAAAAQADPGARLLLTHPGVGPLTALTTVVVLGPVARFPDSKHVVSYTGLAPAVHASADTCRLGQITKQGSPLLRFVLGQAGLIAAHAEVDLKRHYRTLLRRRGRPKAIVAIARKLLVRLYIMLRDQIDYEEFRRRGRTPRGQEVPPPAFA

SEQ ID NO: 137548 - protein, 413 aa, unidentified
MKLFVGIDVSSQKLDVCFLDSDGVVLKESALSNSLFDAYNIKKDVLAFHKQHHYQNIVIGMESTSVYSQHPATLFHEDDELKALGVVDVVFLNPFPIKQYTRIFDEDKTDRIDALRIAEFLGMGKYKTSIIREEKFVALQRLTRSRLQLVSQLTECKMHFLENLYYKCNTLVKELKEDSKSSVFGASLMDILTDSLSLDEIASMKLEDLAALLQDKGRGRFKDPENLAKTIQRAIRNSYRLGDMMQDSVNTVLAMYAEMIKSLKKQLKILDQSIERLIVTIPEADCLRSIPGIGPVYAAGIIAEIGQIDRFDDDTKIAKYAGLYWKKKQSGNYESQRTPLTRTGNRYLRYYLIEAANSVKMREPVYKDYYYKKYAEVPKHQHKRALVLTARKLVRLVDTLLRNRQLYAPERSG

SEQ ID NO: 137549 - protein, 344 aa, unidentified
MTKYAALDVSMEQTAICVVDENGRKVAEGKVPTDPDAISDWLTGKGGEIERIGMETGPLAVWLWNELTKRGLSIVCLDARHANAALSMMPNKTDRHDAAGLAQIVRTGWFKEVRIKSHGAYVARALLSARDLLVGVRGKIENEIRGLLKTFGVMFGKKVGGFARRAEEIVSGELVAAPEIKAIVETMMEARRSIIERIKVLDARVRAAAKQNAMARLFMTAPGVGAVIALSVASTYDDASRFRRSSSAGAYLGLTPRRYESGEVSRNGRVSKRGDKLTRTHLYEAANVILTRQVGFSSLKAWGLRIAKGAGFKKAKVAVARKLAVILHAMWKTKEPFRYAAAAA

SEQ ID NO: 137550 - protein, 358 aa, unidentified
MNAGPVKRRLMTKTQTQLTIGIDLGDRRHAVCVIDKNGQILLEETLANTRACLEQLSQRYPAATLAMETGTHSPWISRLFEARGHRVYVANARKLRAISQSLTKSDEQDARMLARLCRADPTLLSPVKHRSESCQRDLVQLKARESLVRARVDLMNSTRFLLKSLGLTVPSQVKATAFVRKLRPLLDPASTALVEPLLQSIDALSAQIKTLEDQLETLAEKKYPATERLRQIPGVGPITALCFILTIETPERFARNRDIGPYLGLVPRRDQSGHTDKPLPITKAGNTHLRCLLVNCAHYILGPFGPPSALREAGLRIAAHGGPPAKKRAVIATARKLAVTLLALWRTKADYQALPCAA

SEQ ID NO: 137551 - protein, 343 aa, unidentified
MTQYVGLDVSLKDTAIAIRQGGKRIWRGKCCSDPATIARTIRKHAPDPEKVVFETGPLATWFFHSLSAEGLPAICIEARHAQKILGETLNKTDANDAEGLARLAETGFYKAVRVKSFGAMRIRTLVAARAQLLGITTQLSNQIRGIMKTFGLIVPKSKGRVFLSRVQDLLQGQSQLAQIILPLVEVWQAVRARVSELSRQLLAAARHGRNTRLLMTIPGIGAITAVSFVAAVEDPRNFRNSRSLGAWLGLTPRRYQSGAVDLDGHISRRGDHRLRGLLYEAATALLARTRADTTSDLKVWGLQLRERLGFKRAAIAVARKLSVIMHTMLKTGQPFIPTREGFA

SEQ ID NO: 137552 - protein, 347 aa, unidentified
MTQAQIYIYGIDLGKNWFHLVAMDRMGHVLTKQKLTRSQLKQFISTTPPCRVAFEACPGSQYWGRLFQQAGFEPKIIPAQFVKPYLKSNKNDFNDATAIAEAGSRGTMRCVPLKSHEQLALQATHRVRQRFIVERTATVNQMRALLLEYGLTVPVGRKVFERSLPTILEDAENGLPDFIRALVLRLRERWQQLDIHIDDMSLMLGQASSASSLCQKISTVPGIGPIVSTALIAAIGNGSQFKKARDLSAWLGLVPRQYSTGGKSSLGGISKRGNSYLRQMVIQGAKALKIHMKRDKSSLGEWVARLEAGHHHHVVLIALANKIMRICWKVLTSGRDYQPYPNASAAV

SEQ ID NO: 137553 - protein, 315 aa, unidentified
MTTKSETYVGIDVSKDRLDLAVLEEKRIEQYTNTERGIKELVDEMKALKPALIVVEVTGGYERAVVKALFEAGLRVARVSGYRARQYARAKGLLAKTDPLDAMNLADYGKHVQPRVYEAKSEEGQYLAGKLARRRQLGEMVQAEKNRLRLAYGDIGPSIERVIKFLQGELKQLDEEIRAYLDANPVWLEQEQLLRSMKAVGPVTAATLLAELPELGKLDGKQIASLVGLAPINQDSGKRSRYRKTGKGRPSVRNVLYMAALTGLRYNPVIKKQYDGLVLRGKVKKVALTACMRKLLTILNAMVRDQKPFGYAATS

SEQ ID NO: 137554 - protein, 415 aa, unidentified
MALKIVYKICCGIDVHKTFVVACVASTSDKGITSYESHRFSTYTSGLKTLLQWLIDRNCKDVCMESTSKYWIPVYNVLENDCSIVLAHPKYVKAIRGKKTDKKDAKWIADLFKHDLVAGSFMPPADIRQLRDLMRYRFKLTCFKSSEKNRLQNCLTVSNIQLGNVVSDTFGKSAQAILDTLLENPADTSFDLEPLVYKSLKKKLPELRDAIDGFITPEQAGKLKIIKDHYDNLESRKAELEELILALAAPYQQELTILQTAPGISSNFTAIGIISEIGTNMEAFPSAKHVCSWAGLTPTNNESAGKKKSVRVSKAGCYIKPLLVQCANAVVKSTKHPEMRNRYLRLKKRRGHKKAIITIARMLLTALYHMLKNGENYNPELYQKTDLPPVDREIIIEQALMLIRNQGYKIKSATT

SEQ ID NO: 137555 - protein, 385 aa, unidentified
MTILVGIDVAKDKHDCFFMNSEGEVLAKPFTILNNKEGFNFLYEKIQSVSSSDNIKVGLEATGHYSYNIIGFLLNKGLATFILNPLHTNLYRKSLSLRKTKTDKIDSKTIAMMLLSDVSLKSYSDISYHNEDLKSLTRYRFSKVEERAKLKTSLSRLAQILFPELEKLVPTLHMTSIYQLLEEFPSASAIASVHLTRLTNLLSKASKGHYDRETAIKIRDAAKNSIGSNMPAKSLELKHTIKLIRALTIDIGEIEAEISKMMDMIASPITTIPGIGRNIGAMIISEIGDFSRFSSPDKILAYAGFSPSIYQSGKLDNCYAHMEKRGSRYLRYALFHAAKLVCHWDKTFADYLAKKRAEGKHYYVAISLSLVGSEMCIRDRLYLMP

SEQ ID NO: 137556 - protein, 355 aa, unidentified
MRGSPEAPRAVKPASERGAPRIDPLIPNSRRGRERASPIRQGRDKMEITVGIDVSKARLDVHVAPSGESFAVGNDEAGVAALVARLGQLDGLLGIGIEASGRYERLAVAELAAAALPVMVLNPAQVRSYAQAIGFKAKTDPIDARLIALFVAAVRPEPRPLPDIQTQELAALMARRRQLVEMLAAERARRMKAQPGRVRASLARVVTTLEDELKALDADIDRTVRGTPVWRDNENLLASVPGIGPIIARTMLAELPELGTLNPKQIAALAGLAPFTRQSGKWRGRSFIAGGRPTVRTALFMGALVAARHNPTLKAFNDRLLANGKPKLVALIATARKLLTILNAIIRDQKPWQPA

SEQ ID NO: 137557 - protein, 348 aa, unidentified
MEVTTEYYAGIDVSLESASLCVVDATGRIMREAKVASEPEVLIGWFRDLGFAVTRIGLEAGPLSQWLYAGMRSAGLAVELLETRHVRNAFKAMPVKTDRKDARGIAQLMRLGWFRPVHCKSLPAQEVRALLTARKLLQSKNHDVEMSLRGVLRGFGLKVGPTTPRTFAIRVRELVAGHPTLSTIAEALLAARGTLFERWQKLEKRLRSLAREDGRVRLLMSAPGVGPIVALTYAAAIGDPGRFRSSRAAGAHFGSTPKKYQSGETDVTGRISKIGDGGVRTALYEAANIILTRPVKGSTLKNWGMRLAARAGMRKPKVALARKLAVVLHRMLADGTNFLAEKAAVAAR

SEQ ID NO: 137558 - protein, 345 aa, unidentified
MKITTVGIDLAKNVFQMHGVDERGRAVLRKQLRREQVSIFFANLPPCLIGLEACASAHHWGRTLQGFGHTVRLMAPQFVKPYVKTNKNDVTDAEAICEAVARPNMRFVPIKSIEQQAILSVHRVRQGFVKARTAQANQIRGLVGEFGLIIPQGIGHIGKRVPQLLEDASNELPGTFRQLIDRLTRHLKELDLQVKEFERQIIDWHRGSELSRRLEKIPGIGPLAASALVASIADANSFKNGRQVSAWLGLVPRQHSSGGKATLLGISKRGDAYLRTLLIHGARSAIRVAQLKPRNTNIWLAKLLNRRHQNIAAVALANKNARTVWAMMAHGREFKADYISRVATV

SEQ ID NO: 137559 - protein, 301 aa, unidentified
MDLPVYYELETNNGNRDYRIQIGGHYMNYNTVYVGMDVHKESFTLCSCKYEDEKASHYQRTPASYKNVLRYLAFLRTIYGEYTRFVCGYEAGCLGYSLYHQLENFNVECVILAPTTMLEQRSKRRIKTDKRDAEIIARSLAQHNYSPVHIPTETDNQTKEFIRMRDDHKAELKKIKQQILSFCLRQGYQYDGSGNWTAKHVKWLRSLKPTGLYKEILDEYLLTYTILTDKLNRLDQRIEELASKEEYKESVSKLTCFLGIKTHTALSVIVEVGDFQRFVSARKFAGYLGLVPGQHSSGDDR

SEQ ID NO: 137560 - protein, 501 aa, unidentified
MGRMIIGVDPHKASVTIEVVDQHGTLAATGRFPTARGGYQALIRYVRQWPTRVWAVEGTGGAGRPLALRLVRDGERVLDVPAKLAARVRVFDTGQGRKSDETDAHSIAAVAVHTRGLRELSAEDEDLEVMRLLAGRRDELARLRVQIVNRLHRLLTELIPGGANKRDLSSAQARRMLTGVRPRDVAGATRRRLAVDLIGDLETVDAKLKALTAELRIAVRRNGSTLMDLYGIGPAGAARLLVDVAGVARFPSKNHFASWNGTAPLDASSGEQIRHRLSRAGDRRINHVLHIMAIVQLRHDTPGRAYYRRKLAAGKTPMEALRALKRRLSDVVYRQLVADARTTPQPVGAPDDPVTGQAGPAGHAGATTDSSADDLATPMAVSSDKSLPGPATNHATPDHPATGLPAALLRRALAGAGPGLPLIAPARARRGSAVQGGPKGRRPGDPRQRALDGGGAGPYQRGAGDPRAAAPDEAGGEAATDQALNPTPAGRPRTGSDNALT

SEQ ID NO: 137561 - protein, 329 aa, unidentified
MFQVHGVDANEKVVVRKQLRRGQVLAFFAALAPCLIGMEACATAHYWARELTKLGHKVRLMPAKDVKAYVKRNKNDAADAEAICEAVRRPTMRFVQIKSAEQQGQLMQHRTRDLLMRQRTQLINALRAHLAELGIVAAQGREGIQELLAIVADHKDQRIPIDARASLMLLAAQLQAVQTVIGLIEKRIMAQHRSNEASKRLETIPGIGVIGATAIAATVADPSVFRSGRDFAAWIGLVPRQDSTGGKQKLGPISKQGDQYLRRILVVGAHAVLRRAKQNPEKYPWLTQLLARRPFKLVAVALANKMARTAWALLAHGGTYRAPELAATA

SEQ ID NO: 137562 - protein, 409 aa, unidentified
MERQLERCGGLDVHKETVAACVRVGGRTGQAEQHVQTFGTTVGDLLVLRDWLAAHGVTHVAMESTGVYWKPVFYALESDFTCLLVNAAHIKQVPGRKTDVKDCVWIAQLLEHGLLRGSFVPPAPIRDLRDLTRYRKALIHDRTRVANRLHKALEEAGMKLASVASDILGVSGRAMLAALVQGTTDPAVLADLARGRLRGKLPALRQALASRFRPHHAFVIGQLLAHLDYLEEAITTLSAEIERVMAPWAEPLRRLDTIPGINQRTAEVILAEVGADMSVFPSARHLASWAALCPGHHESGGKHKSGKTRKGNRWLRTALIEAAAGASRAKHSALQARFRRVLRLRGPKKAVVAVAHALLRMVYHVLADGTVYHEVGADYYDRHHRQRVTRRALQTLERQGYRVTLEPAA

SEQ ID NO: 137563 - protein, 351 aa, unidentified
MSEIITVGLDLAKNVFQAHGADASGRAVLRKKLRRHQVLEFFGRLPSCVVAMEACGGAHFWGREIGKLGHDVRLIPPAYVKPFVKRQKNDAADAEAICEAAQRPTMRFVPVKSEETQGAAMVFRVRELLIRQRTQKINALRGHLGEFGQIVPQGAANASKLIAIVEDPDCELPADAIPTLKVLVGALVQLEAEIGKLDTEITRRARENDVARRLMTVPGIGPLIATAIATLAPPPENFRKARDFAATCWKHAFSVTLGLTPRQHSTGGKQRLGATTKMGERSLRRLLIIGANSVIIKRHTHAEARQGTWLGGMLTRKPPMLVRVALANKMARIVWALMARGGVYQSPAAAV

SEQ ID NO: 137564 - protein, 317 aa, unidentified
MSAPAASFVGIDVSKQQLEIAVRPSGETWTVAHDEAGVNALVGRLRDLTPTLLVLEATGGWEVAVAGALAAAALPVAVVNPRQVRDFARSTGTLAKTDRLDAQMLAQFAEAVRPEPRPLPDAQAQELTALLQRRRQLVEMLTAEKNRLPLAARRIRPQLQAHIAWLHKQIAQFDEDLRQLLRASPLWREKDDLLRSTPGVGPVLATTLVAALPELGTLSRRQIAALVGVAPLNRDSGTLRGRRTVWGGRAQVRAVLYMSTVVAVRHNPVLIAFYQRLRAAGKAPKLALTACMRKLLTILNAMLKHHTRWAPVLAQHV

SEQ ID NO: 137565 - protein, 342 aa, unidentified
MLYVGIDVAKNKHDVTALNVPGKTVLKPLTFSNNKAGFELLDLSLRQLNQDCLIALENTGHYAFNLLNFLHEQGYKVYTCNPLLIKEFAKSLSLRKTKTDKKDAHGIALKLLSDPNREQFQHNNRQVELKILTRHIHRLKKKQSDWKVQYTRCLDIIFPELDKIVGKHSEYTYQLLTRYPNPQKRIEAGFDKLIEIKRLTASKIQDILSVAPRSIGTTSPAREFEIIEIIKHYKRLIDKAETCVNDLMAEFNSVITTVTGIGGRLGAVILAEIRNIHAFDNPAQLQAFAGLDSSIYQSGQIDLAGRMIKRGSPHLRWALIQAAKACARFSPAFKAYLKTKLE

SEQ ID NO: 137566 - protein, 394 aa, unidentified
MKLVGIDVGKNSHHFCVMDKETGELNVTPSSFPNNKEGFDFLINSLKPYSKKSILLGMEDTGHYHIALLKFLLSNGYTVALINPKTTDLTRKMEGGITKNDKLDTITICNVLDTPERKKQYRITKVDRFDLYEQRQLTRHHHNLKEELNLYCNRLQKSIDLVFPEFNTLFSSKYGVVYMNLLKTFGSAEAIASTDIRTIRKCFEIKGRGGRISLTAEKLKECAKNSIGISSEVETIQIKHLVSQITLIKEQIAEIDKKIEEFSITNNSPILSIPGISHFSGTSILAELGDIGNYSKPSQIIKFAGVAPYHYESSQYNAQHTAITKKGSKYLRKTLYQIILPVINNNPVFKKYYRLKISQGKGHRCAQGHCIRKLLRIIYHLLETGQSFDPALLR

SEQ ID NO: 137567 - protein, 341 aa, unidentified
MNAATHTLGIDIAKRNFEVNLRSLEPGPSRHSSGFPNSPKGFGALHRWLIQHGITQAANLHACLESTSRYGDALAAWLRSHGYQVSMVNPRRTRHYADSQLSRTVTDQIDARLIADFCVEQRHKLVLWEPLSSDHRQLQDLTRTRTALVEHRDALANLLETATGLVRKAVQRQRVNLQREIERFDREIKKLLDQQPDSKLSTQVALADSVPGVGLLTAATVVAELPCIDKISRASQAIALFGLDPKSKTSGETVKTPARISKMGSKRGRRALYMPALVALRYNPLIRALGQRLKAKGRSGNYIVVAAMRKLLRQIFGVLKNGKPFDPNWSKSYAEQLQEVV

SEQ ID NO: 137568 - protein, 391 aa, unidentified
MIYIGIDVAKDKHDCFITNSEGEVLFNAFTIPNNADGFHDLFQKISSLTNDFSNVKVGLEATGHYNYNLLGFLIDKGLPTFVINPLHTNLFRKSLSLRQTKTDKVDAHTIALMMMSGVNLQSYSNTSYHNEELKSLTRYRFDKVQERAKLKTSISRLVNILFPELEKLVPSLHMVSIYALLAEFPSSAQIASCHLTRLTNLLANASKGHYNKEKAIEIRNAAKHSIGSNMPAKSLELKHTIRLIQELTSEIDEIECSIKSIMDEIRSPILSIPGINYRMGAMIIAEIGDFNRFSSPDKILAYAGLSPSTYQSGQLDGCYSHMAKRGSRYLRYALFNATKFVCIWDNQFSAYLAKKRSEGKHYNVAISHAAKKLVRVIYQLEKSGQLYHRAA

SEQ ID NO: 137569 - protein, 377 aa, unidentified
MKRILKIGMDVHSTNYTLCAMEPVFGAADRIYATIQVSPDYKNILLFIEKVKQKLDPNDTYDIECGYEAGCLGYSLYNQLTSAGVKCVILAPTTMLTQQGNRIKTDTRDALMIAQCLSYGGYQPVYIPTEDDDSVKEYLRMRDDHKIALKKVKQQINAFCLRHGYHYPQGKWTQMHLDWLTAIKLPPLYQETLDEYMATYFELTDKIEKYDTRIDEIAAQEKYADKVKKLGCFIGVKTHVALSLIVETGDFYRFAKGNAYAAYLGLAPGEHSSSDKINRLGITKAGNSNLRRLLVEAAWGICKGNIGYKSKDLKKRQQGNSVQVISYADRANSRMRSKYYRLIRHGKKKNIAIAAIARELACFVWGMMTDNIEERVA

SEQ ID NO: 137570 - protein, 372 aa, unidentified
MSANDAVDGSTAGIAMCHGGFQPPIGEPPNMEVTTIGLDLAKNVFQVHGVDNEGAVVIRRQLRRSQLLPFFRKLPPCLIGIEACATAHHWARQLIGLGHRVKLMPPHYVKAYVKRNKNDAADAAAICEAVTRPTMRFVAIKGREQQSILMVHRTRELLIRQRTMLVNAIRAHMAEYGIVAPVGIPRVKELFAVIADGDDERLPAIARACLEGLARQFMSLHEEIAVAERRIHAWHRSNQASRRLETIPGIGPIIASALTASISDPEVFKNGRALAAWIGLVPRQNSTGGKQRMGRISKQGDQYLRWLLVAGAMSVIRHGRKTNFEKNPWLGELVYQKPAKVAAVALANKIARTAWAVLVTGDPYRQPVPAKA

SEQ ID NO: 137571 - protein, 349 aa, unidentified
MVVVGADVHKRTHTFVAVDEVGRKLGEKVVAATTTGHHKALRWAGKQFGAELLWGIEDCRPLSARLERDLLSAGQKVVRVAPKLMAQARASARTRGKSDPIDALAVARAVLREPDLPVASHDPVSRELKLLVDRREDLVAQRTSTINRLRMRIHELDPAHAPALGSLHRANPRRMLADWLATQPGLLAELARDELADIDRLTHAIDALAGRIGEKIAPAAPTLLTLHGCGDLTAAKLIGETAGVARFKSEPAFARHAGVAPIPVWSGNTAGRVRMTRSGNRQLNAALHRIAITQIRLKGSAGHTYYRKRIDAGDSSKEALRCLKRRLATTVFTRLKADYRPDDAWQPAA

SEQ ID NO: 137572 - protein, 392 aa, unidentified
MTTPATCNVPESTTAGTLFVAFELSEKTWKLGFTTGHGQKPRERTVTARHQERVLEEIAHAKRRLGLPDTAPVVSGYEAGREGFWLHRFLQGHGITNQVVDSSAIEVNRRRRRAKSDGLDVRKLLSMLMRYAQGERQVWQVVKVPSVEAEDQRHLHRDLETLKQERASTTNRIKGLLSSQGIRVTSLRNLPEQLEALRLWDGSPIPPGLRRRVLRVYAHHTFLSEQIAAVEAERRAQLQASTDANIDKVRQLMQLKGIGINGAWLVVRAFFGWRAFKNRREVGGVAGFTPTPYQSGESAREQGITKSGNRHVRWMTTELAWSWLRFQPDSALSVWFRERFGGGGKRLRRIGIVAVARQLLIALWRFLETGVFPVGAELKGQAGHDGLCTSAD

SEQ ID NO: 137573 - protein, 341 aa, unidentified
MDKELYIGVDVSKKTLDLAYYDGETIDWKNAHIKVSNDDAGFKKIGSWVAKVGKDFDTFLLCMEYTGLYNQNFRLWLESKEYIYGMVEPRKMHRFEPDLDDDQRSLDRIKTDELDAFRIAIYCEQNHKKILRNPSKLPSPVYFKLKRLLAERKQNTKQSVLYKQQLHDICAYDTNLSVERKKLLLKNMKENQKAIDREIDSYMDEDASISKNYDLLTSIPGIGRIIALETIVLTENFTAISNPRKYACYIGIAPFKKESGTSVRKRTAVSKKGFSEAKADLSIAVLSAIKNNPSIRDYWIRKRKEKCGGIVLNAIKFKLVLRMFAVIKRGTPYVETDAYKN

SEQ ID NO: 137574 - protein, 338 aa, unidentified
MGQYVGIDLHRRSTTIHWMTEDGETLGVQKILSQPFELAQAIADAGPEPEVVLESTYGWYWAADVLQECGAHVHLAHALGNNWGNRRVKNDKHDAADLALLLRIGRLSEGWIAPPEIRELRELVRYRHSLSSHRTSAKAQIHGVMAKNGILPVVAELWGPIGQAQLDGLELPEAYALRLRSLRELLAHIEREITKVDAQLHHRLKPDPGYQALVRLPGVGKVLGAVFVAEIGNISRFESAKKLCSWAGLTPKHRESDEVVHHGSITKQGSRLVRWAAIEAVGNYRAKGNEKLRADYRRIAERRGKYKARVAVARKLVTLVFYALRDGQVRCLDTASAT

SEQ ID NO: 137575 - protein, 347 aa, unidentified
MELHTLGVDLGKTVFHAVGLNQRGEVVVRKKFSRVQLLNFTANLNVALIGMEACGGAHFLGRALREQGHEVRLIPAQYVKPYVKTNKNDYIDAEAIAEAVGRPTMRFVPIKSDDQLDLQSLHRIRERWVMRRTAAVNQIRSLLLERGVTIRKGRKYVNQLLPTILEDADLKLSAALRTLLAQLKVELDQLADRISEVDAVIERTAGENNACKRMTAIPGIGPITATAIVAAIGNGLAFGKGRDFAAWTGLVPREHSTGGKQRLLGISKRGNPYLRRLFVQGARAVLQKWTKQSPGLHRWLEDLTSRTHPNVAAIALANKLARMAWAVLAKGEQYRPPALATVAADAC

SEQ ID NO: 137576 - protein, 322 aa, unidentified
MQGQNSPERSAQGVYVGVDVCKDWLDVYLHPLGQAFRVSNAPEGLKALKRRIGAVRIELIVMEATGKFHRQAHRTLHAAGFAVAIVNPLRARLFAEVVGQLAKTDRLDARVLALMGQTLEPSALAPAPEALEALQELARARAAAIADQTALSNRRGASQTAFLRAELGRRLKTLAGHIERLDAEIERRIGADLTLKRRYEILLSIPGVGPVAAVALVIGLPELGACSAKAATLLAGLAPLACDSGEKAGERHIKGGRAFVRTGIYLAALAAARFNPQLSDDYKRLRGAGKKAKVAITAIMRKLVVLANVLIKEDRPWKPILA

SEQ ID NO: 137577 - protein, 355 aa, unidentified
MDSKKYIGMDVHQATISVAVRDSAGKLVMESILETKANTILEFIRGLGGSLWVTFEEGTSAAWLYDLLKPHVAHVVVCDPRKNALLKAGNKNDRVDPRKLTDLLRAGLLSPVYHGECGVRTLQELARSYLTVTKDLTRVMNRLKALYRSWAIACAGEKVYAPRHRSAWLEKLLQAGVRRRAEQLYQQLDNLVQIRREARQELLRESRKHPASQFLSQIPRLGPVRVALLIALLQTPHRFRTKRQLWAYCGLALQTRSSGEYRFTGGQLQRSQRLPAIRGLNVNHNHDLKNLFKSAATQASGSSDPWADFYQNLLARGMKPAMARLTLARKMAAIVLRIWKKGERFDPEPLKRKSA

SEQ ID NO: 137578 - protein, 404 aa, unidentified
MYNAVGIDVSKGKSTVAVLQPGGTVIRKPFDVSHTSQNLNELADYLSSLDGTTKIVMECTGRYHEPMVKALSEAGLFVSIVNPHLIKNFGNNSLRKVKSDPADARKIARYTLDNWTELRQYSGMDNTRTQLKTLNSQFSFFMKQKVAAKANLIALLDNTYPGVNKLFDSPTREDGSEKWVDYAYSFWHADCVRKIGLKAFTERYKSFCKKHHYIFQQDKPEKLFNASKELVAVFPKEKTYKLLIQQSIQQSNLASEHVERLRREMNELASTLPEYSTVMGIYGVGITYGPQLIAEIGDVSRFTHREALTAFAGVDPGVDESGQHKSKSNRASKVGSARLRKTLFQIMTTLLQNAPEADPVYRFLDKKRSQGKPYYVYMTAGANKFLRIYYGKVKECLRNLEQTE

SEQ ID NO: 137579 - protein, 360 aa, unidentified
MNYVGIDIHKKYSVLCAQDERGGRLLEARIEGHCREDFARFFGALEGPSKAVLEACWNWGLTHDLLEEIEEVEEVVLAHPWKTRLIADAQIKTDRLDAFALGTLLRGNLVARAHVPRPETRARKNLLRQRLYWSRLRTMLRNRIHALLDRQHGLELPQCSDLFGARGLGFLRQLELPEPDGTLLQEALALHDLIAQQMKAQEKRIAAEFKLDSSYERLLSLPGVGPTLGAVLAAEIDQIERFPSADKLCGYAGVVPTTHSSGGKVHHGRLLPYCNKWLRWALIEASWVAIGCSPYFGSLYRQQRARGKKANPAITIVARRMCRILYQLLAQKRSFEKRPPRVQFSDVPGCSALALTAVSP

SEQ ID NO: 137580 - protein, 369 aa, unidentified
MAKYIIAGGDVHEESVLVKWAVDNGEAHRRSFDASGNGRKAMIKFLKAEAQEAGADRIAFAYEACCFGFGLYDDLTEAGIKCHVLAPSRIARSPKHIRAKTDEKDAAKILEILRSHLLAAGEMYDVWVPDQETRQDRMVVRRRLEVGEKRSRVRTQIKMLLKGADIARPQSLGEGWTRRYVSWLRGLCEAGGRLGMGEAISLDSLIREMEWLDSEVAKLDQDLAALSGGARYAAPVREMMKLRGVGLLTGMVYLAEMGDLSRFPNRRTVAAYLGLVPSSDESGEKSDRKGHLTKQGSRRIRKVLCQAAWSRSRSEPDEKAAHARIMRRNPKKGKIALVALMRRLAVRMWHDGLKAQREAGCYARQMQPA

SEQ ID NO: 137581 - protein, 327 aa, unidentified
MVYLGIDVSKAKLDCALLAPATGKRKNKVVSNDKAGFETLLAWLAKQDISVGEVHGVMEATGVYHEQAALWLTDAGMRVSVVNPTQVRDFARGLAVRTKTDGMDSVVLARYGTLIQPEAWEAPPLEIRELKALIARLEALETDARRELNRREKALVAKAPALVRESLDNHIASLSKEIARLQQAIDDHIDRHPRLKADRDRLLSIPAVGDKTANRMLTVLRSRKFTRAEQVAAFLGLVPVECRSGSSINKRPRLARNGDAKTRAVLYMAAIVATKYNPHVKALYARLCAKGKAKMAALGAAMRKLVHLCFGVIKHQTSYQPDWAGSR

SEQ ID NO: 137582 - protein, 449 aa, unidentified
MSRPQVIDDQEHERVHERVAAIDVAKDTGMVCTRTPHPARPGARRATVWTVKARMGAVRALGRQLKQDGIEIVTLESTSDYWRIWLFVLEACGLAVQLIHAAQAKNLPGRPKTDKLDAMWLARLTELGLLRASFVPPKAIRDLRDYTRARTRLVQERTRCWQRLEKLLEAALVKVSSVASKLTTVSAQDMIKAMIAGQRDPEVLAALARGRMKAKHDDLVQALDGMFDDHHGELAGLLLDQIAFLDARIAQLTARAAELTAAMPAAWGVDPDGTTGPGAGTGPDAPVLPAVARLAEIPGVSETLARAVIAETGLDMTRFPTAAHLVSWAGVCPSARQSGPRSRPGKKGQGDTWLRGALGQAAVGASRTATFLGERYSRIVRRRGKAKAQVAVARSILVIIWHLLKNPEARFTDLGYGYYQARTDTDRKLRNHIRQIQALGFEVTLAKTP

SEQ ID NO: 137583 - protein, 473 aa, unidentified
MAKRKKSTFERLQSETWNRQQRRNLAQQLSSADPGLEVVHADAAGIDVGGASHYVAVPPDRDAKPVREFGSWTDDLRKLAAGLNSCGIRTVAMQSTGVYWIALYEVLEAAGLEVYVVNARGTKNLPGRKSDVQECQWLMKLHTYGLLRNSFQPPEQIRAVRNLWRLRDRWVEECGRAIQQMQKALTRMNVQLANTISDISGVTGMAIIRAIVGGQRNPWELAQLRDRRIAASPEEIARSLEGNWREDLLFELKQVVKAYDFYQARMSECDVEIAKYMALLPTHEVAEGNKEAEPELKAGTRRKNHPAFNLRSELKRILGVDVTCLDGIHVMTGQVLLSEVGPDWSAFPTENHFAAWLELSPRREVSGGKVIRHVKPDGRNRLANVLRMAAQSLCRSDSYLGARYRSLRGRLGGPRANKAMARYLACLLYRLLTKGQAYLDRGAQHYEDRRRERERIMLERKALHCGFRLVPVK

SEQ ID NO: 137584 - protein, 356 aa, unidentified
MQNKSTKNLDFTGHNVYVGLDVHAKSWAVNIIVDEIVHRQFTQPPDATALYDYLVSHFPGANYYSAYECGFCGYHHHRKLLELGIQNIVINAADLPITNKERINKKDPVDSRRLSQALKNDQIHGIFVFSPEHEQLRSLFRMRWRAAKEHRRIKNRIRSFLHYYGITPPAELKPDYWPLAFIHWLEHLTLPSEPGTLSLKYLLNAYQNTREQLLEVTRELRKQIKASHNKTYLQLQTVPGVGPLTAMCLIAEIGDITRFKSCKQLTSYVGLVPRSHQSGEKDPSGSLTYRSNKYLRSSIVEAAWVAMRHDPALLKYYKERISKYKPQIAIIKIAHKLLNRIRYVWLNQDVYQQGIA

SEQ ID NO: 137585 - protein, 297 aa, unidentified
MDELHIIGVDLAKHDFQVHGSDKSGRVLFRKKLYRPQFSKFLTEVPVCIIAMEACSTAHHWGREAQALGFKVLLVPPLYVKPFVKRHKNDEVDAEAIVEAALRPSMSFVAVKTKKQQAQAVIFRTRDLYLHQRTQLINALRGHLSEYGVLLPSSRASVARMVSALGEHSDELPVPVRAMAKCLADYIEATTKQIDTTLKKVAVASPEAKRLHTMPGVGPITAVAIKAFCPNLKTFKPGRGFAAWLGLGPRQVSTEGKERFGPVTKMGQRDNRRLLVTGAMSVISAATKKGVATIRGL

SEQ ID NO: 137586 - protein, 346 aa, unidentified
MTIVEAARGITGGIDTHGEVHVAAALDDVGGLLGTESFDATPEGYAALLSWLAGFGRVGTVGVEGTGSYGAGLARFLARSGVEVIEVDRHNRQARRRQGKSDPIDAVEAARAALSGRAHGKAKSRDGSVEAIRVLVVAKRSARQARVKALTQMRQLTFTAPDQLQCKIKGLPTPQFIAAAKGLRPTRSSDPVTAATKAALSSLAHRIGELDEEVDQLDAQITPLLQAHAPALLAVYGVGIDTAATLLMTAGDNPERLQSEAAWAHLCGVSPLQASSGKVTRHRLNRGGDRQANRALWIIVISRLASDPETQAYMERRVKDGRTKREVIRMLKRYVAREVYRQLPRG

SEQ ID NO: 137587 - protein, 460 aa, unidentified
MNPKRSKSRNGGKMPMVHPNAAAIDVGATMHMAAVRADRAPEPVRSFGTFTVDLHRLVDWFTECGVETVVMESTSVYWIPIFELLDARGFTVFLVNARDAKHVPGRKTDVSDAQWLQRLHSFGLLRASFRPKGQIAELRAYVRQRERLLEYAASHIQHMQKALTEMNLQLHHVVTDITGATGLRIVRAILAGERDPEALACLRHYSCHSSAETIAKALTGSYRAEHLFALEQALALYDAYQEKAFACDARIEAVLKKLSIHRGHGHGSAPRASRRRNRTDQANALAFDVREALFALLGKDITTIDGLGPYLSLKLIAECGDDLSSWPSAKHFTSWLGLAPSNKVSGGKMLSSRTRRSGGRAAALLRLAAVTVGRTDTALGAFYRRLSARIGKAKAVTATARKIAVLFYNAVRYGMDYVDPGASSYETRYRTRVVNNLRRRAKAFGFVLQPSEPKVGAAVS

SEQ ID NO: 137588 - protein, 345 aa, unidentified
MIHVGADLHHRFCYMTALDASGRELSARAVPNRSAELRCYFEQFRGPVQVAVEACSFWPAFREAVGEGAEVHLVHRQRVKAIAAAKLKNDRIDSGILAHLLRCDLLPKAWMADAETQALRQQVRLRASLVRQRTRSKNQVHALLHQQGLRFEGSDVFGNRGREWLATVEMPKGTRSAMKVHLKLIDEFSRQVAGQDRQLEQLRKKDVRASWLETIPGIGKYSSLLLLAEIGDIQRFATKRALCHYAGLIPWMRESADKRRSGGITRVGSPWLRWILVEAAQTAIRTAPEVNAWFQCLARRKHQHTAVVAVAGKLLVAVWSMLQDGVVYEESHFAVNSARAKAGAN

SEQ ID NO: 137589 - protein, 338 aa, unidentified
MQTFAAIDLHSNNGVLTVIDEKDRVLRQKKLPNRLDGFLAELAPFRATLQGVAVESTFNWYWLVDGLIDRSYPALLVNTAAIQQYKGLKHSDDDYDGWWLAHMMRLGILPTGYIYPREERAVRDLLRKRMTLVQQRTANILSVQNLEQRNRGTKISSNEVKKLTAARVHELYTNDDRALAITTTMNVIHALTEQINVLERTVLKKAKLHPEFEPLRTVWGIGEVLSLTIMYEAGSMDRFDTVGDFASYARCVEAKRLSNGKKKADNNAKNGNKYLAWAFVEAARFAVRFYPEAKRYYDRKAAKTNTIVATKAIAHKLARASFFVLRDRTEFDPKRIFV

SEQ ID NO: 137590 - protein, 427 aa, unidentified
MNEVDAIRIEAFRQFKKEIRGSKEYLIVGIDVAKEKHHAFFGTATGKTLLRRLVFENDLDGFSKLLDRAEALRIQEGLSKVVFGLEPTGDYHKPLGEHLIKCAKFVVLASGVAVKRNRELLDGRWDKNDGKDAANVADLVVQGKCMFYEYPEGKVRDLRVLLSLKMHLKKQEHRLRVRIRNHLVAQYFPELDRAWGHSESESLAIVRWCLDPSVIAGLEPDEFVKRVTRRDGGARQRARLEGLWKAAVDSVGCQVPEAVSVECQVVVEGLKRLKEEIKEVSDEIELICHRFEEYPFLLSIPGFGPGVSAQVLGAIGDPHRFNNASEVLKMAGLDLSASRSGKTSETARPVISKRGKAHLRYMLYQAALIASIHNRDFINYYTQKLVGRQQEQGIKTKMRVKLAAKLLVIAWTLMKKKEPFDPGYLKN

SEQ ID NO: 137591 - protein, 355 aa, unidentified
MKSCYENKEIYVGIDVHKKRWVVTVRTYDLELKTFSMLAVAEELEKFLVDNYKDALLHIVYECCFSGFWIYDYFHQRGYNIIVTPTNRIYRDGSIVKTDKIDSRKLAFQHSRGLLRAVKVPVEKVREYRSIFRIYDKEKMREGQLLRQFRCILEVKNHPLKWEKWNKQFIERLKELRFQEDIFNRKFEQFIKEYEYIKEQIRDSEKRIKEISEDREFGPKIKRIEKINGIGIISSVRLVVYLFDLKRRFESGEKLVHYVGLTPGEHSSGEKIVRSRTGLVGNKQLRSIIIQLAWVAVRKDGNLLNKFERVFKKSGSKQKAIVAVARKLMMKVYTITEKEEEYEINKPACRSGRAA

SEQ ID NO: 137592 - protein, 394 aa, unidentified
MFYLGIDVGKFSHSLCLIDETGRHHIWQVNNDKSGFELLGKKLEALNLVFTSSNLLVGMEATGHYFLNLYDFFLSLGLPAGSIALLNPLQVKSFRNTNLRGGKSDNIDAEQIAVLLQFGNFDRCNVSTDHIMNLRGLTRLKSDLTSNLGNLKRKMIGVIDRVFPEFARIFQNKFGLTVVALLTDYQTPEEFAALSLEELTTLIKGLSKRGVNQDKIKRLYDAARNSIGISFGKESFKIELSILLEQLKKLGEQIDFLEDKIAELVNGLNSPIFTIPGIGKTTGAAILAEIGDISHFDSAVKLIAFAGLDPKLKSSGTYQGRTPISKRGSKYLRNALWYSAMVLCRTDEKFHKQYQDRRKLDKSHRYAVTAAANKLTKIVYHVLKNNCIYDPKLA

SEQ ID NO: 137593 - protein, 310 aa, unidentified
MSKHSVRAGDVAGLLARLADLRQKARARTGQIFPIITVQEAGLDGFWIHRVLEAEGVESYVVDPASIAVSRRRRRAKTDRIDGEALVRTLLAYKRGEPRVCAMVRVPTPDEEDQRCLCRELKTLVSERVRHVNRLRGLFFSQGIADYDPRRPDRRARLDELRTGDGRALPPHLKAVARRELEVIELLDRQIEAVKAERDALLAAAQTAEVPSKAVQMLLGLKGIGSGFAGALWSEGLFRHFDNRRQVAAYAGLAPTPWKSGKIDHEQGVSKAGNPRLRAILVEMAWLWLRHQPGSALARGTMIACAWAGG

SEQ ID NO: 137594 - protein, 347 aa, unidentified
MRFYTQQHGHYCGIDLHARTMYVRIIDQDGTVLVEKNIRARPGPFLDLIAPYRDDLVVAVECIFTWYWLADLCHEEGIAFVLGHALYMKAIHGGKAKNDRIDAGKIATLLRGGMLPRAYVYPREMRATRDLLRRRLHLVRHRGRLLAHIQNTNHQCNHDAFGAKLTYKANREGVAERFDDPSMRKSVEVDLALIGYYDGIIRDLELFIVRMAKQHDADMFHRLRSITGVGKILALTILYEVHDIARFETVQQFASYSRLVKCSRESAGKRMGTGGAKIGNVHLKWAFSEAAVLYLRANPTGQKYLARLTSKHGKGKALSILAHKLGRATYYVMTRSRNFDDKKFLAA

SEQ ID NO: 137595 - protein, 395 aa, unidentified
MLRLAKGRRCTHGCVNAVASSVVTSLESLEPESEASRYRFPAVADVYSYVVGVDTHAESHVFAVLVARTGAVLETESFRADRDGIGSALVWLMEMLVGDVLLAIEGASSYGALLTRMAEDAGFVVCDARPSRRVRGNPKTDQSDAVMAAFMVLGTPVAKLSQPRAGGPRKALSLMVTARREMETRSVAIRNRLNGIVRTTDFGLDTTIKLDIAGIRRFTSPSWIVGDPYEVMARQEVTRLADEYLRVRDLLAENKRNLEQLVTEIAPGLLDMYAVGPVTGAIILGAYSHPGRVRSEAAFAALAGVSPIEVSSGKTIRHRLNRGGDRQLNRAIHTIALVRMIRDERSRIYLQRRLAEGATRRQVLRSLKRYVIRDVFRQLDRIMRAQHGLRAASES

SEQ ID NO: 137596 - protein, 361 aa, unidentified
MTIYRTNFGLDVHARSVVAYGIDNETGEVFRRRLGGGSAEVVSFLVNLPGPMQATYEAGPTGFGLYRALDAAGIDCLVAAPSKLQRPVGEKVKTDMNDAEHLCRLLRLGQVVAVTVPTPDREGYRDLVRAHEDTRQQLMAARHRVSKLLLRQGLIYDDGQTWTAKHYRWLLSHRFTQPGLRIAYENDCEVVAQATARRERLEKEIIATAAISEFTPIVDRLGVLRGMAPLTAFSLAVEIGDWHRFSGKTIGSFIGLTPSEASSGSTRSLGSITKVGNAHARRLLVEAAWQHKRDLRTPGPVLARRRENTTGPVRLRGDLGNQRLHNQWVKYTAHHKKTVVANIAVARELAGWCWSLATMDN

SEQ ID NO: 137597 - protein, 417 aa, unidentified
MRIVRPICCGADIHKDLIVATIAATNQDGITEYIQSSFSSQNFDLVRLKAWLIEHHCFEIAMESTGKYWIPVFNVLEGEIKVFVVHPKYTKAIKGKKTDKKDSKWIADLFKHDLLKFSFIPPKEIRELRELSRYRIKLIAMRSSERNRYQNSMTISNIGLASILSDPFGKSSRAVMKEVIRSSSVTEEKISKLLERNTKKKVKEVLQSLVGSHIESDQRLKMNIASQHMDQIDSHVRRLETEMAIRCIPYATLINLLLDIPGISYLSAMTIIAEIGTDMSVFETSKQLSCWAGLAPANNESASKKKSVRISKAGSYLKPLLVQCALAAINSKSNPYYRIKYNRIKKRRGHKKAIIAIARMILVNIYHILSTGEVYSPCDMEQIINPKPVKKVMTIQNAIEFLQSQGFDTSKLISSSS

SEQ ID NO: 137598 - protein, 342 aa, unidentified
MEYYAGIDVSLECSSVCVVDANGKIVCEAKVASEPQALIAWFGSLGFGLQRIGLEAGPLSQWLFAAMKAAGLAVELLETRHVRKAFEAMPVKSDRNDARGIAQLMRLGWFRPVHCKSMSAQETRSLLTARKLVQSKLQDVENSLRGILRGFGLKVGKTTGQKFAGRIEELVAGHPHLQTIAKALLAVRAVLRTEFAAFEKQTRRMVRSDTQARLLTSVPAVGPIVALTYASAIDDPARFKSSKQAGAHFGLTPKKYQSGETDYTGRISKIGDASVRTALYEAANVMLTKPVKGCSRLKSWAMRIKRRAGMSKAKVALARRLAVIMHRMLADGTPFNAAAAAA

SEQ ID NO: 137599 - protein, 341 aa, unidentified
MDEVTTIGLDIAKQVFHAHGADASGRRVFSRRITRAKLIEFFAAQPRCTVALEACAGAHHWGRELQRLGPEVRLIPPVYVKPFVKRQKNDAADAEAICEAAQRPTMRFVPVKSEEQQASAAVFRARDLLVRQRTQLLNALRGLLAEHGWVAPKGLFHAGAMMAKIEDPGCALPPSARDVFLVMIGSAKALDERIGLLDREITKRAREDETAHRLMTIPGIGPITATALVALAPPPESFRKGCDFAAWVGLTPLQRSTGGKARLGSISRMGERTLRRLLILGSAAVVLHASKRGAPKGSWLEQMMARKPRMLVTVALANKTARIVWAVLANGGVYRAPAVVA

SEQ ID NO: 137600 - protein, 364 aa, unidentified
MKKDSKLSTKGSVKPEFTVGLDLGDKSSYYCLLNSHSELMEEGKVRTTEAGLRKQFGDEARMRIGLEAGTHSAWVERLLTELGHEVIVANPRKLRAITSSESKNDRNDAKKLARLAACDPELLSPIRHRGVERQQDLNLVRTRAALVRARTMLINAVRGLVKSAGGRLPSCSSEAFAEKVRSSVPPELRAACVPLLQQIAQMKLTIRAMDKQVEALEKKYPEITLLQTVPGVGPLVAACYVLTMDSPQVLNTNRQAGAFLGLRPRQSQSGESDPQGRISRTGNTYLRSLLVQSAQYVLGPFGPASALRQWGLQLAGSGGKRGKRRAIVAVARKLAVMLHSMWRSGKKFQPFPQGPIQTAVLVAA

SEQ ID NO: 137601 - protein, 352 aa, unidentified
MKHALQQESILGVDTHRDIHVAAVINQSGQLLGTQSVSTNTAGYFQLFQWASSFGALKRAGVEGTGTYGSALCRFLSDKGVAVLEVNRPDRSRRRLNGKSDPIDAENAARSVLSGISQAIPKQQSGACEAMRIVSVARRSAVKAKTQTINQIRAMLVSAPQDVREKLWRIKATDCAKACAVVRSLGDTAVLRALSTTLKSLAKRWLALTEELKDYDKQLETLTQKHAQQLRSRFGVGPQTAATLLSVAGDNPNRLKSEAALASLCGANPLPASSGKTTRHRLNRGGSRAANNALWTIAMVRMRSDPRTRVYVERRTNEGLSTKEIHRCLKRYIARELYPLIMGDLGTMNAIP

SEQ ID NO: 137602 - protein, 356 aa, unidentified
MSSIVSEQYEFVIGVDTHAATHTFALVAGATGAALDHAVFPTSAAGLSRAEGWLARRVGDAPTLVVIEGTGSFGAILTERLQSAGREVVEAARMPAGDRRGAGKSDELDAVRIARAVLGLAAADLRTPRALATDRARVAMRVLVVARDQMTRERTRAINALIALVRTIDLGIDARKPLTAGQIATIAAWRQRDEDATTATCRHEAVRLARRIRTLDGDLAGNRADITELTRQDTPQLLELTGVGAVVAASVLIAWSHPGRVRSDAAMASLAGTCPIPASSGNTVRHRLNRGGDRRLNRALTTITIVRMRVDPATRAYVTRRRAEGRTTKEIMRALKRYITRQLFRTLAAAHPIPTG

SEQ ID NO: 137603 - protein, 355 aa, unidentified
MKRAYFIGMDTHCQFCEIAAVNTRGDVVERDRCVTCIPALLEVIERVPRPRQLVIEEGPLAGWLWRHLHQAVDRMVVSEPRRNRLIALDGDKDDDLDAEKLAQLLRGGYVKAVHQVETLERALFKQQVSLYHHRVRQRVREGLRISSVFRQHGVMIREKAFAAAEDRPALQAQLPAAESFQEILPLLWSSYDAAVEHEELWRRRLVRLAKQEEVIQRFEALPGISWIRAATLYAYLDTPWRFRSKAALWKYLGIGLERKHSGNAPEYLGVPTRAHRLLKGTILGAACSAVASGNNPFAELYGRWIEHGLSSKLARRNAARALAATLWGLWKNGSAYRPEWVGVARVAGLATEVSR

SEQ ID NO: 137604 - protein, 371 aa, unidentified
MKSIVYVGMDVHSSNYTLSCYMVENDRCFATVQVEPDYKEILKYLDNVQKNVGEPCEFHCGYEAGCLGYSLYHQLVDHGVDCTILAPSTMPTYKKNEIKTDKRDAMKIARCLAFNTYRAVYIPTKEDSNVKEYIRMRDAHKLALKKVKQQILAFCLRYDFRFTSGKSYWTQKHLAWLRGLAMDTLMREILDEYIQTYQNLVDKLERFDKRIEELAGGASYAEKVKKLSSLIGIRTHTALALIVETGDFARFAKANQYAAFLGLVPGEKSSGDKQNRTGITKAGNTHLRRLLTEAAQCYGRGRVGFKSKALKERQYGNTPETIAYADKANERLKRKFYHMVLNNSKKHNVATAAVARELSCFVWGLMTGHTA

SEQ ID NO: 137605 - protein, 414 aa, unidentified
MNDVPWLVGIDWASDQHRVCLLDADGKQVAERDVTHDGAGLSELCSWLIEKSKARPGEIAVAIETPHGPVVEALLERGFQVYAINPKQLDRFRDRFSVSGAKDDSRDAHVLAHSLRTDRPAFRRLAIDDPLVIELREWSRMHAELTQERTRLANRVRNQLWRYYPQAFALTDDLAADWFLELWQHVPSPAKAARVTEKTVARILKAHRIRRLDAAEALRILRQPPLAVAPGTTEAASAHIHSLAARIRLVNQQIKDAERRLDQLSAAIEESAPGQICEQRDIAILRSMPGLGRINIAALLAEACEPLRRRDYHALRVLAGAAPVTRRSGKSCIVLRRYACNKRLAQAIHRWAWSAKQHDPITQQRYAELRRRGHSHGRALRTIGDRLLYVLCTLLERQVLFDPNYQSRPVAAAA

SEQ ID NO: 137606 - protein, 325 aa, unidentified
MDRNTHPAAPVAAVFAGIDVSKTALDVALRPEGSSWRCANDEAGIADLVGRLQPLGPQLIVLEATGGLERLVVAALALAGLPVAVVNPRPVRDFAKASGRLAKTDALDAAALAHFAAALQPEPRPLPDAQEQALAALVERRRQVVGMLTAEKNRFQQALPAVRAKVAAHIAWLEQALAELDAELDQLLRASPLWRERDQLLRSVPGVGPTVALTWLAHLPELGHGSVKHVATLVGLAPLNRDSGAWRGSRAIWGGRRHVRAALYMAALVGVRHNPVLRAFYQQLLARGKPKQVALIACMHKLLTILHAVLRHHTPWRPVAPPLAT

SEQ ID NO: 137607 - protein, 322 aa, unidentified
MTRIICGVDVSSSTLEARIGREGATGTFPNTPAGISALGGFCHAHAVELVAMEATGGYEKQAFCQLSEQGLPVAILNPRAVRRFAEGMGLLEKTDALDAGMIAWFAEVKRCGPQSPGSPAHQQLRALVTRLRQLTQIRTAQRNQRRLVTDPVVEASFDQLLAVVQSQIAQLETAITDLITHDPLWRELDPVFRSVKGVADRTIARLMADMPEIGTLSNKAISKLAGVAPLARDSGKQQGKRITRGGRAPVREILFIVASVVGRYEPDFIAFQQRLRAAGKPPKVIRIALAHKLLIRLNAKARQVRQQLANASPLSLPLPATS

SEQ ID NO: 137608 - protein, 443 aa, unidentified
MSKIKNHFELTHPNAAGIDIGSSSHFVAVPPDRNEQPVREFPSFTEDLYALADWLTACGVDTVAMESTGVYWIPLFELLESRGFTVYLVNARHVKNVSGRKSDALDCQWLQQLMSFGLLSGAFRPQGDFCALRAVARLRDMLLRNQAKHIQHIQKALLLMNLLLTEVISDVVGETGQKIIRAILAGECDGQVLAKYRNNHIKASEEDIAKALQGNWREEHLFALKQAVALYDAYAVQLMECDQQLEKMLKDLARNDLKAEKPKRRGGKSKNAPNFDARTLLMQMCGVDLTRIDGIDVTTAFKVLAEIGADLSRFKDAKHFASWLGLCPGTKISGGKKISAATSRTTNRAAQALKMAAVNLRASQSALGAYYRRLCGRMDKAKAVTACAHKLARLIYAMLTKGEDYVDQGQEHYEEKYRQRVIKNLTKHAEKFGFQLIPVPEGV

SEQ ID NO: 137609 - protein, 463 aa, unidentified
MKPFTENITKKSEKCKEEKSSEVKVESGQAKRISRGFIRAQNRNKKTRQIVPKNSLIVAMDLGRGEHCAWMCTTEKEPLDKIKISNNPHGIDEMLDRAEEVKKQNNLGKIVIAMEPTGHYWMNVAEYLTQNNYEYVLVHTVSVKREKEIACYRNAKSDFRDAEAIANLVSERKITYTQLPKDPLWAGLKASAKEYYLTEVNLISEGMRVASFMERVYPDYQSIFKDITKYTALACVLSLDHINGYEQMEFLAYARSHFTNRTSINKMKDFHTMVTSPGQWGCRTYEDGLCMPIKHAADRYKIALHQHEEAAQKLLSYYEQTGYAEYANSFTSLSSIFHASVLALIGDPQKYDSNRCILKFAGLDIKENQSGDYKGKTTIARRGDPLLRYVAYLGGFVLSQHDPLWEEKFLYYTNRIMRPLKKNQAFVALGCKYLRIIWTLCKNHVYYDPVKAEKGNDYHRTIA

SEQ ID NO: 137610 - protein, 355 aa, unidentified
MSSEKYIGLDVHQATISVAVMDSQGKTIMESILETKASTLLEFFAGLRGSLFVTFEEGTWAAWLYDLLKPHVSDVLVCNPRKIPLHKQGNKSDKIDARKLAERLRLHDLKPVYHGETGVRMLRELARSYLTVVKDLSRVMNRLKALYRSWAIPCAGRDVYYTRHRSQWLEKIPEAGTRRRAEQLYQQLDMLKHLRQQARRELLAEGRKHAITAKLRQIPALGPIRCALAVALIQTPHRFRSKRQLWTYSGLGLETRDSGEYHYVHGQVRRRKKQATIRGLNKDYNHDLKGLFKGAATRASVQPGPFQDFYQRSLAKGIKPTMVRLTLARKLAAITLTLWKKGEDFDIHKLNSQAA

SEQ ID NO: 137611 - protein, 355 aa, unidentified
MKKSYYIGIDISKKTLDASIFVENMDEKRFPHLKVDNNKTGFREILKWARREKVNLKDCLFCMENTGHYGLDLYSFLEQKGIEYCSVCPLVMKRSMGISRDKNDKIDSARIATYAFEKAYRLKPSKMASEDILALKRLQSERATYVSERAKYKAYVSDKCSKKDSAFKRMTLMVEALSQQIEAVEAEMQSIIQRNEELKTSYSLITSVPGVGKVIAISTLVHTDNFQSFSNARQYACYASVAPFAHTSGTSIHGAPSVSRMGDKRLKAELSQGAISACRNDPEMSTYAARKREEGKHPGVILNAIKFKIIERMFAVIHRGTPYVLTHEYKTMKNTAEGCHSGGRRKVSQERLVAS

SEQ ID NO: 137612 - protein, 345 aa, unidentified
MKNTIAGVDLAKDVIQVCICKNNKVHSNVEMPHHEFLTWLFKSKPMSIIFEACGTSNYWKQRAIEAGHDAQLISAKLVASIRQNQKTDKNDALAIAQASQLADIQFVKGKSVEQQQLQSMMRLRELAIKQKTASSNQIKALLLEFNIRVSPKKGGLKGVIESLLEDSENGFSFEFRHALNAAWGLHLGLLDSIRVYDRCLETTIDEHADCKRLLKLEGVGPLNAINLYIALGCADLGVFNKGKDASACIGLTPLQHSSGGVTKLGHIGKGVKNSSIRSQLITGAMAVVSQMVKRTAVTKKEAWVQGLVERRGKKCAAVALANKTVRTAYVMLTQGTEYKAELMAA

SEQ ID NO: 137613 - protein, 341 aa, unidentified
MKNLFIGVDFSKEKVDVAIIFADGLAETASRVFNEFKTTVSGYKQLIKWVEQNSSGIEPSLWLFCGENTGDYSKGLCNFLYGKGYDMWLENAKSIKDASGLRRLKSDRADASMIAEYAMRNYDRAIMYEPLSESLAQLRELFLYRQMVIRHRCSFQVRRGEKRHTMEKSPVKTMISQSGRHIVSELNKEVEKIDKRIAELIKSDEELTEVFTIVTSVPGIGTQNAVCLMVYTDNFRRFNYDSRKIACYYGIAPFGKDSGTSVHSDPRVHYMANRQIKAMLTQAALAAVNFNPVIARYYMRLVERGKKKQVVLNNVKNKLIHLITAMVRNRQLFSPEYKISA

SEQ ID NO: 137614 - protein, 398 aa, unidentified
MGPRSEKKYKPASEPALRNYVKKGLEISGSLLIIKEKTKEGTVMDNQSIDYTNQDFFLGIDVHKKSWKVTVRTQNMELKTFSMDPSPEELYRYMNKRYPGGNYHSVYEAGFCGYWIDRELRRYGFKNIVINPADVPTTQKEKSTKTDKVDSRKLGRELENGTLRGIYVPDELHQQLRSLCRLRFKVVQSQTRLKNRIKGHLAFYGYVIPGHDEVSHWSLGFIRWLKTLEFSYGMGRDYLWLCLEELESHRRRLGEVLRLLRRYCREYGIQEEVKNLRRVPGVGFVTAMTLYGELMDMRRFKSIDYLASYVGLIPSVSASGERESSLGLSFRRNRYLRYLLIEGAWVAVREDPALGYVFSRLIRRMSRQKAIVRIAKKLLNRIRHVWNHKEGYACGLIS

SEQ ID NO: 137615 - protein, 352 aa, unidentified
MDATTVAVDLAKDIFEVACANRAGRVVERRRLTRRQFEQFLDKVETNTEIVMEACGTAHYWGRRCQTRGVRVRLLPPQYVRPYVRRNKTDRADAEALLEANRCGEIHPVPVKTLEQQTLQVLHRVRTQWQAARTARINMMRGILREHGVPVGLGARAALTRIPALLEETATPLPDLVRHTVQLLLEEVRAVEGRLATIDQQLAQIARTHPVACRLQQIPGIGVLTSTALIGSVNHIHAFRRARQFASWLGLTPREASTGNRRYLGRISKRGDVYLRCLLTHGARAVLLTAQRTARATPHRLTRFQQWAVTLATRAGHNKAAIAVANRLARIVWVVWARDVDFQALPAEAVAL

SEQ ID NO: 137616 - protein, 400 aa, unidentified
MAVAVGVDVAKEFHWAALVHSETGRVLASRKVDNDPSAIQVLIDDIRAAQAEHGPATVAIDVLGGIAGLLQVMLVDAGLRLVHVSGLAVNRARRGTRGGEHKSDPRDAKVIADQIRLRADELRPVEPATEADSELRLLVGRRRELVVDQTRRISRLRDLLASIHPGLERVVDPTHKVDAALLARYVTPAEIRRAGRRRISEYLRTTGRHNSTVIDALVDKALTAAGAQHVTVPGETVAADIVRDLAREALACRDKLADLDKRILKVLDRHPDAALIQSLPGMGATLTAEFLAVAGGITRFATGDQLASAAGLAPVLHQSGKVHYLRRATSGDKTLKRVFYQSAFCALQRDPASRAFYDRKRAEGKRHHQALIALARRRINVLHALLRTRQPYRLDHPLAA

SEQ ID NO: 137617 - protein, 356 aa, unidentified
MKDTRSNKLFLGFDVSSKTIEIYGRMADSEEGKNIQIKNTKASIKKFMEKLPDPGNTVIAMETGFDSPWMSDMISAYGCEVIVAHARELALIWGSAAKCDRRDAEMLARLACFDKKLLHPIKHADAESRNDLCVIKARDTLVRMKVTLINTIRDLLRSGGADVSGLTPENLTKKASKILPVELQPALNGLLTQLCHIREEVKRYDRIVIRLCKKYPATTKVRQIRGVGPITALSFVLVIGDPKRFSSAERLAAYLGLVPRRDQSGEVDKQLGITKQGNSFIRRYLIQGANYILGHYGEDCDLKTHGLKIAARGGKIAKRKAAVAVARKLSGLMYTLWQNDEVYDPHYKQNHRRKTA

SEQ ID NO: 137618 - protein, 336 aa, unidentified
MRYIGVDLHTTQITVCYLKAEEDFEIRKYQLVEMEKFVNSLELSDEIAVEATGNTRWFCEQVQAAVSRVVVVNPRQFEVVKNSCKKTDKNDALNLARFLRADLLPEVRPKREEATTVQSLVNTRTKLVRLKTSLINKIHALYVSNGRKLKKASLGSEKGLEKVLLSEWSAIERIELEIIIEQIRSLKVSIKKLDKAIEAESEKLKGYESLVSMSGIGSLSAGILLSVIGEVKDFETADKLASYFGIVPRVSNSNETIKTGRITKRGNKTGRTTLVQCSLSAIKKSEYLKKYYEQVKARRGHGKAKIALARKYLGIIYNTLTNNWVFRDFNNFELAE

SEQ ID NO: 137619 - protein, 318 aa, unidentified
MSESFVGIDVSRDYLDLHERPSDRHQRYANDDAGIEAIVVRMLELKPTLIVVEATGGLEVPLMVALANRQLPIVQINPRQARDFAKATGRLAKTDVIDAATLAHFAEAVRPPVREFPTEEMRELRELLDRRQQLIGIRVMEQNRLASTAIKSVRRDIEAHIRFLNKKIAAVEKDMNKRIRESESMRQKDEVLQSVPGIGDQVSRTLIIRLPELGTMERRPITSLVGLAPMSWDSGSMKGTRHIRGGRSAVRVALYQAAVAAIRVNLEFKAFYARLKAAGKATKVALVAVARKLLVLVNALVAKNEPWRANSILPTQNT

SEQ ID NO: 137620 - protein, 421 aa, unidentified
MDEIEDWVETVDRVAGLDLGKASLTACIRVPSEQRPGGRSQEVRDYATTTGSLLELADHLRAQSVRLVAMEATGEYWKPVFYLLEAEGFTCWLLNAHHVKNVPGRPKTDKLDAVWLAKVVERGMCRPSFVPPKPIRQLRDLTRYRRVLIRERTREKQRLHNVLEDAQIKLSSVITDLFGVSGRAMIEAMIDGQRDPKVLAQMAHGVMRSKIGALTEALRGHFEDHHAFICRVMLQRIDTLDAQIGQLDDKIGQMIAPFAGQVTRLDEVAGIGRTNAQELIAEIGVDMSVFATSAHLVSWAKYCPQPRQSAGHDKQRSTGKGNPYLAGALGEIGIGASRTNTFLGERYRRIARRRGKKRALVATGHSVLTIAWHLLADPDTHYLDLGPDHYQSKINKDRQARALIRQLQHITGQQVLLEPAA

SEQ ID NO: 137621 - protein, 342 aa, unidentified
MAQTISVLGIDIAKLVFHVVGMDDSGHVVLRKRIARSEVLTFIANLPPLRIGMEACGSAHYWARCFREHGHDVRLIAPQFVKAYVKSPKNDARDAEAICEAVTRPTMRFVPIKRLEQQDLQALHRIRERLIKARTALVNEIRGLLREYGIVLPQSLAKFRALLVERLEADQAKLTPLSTEVFWHLYEEFLALEKRLAYYDEQLTAMGQAHPECRRLQTIPGIGPVTATALIAAIGDVTQFKNGRQLAAWLGLVPREHSTGGTPRLLGISKRGDRYLRKLLVHGARATLRWVDTRSDERSRWLRALIARRGKNRAAVALANKNARIVWALLAYNQEYRVRTVV

SEQ ID NO: 137622 - protein, 343 aa, unidentified
MGEVITIGLDIAKSVFQAHGVDEAGAVVIRKRVSRAKLLEFFASLQPCLVGIEACPAAHHWGRELQALGHTVKLMPPSYVKAYLKRSKNDANDAAAICEAVTRPSMRFVPIKTKEQQAALMLHRARQLLVRQRTMLSNAIRGHLSELGIVSAKGRKGTGALLEIIGDAKDGRVPPVARGILDVLARQYSAIGAEIGSIDRSIVAWHRSCEASRRLEEIPGVGPIVATALVAEIGDWKAFGSGRNLAAWIGLVPKQQSTGGKDKLGSITKQGNRYLRWLLVAGAMAVIRYAQKHGTLKRPWLGRLMERRPTKLAAVALANKIARMAWAIIVHGDRYREPKPLAA

SEQ ID NO: 137623 - protein, 344 aa, unidentified
MDINTIGLDLAKSIFQVHGVDASGAVVVRKTLRRSQVLPFFTKLPPCVVGIEACGTSHHWARELIKLGHEVRLMPPAYVKPYVKRGKTDANDAEAICEAVTRPTMRFVAVKSPEQQAALALHRARDLLVKERTQLVNMVRVLLAEFGIDIPRGLERALTMARQINEGEILDVPDEAATAITILCEQALAAHERLRSIDRAMLAWQRASDLATRLATIPGIGPVGASALAASVADPHQFKSGREFAAWLGLTPLQKSSGGKERQGRISKMGDKYLRKLLIVGMTSLVRRARYKPESVDPYVADLLARKPVRVATVAMANKTARIAWAIMARGGTYREPAPRLLAA

SEQ ID NO: 137624 - protein, 414 aa, unidentified
MDVHFANCAGLDVHKQTVVACRIARQVNGKRVMETRTFGTMTADILLLGEWLGLGNVTHVAMESTGVYWKPIWNLLEGNFTLWLVNPQHIKQVPGRKTDVKDAEWIATLMEHGLLKPSFVPPAPQRALRELTRMRSTIVRQRSEMLNRVQKVLEDANIKLASVASDAMGVSGRAMIEAMIGGESDPKVLADMALGKLRNKHDELERALLGSMNRHHKIILQQLLDLVDGMDKSIATLDKEIEDGCAPFVEAVERLDAITGIGVPTAQTVLSEIGTDMSKFPSDNHICAWAGLAPGNNESAGKRKSGKTRKGNQSLRSALVQAANAAARSKNTYLSALYNRIAARRGKKRAIIAVAHAILKIIYHMLTKGTEYNEMGADYFDKLNPKRTAKRLIKRLEQLGYSVTGSLDAQAVAA

SEQ ID NO: 137625 - protein, 346 aa, unidentified
MDYVALDVHKHYSWARVENDQGQKIFECKLAHSRGTIKNFTSKWSPATPVAVETVGNWYWVVDEIEAGQGLPQLVNARLAKLMIGSVNKSDKLDAKGMNRLQRAGTLPTVWIAPSAVRDARELPRTRMVLSKQRTQFKNRIHATLEKYGLKVEGVSDAFGKKGRQIIEALSAKLPPHTQQALGLMLDELDHVGANLKTIEGQMQQAFAPCAETTYLQSEPGVGEMLAVVIWTEIGTIERFGRAEQLASYAGLVPRENSSGGKVRYGRVRKDVNLYLKWAFVEAANSAVLNRQRCEYRHVARLYENVKARRGHGKAIVAVARHLAEASFWMLKKGENYREPMSSTQG

SEQ ID NO: 137626 - protein, 320 aa, unidentified
METEKVYVGIDVSKDTLDLAVHASEQRWRFANSDKGITEALSCLEELCPTLVVLEATGDNEYPLAAALAAAGRPMVVINPRQVRDFARAAGRLAKTDAIDARILAHYAAVMHPESRPLPDTQGQELKAILARRRQMIEMLTAERNRLHSARSKAVKANIQAHIAWLEKEMTHIDDDLGQSIRQTPVWQEKDDLLKSVPGVGPVLSTTVLADLPELGLLNRRQIAALVGVAPFNRDSGHIRGQRAVWGGRAVVRSALYMATLVATRYNPIIRDFYRHLLSAGKPKKLALTACMRKLLTILNAMLKHKTPWHYPISGILQAS

SEQ ID NO: 137627 - protein, 311 aa, unidentified
MTLPQDVIGVDIAKGWIDTFTLSSRTHERIAMTKPALARFARGAAGCLVVCEASGGHERPLVAALAAAGVDCARVNPRQAREFARATGRLAKTDRVDAEVLARMGRALSPAPTPPVDPARARLADLVARRDDLVAGIGRERNRARTATDAWIAREIAGLLRVLQAHLKAVEGQIAALIEAHAALAEDQRRLTTVPGIGPALSTVLIARLPELGQLDHRRIASLAGLAPHACDSGLHRGKRHIWGGRADVRRSLYLAAFIGSRYEPSLKAFRKRLKDAGKPTKVAITACARKLLNILNAMIRDAKDHQPHTR

SEQ ID NO: 137628 - protein, 391 aa, unidentified
MVCVGIDVAKDKHDCCILDSDGMVRADCFTIPNNMDGFKQLLQTIRNCTRKSDKIKVGLEATGHYSYNILGFLLDNGLPTYVINPLHTNLYRKSLSLRKTKTDRVDARTIATMLLSDVDLKSYTDIAYHNEELKSLTRYRFDKVQERAKLKQSVSRLSTILFPELEQLVSSIHGTSIYALLREYPGAKQISEVHLTKLTNLLTTASKGRYGKEKAIQIREAARASIGSVMPAKSLELKHTIKLIQELASEISEIEDSIQKIIDELNPPILSIPGMGVNSAAVILAEIGDFSNFSSPDKILAYAGCSPSTYQSGKLTNCYAHMEKRGSRYLRHALYNATKYVCYWNPVFAEYLAKKRAEGKHYNVALSHAMKKLVRLIYALQKSGKTYLTAA

SEQ ID NO: 137629 - protein, 339 aa, unidentified
MTYTLYVGIDIAAQSAAVAWQVPARGEWQALEIKQQQSDYTRLMQQLRRQATPAETLVVMEATGVYWLALADALHRQGFQVGVINPLQARRFAQLHLQHAKTDAIDARLLAAYAQHMQPTPWTPPPAIYYHLQQRLAYRQDLVKIRTQERNHLHALRHHPHADAAIIQRQRQHLAYLTGQIKALEAELKTLLAGDHPWREAARRLQTIKGFGPIVTAWLLVATQCFAFCDTPEQAAAYAGLVPYPRHSGSSLRATRSTGRTGHAQLRTMLYMAALSAARHTPPVKALYDRLLARGKPNKVARVAAARKLVHIAWAVVVKERDFDPYYNTPSHQAVPIPT

SEQ ID NO: 137630 - protein, 367 aa, unidentified
MKKQTSATSETGIKGKTIIDYSGKVIYVGIDVHQKDYQVAKVLNGVCLGNHRMESSNEKLVDHLRSHYPGAAFKCVYESCAWGFTLQRTLEAAGMECIVVHAADVGTTDKEKRRKTDKVDALKLAHQYASGNLKGIHIPGEDIQKDRNLIRYRKRLMWDINRSKNRLKSLLKYQGITILPQYAGNNWSRNFLNWVEQQATKDALLKDTLELMLEQIQLLRQLLLKTERKLREMRKTKYAATAQLATSVPGIGQTTAMLFLLEAGDVNRFKGFDALNDFVGFCPDTDSSGDVHRDTGITTRRHKQLRSALIEAAWQAIRTDPALMESYQTLTKRMKGHEAIIRIARKLLRRLRAVLLSGVPYQKGLVA

SEQ ID NO: 137631 - protein, 344 aa, unidentified
MKVTALGIDLAKNVFQIHGIDQHGKVMLKKQLKRAQMAPFFINLPPCLVGIEACGSAHHWARKLQAMGHTVRLMAPQFVKPYVKTNKNDAADAEAICEAVGRPNMRFVPIKNVEQQAVLALHRVRQGFVKARTAQGNQIRGLLAEFGIIIPQGINNIGSRVPELIEDASNELPGAFRVLVQRLLDHLKELDRQVDELEAQIQAWHRRSDLSTKIAQVPGIGPISASALIASIGDAKNFDNGRQLAAWLGLVPKQHSTGGKSNLLSISKRGDTYLRTLLIHGARSVIYHAAKRPESCSWVNSVVNRRNKNVAAVALANKNARIVWALLAHDRRYETGYTRAVEAN

SEQ ID NO: 137632 - protein, 452 aa, unidentified
MAKKAKKIKTEKGLRLKIVNPDSAGIDIADKEIQVCVPEDRDGENNRRFGSFTCDLREICSWLHACRISTVAMEATGVYWLNLYLLLKDAGIDVVLANPLQVKNLMDKKTDEADAEWLMLMHIYGMVKPSFQPENITRKIRNLTRHRSSLLESAAVEIQHMQKAMEMMNIKLSTVISDITGKSGQAIIRAIVAGNHAPESLSQLADGRCRASKETIAKSLEGTWDEDILFMLGQSLQAYDFYQAQVEACNGMIEALLMEYAAGIDTEGAEFVRTKKNTTPKNALTFDMEKYAFDIWGVNVRAIPGMNVGSMLQLVGELGHDFVDKFETCRKFCKWCNIVPNNKISGGKLLSSHLPKRKNPVGQVFRMCANAVKDEKTEMGNYFRRIKARSGSAQAIVATAHKIARVFYTMIKNRQEYNQRLIGCEEKELLLRKIERAKKALYKLDQRLAETA

SEQ ID NO: 137633 - protein, 450 aa, unidentified
MSKGSGVSRGDRRRNARLAELRLLVPRENAIAGIDLAEDNQAVVVTDHDSKVLARRSPRCKAWQLGEVLDWAVAKAQARGFASVTVACEPTGSRWMHVQQACAERGLNFVCVQTLVTHNARVAEDFTRDKSDQKDAVLIARLTAELRCYRPEVIEEDWAMLRYLGQRRDALVTEATRCRQQITDRLALAWPAVLGAAAAPLESVTFLACLQVAAERCDGDPGKLRRYGLAEFTQIVRGVLPRWGGQRICHRIVAAFHAALGDSRGAVPARRRGALKLAGHALADLRRARTLQAAVEAEMVAQLHVLGIADVLASIDGLSLQVAACILAETGDPARFGSSRALVKHAGLAPCENSSGNSAGQARISRRGRPVLRKAAWRATWAMIHGANPVLAAKYDHLTSRGTGQLAKGQAHIACVAALLRWIYSVITSRAAWDRRIAAGTISHAAAMAA

SEQ ID NO: 137634 - protein, 412 aa, unidentified
MEVLHSHCAGLDVHKGSVVACARHMVDGAVKREVRSFKTTTKDLMALSEWLSVEGCTHIVMEATGVYWKPVWHILSDGEFKLVLANAAHVKNVPGRKTDVNDATWLADLMAHGLVRGSFVPDEPTQEMRNLLRTRKQFVRERSSHVQRIQKTLEDANIKLDSVIADIVGLSGRRMIEALIAGETDPTALAALAHRRIKATPADLEAALRGRVTDHHRFMLRLLLQHIDAIDAAIAQIDQEVDGKVEPFRTAIQIVSTIPGVRELSAEVIVAEIGIDMARFPTQAHLIAWSGLCPRNDESAGKRRSTRMRKGAPWLKTTLIQCAWAAARTKESYLQAQFHRLRARRGAKKAIGAVAASILTAAYHMLKTGTLYHDLGPNHFDKRAKEKHVHRLINRLQNLGFAVEITPLEVAA

SEQ ID NO: 137635 - protein, 316 aa, unidentified
METTVCYVGIDVSEATLDGATAPLESVWSHPNDQGGLAQMVERLSLLKPALVVLEATGGLEAPVAAALHDGGFSVAVVNPRQVRDFARAMGILAKTDRLDARVLALFAQKVQPAPRPMPDKQARALKALVSRRRQLSEMLVAEKQRYRRAAPVVQGDLQESIAWLEGRLKRLDKELQKMVKSSPLWREEEDLLRSVPGVGPTVAFTLLAELPELGKLTPKKIAHLVGVAPLSRDSGTLRGKRAIWGGRATVRRALYMGAMAAKRWNPQFIAFFEQLTGRGKAKKVALVACMRKLLLLLNAILKNKTPWSPSYAEGL

SEQ ID NO: 137636 - protein, 418 aa, unidentified
MKIVFPTCCGVDVHKSFLVATIIKTPQNSLQQSYQKKRFSTFNSDLNRFADWLRENDCLDVCMESTGKYWVPVFNILEKQGIRVVIANPKWVKAVKGNKDDTKDSKWIGDLFRIGLVKSSFIPNKEIRILRELTRYRYKLISMKSSEKNRFQNAFTVCNVALDSVVSDMFGKSATAITDYLTSDVEFDAQHCISLLQRSLKKKAPAVLEAVEGYQIAPEQKTRIGIVRDHLHYIDKLIERVDDCVEGMVKKYEGAITLLRTIPGVDRSSAITILSEIGIDMAQFGSSKRLCCWAGLTPGNNESAGKKKSVRISRAGVYLKPALVQAAHAAVKDKSSTYYAVKYERISKRRGKKRAIIAIARMILTAVFCMLSTGEVWNPVDLYKVDMPEHLKEKQLAKAVKQAVHFLETQGLTVLDSA

SEQ ID NO: 137637 - protein, 424 aa, unidentified
MKVTYQTCCGVDVHKAFLVATIIKTTGGIEPSYQKRRFSTFNNSILEFKRWLLENECLDVCMESTGKYWIPVFHLLEDEINVTIANPKWVKAVKGNKDDTKDSKWIGDLFRLGLVRGSYVPCKTIRILREYTRYRYKLISCRSSEKNRYQNALTVCNVALDSVVSDIFGKSSTSIIDYLLEQSGHSINHEEIASKLLRRLKSKTDAVIESIEGYQMTDAQKYRMRLVRAHMDYITAEITDIDSMIENLISSDSDYENTVQLLCTIPGVKHDSAVTIISEIGIDMTQFCTSKRLCCWAGLTPGSNESGGKKKSVRITRAGVYLKPALVQCAHAAVKSDQSPYYKKKYESLVKRRGKKRAIIAIARMILTAIFQMLSTGEAWNPSDLYKIDMPEVLLEKQKQKAIKQAQKLLIREGLLPPLEPLAS

SEQ ID NO: 137638 - protein, 413 aa, unidentified
MNSYKIAAIDVHKSMLAVVVTDAAVEGELPFQRRKFGALGSDLKALAEWLAAQQVQEVVMESTAQYWKPVWRRLEGQCRLHLAQAHSNRARKGRKDDFRDAERLARRHLAGELILSFVPDPEQRLWRTLTRSKHQLTRDRVRLHNQMEALLEDARIKLAACVTDLLGVSSRRMMEQLAQGETDPARLATLADPMLRATPEELSDALSAAPEMSTLHRQILRLFLERLELMERQMAVLDRNIAAALQLHQDAVVRLAAVPGLGADSAQQIIAEVGPQAATFSSPQELASWVGVCPGREESAEVSKSDETPKGNQTMRRVLNQAANSARKTKGSIFQSLYQRWVSRLGHNKTIWAIAHRLCRVVWIILHRGEPYIEFGNSRDPRSAAKRTARLIHKLRSLGYQVTPPTPTPRVAG

SEQ ID NO: 137639 - protein, 344 aa, unidentified
MDHFAGLDVSVKETSICIVDDAGKIVREVKVASEPEALLAVLKNLAYHFKRIGLEAGPLSQWLFSALAEAGLPVICVETRHMQAVLKAQINKTDRNDARGIAQMMRAGLYRPVHVKTIRSQKLRMLLTHRKLLQSKAIAIENDLRGTLRNFGLKVGMVGKVKFEARIRELVENLPDLAVLVEPMLIVRRTLREQIVILHRRLLAIVRDDEVCRRLMTTPGVGPVVALTYRATVDVPARFRKSKAVGAVFGLTCAKYQSGEVDRNGRISRCGDEMMRVMLYEAAQSMLRSKKWSWLKAWAMQIARRRGMKKAIVALARRLAVIMHRIWVDGTEFRWTREQATTAA

SEQ ID NO: 137640 - protein, 345 aa, unidentified
MIIGCDFHPSWQQVSWMDTETGETGEKKLVHVAGDAKTFYQQLEAPVLIGVEATGNSQWFVELVEDLGHAIWIGDAAQIRASYVRKQKTDKRDAAHILKLLVEGRFPRLWTPDREQRDLRQLVLHRHKLVEIRSRVKNELQHLSMNKGMQRKGKLWSQTGQKLLRELPLKPWAACRREDLLGLLAMLDQQVGKLDDAVQQAAGQHPQARLLMTQPGVGPNTALAYVLTIGDVTRFPRGKQVASYLGLIPREESSGGRQKPGAISKQGNGLLRSLLVEAAQIAVRYDPGYRKQYLHRCHQKPKGVAKVAAARKLAVRLYWMLRTNVAYPEIVRIESSPRLPLVGAS

SEQ ID NO: 137641 - protein, 381 aa, unidentified
MTTLATRHTQDTTTEGTLFVAFELSEKTWKLGFTTGHGQKPRERTVTARQQERVLDEIAQAKRRLGLPDSAPVVSCYEAGREGFWLHRFLQAHGITSHVVDSSAIEVNRRQRRAKSDGLDVRKLLSMLMRYHSGEHQVWQVVKVPTVEAEDQRHLHRDLETLKQERASTTTRIQGLLSSQGLRVTSLTKLPEQLDALRLWDGSPIPPGLRRRVLRVYAHHTFLSEQIAAVEVERRTQLQASTDTSIDKVRQLMQLKGIGINGAWLLVMEFFGWRAFKNRREVGGLAGFTPTPYQSGESAREQGISKSGNRHVRWMTTELAWSWLRFQPDSALSVWFRARFGGGGKRLRRMGIVSVARKLLIALWRFLETGVIPAGAVLKEA

SEQ ID NO: 137642 - protein, 317 aa, unidentified
MSKSFIGIDVSKNNLDVHILPEALSFSYRYETKAIKALIKKLKIYTPELVVLEATGGYEISIGIALSDANLNVAIVNPRQVRNYARALGQLAKTDKIDAYVIARFAQDVKPEARAQMTFKELELKSLVVRRQQLMEMRCAEINRLSRTSVTQIKNGIQKVIRVLDAQIEAIDHELKNEIKNNPTWSKKLELITSFKGMGDHTAHTLLFGLPELGNLNRQQIAALVGIAPFNRDSGMFRGKRTISGGRANIRKALHMPALSAATRWNQALKEFYCRLIAKGKKHKVALTACMRKMLITLNAMLKNNQTYNPKLGINYC

SEQ ID NO: 137643 - protein, 421 aa, unidentified
MTHGSHEEFAAFVGIDWADAKHDVCLQAAGSEKRESCMIEHTPETLDAWVSMLRTRFHGQPIALCLELNKGPLVSALRKYDFLVLFPINPITVARYREAFTPSRAKDDPTDAELQLELLLTHRNKLQPLQPQSPAMRALEQLVEHRRRVVGDKVRLTNRLTSTLKNYFPHVLQWFQEKDTLIFCDFLSRWPTLKAAQLARRSTLETFFRDHHVRSADVINTRIHALKTAMPLTTDEGVIAPHALFVQALVSQLRVTLHAIEDFDTAIAQRAQNHPDFSLFQALPGAGPVFASRLLVAFGEQRERYASAAELQQYAGIAPVTERSGKKSWVHWRLQCPTFLRQTFVEWAAESIRHSFWARVYYQQQRDKGKAHQAAVRALAFKWIRILYRCWQERTPYDESTYLHALNRRGSSLIQNLAKVS

SEQ ID NO: 137644 - protein, 411 aa, unidentified
MNTNPVFLRYLAIDAHKHYVVIGGVNAACELVLSPRRLEWAELEDWLRTHLQPTDKVVIEATTNTWTLYDQVARYAGAVVVAHPPHIKLIGAALVKTDKRDVQVLAKLLALNLIPEVWVPPQPVRELRELTAHRLRLTHARTQTTNRLYSMLQRHNLAAPAGDPFAAQHRAWWEALDLSPTEKLHVRQDLATLDLLNTQLAEVEQELARLSTVAPWAAQVPFLIQLPGIGLITAMIILAAVGDITRFARAKNLVGYAGLGTYVHDSGKTHRHGGITKHGRADLRSALVEAAWMAVRTHPRWQAEFARLSKRMPANQAIVAIARKLLVVVWHVLHDHEPDRHAQPDKVAAKFFVWSGRLGQTHRGRFTPRQFVRWQLMQLGLGDDLTHIRFGGDLRSLPTAEELAALIPTVT

SEQ ID NO: 137645 - protein, 346 aa, unidentified
MRQIVRIGLDIAKRWFQVHAVDEVGKEVLNRKLPRDKVLGFLGSLPSCEVALEACSSSHHWGREIGRLGHRVRLISPNYVKPFVKRGKSDAHDARAICEAASRPDMRFVCVKTEEQQAALMQHTSRQLLIDQRTAVANSLRSQLAEFGVIEKQGIENLADLVRRLEEEDPDIAHIPQTALAVMKILADQLRAVEANLAMIDEQIEAWRQSSASAQALETIPGIGILISAALAAYVPDPSAFLSGRDFAAWLGLVPRQNSSGGKDRLGRITKQGNPYLRRLLVLGATASLRWLHKRTDPLAVWTRQLLQRRPARLVTVALANKLARIAWAIMTTGELYRREALSAVA

SEQ ID NO: 137646 - protein, 344 aa, unidentified
MLSIAGGMDIHRKQVTFDYLDLVTGEVKCGQIAPADRAGLRAWLERFGGVAGVAFAVEACTGWRYVAEELQRAGIEVHLAGPADTAAARGRKMRAKTDKADSRLMRDLLAGGRLPECWIPPPQILEYRALLETYHALRREHTAWVQRVHAVLFHQGAPVFHDLSRAGAPQELAALTRAHLSPAGQQQIALCLRMLEVTGGELDALRRQLVSAAGQLRGARVLAGQLYGVGPVTALALTCWLGGAGRFSSARKAVRFTGLDITVYSSDGRRSPGHLSRQGPPVLRWCVYEAGKTHARACAPDHGYYAAVKDRKGGKRAALSEARKIVRRACHILGELGDDAFATA

SEQ ID NO: 137647 - protein, 340 aa, unidentified
MSNITTIGLDLAKNVFQVHGVDETGTAVVVKRLRRSQVSGFFASLPPCLIGMEACATAHYWARELTELGHTVRLMPPQYVKAYVKRNKNDAADAAAICEAVRRPSMRFVPVKTADQQSALLMHRARDLLIRQRTMLVNALRGHMAEFGLVEAQGLHKVVGLIAIVLDEKDERIPILARQALKIITDQISELQTRISEIERQVLAWHKDNPVSQRLATIPGIGPIIATAIAATVADAGVFRSGREFAAWLGLVPRQSSTGGKARLGGISKRGDSYLRRLLVNSAHTVLLCWKAAKADPWVLSLRGRKPRLVVAVALANKTARIAWAVMSRQETYRRVAVAA

SEQ ID NO: 137648 - protein, 428 aa, unidentified
MAQPYYDRIEAFRQLKKEIRGSKDYLIVGIDVGKHKHHAFLGTTSGKTVLRRIIVENSASGFEYLLDMVQFYQTRDGIPKRVFAVEPTSVYHKPLSEFLIEHGYMVVYVTNEAIKKNRVLLDGRWDKHDTKDAANIADLVSQGKCQYYDLPDITLRDLRSLLLIRKRLLKQQHSARVRIRNNLVAQYFPELDRYWNQAETENVAIVRWCLAPRSITHLKFEDFVQMVAPQYRRITQYQRLRKIWEIAPCSIGCRAGTALELEAKIMVEGLRYTQQQIDEVEEAIKAICRSFTEYELLLTIPGFGPYISAVVLAAIGNAHRFRNASEVLRLAGLDLSAHRSGTKSATAVPVISKKGKAELRYALYQAAVVATSFNRDVRAYYHRLLEGREREKGIRTKMRVKLAAKLLIIAWTLMKKKVRFDAQHLQID

SEQ ID NO: 137649 - protein, 414 aa, unidentified
MNARHSVTCGIDWAERHHDVALVDERGQLVAKRRISDDAKGFAMLTELLADAGDNEDNPIPIAIETPRGLLVAALRATGRGVYAINPMAVARYRERWTVARSKSDHADAMVLANILRTDRHAHRVLPADSELAQAIAVLARSHQDATWRRTKAVQELRAHLREYYPGFLDAFTAAGVTNLASADARALLAIASTPAAGVKLTRARIAAALRRGGRRRNIDRLADQLLQALRRPQLRQLRLVEQAMGVQALSLLAVLNAACAGMDQLAEAISESFPKHPDYTVITSFPGLADVSGARVLAEIGDDRSRFADARALKAYAGSAPVTRASGRSHAVTHRRIKNDRLAAVGYTWAFMALTNAPAARAHYQRRRAHGDRHAAALRNLFNRMLGQLHHCLQTTQVYNERLAFATPMPAAA

SEQ ID NO: 137650 - protein, 394 aa, unidentified
MFYLGVDIAKTNHVASLLDGEGNVIVKAIKFTNSKEGFEKLLSSLDSVVTDYSKVLISMEATGIYWLALFSALVEKDFNVSVFNPYQIKAYRGAYNNRKQKNDVIDSIIIADYLRVFGEKESSLPKDDVLSLRDLTRFRATIIDDIGTQKVRVINLLDKVFPEYKSAFSDVFGTTSKQILLECPTPESILKINTLKLSNLLSKNSRGRMAKATAKSLKELAKNSFGIKITSDSTAFAIKQLINQIVFLEDQASIVQEKILEIYFKLDSHLLSIPGVGKTIAPLIFAEIGDVNRFDSPSKLTAFAGIDPSQNQSGNKLSTNEKTSKRGSPYLRHAIYTAAFVAISNDPVLRDYYDKKKAEGKHHFVALAGVQRKLLHIIYYVLKEQRDYRKSLIK

SEQ ID NO: 137651 - protein, 402 aa, unidentified
MRFFVGIDWASRAHAVCIIDQTGRVRWQDSVPHTAEGLPELVGHLRRFRGRGGLRVALERPSGLLVDTLVDAGFEVVPIHPNALKATRPRYSAAGGKSDPGDAFILADLLRTDGHRFPALRPPSDETRALRALVRGRDDLVTQRVALANQLRALLERFWPGAAAIFVDVDSAIALAFLARYPTPHSAARLGEKRLAQFLGQHAYSGRRPVVELLARLRTAPASQVGEAEAEASGDLVRALVAVLTPLVGQLQQLSAAIEAALAQHPDGRLVQSLPRSGAVNAAQILAELGDDRARFPSDEQFAAEGGLAPVTHASGQHKAVVFRWACNKRLRRALTTFADTSRHASRWAALVYQRARARGCRHQHAFRILARAWARILWRCWQDRAPYDVSRHRAAQALAAA

SEQ ID NO: 137652 - protein, 400 aa, unidentified
MLSIGIDVSKGKSTVCGMKPGGEIVYTPFEVQHTREGMSDLVSLLRSSGEEVRAVLESTGSYHCPVVAALLENGIFVSVVNSLRMKRFCSQSIRKVKTDRIDAMQIALYGLAYWQELQPTRLPEDTYRELQLLARQYYQMTSMLIKAKVDFNAICDQVLPGMQELMNDHAGRHKLSDFVLRYRHTTHILEMGETRFRKDYCKWAEKKGYRNCERMAALIFATAQNGIPVLPNAPSTQIVITEAIRVLHTVEASRDAILTQMQALAKTLPEYSLVREMPCIGDTLAPRLIAEIGDVRRFHSKRALIAYAGIDAPPYQSGKFCANNRHISKRGNRYLRKTGYEVMQSYVMHKPANDPIFTFIEKKRGEGKSGKLAMVAGLNKFLRVYYGKVTELYRSLSAIE

SEQ ID NO: 137653 - protein, 360 aa, unidentified
MMKNSVAAAVHAALNAERPVILDHPPAAWAEEPRPRQEPTTEAVPLPAECWVGIDVAKAHLDGATWPESERLRVTRDDAGLVALTAWLRARAPRLIVLEATGGLEVPVVTALVEAGWPVAVINPRQARDFAKATGRLAKTDALDAAVLAHFGHAIRPEPRPWKDAEAQALTAVIQRRRQVVEMLTAEKNRLASAHPHVKPDLEATIAWLEQRLKDHDRDLQQRLRASPVWRERDDLLRGVPGIGPVTAATLLAALPELGTLDRRQISALVGVCPFNRDSGQSRGRRMIFGGRAGVRAVLYMATVTASRCNPVIKAFYQRLRQAGKPAKVALTACMRKLLTILNAMLKAKTPWQPPAECRS

SEQ ID NO: 137654 - protein, 341 aa, unidentified
MEKITTIGLDIAKHVFQVHGINGAGATVSRRRLRRDDVVGFFKALPPCLIGIEACATGHHWARVLMALGHEVRLMPASYVKPYVKRQKNDATDAEAICEAVTRPTMRFVPVKSEEQQGVLMLHRVRELLIRQRTMLVNALRGHLAEFGIVTRQGIAGVGMLIALVDDDDHDLIPPLARSALLPLIGQLRELHEKISELDRQIHAWHRSNELSRRLETIPGIGPITASAIAATVTDASLFKSGRQLAAWIGLVPRQNSSGGKDRLGRISKQGDPYLRRLLVVGAHAVLRFSGKAKVAPTRWAAELLVKKPYNVVAVALANKMARIVWALMTTGRRFEATAAL

SEQ ID NO: 137655 - protein, 343 aa, unidentified
MDHFAGLDVSVKETSVCIVDDTGKIVREVKVASEPDALLAVLANPTYRLRRIGLEAGPLSQWLFSALANAGLPVICVETRHIRAALKAQINKTDRNDARGIAQMMRAGLYRAVHVKTLRSQKLRMLLTHRKLLQSKAIAIENDLRATLRNFGLKVGMVGTVRFEERIKELVENLPDLAVLVEPLLIVRQTLREQFGILHRRLLAIVRDDEVCRRLMTVPGVGPVVALTYRATVDVPARFRNSKAVGAVFGLTPSKYQSGEINRTGAISRCGDEMMRMMLYEAAQVMLLRSAKWSWLKAWAMKIARNRGMKKAIVALARRLAVIMHRIWVDGTEFRWTREFAAA

SEQ ID NO: 137656 - protein, 340 aa, unidentified
MKDTIFDHYIAIDWAAENMAIARMTKKSNKITAIDVPADLGEVRAYLKALQGTKALTIEETTPSQWLYTELKNHVDKILICEPHHNRLLNEGPGNDKIDATKLVQLLKAGLLKEVYHSNSDFIHLRRLVSGYEDLVQAGVRSQNQRYSLLRACGKQGYEKTKVGLVAKEDRFVLNVLDRQIDTYAEEKKEYEKEFKQLAQKHKAIRHQMTLPGIGVICAVKIVARVVTPFRFESNGHYLGYLGLVKHEKISGKRKYGKRKPRYSRQLKGVYKTATFAAIGGNNPINDYYEYLIQEKRYADYTARHKACRRLATLSLGVFKSGKPFQPDRRKDRVKIEKAK

SEQ ID NO: 137657 - protein, 462 aa, unidentified
MTFSPCRVDGSGSGVTGSGGIDRPLIRGMTTGFFAGREALRNVDVAIGAVGRPGEDDRRTSVIDVSGTGAFLGLDVGKGEHHATAVTPAGKKAFDKRLPDSEPKLREVFGKLQAKHGTVLVVVDQPASIGALPLAMARDMGCPVAHLPGLTMRRIADLYPGEAKTDARDAFVIADAARVMPHTLRSVDLEDETTAELEMIVRFDEDLTGDATRISNRLRGLLTQIHPSLERVFGPRVQHPAVLKLLDQFGSPAQIRKAGRRRLVTPTRPKAPRMAERLVDDIFTELDEQTVVVPGTDAAALIAPSLASSLQAVLDRRKLLTARIEELLEKNHPLCKVLTSMPGIGVRTGARILIDVGDGRWFPSAAHLAAYAGLAPATRSSGSSIRGEQPSRKGNKQLERAFFLSAFAALADPDSRAYYDKKISQGKHHTQALLCLARRRADVLFAVLRDGTFYEPQPAPSA

SEQ ID NO: 137658 - protein, 459 aa, unidentified
MTMVKVATKGSLVKYEKGLQMINPHAGGLDLHQETIWACVAADRDGDSQVKTFGTCTAELRRLAKWLRDVGVTTAAMESTGVFWMPVYDILEKTGLHPLLVNAAMVKGIKGRPKTDRLDCMWICRLHSYGLLSGSFIPPPQVVALKSLCDCREKIIAENSRTIQRIQKTLQRMNCRLDNAVSDVTGDSGMRIIEAILAGERDAMKLADLSDIRCKKDRAAIALDLEGNFQPELLTVLGEWYEHYCFYQQRLSSVNTKIYALLEQFPKKAKAADLPPKPAHYREAKKEFILPLRPLLFEIFGADLTQLSGIGPTVILSFLATVGSDVSAWPTENHFASWLGLAPNPQISAEHRKKGKTKRVKNLLATNLKIVAMAVQRSDSFLGAFHRRLKARIGPSLARIAVARKMAIILYRLTRDGGQAIKFSAEQYEQLYRERKLKNLKRQAINLGFDLVAVPAVNS

SEQ ID NO: 137659 - protein, 378 aa, unidentified
MNADKMQGDGSSERQGDVLLVAMEMGLKSWRLALALAGSLRHRQKSMEAGQYGQFDAAVAEARERFGLAADCRVSVCYEAGRDGFYPYRQLVSAGYTVWLIDSSSIEVDRRYRRAKNDVLDAGRLLGLMQRRWRGELPMRLVRVPTPEQEDERQRSREREELRQDRQRLKVRMQSLLFAQGLREFPRSVAAIERWLERRELPRHLAVRVRRELERLRLVDRQLKTVEGERRQAQANAPDATSMDGTAARLYRLRGIGECGASVLSAEMFGWRRFRNRREVGAVAGLVPTPYDSGESQREQGISKAGNKRLRRTIIEIAWKWLDYQPDSVLSQWFKQRFGQQGKRSKRLGIVALARRLLVELWHYLEHGVLPRGALLKA

SEQ ID NO: 137660 - protein, 382 aa, unidentified
MTRCRASMHRRRVVGENTTFIGLDVHKETITVALAESGERGEVCEYGRIVNSPEALKGLLRKLQRTGRQLQFCYEAGPCGYGIQRQLTAAGHECVVIAPSLIPRKPGERIKTDRRDAVSLARLHRAGELTPVWVPDPAHEAMRDLVRARLAAVRALRQARQQLSGFLLRHGRHYGRPAWTLMHRRWLSGLRFEQAVHHVVLEDLIAAVEAATERRDRLTRQIEAVLPEWSLASVAQALQALRGVALVNAVTLVAELGDITRFASPRQLMAYLGLVPSEQSSGQSRRQGGITKAGNGAARRMLIEAAWSYRFPARVSRDLLLRQEGLPQPVRATAWKAQLRLCRRYCRLAHAGKPATVVTTAIARELAGFVWAIAHQFASRTA

SEQ ID NO: 137661 - protein, 347 aa, unidentified
MIIIGCDLHTRSEQIAMLDTETGEFEERRLEHEDGEARRFYAGLKEPALVGIESTGYTRWFADMLAELGHELVVGEAGKIRAKETRKQKHDRRDAEHILNLLLRGDFPKIWLPSAEERDVRVLLEHRHQLVELRTRAQNGLQAIALSYGLRRRRRLWSERGQEELKKLPLREGMGRRRADLLRLVRQLDTWIQELDRRIEQEVAQREDAQRLMTHPGVGPQTALATVLVLGPVERFPDDRHLTSYLGLIPQEDSSAGRQRFGHLTKQGNRLLRWLLVEAAQTASRYDPRLARAYRRLAFRKGRAVAKVAIARKLAIRLYIMLRDKIDYPEFCRRGSHAGMPEEVALA

SEQ ID NO: 137662 - protein, 342 aa, unidentified
MHITSIGIDLGKTTFHLVALDEHGKAVVRKKFSRKQLLAYTANLQASLIGIEACSGAHFIGATLREQGHDVRLIPAQFVKPFLKSNKNDFLDAEAIAEAVARENMRFVPIKTDEQLDLQAMHRVRDRLVQRRTAIINQMRGFLLERGITFAKGPANLRKNMAAILEDADENLTPRMRNLLAQIWQEWKQLEVDITTISEQIERISTEDEACKRLRQIPGVGPLVSTATVAAIGNGAAFRKGRDFAAWLGLVPRQHSTGGKAKLYGISKRGNLYLRRMFIHGARAVLLRVKYDTAGLGHWVHQLETRAPRNKVIVAIANKLARIAWSVLFRGEPYRHAALAAA

SEQ ID NO: 137663 - protein, 404 aa, unidentified
MEVLHPRCAGLDVHKKSVMACIITPEGREVREFGAMTRDLLALADWLLERQVTQVAMESTGVYWKPVYNLLEPLDITVLVVNAQHIKAVPGRKTDVKDAEWIADLVRHGLVRGSYIPDRGQRELRELVRTRRTLIGERSRVVRRIQQVLEGANIKLSAVATDVLGKSGREMLEALVAGIVEPAALAELARGKLRKKQGALKEALEGLVGPHQRLLLAHHLRHIEFLDDEIAQLSQEVEERMRPFKEELALLDEITGVGPRVAEEVIAEIGVDMSRFPTEGHLASWAKVCPGNNESAGKHKSGRTGQGNPWLRSGLVEAARAAARNKRSYLAAQYRRIAARRGANRAAMAVAHTILGIIYQLLSRHCHYQDLGADYFDQREQDATVRRLTRRLERLGYEVAPKPV

SEQ ID NO: 137664 - protein, 346 aa, unidentified
MNYCGFDIAGVSSYVYVTNEKGRKLSCGAVATDKATIERRLKPFLRCGLSVAIEAGNQTAWIYEVLVGMGAKVTVVNPAKVKAIAESRRKTDKIDARILCELLRLDALPHPVHMPGRDTRALRGLLVARRQLVSARTKLCNVVRGMLRQEGIRLPAGALSSFAGWRRLLAQGYEQAHLPVVLATFFDSFVSLTDSLRDLEKHLAESERKDGRVARLKTMPKVGRIAALTFVAAVDDVHRFPSSRKLVGYSGLAPTVRSSGERTEYGSISREGRRELQAVWVQIAHLVAIDGTKATQPLRRWFEKVAGKRGKKTALVALARRLLVIAYRLLKDETVYDAARIKKRAA

SEQ ID NO: 137665 - protein, 387 aa, unidentified
MPQPNDLSRSLVALDQNSTVIAVVELSHSSWLVAGMVPGIERQPRKKLEPNPERLLGLLHRWRYEAVKAGRTITRIALAFEAGRDGFWLARWLAARGVEAHVIHASSVAVSREHRRAKTDRLDTELLKRGFLGWLRGERGHCHMARVPTIAEEDAKRPNRERDCLVGERTRIVNRIKSTLVRLGIRNFKPTLRKAAERLATVHTPEGMPLPPNTLAELQRDTARLGLVVSQIREIEETRQKRLEQQPETGSHAMVRLLSRIVGVGVETADMLVHEVLSRPMRDRRAVARYAGLTGSPDESGARRREQGLARAGNARVRRGMIQLAWRFLMFQKESALALWYRARTADSRSGTRKTMIVALARKLVIALWRFVTTGEPLEGVVLRPAS

SEQ ID NO: 137666 - protein, 410 aa, unidentified
MEIVYARVAGIDVGKREVAVAVRVPGQSPGQRGQQVRKFKTFYPVLQQMVRWLVEQGVTHVAMESTGVYWKPVFHALCESDSLEIVLVNARHVKNVPGRKSDVIDCAWLGQLLECGLLRGSFIPPPQIAAIRELTRYRKKLIESRTRELQRLSKVLEDGGIKIDSVASSITTLSARDMIEALIGGERDPRVLADLARGVMRKKIPDLTMACSGRFGDHHGLLARMHLEHIDHLTSMIDELDTRMEQVLAPLAQQMSLLRTIPGIGERAAQVIISEIGVAMSRFPTAAHLASWAGLCPGNNESAGKHKSGRTRKGNQEIACARWRSTCWTRQKGQACRSVPARWCCNPVREGSPRSSVARTRFEATAAETGAYVALEVPQAGAPPPRHVHDAAEEASMASSTTAMGIPSSA

SEQ ID NO: 137667 - protein, 399 aa, unidentified
MDHCTAGLDWASEEHAICIVDAAGAIRESFSVRHDASGLGELVRRLCRYPELRIAIERPDGLLVDTLVDGGLRVVPIHPNKLKAARERYSSSGAKSDPGDAYVLADLLRTDGHRFRELAPLSEATRALRALVRSRDDLVKARVALTNQLAAQLAAFWPGAAEIFHRLDSDIALAFLTRYPTPEAALHLGEARLRAFLRRNAYCGRRPASDLLVRLRAAPSGLAGTLESEARGECVKALVRALGVLLPQIRELEGAIAVALDEHPDGALVKSFPRAGEVNAAQLLAEIGDVRERYVSDDVLAMEAGVVPVTRRSGKSKSVGFRWAANKRLRRALTGWADNSRRASPWAELLYQRARARGADHPHATRILARAWLRVLWRCWQDRALYDPTQHLGAARTAA

SEQ ID NO: 137668 - protein, 444 aa, unidentified
MTNDSIQTNSAPGREPAVPIVGWVGLDWADQQHCLVVRTAPGAAAKTHLVEHKPEALDQWLLQLRKDHPQGRIAVAIEQSRGPVLYALMKYDFLALYPVNPRCLADYRRAFKVSGAKDDPLDADLLCELVCLHADRLRALAVDDVPTRKLRLLVEARRVFVGDRTGFSNRLGANLKCYYPLALDLIGEDLATPMALDFLRRWPNLAKLQAAKPGILRAFFYAHNSRSEDKIAQRLEAVKQATPLTEDPALVQPLQLQMERLAQQLRSLNQAIDQYDAHIKMVFAQHSEKWLFDPLPGCGAVLAPRLAAAFGTIRANFESADDLLCFSGVAPVKKESGTLKVVHFRYARPVFVHQSIVEFAKCSIGQCEWARLLYEHQLTKGKSRWAAIRMVAFKWLRILWRCWQDRQAYDETKYLRSLRRDGVELYRSIYGGLLPLKVTTVNNS

SEQ ID NO: 137669 - protein, 352 aa, unidentified
MKKFYGCDAHKKYSMFGSMDEACNPGLFVRVENSRDQFRDFLHTLPPGSPIALESVGNWYWMIDEMERAGHVPKLANAGKAKLMMGQINKTDKLDAKGLALLLRNGTLPSVWIPPGELRDQRELPRMRMAFVRVRTMLKNRIHAALAKYAIVIKEFSDIFGVGGRALMASRLGELPPQTRSSVEAQLKLLDQVEEQIKLCEKQIKEVVEESPAMKLLKTIPPVGYILTVVIALEVGDIKRFWRAESLANYAGTVPRVKDSGGRRRYGRVRSDVNRYLKWAFIEAANIVVLNQARWNDRHVVQLYRRIRQRRGHAKAVVAVARHLAEATYWMLTKNEPYREPKRNNTVSSTRK

SEQ ID NO: 137670 - protein, 337 aa, unidentified
MKTSENMYGTFVGIDVSKLTLDVTILNPLNRKLHHRVFDNSDEGHINLKDWLCECHSLDLTRTLFCLEHTGLYTRSIDRFLVGSKTNVWKESSLHIKKSLGLTRGKNDKIDSRRIAEYAYRFCDKADINGLYPSVIQKLRDLLTTRERLNKSLKSIMVSINELKRVDLRQAINLETYQLAAIRGLKESIREVEEAMFETVENDKQLKKHCEMATSIPGVGKILAIKLMVYTQMFTRFESVRQLACYCGVAPFEHRSGTSINGKTGVSKFANMDLKSTLHLASLSAIQHNPDLKAYYQRKVNEGKSKMCAINAVRNKLLSRIIAVTKRQTPYVVLAQV

SEQ ID NO: 137671 - protein, 367 aa, unidentified
MFSERTSVGLDVHARSVAAAAIDGVTGELSRARLTPAHDHIRGWIRELPGPVAVAYEAGPTGFGLARALAADGVRCVVAAPSKLQRPSGDRVKTDAKDALHLARLLRLDEITAVVVPSRDQEAARDLVRAREDARGDLMRARHRLSKLLLRHGIVYSGGAAWTGAHDAWLRRQHLDDPATRIAFESDYDAVLAVTARRNRLDAAIATLAADSEFTPLVRRLSCLRGVSTLTAFALAVELGDWHRFTGNTIGSFVGLVPSEHSSGASRVQGSITKTGNTHARRLLVEAAWHHRPAYRPGKTIRDRWELAPPAARARGDAGNRRLHERWITFNLRRKRPVIANVAIARELAGWCWSLAVLDTSHDAVMR

SEQ ID NO: 137672 - protein, 417 aa, unidentified
MQTELSRFTAIIGIDWADKKHDVCIQTTDSSDRHNDQISHKVDKIDEWAQSMYQRHGGPMAVAVELSKGPIVYALQKYDFFVIYPINPTTLATYRQAFKPSGAKDDPTDAELALDLLSHHPGRFEALNPQSMELRTLMTLVEQRRRIMNDRVRTTNRLRNALKQYYPQVLDWFDRIDTALFCDFIRRWPSLLQAKRARKATLEKFFHEHHIFRKELLKQRVDAIKSATPLTTDEAVIVPYRLQVLILANQLEVALQSVQRYDEEIAALAPQHPDYQLFSTLPGAGPCLAPRLLVAFGEQRERFSSAAEVQKYAGIAPVTERSGQKTWIHWRWQCSTFLRQTFVEWAAQTINKSYWAGLFYAQQRAKGCSYQAAVRALAFKWIRILYRCWTTRTPYDEAKYLKALRDRGSPLLGVETT

SEQ ID NO: 137673 - protein, 382 aa, unidentified
MAMKVRSWAGFDVHAAKVVACVVDAESGEMTTHRLPGDTEKVVAFCAALPGPTRVAYEAGPTGFGLARALHAAGVGCVIAAPGKIERPAQDRVKTDQRDAERLVRLLMIGALHEVRVPGLAEEALRDLTRAREDLRGDLMRARNRLGKLLLRYDVRYEGTGDRWTDRHRAWLAKVELPERGAQATFLDYLGAIDALVIRREQLEATITELAPVSRWATDIARLRCLRGIDTLSAVGLCAEVGDFARFERPAQLMSYVGLVPSERSTGEARRQGAITKSGSSLARWLLIEAAWHYRHPPRLGTKLQRRQQDQPAAVIALSWKTQRRLYQLWRRLDHKRGKRRQLVAVAIARHLAGFCWAIVNLDPTATGTTPANDTNRLTQTG

SEQ ID NO: 137674 - protein, 434 aa, unidentified
MIILAQIKYNKKLRFCKMEKQKKETISFEQIISRGCGIDVHKDEVVITVRGKGLREETFTYSTFTEELESMRDMLKGKQITHLAMESTGVYWKPLYNILESDFEIILVNARHIKNVPGRKTDKKDSKWITKLLLSGLLSGSFIPPRHIRDLRDLTRYRTKISNQIASEKNRVQRILEDANIKLSSVVSDMSGATATKIVKALIDGQEDISELVKYRHGKMKATPEELAASLKGNLTEHHKFMLRTIKKSMEEKEGLLEILDEQIDKLLESEKIDVDRELLQTIPGVGEIASAGIIAEIGTNMEQFPNEHHLASWAGMSPGNNESAGKKKSSKTTYGDKYLKTLLVECAWAATRTKGTYLRSKYDSLVVRRGKKRALVAIGHKILTAAYFILKEKEPYKELGAEYLQSRNKNKKVNRYLKYLKEMGVEVEIKKVA

SEQ ID NO: 137675 - protein, 410 aa, unidentified
MADYDLYVGIDWATQTHQVCVVDARGDRREQWQVAHSGAGLAELAASLRARAPAPARIAVGLEIPRGAVVDTLLEEGCDVFAVNPKQLDRFRDRHTVAGAKDDRRDAFVLADALRTDGWAFRRLTREDPRVIQLREVSRLHDELRQERTRLTNRLREQLVRFYPHALALCAAADEPWLWILLERAPTPAHAHRLTVRTLRAVLASHRIRRFTAEELHAALGAPALRVAPGTTEAASEHVALLLPRLRLVDEQQKQCDRRLESLLAALATGEGDGAQREQRDVTILRSCPGLGRVVAATLLAEATQPLAARDYQTLRGQAGTAPVTRQSGKGRSVSMRHSCNPRLRTAMFYWAQTAIRADARCRSHYQRLRQRHGYARALRTIADRLLAMLIAMLRSGTLYEPARRPVIGT

SEQ ID NO: 137676 - protein, 349 aa, unidentified
MTVGIDVHKRSHAAAIVDERGAPLATLTIANSREGARRLCRWLSEHGAEQATVGVENAAGYGRLVCAVLAAAGHEVLNVPAWRVHRERPQQGPGKSDPGDAVAIALCVLRDREKLGPALEPPLIRAIAFLETHRRQSVTRRSDAIQRLRAVWAQVDPEAEAAVPNIAAAKALRRLKQIELGDGLAEQAAARCIHDLAGEIEALNTRVTELETELQRLLSDTAAPFDDLPGAGLATTVTLIAQSGDVRRFRNEAAYARYGGAAPIPCGSGSTAGRHRLHRGGNRQVNACLHRIAVTQARVDPNARAFLARKIAEGKTKREARRALKRHLSDVVYRRLHTWAEHALPPLRT

SEQ ID NO: 137677 - protein, 419 aa, unidentified
MERLIEHCAGLDVHQASVVACVLIHETGKRAKKQIRTFGTMTNDLEALRDWLEEQGVTHVGMESTGVYWRPIYAVLEGEFELIVGNARHIKNVPGRKTDIKDAEWIAELICCGLIRPSFVPPKPLRELRELLRYRRKLVEVQAAERNRLQRLLETANIKLGSVASDVFGISGRAMLRALIEGEASPAEMAELAQGRLRRKRADLVRALEGHVEEHHRFLLAMQLQRVEAAERDIEQLDVRITGKLIPYQPAMTLLMQIPGVDWVVAAAVIAEIGVDMSVFLSVHHLVAWAGLCPGSYESAGKRKNVAARKGNVHLRTILIGAAMAAKNTKGSYYKDKYHRLKARRGAKRAALAIAHKILVAAYHMLSRGVGYRELGEAYLDQLDQTRTAANLKRRLERLGYVVAIQPKNDGPQPQEAVL

SEQ ID NO: 137678 - protein, 318 aa, unidentified
MSDAVFIGIDVSRDTLEVGSTAQTSTSQQTNDTAGIAALTAQMLELGPALVVLEATGGYEFEAACALQAAGLAVAVVNPRQARDFARAMGALAKTDSLDARMLAEFARVLHQHPERERFIKPLADAELQRLQALVLRRRQLVGMLTSERQRLRMSHASARPSIERVIEFLKAQVEDIERDCAAHVSAHHAALAQALGSVKGIGPATISTLLAELPELGQLCRRKIAALVGVAPLNRDSGQMRGQRAIWGGRADVRRTLYMATLVAVRHSAVFKTFYQRLVATGKPKKVALVAAMRKLLTVLNAIAKTGQHWDESLHSA

SEQ ID NO: 137679 - protein, 343 aa, unidentified
MTKISTIGLDLAKNVFQLHGVDASGAVALKKQLRRGALEKFFAQLPPCLVGMEACGSAHHWARVIGRYGHEVRLMPPAYVKPYVKRNKNDGRDAEGICEAVGRPTMRFVPVKSVEQQATLAVHGTRALLVRQRTMAANALRAALSELGIVAAQGYEGLRELMAKLEEPSEEIPEVMRGALLVLAKHWQALDADERVLERQIAKAARCDQDARRLMEVPSVGPIIASTVLAKVPDAKVFRSGRDFAAWIGLTGKDHGTGGKHRPGRISKQGDRMLRAMLICGASAYLRHQKARGVSDPWLRELLARRPYKVVMVALAAKTARIIWAMLAKGEAYRDRASASAAA

SEQ ID NO: 137680 - protein, 326 aa, unidentified
MEHELHYIGIDTAKEKLDVDVLRPDGRHRTKKFANTTKGHDELVSWLKGHKIDHAHICIEATGTYMEPVAECLYDAGYIVSVINPALGKAFAQSEGLRNKTDTVDARMLAEFCRQKRPAAWEAPHPLERALRALVVRHQALTDMHTQELNRTETAREVQRPSIDAHLLWLEAELKRLEKQIKDLTDDDPDMKHRRKLLESIPGIGEKTSAVLLAYIGLKDRFAHARQFAAFAGLTPRRYESGSSVRGASRMSKAGHVSLRRALYMPAMVATSKTEWGRAFRDRLVANGKKGKVILGAMMRKLAQVAYGVLKSGVPFDASRHNPVAA

SEQ ID NO: 137681 - protein, 355 aa, unidentified
MDSKKYIGMDVHKESISIAVMNGAGKIGMECVIETKASMILQFVNGLRGDLQVTFEEGTSAAWLYDLLKPHVTRVVVCDPRKNASMKEGNKSDKIDARRLAELLRLNHLNPVYHGEHGLRSLKELVRSYLTITKDLGRVMSRVKAIYRSWAIPCTGKQVYAPRHRAEWLEKIGEPGVRRRAEFYYQQLDALRTVRQQVRRELLAESKKHQVWKRLCQIPSIGPIRAAVLLGILQSPHRFRTKRQLWTYSGFGIETHSSADHRSVDGQLRRAKKQISVRGLNRNCNHDLKNLFKGAAVVASSKPGPFQEFYTALLTKGIRPEMARLTLARKIAAIALIIWKKGVTFDAQHLKPQTA

SEQ ID NO: 137682 - protein, 376 aa, unidentified
MKRSCGIDWAEGHHDVAIVDSDGKLVAKKRISDDPAGFSALTELLADSGDSPEDPIPVAIETPRGLLVAALRGTGRPVFAINPMAVARYRERHSVARAKSDHADAMTLANILRVDAHLHRQLPAHSELAQTIAVLARAQQDAVWRRTIAPTPAHAARLTKARIAAALRRAGRKRGIDDLATDILQHLRIPQLRQPDLVEKAMGRQAMALLAMLDAACAGADDLEQAATEEFRKHPDYAVITSFPGLAEVTGARILAEIGDDRDRFADGRALKAYAGSAPVTRASGKVTSITHRRVKNDRLAAVGWVWATYASINPGPARTHYCRRRDHGDRHAAALRHLFNKMIGQLYHCLQTRQTFDAQKAFSHSADTPQNEAAA

SEQ ID NO: 137683 - protein, 349 aa, unidentified
MPRRVKKVVLLENGEGKRKNGAIMGIDVHRSILAVCILNEKSFLYEQNHTNNKAGLETILKLVKKFKVRGVAMEATSTYHLKICFALIDHSIPVLLACAKQTADTQGRKTDKLDARRIAVAYRDGRLKPSVISPREFTHLRRSTRKLVMLIQDQTKSKQRIQQLFQLYDCHLTAIQPNLLKTKWSLDLLLACLEITENIGNKNIKELVLEYYPEKKQKFASSSQINSLQDEIENLLNQLTLVEKINLQTELYQIRIFDKLIEQHRLIYRIFAKEHPQFKNNMELLLTIPGVGPDTAAIVLAEVVDVKLFSKPEKLVKWSGLAPRVLQSGHRKKKTEKSIKEVINISEGL

SEQ ID NO: 137684 - protein, 418 aa, unidentified
MGRLKIVYPICCGMDVHRDFVIACIASTNPQGVTSYASRRFSTFSGGLRDLRDWLAKQGCKDVCMESTGKYWFPVHNILEATCNVVVSHPKFVKAIKGKKTDKKDAQWIADLFKHDLVRGSFIPPEGIRQLRDLCRYWMKLTWCATGEKNRAQNCLTVSNFKLDSVFSNVFGKSASAIVSYMLEHPGEQFDVTPLVDGRCKTPIEEIQQAVDGVFSPWQAEKLKVIRGHMNDLDKCKALIEDLILRLAEPYMHQVELLLTVPGVSDPMTAIRILAEIGADMNQFESSKHLCSWAGLTPQNNESAGKKKTTRIGKAGQYIKPLLIQCAMAASNPRSDKNPDIRAKYQQLKKRRGTKKARVAIARRLLTAIHQMLLKDEPYTPYIAPAKETIPQSRVLSPEQALAMLRAKGYIIEEAIAA

SEQ ID NO: 137685 - protein, 338 aa, unidentified
MKLYGAIDLHSNNCYLVLLDENDNVILQMRCPNDLPTILSRLSPYQSAIQGIAVESTFNWYWLVDGLMEAGYRVHLVNTAAVQQYEGLKYTDDEHDARWLAHLLRLGILPEGYIYPAQTRGIRDLLRKRSQLVRQRTSQILSIQNLMSRNTGQMIKGDAIKRWTPEEVEQRLPDPALSLAVKSNLSVMQALDRNIDELEKVVLKQARLRPEFKPLLTVHGIGPILGLTIMLETGDIRRFEQVGNFASYCRCVQSQRFSNCKKKGEGNRRNGNKYLAWAFVEAAHFATQREGLIKRFFQRKASKKNKIVAIKAVAHKLARACYHVLRDQIVFDVNKAFA

SEQ ID NO: 137686 - protein, 357 aa, unidentified
MKKLFIGIDFSKEKLDATIILACGMNEIGSREYGCFPNNTTGYRKLCNWVKTNAWNTIAEEWLFCGEDTGSCSIGLSKWLYGKGYDIWIENAYAIKHSSGIQRMKNDKADSAIIAEYAWRQQDKVVPFEPLNESLAQLREIFLYRHKLVGQRVAMELRKEDKSQSNKSKAISFINRKSKHLIAEINKTIAECDKAIDSIIEADEELKENYAIITSIKGVARQNATCMLVYTNNFKKFGYDPRKIACYYGVAPFGKQSGTSVNTPAHTSHFANKLIKSLLGQAAHIAKIYNPEIRDYYQRLISKGKKPQVALNNVKNKLIRIIVALVRKKVPYDQNTYKYYEEREVIERKKNEKLIYC

SEQ ID NO: 137687 - protein, 445 aa, unidentified
MFIQSQDDSHCCYSFFIKVVILMMKLKYSICCGLDVHKNVIVATIVTTNKDGISEYLQKSFSTINSDIQRFHNWLIENNCYHVCMESTGKYWIPIFNYLENDIDVCLTHPKYVKAIKGKKTDKKDSKWIADLYKFDLVRCSFIPPKDFRQLWELSRYRFKLVCMKSSEKNRIQNCMTISNVGIASVLSDPFGKTATEIISYLLEHTADSMDEKAVRKLIKKGAKSKSDEIIEAIKGYTIETDQAKKLELARGHLEYLDDMITQTEVELYVRIKPYYEFVEFVSTMPGMTELSSTIVLAETGVDMDIFDDAKHLCSWCGLSPANNESAGKKKSVRIAKAGDYLKPMMVQCALAAIKSKKQPYFAIKYGRIKKRRGHKKAIIAIARMMMVCIYHMVSEKKPFTPTDYEELMDPQNHVESVVLNENNVFAYLESLGYDSSKLVKRNDN

SEQ ID NO: 137688 - protein, 430 aa, unidentified
MHNKNYISVGIDVGSAFSFMTILAPDETVILKPFKITHNNKDSLERAVSEIKKAEELYSLESRTFLESTGIYHFPLFCYLVDCGFNASIINPLITHSTKNGNIRKVKNDKIDSKGIAKLGLSKDIPVSQFPAKLVLELRSLTRKYYDLTDERSAHINKLKGDLHTVFPQYLDVFCDVTGKTSTMILRQYGTPDKILRGHKKTMIEKISKASRKGLAKASERYEKLCAAANAAKTFGCQIDSIYFNIFLTLDLVEKLDSALDSILNRIRQLITFNKNEKFIQQIKLLNTIPGVGFLTAVTIMCEIGDFSAFRNPKQLFAYFGLDPEVNESGKFVGTQLHMSKRGSRIARRAIFAVALASIRTKRNGEGINPYLRKYYELKSGQKPKMVAIGAVMHKICNIVFAVLRDEKAFELRSPEEHCKQYQRPALAAA

SEQ ID NO: 137689 - protein, 313 aa, unidentified
MSDPKFVGIDTAKASLSVASCPSGIALDVPNSPEGRRNLIKALKEHSVSLIVLEASGGYERAVAADLLDAGFAAVIVNPRQVRDFAKGMGELAKTDPIDARVLARFAEVVQPKPRPRPSEEQIELAELVNRRRQLVATRTQEENRAGMSHVLHVRRSIEKVIKLLNAEVERIDEHVAKLIEADETLSRKDKILRSTPGIGPGTSSMLLSQLPELGRLNRQEIAALVGVAPWDRASGTWTGRSCIWGGRAAVRCALYMAVLSAMRFNPAIKAFAQRLKAAGKAFKIVATACMRKLLVILNSMLRSGTPWNQKNA

SEQ ID NO: 137690 - protein, 374 aa, unidentified
MHSINNTELSSHEETRCQFNGGRCAIKSAEGRIRRYVGLGIDVHQDFHVVAEQVGGTNPKPPQRFQKQAFLHWAAKLKQSGAEVYAVYEACGFGFSLQRQLSALGINCYVVCPQKLDERNKRVKTDGLDAKALCLRLDRFVQGNRDALAMVRVPTEEEERSRAIHRQREQLVGARKRLEAQGRSLMVNHGLEPVQNWWKPRTFASLLVPQWMRELLLNSQPILLALQEKIAALTLQLQSAATPNQPHGLGKMTSVIIDREIGNWHRFSNRRQIASYTGLCPGEYSSGNTRLQSCVTKHGNPRLRAALVELAWRLVRFQPNYKPIVKWRQILAKGALATGAARKKAIVAVARQLAVDLWRVRTGRCKPEVLGLVS

SEQ ID NO: 137691 - protein, 342 aa, unidentified
MTIIRIGLDTSKHVFQIHGVDENEKPVLRRQIRRSEVENVFAKLPPTRIGLEACGASHHWARVLRGLGHEVMLIPPQYIKPYVKRGKNDAIDAEAICEAMSRPTMRFVPIKTAEQQAALVLGLDPRMLGVRDLLVKQRTMLINALRGHAAEFGVTAAKGPQQVGELLRRLTTGEGVPALAREMLAMLAGQIEAVNAKLKAIEARLMAWHRRDQTSQCLATVPGIGPIGGVSFALKMPHAKAFRSGRHFAAWVGITPREDSTAGKHRPGRISRAGDEDLRRLLVLGATAVIQQAKAGRASPWLLELLARKPKKLAAVALANKMARIIWAMMVSGETYRRPTVA

SEQ ID NO: 137692 - protein, 387 aa, unidentified
MATVVIGVDPAKRSNTIEVIDSDENVLLMARFENSSADYRKMRGLVKRWPERKWAVEGATGVGLNLAQRLVSDGEHVVDVPSKLSTRVRAIDTGHGRKNDPSDAHAVAVVGLRTAGLRVVTVDDEAVVMRLLSQRRRDLVRSRTQAVNRLHQALMQLIPAGARKKLTAAKAKEKLATVRPRDAAGKARRQLAADLIDDVIVLDRKLDAVDKRIAEAVKASASTLTDIVGVGPVTAAAILGEVGDVARFTTADRFASYTGTAPLEVSSGDVVRHRLSRAGNRRLNNALHIVALSNKRYDPRGKAYYERKLAAGKGKKGSLRCLKRRLSDVVFRTMVEDRARANPGGQMGATLTASAVDQIPKANTSDKPQPGFVTEATPTRPPAKAAS

SEQ ID NO: 137693 - protein, 338 aa, unidentified
MKLLRQNSGIDMAKDTFVAGFTTINKEQTVLQKQPKTFNNNIAGYVEFSNWIDKFKSNDIQMNFSMEATGVYYEGLAYFLHERNKHVSVLLPNTVKKFGESLNIKSKTDKIDAKILGQMGVERILPEWKVSSKIYRELKSLTRERQRLVENRTAVKNQLHAEEHTAHPMKTVITRMKNHIKYLNKQIVGIEKELEKKTSTDDFVSEKIKKVTTIPGIAFITAVTIAAETQGFDNFTSSRQLSSFAGYDIQLKESGNFKGKTKISKKGNSHIRRAMYMPSLSTIVHSKTYKKIYDRLYQKKENGLIAGTAIQRKLLGLMYTLWKNDIAFIDNYESKKVN

SEQ ID NO: 137694 - protein, 307 aa, unidentified
MFIGIDVSKTRLDVHVRPNGEAFAVDRDGDGIEQLITRLQALSPELIVLEATGGFETVVAAGLGAAGLPLAVVNPRQIRDFARATGQLAKTDPLDAAVIAHFAEAVRPEARPIASEEARTLGEFVARRRQLLEMMTAERNRRRQLTSPRLVKGVDRVLATLQAQLTELEGDIDIAIRGTPAWREKEDLLTSVPGIGPKIARTMIAELPELGTLTRQQIAALAGVAPFNRDSGTWRGRRSIAGGRAPVRSALYMSILVAIRRDLPLAVTYRRLRNAGKPAKVAIVACMRKLITILNAILRDKQPWQMA

SEQ ID NO: 137695 - protein, 428 aa, unidentified
MKYNTQNSKIASITEKTLIVGIDVGSQVHYARAFDWRNYEYSRKPFAFSNDEEGFMAFKNWMDEIAENHDKEVVLPGMEPTGHYWFGLGMFLQNLGMRPVHVNPHHVKKSKELDDNNPNKNDRKDPKTIAALVNEGRFSYPYIPSGIYAEIRNLSNLRFQTQEEITRIKNRIARWFSIYFPEYKDVYGNLDAVSGMMILKQAPLPGDIVRLGVDGVNKIWRDAKLRAVGIKRAKTLVNKAEHSIGSQEAPEAARVELQILLGDYEMYTCRMNDLMQTIEEKLYEIPYIDKLLEIKGIGMITICGFIAEVGDIRRFDNPKQLQKLAGYAIVSNDSGKHNGESHISYRGRKRLRYVLYEAAISLIGKNAEFKEIHNYYRTRERNPLKKMQSVIAVACKVIRIFYTILTKGVAYDGTKMLEDIQRPALALN

SEQ ID NO: 137696 - protein, 365 aa, unidentified
MDVHQKSIVVCVVVGAEGDEPETEIRTFPAMTRDLFELLRWLEEKGVTHIAMESTGIYWKPVYNILEGYLANAQRIKNVPGRKTDVSDAEWIARLLRHGLIEPSFVPPLMIRELRDLTRLRKKWVSYLTKEKNRIQKVLECSNIKLSSVISDVFGVSGRNLLARLVEQGYIEPDEIEKRIKGRVKRKVAEISESLFGTLTEHQIFLIRHSWNHIMFIEQSIQELDQKIDELLQSFQEEMEIIQSMPGMNRLSAASVLAEIGTDMNQFPSAAHLSSWAGVSPRNNESAGKKKSTRIVKGNPHIRTTLCEAAWAVARSRNNRFATKYWKLAARRGKKKALIAIAHNMLVVLYHLLNKKERYVHAQLC

SEQ ID NO: 137697 - protein, 354 aa, unidentified
MLTSIRPQDYNIFVSLDVDKKSYAISFKEYQNPKCYSLKIPAQPANMIQFFQKRFPGKRLIYAYEAGPTGYALYDYVTSKGHDCMMVHPGNIEKAPKDRVKTNRLDSLKILNQLHGGNLKGIRVPSESYRQLRHLTTLRQQYAADQRRAKQRIEALLTFESIQLPFVTGKRWSSRHLQTIKELKLEAVRRFRLDSLLEDLSYARQQLLKIHRQLQEFCRQNNDIQKNIQLLRSIPGFGFVIPTYLLGRIGDPAHLHTIRELGSFVGVVPSEHSTGDTVKKGPITHMGDPILRGLLVEGAWIAIRKDTELRQFYDRIRSRNSGDHGSRIAIVAVARKLASRAHRVLKDQKPYSIR

SEQ ID NO: 137698 - protein, 270 aa, unidentified
MEPTVMGVDIAKRVFQLHWIAADTGEVFDRQLRRDHFLEHFANRERCLIGMEACGGSQHWARRLVELGHEVKLMPGKLVKAFVTGNNNDVADARAIWAAAKHPGVRAVPVKTEAQQAVLALHRIRQQLVIFRRSQSNCLRGLLGEYGEVMGVGRAAMNRAMPEVLLRLDSRLPRVLLDSLREQWQRLVDIDGQIAVIEQRLRAWLRENPACRAIAEIPGVGFLTATAAVASMGDPKAFRSGREFAAWLGLVPAQFGTGGKVRLLGISKSV

SEQ ID NO: 137699 - protein, 465 aa, unidentified
MKTKTSPSKKRKPKVSIDQRWEIINPQAAGIDIGAREHWVCVPPGAAPDPVRRFGTFTADLEALADWLQECGVTTVAMEATGVYWIPVFQILEGRGLKPVLVNARQTKNVAGRKSDVQDCQWIQRLHTYGLLQGSFRPADAYCVVRTYLRYRDELVSARSTQTQHMQKALQQMNLALTQVLSDVTGVSGLAIIGAILQGERDPVKLSRLADRRVRATPATLQKALVGDYRPEHLFVLQQAFDLYHTYEEKIQACDQEIVRALAQLPDRVDLKRQPLPKRKEGRQASQDRMAGQDLREALYRKTAMDLTAIEGIGSLTSLVVFTEVGPDVSRFATEKHFCSWLGLCPDNRISGGKVLSSRTRRVVNRASDALRMAATTLERSQSALGGFYRRMKARLGAAEAVTATAHKLARIIYRLIKYGEAYVRQGLQAYEKQFQSRRLRALQRTAKTMGFQLVPTQTLAAGVS

SEQ ID NO: 137700 - protein, 399 aa, unidentified
MMYQQFCGIDVSKDSFDITLLNSNGEIKLQDKLLMNRDGFNTLLKYLSSYSKENLLVAMEATGIYHLPLLSFLLENSFKSVVINPILIKSFIGSTTLRKTKNDKKDATSIALFSLKSYQSLHLATTDAIENIKPLIRERETLSKEIARLKTEIKAILTQLFPELSKNTNIFTRSILNLLLKAPSRKAIRNLKKQKIQKILDNTSGNKVRISADEILSLAKNSIAISDKYLEKVLTSKIRRLIYIQDELSFLDTELQNSLEDTDINNDIEILQSIPGIGSVTSKNFMVEVSSVEKFKSVKQLCAFIGIDPSVKQSGTSINYRGKISKRGNANLRRTIWQMAIGVIRSCDKFNAYFTKKREEGKKFKQAVIAVANKLLKTIFVLLKNKTKFDENLALGVSK

SEQ ID NO: 137701 - protein, 328 aa, unidentified
MTKYSNYYGIDVSKLTLDIVNQKGEHLQVPNNEKGFKKLHKILPKDSLCIMEVTGVYHIQLALFLYSKEIPLSVVNPLKIKRFIQMHLQRNKTDKSDAKMICLYGQTQQVELWEPNDPILEECKDIYAAMDHYIDIRAGLKRKIDSLNSKKAFNFLIKNIEKQILSLDSAIEELEKTLIEKVKSYDSALLTNIKSIKGIGERTAILLMIFTNGFKNFESSKQLSSYFGLAPTQTSSGISINKVERISKMGNPLVRKKLYMCSLQASVSNKACRDLFQRIVAKGKPKKVALVAVANKLLKIAFAISKSGLPYDPYYKSVKIEKSILKTR

SEQ ID NO: 137702 - protein, 364 aa, unidentified
MNKCHLNTELSSLEGTRSAFNRSKAVIKLGIDVHQDFYVVVEQMEGTNPKPAQRFQKQVFLHWAAKLSKSGSKVHAVYEACGFGFGLQRQLTALGIRCHVVCPQKLDERNKRVKTDGLDAKALCLKLDRFVQGNREALALVRVPTEAEEQKRAIHRQREQLVKARKGLEAQGRSLLVNHGMEPASNWWKGRTFAQLQVPEWMKELLQNSQPILLALEEKIRALTAQLQAAAISKQPRGLGLLSSVVIDREIGSWTRFKNRRQVGSYTGLCPGEYSSGNTRVQSCVTKHGNPRLRAALVETAWRLVRFQPNYKPVLKWRKILAKGALATGAARKKAIVAVARQLAVDLWRIRTGRVATETLGLIN

SEQ ID NO: 137703 - protein, 345 aa, unidentified
MNNTRVGVDLAKDVIQVCIYANNKVRSNKEMTQQEFSLWLINIKPGIIIFEACGTSNYWHQVATALGHDARLICPKFVASIRQGQKTDANDALAIIQASLLPEVRFVSGKNIKQQQLQSIMRLRELAIKHKTALSNQLGALLLEFNIRYSARTGGLRGAIESTLENGDNAFSTEFRSSLSASWEQYLSVLKAISKHDESLLKAINSHPECKRLLKLEGVGTLNAVSLYMSIGCSELGVFSKGKDVSACIGLTPIQHSSGGKTKLGTIGKYVKNSMLRSQLITGAMSAINQIVKREARTKKERWVQELVARRGRSCAAVALANKNVRTAYAMLTQGTDYKAELLTA

SEQ ID NO: 137704 - protein, 412 aa, unidentified
MRRVIGIDIHRTFGEVVFWEDGRLRHGGRVDMTRTALEGLGKSLSVTDEVVIEATGNCMAVSRVLSPFVRRVVIANPLQVKAIAQAHVKTDKIDAGTLASLHAADYLPQIWTPDAATERMRRLVARRYQVVRHRTRIKNEVHSILHAHLIPKCPHADLFNNRGRDWLKRQPLPADEQIAIERHIRELDRLGEDLAILDRQIAEGTTDDPAVRRLLTITGVNLTVATGLMAAIGDIGRFNSPQKLVSYFGLNPRVRQSGLGAAHHGRISKIGRSHVRAMLVEAAWAAAKAPGPLHAFFVRVRARRGHQVAAVAVARKLTVLVWHMLTKQTDYLWARPSLVAHKTRAMELQAGKPQKKGNKPGPAYAYNVKKLRDQEMRIAEQAQKGYERFVETWRPRPPNQKARGRLNPARLE

SEQ ID NO: 137705 - protein, 351 aa, unidentified
MIIIGVDYHPSFQQIAFVDNESGECGEQQLNHGEGEAEKFYRDLKLRGANVRVGMEATGYACWFERLLAELGFELWIGDPGEIKTRRVRKQKTDRKDAELLLKLMLEGRFPRIWVASAENRDVRQLLWHRHRLVQMRTRIMNQLQALAMNEGKQRKNKLWGQRGRAEFEKLPMAPWASRRRLELLELLDRMNPTIKELTAAVEEEVEKRPEVLRLMTHPGVGPLTALAYVLIIGTPMRFPCGKQIGSYLGLIPSEDSSAGKQRLGHISKQGNSLLRFLLVEAAQAAVRRDPDWRRRYLHLAFRREPRIAKVAMARKLAVRLYWMWRREWTYQQIVQFGPHAGQLVTGHGVK

SEQ ID NO: 137706 - protein, 362 aa, unidentified
MGTSSKVSRFGVDVHGKFSVATARDASGQVLSRHRLDHTDREALRQTLRQWPSGAPVILEASFGWGWMCDELMAAGLQPHLASSVKVAAWRKARGLAKSNRIDADLLAELWDQQPRWWEVWLAPQEVRDQRELLRHRMGLVATQTQVKNRIHALLHRHGIVHGYSDLFGVSGRRFLSLLVEDHQRLRETARRTLKDMLILLDALRRLIARATRQFRAVIRRSEGAQRLTTLPGVSTVLAYTLMAEIGQIERFANARKLVRYSLLAPMADDSGETREGKPIGRCLSRAGRATLQWAWIEAAHGAIRKDAHLRELFNRRTDNGKQDRNRGYIMIANRLCRIAYAILKHKTDYQMTPPPRRGSQG

SEQ ID NO: 137707 - protein, 369 aa, unidentified
MEKDTIYVALDDSKRKLVIAILRPGATEPEEQEIPKDPPHIQRLFRRLRREGPVQACYEAGVSGYDLYRQITACDVAGHVIAPALTPRRPGQRIKTDRRDARKLVRLLRAGELTPIRVPDEAEEAARDLVRCREAVRRDVVRWRHRLLKLLDRHGRLWVTEKNWTQRHWTWIRAQHFELAALQRAFEATVFALEQALVRQAELDKEIAILAATAPYRQPVGWLRCFRGIDTLSAMVLLAELVDFQRFRRPRHLMAYLGLVPSEYSSGETHRRGALTKAGNTHARRVLVEAAWHYRHRPTVGRALASRSQAQPDEVVKHAWQAQQRLHRRYRHLVGHGKRPPVAVAAIARELVGFLWAAMTRLEMRTHVA

SEQ ID NO: 137708 - protein, 401 aa, unidentified
MVAVGIDVSKGKSMLAAISESSIVVAPVEFVHTSVGLKMLTETILSFDTTVKVVMEATGHYHEPVVKALYSAGIFVSVVNPLLIYAYGDNSVRRVKTDKKDAVKIARYCFDNWHTLEPYISPESVRGHLKLYSRQYHSCQKTVHALENNLQTLLDKTFPGTGTFFASGKKKNGRQKWVDFALHFWHVEKVASLGLEAFDAQYLKWCKNYLYRYSKEKAEIIFKTAAIGFATLAATKETELLIVSATKQVIAMAEILLQLKAELIRLVKLLPEYDTVINMYGVGELTAAHLISEIGDIKRFYDGKALVAFAGIDPLPVQSGTYNKKNRETSKRGSATLRKVLFHVVLAHLRLKPQEEPVYTFLNKKKAEGKPYFVYMTAAANKFLRIYYGKVRDACCNEQES

SEQ ID NO: 137709 - protein, 351 aa, unidentified
MFVGIDVHKHTHAAALVDERGGEHGTLLFANTPEGYRRILRWLAKHDAADAVIGVESPGGYGRALVTALTAAGHEVLNVPAWRTHRERHRQGPGKTDPGDALAIADVVRRKHAELGPAQEPELVRALGMLELQRRRLVHDRTQAIQRLRADWTQLDPVGEAKVVRLDRQRELRRLKRISFGDGLAETTAARCIRELARDIEDLNQRISDLDAEIAQLLAEHGNPVADLHGAGTLIAATLIAQAGDVRRFKSQAAFARFCGAAPIPCGSGQTAGRHRLHRGGNRQLNAALYRIAIVQQRHHPAAQAFLARKLQEGKTPREARRALKRHLANVIYRRLHAWANATPAMNHLMP

SEQ ID NO: 137710 - protein, 457 aa, unidentified
MNRKRTKSKVDRTMPMVHPNAAAIDVGATIHMAAVSADRTPEPVRSFGTFTTDLHRLVNWFKECGVETVVMESTSVYWIPIFELLDARGFTVFLVNARDAKHVPGRKTDVSDAQWLQRLHSYGLLRASFRPKGQIAELRAYVRQRERLLEYAASHIQHMQKALTEMNLQLHHVVADITGTTGLRIMRAILAGERDPKALAHLRDYRCHASAETIEKALTGSYRAEHLFALDQALALFDAYHEKVSACDVRIEAVLKELSISRSRGSGSLPSSRRRTDQTNAMAFDVRAALFALLGKDVTQINGLGPYLSLKLIAECGDDLSAWPSAKHFTSWLCLAPSNKISGGKVLSSRTRRSGSRASALLRLAAVTVGRTDTALGAFYRRLSARIGKAKAVTATARKIAVLFYNAVRHGMEYVDPGASFYETRYRKRVVENLHRRAKAFGFVLHPAEPTPSVAVS

SEQ ID NO: 137711 - protein, 369 aa, unidentified
MADRITYVGLDVHKESIVVAVAAGGLRGEVREYGRIANTAAALDRLMRKLSGEGVGLRFCYEAGPCGYGIQRHLSAHGHECMVVAPSLIPKRAGDRVKTDRRDAASLARLHRAGELTAVWVPDAGHEAMRDLVRARLDAVHALRRARQQLSGFLLRQGCHYRRPAWTKLHRRWLAGLKFEQAVHHIVIEDYIAAVEAAATRRDRLTAQIEAMLPDWTLAPVVAALQTMRGMALVNAATLIAELGDLSRFANPCQLMAYLGLVPSEHSSGASIKRGRLTKAGNSAARRLLIEAAWTYRFPARVSRELLLRQEEQPKPIREIAWKAQLRLCARYRKLARTGKPANIVTTAIARELSGFVWAIARQVTVTKD

SEQ ID NO: 137712 - protein, 468 aa, unidentified
MGRTERGGAQPRRGKTSKAEQRLLERVHLNAAGIDVGSGNHWVSVPDDRDPQPVREFKSFTHQLIEIADWLDACGIETVAMESTGVYWIPLYEILEERGFEVLLVNARHVKNVPGRKTDILDCQWIQQLHTFGLLRGSFRPQAEITTLRTLVRHRDKLVEDTAMVTQRMQKSLTLMNLQLHNVISDVTGLTGMAILREIASGETDPATLARHRDRRCKASQEEIAASLTGSYREEHLFVLRQTLEVYDFYRAKIEGCDAEIEVRLRTLEARCQPPANPLPAPRSNRKKKLRDNAPSFEIRSPLFQLTGGVDLTELPGIGPYGALKLISEVGLDMHRWPTEKHFVSWLTLAPQNKISGGKLLSSRTQPSANRAAKMFRIGAMTLGRSDHALGAFYRRLAIRLGKPKAITATARKLALLFYRMLRHKMSYVETSAVEYDERQRNRILRSLGKRARSLGFDLVDASTGLVM

SEQ ID NO: 137713 - protein, 331 aa, unidentified
MDGEKRFVGIDIAKAALDVFIGSGGAAFSVTNDEVGIRELLRHLAPGDFVILEATGGLEMPAASALAAAGIAVAIVNPRQVRDFARATGRLAKTDRLDAEVLARFGEAVRPEARPLAAEQAQTLEALVTRRRQLVEMLTAEKNRRARAPKILHRSIDEHIGWLEKRLAGFDDELAELIRDTPLWRERDELLRSVPGVGKVLSSTLLAQLPELGMLNRKQIAALAGLAPFNRDSGNMRGSRCIWGGRAQVRRVLYMATVAGVRSNPTIRTFYLRLRANGKHAKPALIACMRKFLVILNAMLHHKTHWQTPALAPSTVALSPLPGAVSEHGCC

SEQ ID NO: 137714 - protein, 320 aa, unidentified
MKHKVGKDNTVARFIGIDVSKQWLDVATLPERETRRFSNDGAGQEQLGAWLIQLAPELIVMEATGGFETRVATALAAEGLALAVVNPRHVRDFARAFGILAKTDRIDASVLATFAEKVHPPVRPLPDEDRRELIDLVDRRRQLVTMRAEEKTRLSQATASARQDIKEHIEWLDERLRRLDIDLTAKLRSSSLWKAKEELLISVPGVGRVTVFTLLARLPELGALNRRAIAALTGVAPFARDSGQHRGRRMIWGGRADVRSVLYMAAVTAARINPVIKSFYLRLKQAGKPAKVALTACMRKLLTILNTMLRTNQSWHAPTT

SEQ ID NO: 137715 - protein, 342 aa, unidentified
MDISTLGIDLSKTTCHVIGFNARGEIVLRRKFSRRQLLQFTSNRQQMLIGMEACGGAHFLSRALQTQGHDARLMPAQFVKAFRKSNKNDYLDAEAIAEAVQRPTMRFVPIKTDDQLDLQALHRVRDRWVARRTAVMNQIRGFLMERGITIRKGPSHLTTQLQGILEAADSLLSGRLRLLILELKHEWDELDKRIENSNAELQRIAKQDDACHRLMEIPGFGPLVSTALVAAIGNGITFRKGRDLSAWLGLVPRQHSTGGKTRLLGISKRGNEYLRRMFLHGARSVVAQIGRNPSALGLWLSDLSARSHRNVTIVALANKMARTAWAILSRGTHYCAPSMAAA

SEQ ID NO: 137716 - protein, 367 aa, unidentified
MKKVSTIAAATTKNFRDEELTIGLDLGDRNSWYCVLDEGGQVVQEQKLSTTARALREVFGRMPRSRVALETGTHSPWVSRLLSELGHEVIVANARKVRLIGESRKKDDRLDARALARLARIDPELLCPVKHRSAQAQADLAMIRARAGLVRARTGLVNAARGVAKSYGERLRSCNVRNMNPEKAEQLSPELQRALEPLLSAIEEVSERIGEYNDRIEALAQDSYPQVGLLKQIKGVGTLIALTFLLTLEDPHRFRKSRDVGCYLGLQPGRRNSGQSEPQMHISKEGDPYLRTLLVQGAQHILGPFGVDCDLRRWGLKLAERGGRNGKKRAIVATARKLAVLLHHLWVSGEVYEPLHNSQRMTVTVAA

SEQ ID NO: 137717 - protein, 429 aa, unidentified
MNCTQNKKIEQVKETTMIVGIDVGSEKHYFRAFNWRGIELTRKPVAFSNSMEGFNSFYNTIVELMQKSELEEALVGIEPTGHYWFDLGQFMGEKDIKFVMVNPHHVHKTKELDDNSPSKNDRKDPRVIAGLVRDGRYFYSYMPTGAYAELRNASNRRFVLVEEQTRAKNRLQKWIAVYFPEYKGIYTHIDAKGGMLVLKKAPTPEEIVRLGVEGIIKIWKDAKLRGNGHKKAMLILAAAMRSIGLKAGLTEARMEIQDLIEDYELQTKRLERVNDLIKGLCQQVRYADKLLEIKGIGITTVAGFIAEVGDITRFDSAKELQKLAGLELVADSSGKHNGKTKISKRGRKRLRYLLFEAAISVVGKNEEFKEIHRYYTTREKNPLKKMQSLIVVACKLIRVFHAILTKGIRYDASKMLKDIRHPGEQLKAA

SEQ ID NO: 137718 - protein, 407 aa, unidentified
MTNEDPKVIVGIDTHADTHHVAVITDYGKHLADQKFLAVGSGYREIAEYITEYGPVSAVGIEGTGSYGAELARVLAKEGFEIREVNRANRAHRRLHGKSDPIDAYQAAESVLAQRGTSTPKTRDGYVEALRVLRTARTSASKARTAVLAQISAVLTAAPEAIRAKYRGQTSPARAKAMAATRPTGDSADPAVATAVTLKRMGTRHQYLSTEIEQTDAELAGIVAEHAQALMEINGVGTAVASQLLVTIGDNPERLASEAQFAALTGTAPIPASSGKTTRHRLSRGGDRSANAAIHRIVLVRMSKDQRTRDYVDKRTGDGKGKLEIMRCLKRYVAREIYRCLRNPRPAPATNDLRPRRRALGLSQVRVARELGTWPSAISRLERSQSRDPDLSSRYREWLEEQPKISA

SEQ ID NO: 137719 - protein, 369 aa, unidentified
MARTNLASAPAPGGDSEPVSVYIGIDTHRDFHVAVALGGQGCLLGEMNLPACTAGYEALLDWALELAEGQATSLLFGIEGTGCYGAGLSRHLQAAQCSVREVNRPNRQTRRQRGKDDAIDAEAAARALLAGTATAVAKAGNADAEMLRVLKSTRDSAVRCRTRAITQLKALLIVVPAELRESLQHLDTAELVNRCLNRNEEVASSPLTAACLVMRTLAERIRHLEQELMVLGRQLDRITQAVAPGLRAAQGIGPDNAAALLIAAGDNPQRLRSEAAFAALCGASPIPASSGTRQRHRLNRGGNRQANCALFRIALNRLRWDPATKAYAERRTAEGKSKREILRCLKRFIAREVYRLLQAGSLRPEVTRA

SEQ ID NO: 137720 - protein, 312 aa, unidentified
MTRVCAAGVDVGRDYFDVGLAPVGQVFRAANGPAGVAQVVERLRRAGVAKVVLESIGGYAQRLVRALAEAGFEVGVVDPKRIRALRLAEGRRAKTDALDAALIARFALIMQDAARPIPSAKAFEIKALSTRRRQLVEMIAMEKVRLGQTLDPPVADSLRRIIALLAEERAGVEAALHQALMALPGSPGRARQLQSIPGIGPAISATLMSDLPELGSLDRKAIASLAGLAPHPNQSGTLSGKAHIGGGRPCVRAALYMAAVSAVRSDKGFKREYQALRAAGKPAKVALIAIARKIVVAANSMLRDGREWAKTP

SEQ ID NO: 137721 - protein, 408 aa, unidentified
MNPLFVGIDVSSRNNVAYLMKPDGSKHSSFSVQNNLGGAKILSERIVSALESVPLSDLVIGLEATSIYGDSLVYALREDGSLGRFQRKIHVLNPKQVRKFKEAYPDLPKNDWVDAFVIADHLRFGRIAKEVYMDDYRYQALRTLTRSRFDIIQNLTREKQRFANYLFLKCSGIAQAKDIQNTSATTIALMERFETVDDLANADLDELTAFIAETGRGRFADPDAAAKAVQSAARGSYRLPKTVNDTVNQAMAVSIASMRALKEQVKVLDKAIEQQFEIIPNTLTSIPGIGKVYSAGIIAEIGDIHRFDSQASVAKFAGLVWHRNQSGDFEAEHSQMIKSGNRYLRYYLLEAANSVRRCDSEFRRYYDLKLKEVNKYQHKRALALTARKLVRLVFRLLKDNRLYIPPEG

SEQ ID NO: 137722 - protein, 316 aa, unidentified
MAIAHSTRHSKEISTIDVPSNIKNLKSYISQMKGTKILTFEESSPAQWLYTELKDCVDEIIVCEPYTNHLLKVGPKTDRTDATKLLKLLKADMLKSVFHCTDEFINIRKLVSGYDDLIMSTVQLKNRKTALFRSVGKRVDGVLETVEEQFVLDGINDLIETHEQTRLKYEAQYRRLKKENPMIMNLQSIPGIGPINAVKIAAAVVDPKRFKHASCFWRYCGLQKYDLISGGRSYGRRSPRYSRALKTVFKTAALVCSRVDDGPLKEYFEFLMKEKNYPEYQARHALARRIATLAIGVMKSGKPLDENELYKKDLAN

SEQ ID NO: 137723 - protein, 343 aa, unidentified
MGVYAALDVSQELTAICLIDDGGALLAEGKVATCPDAIATWLGRWTGALEKVGMETGPLAVWLWNTLTAKGLPVVCLDARHASAALKMMPNKTDRHDARGLAQIVRTGWFKAVRIKSHEAYVVRALLTARDALVAIRVRLENEVRGLLKTFGVLFGKRVGGFMRRAEEIIAGELAVAPELRPIFEALVAARCAILQRIRALDAQVRASARRSRTVQLFMSAPGVGPITALAVAAAFDDAGRFRSSASAGAYLGLTPRRYESGEVSRNGRISKRGDRMARTHLYEAANAIMTRKLGASRLRDWALAIAERTGPRKAKVALARKLAVILHAMWRTDTPFRDAATA

SEQ ID NO: 137724 - protein, 317 aa, unidentified
MYQNFIGIDMSKETFTVGQHNLKQTREFNNTLFGFKQFCLEYQDLLSGSLIVLEATGGYEMSLVRYLISQGIKVHRADARKVKHFIRSLGNHAKTDRIDAVGLAQYGYERHSRLECFVLQGINQEELQHLAQRRLDLKQLLVQEKNRLQAPDKNQTIKKTCEKLIQTIEAQLNILEKEIESIIESSTDMKKKREILQEIEGIGPTIANYLLALLPELGQINRKQIASLVGLAPHPYESGKQIGYRKTQGGRQSVRTILFMGAMTAARSRGKLGDFYRQLIARGKKKMVALTALMRKMIVMANAKIRDGYQLMTSPLV

SEQ ID NO: 137725 - protein, 342 aa, unidentified
MNKVAIAAIDLGKHTFHLHAQDDRGHELYRKKFNRVALAQHLANLEPCTVVMEACGGAHFMAQEVAKLGHTPKLIAPHLVRPYVKSNKNDFADAEAICEAATRPTMRFVPPKNQAQQALAMLNSVRESYIKDRTATVNRIHAALLEVGVSLAPGFKSIKELPALLEMSSFSGSIKKILMGLHEHFNYLDGKVKALDKEVECQAAEDDLASRLMTMPCVGPITSSALAAELGDGKQFKCGRGYAASIGLVPKQHGTGDKIVLLGISKRGDRNQRRLLIQCARVYLIQLERQKGALADWVRQLLASHHHSNLVVCALANKLARIAWAIAAHHTEFDAGPVAMNA

SEQ ID NO: 137726 - protein, 329 aa, unidentified
MQTVLHNCCGLDVHKNMITACIIKTRNLLDNEHKSEQTEKQIREFKTFPNSLHQLKCWLEEEDCHHVAMESTGIYWCPVYEVLEKAFEGDIEIRVANARHMRNVPGKKTDLKDAEWIAKLLRAGLLAGSFIPDEEIRELRRLTRYRKNIIHDITKQKNRIEKELQRVGFKLSSFLSDVFGVSGRNILKVLTEKGCLTTEDVEREAIHIAPKKRAEIASEINGYLSESTRDFIKMQLGHLDTLYVNLREIEISVAKTATLFREDIDRLDTIPGIAATAATAIIAEIGTDMSKFPTAEHLCSWAGLTPGDNVSAGKKKVLVSAMETHTSKV

SEQ ID NO: 137727 - protein, 343 aa, unidentified
MERYVGMDVSLKETSICVVDGSGQIVSEGTVISEPEAIAAFIKTKAAGAKRIGLETGPTTTWLWHELRALGLPVICIDARHAKAALSLQINKSDRNDAVGLARIMQAGWYKEVQVKSLPCHEIRAVLSSRAQLVKIKCDLENQIRGLLKNLGLFIGKAGGKVFHRRAEELMGEHRLLPEAVRPLLGVRETVRREIASLTRRLLALARDNDESRRLMTVPGIGAINALAFCAAIDEPARFRRSRSVGAYFGLTPRRHASGEVDWSGRISKCGDAMVRTYLFEAAGVLLTRVPQWCKLKAWGHRLWKRIGFKKAKVAVARKLAIILHRMWRDGTDFIWSSKEAAA

SEQ ID NO: 137728 - protein, 315 aa, unidentified
MDAILERCAGLDVHQDNVVACFLSGPLENKPSKEIETFGTTTKELLRLLDWLQERECSQVAMESTGVYWKPVWNILEGSCQITLANPERIKNVPGRKTDCNDAQWIASLHRCGLIQPSFVPGESIRDLRDLTRYRRKLLQNVTQEKNRIHKILQDANVKLTTFLSDVFGVSGRALLESVVNGENLHEQEIRHKVKSTVKRKVPELVEALNGRLRLHHRQMMRRHLDHIVYLEKEIGTLEGEIECVLVPYRTEMELLDTIPGIDQEAAASILAEVGPDMTHFPTDGHLASWSGVCPANHESNGKKKVERTDEAIKV

SEQ ID NO: 137729 - protein, 334 aa, unidentified
MENIALIGIELGKNSFHIHCQDRLGKAVYRKKFTRSKLIEFLATCPATTVAMEACGGSHFMARKLAELGHSPKLISPQFVRPFVKTNKNDFVDAEAICEAASRPSMRFVQPRTESQQAMRALHRVRESLVQDKVKTTNQMHAFLLEFGISVPRGAAVISRLSTILEDGSLPLYLGQLLLKLQQHYHYLVEQIKDLEFQLKRKLDEDEVGKRLLSIPCVGTLTASTISTEIGDGKQYASSRDFAAATGLVPRQYSTGGRTTLLGISKRGNKKIRTLLVQCARVFIQKLEHQSGKLADWVRELLCRKSNFVVTCALANKLARIAWALTARQQAYEA

SEQ ID NO: 137730 - protein, 327 aa, unidentified
MVAKPRSSSNHIQSCAPQPIFVGVDVSKDWIDIADGSGRCIRVPNAPAAIAKAFRGPWSCCENLVCEATGGYERALMKVASDLGLPLRRIHPNRVRAFARATGRLAKTDALDASILARYAAFTAKETPAPLPSAKAQQLADTVSRLTQLKDLRQAETCRAKRATDLLVKQSLAVIMAAIDGQIETVQKALDALIAADPVLSRKADLIRSCKGVGPRSAQAILAMLPEIGTLDRRRIAALVGVAPIDAASGSSLHRAKIGGGRKALRDILFMAALSASSHNPTFKQFYERLRSSGKPHKVALIAVLRKLIVTLNAMIKSDQPFKSALT

SEQ ID NO: 137731 - protein, 312 aa, unidentified
MAQFASVAGVDVGKDRLEAYAFPAGTRLSVANDGAGHAELAAWCRNEEIRVIAAEASGGYEREALLHLAAAGLRTRRLNPLRVRRFAEARGHLAKNDRADAETIAAFAAAVPERHTSPPADPNRERLREHLVLRSQTLEAIAAAENQLEQLRDKALQAMLRTRLAGLRRSLAALDRRIAAVVHSAPDLAELATRLRSVPGVGPVLVHTLLGLLPELGRVDRRAIAALVGVAPFDDDSGRRNGARHIRAGRAAVRKVLYMAALVAKRCNPIIRAFAERRLGKPPKSIITACMHKLLIILNAIARDGTEWTRPA

SEQ ID NO: 137732 - protein, 342 aa, unidentified
MDHFAGLDVSVKDTSVCIVDGTGKIVREVKVASEPDALLGVLRNPDYYFKRIGLEAGPLSQWLFSALGEANLPVICVETRHMRAVLKAQINKTDRNDARGIAQMMRVGLYRPVHVKTLRSQKLRMLLTHRKLLQSKAIAIENDLRGTLRNFGLKVGIVGRTRFEERIEELVGHVPDLAVLVEPLLVVRRVLGEQIAVLHRRLLTIVRDDEVCRRLMTIPGVGPVVALTYRATVDVPARFRKSKSVGAVFGLTCSRDQSGERDRPGAISRCGDEMMRAMLYEAAQSMLVRSTRWSWLKAWAMQVAKRRGMKRAIVALARRLAVIMHRVWVDGTEFRWTREVTA

SEQ ID NO: 137733 - protein, 317 aa, unidentified
MTEPMFVGIDVAKDSFQAASQPVGLNVSWPNNPEGWQELINALSDRPVALIVLEATGGYERALAVELVQAGHRVVVANPRQVRDFARGLGQWAKTDAIDAAVLARFAQIVQPAPRKQLSADGSDLAELVRRRRQLTDLRTQESNRLPMVRHPQVRRSVQKMLKTLDHQIAELEDLIHDHIQSDDGLRHKNGILRSTPGVGPQTSAMLLSDLPELGQLNRQEIAALVGVCPWDCQSGHYVGKARIWGGRKEVRSVLYMAALTALRCNPVIRAFGQRLREQGKAFKVVITACMRKLLVILNTMVRRNEQWNPHIATQNP

SEQ ID NO: 137734 - protein, 377 aa, unidentified
MSNCTRYLGLDVHAESITAAIAEGRGRIRNLGKCPNRPEAVRKLLEKLGGGKNLKVCYEAGPTGYALYWQFTQLGVDCEVIAPSLIPRKAGDKVKTDRRDAEKLARSYQSGDLTPVWVPTPEHEALRDLVRQRAAAKHDESRAKHRLITLLLRHASREPNGSRAWTHPWWRWVQALKFEHEARQVTLADCIAEVLHMGERLARLEQAIDRLVESAPPHMRAVIAALQALRGVAKLTAVTIVTEVGTFQRFHRPTQMMGYTGLVPSEHSSGARQAQGGITHTGNAHLRSVLVEAAWHARHRPWLNQRLKKLLPTLPAGVAEIAWKAQERLHRKFGKMIYSRKHAGVVAAAVARELVGFIWAIGTMVEAKHNETMARAA

SEQ ID NO: 137735 - protein, 315 aa, unidentified
MSEYQHFIGIDIGKFSFVAATHKTKKTREYENTTLGMKTFMKDFKKELPNALVVLETTGGYEMKVLLTLCNKKFSVHRANTRHVKNFIRSLGGSAKTDLLDARNLARYGQERADRLTLFTPPSKRIFELHQLAQRRNDLKQMLVAEKNRLQAPQGKIIQESCRQMIQILTTQKEQITQSIEKIIQEDPILKQKKETLKTIPGIGDLIAQDLLALIPELGECNRKQVAALSGVAPRANDSGTFRGYRRTGHGRQGLKPILFLAAMAARNSKSTLKAFYENLIKKGKKKIVALVATMRKIIVIANAKIRNLFLYKHS

SEQ ID NO: 137736 - protein, 346 aa, unidentified
MKNTVAGVDLAKEVIQVCLCTNNKVHSNIEMTHRKFLTWLFKSKSMSIIFEACGTSNYWKQRAIEAGHDARLISAKLVASIRQNQKTDKNDALAIVQASQLTDIQFVKGKSVEQQQLQSMMRLRELAIKQKTASSNQIKALLLEFNIRVSPKQGGLKGVVESLLEDAENGFSFEFKHALNAAWGLHLETLESIRVYDRCLETTIDKHDDCRRLLKLEGVGTLNAINLYIALGCADLGVFSKGKDAAACIGLTPLQHSSGGITKLGHIGKYVKNSTLRSQLITGAMSVVNQIVKRSAVTKKEAWVQGLVARRGKKCAAVALANKTVRTAYVMLTQGTEYKAELVVVK

SEQ ID NO: 137737 - protein, 411 aa, unidentified
MIPPTEQINRFIAIDAHKHYLVIGGLDAHMEIVLPLRRVDIHRFPDWARKHLLPSDTVVIEASTNTWTLYDVIAPLVAKAVVANPYKVRLIAASRVKTDKLDVWALARLLVANLIPEVWVPPIDVRELRALISHRRRLVQTRSRARNRLQSVLHRHNLKPPTARPFTPKYTDWWLSLPLSPTESLRVQHDLETLDHVNRQLDTVEDELNRLTTIEPWSSSYPYLVQLPGFGLVVSMTVLAAIGDVSRFPSPKKLVGYSGLGASVHDSGKTHRTGRITKQGRKDLRWVLVQAAWAAVRHHPHWKAQFQRLSRRKHPNKAIVAIARKLLVVVWHVLTECVADRRADDEMVAFKLMLWGWKLGKDGRDGLTTPQFVRRGLMTLQMGEDLSHIVRGGTTRPIASVEEVLALQEQT

SEQ ID NO: 137738 - protein, 404 aa, unidentified
MKGPIVSIDVSKDKSDYQAFKEMNVKYTGSRSIKHTKEGFDEIVSLVREMEKKLETEVCVVYEATGVYHRVLKKVLEDNNIKQFIINPLLSAKTRKNDSLRSPKTDKLDPKSIAKTYYSHSLHNSHKPETIYHELRELSRYYEDILVHLRKDKVAFRAQLDVVFPGYDTLYDDLYGPVALAVIEKYPHPEMLQKKKINTVSKVIQSKTCHRQAMSDTMADKAIEYSKTIYSGCDKDDIEVLILQRFIKKLKEDMAEAERTIGEMIKLVQELPDFSIIKSIPGIGDNLAARIIAELGDMTRFKKKNELVAFAGLDPRISESGQNDGDHMHITKKGNKRLRCLLYLAVTCSIRLKRDDNSIKDFYIKKKQQSNPMCSKAAKTACASKLVRIIYSMCKTGELYQYNK

SEQ ID NO: 137739 - protein, 446 aa, unidentified
MKQKKFESMAVVNPFAAGIDVGSKSHFVAVGQDPKKDVKEFGVYSQDHEMMINHLKSHGIITVAMESTGSYWQSLFFALQNAGFEVLLVSGHQTKNVRAKTDVKDCIWIQKLHSLGLLRGCFLPDKESAKLRTLQRHRSSLIEESAKMVNKIQKAMRMMNLRLDVVISDITGKTGTAIIRAIIDGERDGQALSLLTDPRIKKSREEVARALQGNWDEELLYEMTDCYQIYTFLQERMKSCEQRLENLLVEYTQEIHLENDLVLSSKQLKGKNQPKFNLPVLSYKFYGVDLFAIESISSSTVLTLICEIGQGIYNFNSAKHFASFLRLAPNNRVSGGKVVSSRTPKGSNKLALALRNAANTIDKTKDGVLTRFFKRVAYRKGRGAAITATARKLAVIIWNMIIKGERYQPGNLDQYQKEMKDRMIASIKKKMLSLNMSADELNAALS

SEQ ID NO: 137740 - protein, 350 aa, unidentified
MSMLADQVDVVIGVDTHKHTHSAAVVLSSTGAVMTETTVDADPGGYLALLDLAEAHGPRRAWAIEGTGSYGAGLTRFLEETGEQVIELERPERARRHGGAKSDPLDAIRAAREALGREHLAQPRARGERAALSVLLCARRSAVEAATAAQRQLHALVVAAPETLRARFRARSTAQMVEMAARLRVNDQSDLETRTTAEVLRALARRIRAMTAEAEVHEASIVAVVRSWRPDLLGQFGVGPIVAATLLCAWSHPGRCRDDAAFAMLAGAAPIPASSGLTTRHRLNRYGDRQLNRALHTVVICRLRYDPATRAYAQKRTKEGKSPREIKRCLKRYVARQLYRQLENPPLDSP

SEQ ID NO: 137741 - protein, 468 aa, unidentified
MELTLGIDLACRAAHQASLARPDGTFVWTGGKFFTRPAELEKLWADLGLGEQDTVRVVMEPTRNVWAPLASWFRHRGARISMVPTTQSADLRAYYSKHTKNDHLDSKLLARLPLLHPEGLREHTGDGPAEPLRRVVKIRSSIVKRRTAVFQRLDAQLELLGPAWYDALGSNYGKAALALLARYADPNSLIRLGHARLTRFLIRHSRGAWREHHATMLLTAAQESLQLWGSGDQARIDFAELAADIAVEAEQAQVLTEQIEDLDERCANLYAEADPTAIIASAPGVGPVTCAVIAGRIGDPHRFHSLAAIRAYSGLVPKVNQSGQAEHHDGLTKAGDPLLREALFTAADQARKTDPQLAAKYKRLMNTERHHDSAICHIATILLTRIATCWRTGQHYALRDTNGRPITPDEGRTIVRAHHTVDKQTRIKAANTRQSQRRKGRTGRGQQESPSAPIHRPANTTIKRAKTA

SEQ ID NO: 137742 - protein, 370 aa, unidentified
MSSITYIGLDVHTTNYTICSYNGYDGNYFGEVTVKPEYQQIEKYVRRLQKQYEPGHRFLCGYEAGYLGYSLFHELASVGIECVILAPSTMCDTKTNRQIKTDPRDARNIANCLAYGLYSAVHVPTEQDDAVKEYMRMRDSAAAEFKAIKQQILAFCVRHGKRFEGKSTWTKKHLDWLDKLDFGNPILQNAFWEYLRRYYHAQEMQDLYDTQIAEYAQMEEYRQKVSELRCLIGIETHTALALITEVSDFRRFGKADQFAAYLGLIPGEHSSAEKTNRLGITKTGNKHLRRLLVEAAQHYGRGAVGRKSVSLKKKQEGNRREVIEYADRCNTRLRRKFYRIASHSPRNVAKTAAARELACFVWGIMTEHIT

SEQ ID NO: 137743 - protein, 391 aa, unidentified
MIYVGIDVAKDKHDCFITNSDGEVLFKPFTITNNLDGFNELYQKIESVTEDATKVKVGLEATGHYSYNLLGYLIDKGLAAYVINPLHTNLYRKSLSLRQTKTDKVDARTIASMLMSDVNLKSYSDISYHNEELKSLTRYRFDKVKERAKLKSSVSRLVCILFPELEKLVPTLHMASVYSMLSEFPGAKHVTSAHLTRLTNLLSEASKGRYSKDTAITFREAARASIGSNMPAKSLELKHTIKLIQELDSEIDEIENEIKVIMDEINSPILSIPGINYRMGAMIIAEIGDFSRFDSPDKILAYAGFSPSTYQSGQLDGAYAHMEKRGSRYLRYALYNAAKYVCHWDPTFAGYLAKKRAEGKHYNVAISHAVKKLVRVIYHLEKTKQQYIKVA

SEQ ID NO: 137744 - protein, 343 aa, unidentified
MAIVNRIALDLAKDFIQVLALDENEQEVFNKKLRSNKVLAKLAKLSRTDDCEVAVESCGMSHYWRRECEKLGYKTVALPPRFVKAYLQGEKNDANDARAIAEAASRPNRQTVRLKSIEQQDLALMVNQREGFVQTRTQFSNRLRGQLAEYGILLPKRVGTILQRVPEILEDDSNALTLQSRDLINRLYQMLRAVDEEVKALDKRLAAQAERNEDSRRLMTLPGIGPITATSLLALIGDVSEFKRGRNLSEYLGLVPRQNSSGGKDRLGGITKKGNTKLRTLLVHGARSALRVAQQRHDRLSLWAQDVAKRRGNNVAAVALANKHARIIWAMLKNKEDYRMTAA

SEQ ID NO: 137745 - protein, 403 aa, unidentified
MNSVGIDISKGRSTVAVMRPFGEVVISPFEVRHTDSELSELARQLKSLDGETRVVMEATGNYHAPVAKLLHDAGLYVSVINAKLVHGYGNNDLRRVKTDKKDAVKLANYGLDRWLTLPRYIPEEDTRLLLKNCYRQYRQYSKVQTVLKNNLISLLDTVFPNANRLFSSPIRGDGSEKWVDFVAEFWHCRCVSEKSQKAFTNKYQRWCRKHGYNFSEAKAHTIHAEACGHIDVIPKSETTKLLVEQAVAQLRATSAALAALKHEMQALASMLPEYPVVMDMFGVGPTLGPQLIAEIGDVRRFYSKKALVAYAGLDAPPNDSGDVTGRHKSMSKVGASSLRRTLFLVMSVYLQTAPLDEPVYQFMDRKRAEGKPYRIYMMASANKFLRIYYATVKAYLESLEHTA

SEQ ID NO: 137746 - protein, 440 aa, unidentified
MQKVITFDQVNDHAAGIDIGSEKFFVSVDGVQVENFETFSSDYHRCTGYLKSHSIKRVAMEATGVYWISLYSLLEQSGIKVCLVNPRETRSRKGHKTDVQDCRWIQRLFSAGLLKESFIPKGLLSEIRYLVRERMDIIEMGSTYVNKMQRCLELMNIKLTSVINQIHGKSGLTMIRAILEGERSPEALLLLCDERIINKKAERVLKALEGNYNDTYLFMLSQNLTLWENHQKQIAAIDGCIEQLLLKLTIDKTVDESTVGKTKLIRHHKPQIQNLHELMVKLFGVNVSSVSGINDYTLLRLVGETGTDMSRFPSIKHFVSWCGLAPGHYQSGKYKRTKRMPCSKAGQIFQEIAQGLENSKTIAIGSFIRKLKAKRNAPVAYKAGGRKIAEAYYNALTRGTTYVEQGVKKYEEQLRQKEKAVLKKLAKKHNMQIIEKEHAA

SEQ ID NO: 137747 - protein, 428 aa, unidentified
MHENNENNWQQRRYYMGLDWAKDKHDIVVVDGNGRIILDIRIEHAAKGWHRLRTKLIKLAGPDLSVVAVTIETNRGPAVERLLELGCAVYPLNPKAAQRYRDRKAPSGGKTDHLDALSFADALRTDGHGWRQLKPEDPAIQELRLLCRDEINLIEQRTALVNQLQEALHEYYPAALDAFDDWTAPAPWAFIERFPTPQALKKAGKRRWEKFLHTHHLYRPETYQKRLDVFSRATEFCGGQAVTNAKSMLAVSLAKQLRLLAQQLKVYRQRIEEVFQEHPDNYLFGSLPGVGEKLGPRLLSEFGEDRERFVDHQALQCYAGTAPVSFQSGQIHKVKFRYACNKNLRAAVHLWSDLSRARCAWAQIYYEQKRLEGKSHACALRCLGQRWLKILWKMWQTKKPYNEQVHTRNQIEHGSWVLALKPVHSSAK

SEQ ID NO: 137748 - protein, 401 aa, unidentified
MEGPIISIDVSNGCSHFRCFIDRNKAFGKVHKIKHDVDGFQYLLDCMERLNEKTNEEVCVVYEATGVYTKPLTRFLNKHKVRHYMVNPLQAAKMRKTDLHSKKTDKNDPNSIAKVYYDKDLYEYADEEPIYHTLRVMNRNYEDQLDHLRKYKVTFQNILCIVFPGYGSLFKNPYCDIALAILKKYPHPDMIRNKKPETVANYIEKHTCHHKDSCLKWAVKVIEYANKTYPGCDKDEIEVIELLRIIKELEVCIASCDTQLNEMVQLAEQLPNYFLILSIDGIGPNLACRILAEIGDIKRFGNTKQLISYAGIDPHISQSGDVDGLHLSISKKGNKRLRCLLYLAVTCNLRLKKENDPIQQFYKKKKQQSVPLKPKAARVACTNKLLRIIYGMCNNGCSYQK

SEQ ID NO: 137749 - protein, 424 aa, unidentified
MEKALEDNRIAASTFCGIDWAEDHHDVAVVDGDGTMLARLRIGDHAAGFAQLLSLLAEHGDTAGQPIPIAIETPRGLLVACLRATGRKVFAINPMAVARYRERFSVSRKKSDAIDAAALANILRTDMHLHRPLPADSELAQAIMALARAQQDAVWDRTQAHNKLRSVLREYYPAILAAFADKRDGIMRPEARTLLAAAPTPAAAAKLTKAQLRALLTRAGRKRGIDAEAERLQAILRAEYLHQPELVERAYGQQALALLRHLDAACTNADELDAAVTASFLQHPDADIITSFPGLGPLNGARVLAELGDDRSRFTDARSVKAYAGSAPVTKASGKSLFVMTRKVKNQRLAAAGYVWAFCALTASPGARAHYDRRRQANDRHTAAQCNLFNRMIGMLYHCLQTRQCYDEQKAFPSHQTQPADAAA

SEQ ID NO: 137750 - protein, 413 aa, unidentified
MRVVNPTCAGIDVHKKNVKVSLVTRDSAGQRHEEVRTFATVTRQLLALRDWLQDHNCKVIAMESTGVYWKPLFNLFEGDFEVLLVNPAHIKQVPGRKTDVKDCQWIAELLEHGLLKSSFIPPLEIRALRDLTRYRRRLVQTRAAEVNRVQKILEQANIKLASVATDIMGVSSRAMLAALLQDAAQDPQQIAELAKGRLREKRPELALALEGRFRSHHTKLLRRILTHIDFLAESITECEEEIDELCRPFAAVLERLDGITGVNLRSAQDLVAEIGLDMSQFPSHKHLCSWAGVSPGNNESAGRRKRARTKKGNKWLTAILVQCAQAAGHTKDTYLGAQFRRFAGRKGKNKAAVIVAHSILEAAYFVIRDQVSYQDLGPQHFDQLKKDHIIRSYVKRLENLGLKVEVTELPAAA

SEQ ID NO: 137751 - protein, 327 aa, unidentified
MSDSKSPVPVLGIDISKGKFNAALLRVGKYRHKAFPNNSRGFEQLSKWLQGLGVMELHACMESTGVYGEELAEYLYDQGFSVSVVNPARIKGFAQSELIRSKTDKVDASLIARFCVAMKPSLWTPDPMEIRELRSLVRRVEALLNMRQQEQNRLDVSNKVLRKSIRKLIRYIDKEIEELKGEINKHIDRNPELRDKRKLLESIPAVGEATIHVILSHFASIEKFPGPKRLAFFLGIAPRHYSSGSSVRGRTRMSKVGRSSLRKAFYMPALVGLRFNPVLMNLRERLERAGKPPMLIIGAAMRKLVHIVYGVLKNKIPFDPNFSLKSA

SEQ ID NO: 137752 - protein, 346 aa, unidentified
MTIFAALDVSKRDTSIHVADIRGKCLWRGKVLTNPEAIAEALAPFSERLEKVGLETGCWTTWLWHELKDRGFPMICMDARQAHAALSVTMNKTDTNDARGLAHLLRTGLYREVRVKSWDDMRKRALLRARATMLRCALDLANAIRGALRTFGLALATGSGNGGAKAFEQRVVVHLSGRPDIHVIVTPLLEAWRAARTQVARHERAIRAIVRADSRCRLLMTVPGVGYLTAVGFVGAIGDPSVFSSGRTAAAWIGLTPRRYQSGTIDIQGRISRQGDKLLRAYLYEAAAHILTRAKTDSALRRWGLNLRERIGFKRANVAVARKLAVLLHSMWRTGQPFKATGLVPA

SEQ ID NO: 137753 - protein, 344 aa, unidentified
MPHYAALDVSQETTCVCLVDETGRVIGETKLPTCPDAIAAWLGKRAVDLTRVGLETGPMAVWLWNELHARGLPVICIDARHAHAALKVRPNKTDRNDAAGLAQVVRTGWFKQVQIKTRASYEVRSLLTARDALIQIRVKLENEIRGLLRTFGIVFGKAAGGFSRRGDELVAGELEASPPMRRLVETLLQTRGAVLDQIKVLDGQLTATAKIHPVARLFMTAPGVGAITALSVASAFDQAERFRRSSSAGAYLGLTPRRYESGEVSHNGRISKHGSALTRKHLYEAATTLLTRTTRFSRLKAWGLRLAKASGFKKARVAVARKLAVILHAMWKTQTPFRWGEAVA

SEQ ID NO: 137754 - protein, 358 aa, unidentified
MQNKGKELDFSGQNIYIGLDTHLRNWTATIRIGSDFFKTFSQNPVPKALSAYLNKNFPNANYYSAYEASFSGFWIHRELIKLGIKNIVVNPADIPTTDKEQKQKEDARDSRKIAEQLAASSLEAIHVPSIEAEGDRSILRFRRTLIKEIARNKNRVKSKLYYYGIEIPEQFSGKTYWSKRFTKWLQEVKLPTESGRSILTGIIETVEFFRKKQYQILKQIKELSESKKYKKNILLLLSIPGIGLVTAMSFLTEIEDILRFKNLDKFCSFVGLIPMTSSSGERDVVGSITKRQNKILRTLIIESSWVAIRTDPALMMTYQKYIKRMEPTRAIIRIAKKVLNRMRCVLKKQEIYEHSVVE

SEQ ID NO: 137755 - protein, 355 aa, unidentified
MKTKIPAIEKLTVGLDLGDRRHSACVLDASGEILAEEVIVNTRECLTAFSARFPGATIVLETGTHSPWVSRLFEARGHRVYVANARKLRAISASHTKSDDEDAQMLARLGRADPKLLSPVRHRSEATQRALVRLKVREALVRSRVNLVNAVRFLLKSLGVFVSSSIKAMAFTRKVRAQLAPVDAILVEPLLAAVDALNAQIKALDTELETLARETYPATERLRQIPGVGPLTALCFVLTLEDPKHFEHARAVGPYLGLVPRRDQSGLSDKQLGITKAGHVQLRCLLVNCAHYILGPFGPPCALRTAGERIAVRGGKSAKKRAVIAVARKLAVTLLALWKTGADYRPLPVPLPQAA

SEQ ID NO: 137756 - protein, 337 aa, unidentified
MEYFAGLDVSMEETHICILDREGVLIREGKASSLPKAIAAFLAAGPTCSKVVFETGRMAPMLFHGLTELGVPVVCIESRQAYQALKSLAGHKTDRNDARGLAHLARTGFYKPTHVKSLSAHAIRALIAARKKLVGQRVTIDNQIRGLVVVFGVRLPRALSPSFKDAALKISDGVPGLHAALRGLFAAREAILTAVAAIDGDIRVMTRRSEVCARLMTVPGVGPITALAFAAAIDDPKRFKRSRDVGAYLGLVPKRHQSGEVDYTGSISKRGDVRVRTLLYEAANVMLTRYAAPLKLKSWALAIGQRSTMRKARVALARRLAIILHAMMRDQTEFQVA

SEQ ID NO: 137757 - protein, 413 aa, unidentified
MEVLHGRCAGLDISKRDVKVCVRSQLPRRKQPDREVTTWSSMTEDVLGLRDYLLGAQVSCVVMEATSDYWKTFYYLLEDAPFEVMLVNAHDAKNLPGRKTDVSDAAWLAELGAHGLLRASFVPPPPIRELRALTRTRTQIVRERNREIQRLEKVLEDAGIKLSVVVSDITGVSARRMLSALSSGERDPDALAQLSVRQMRAKIPQLRRALTGRFTDHHAFLVDLHLDFIDQHTRVIDSLSTQIEQVVTPFRHARELICTIPGISMTTAEVIVAETGADMSRFPTAGHLASWAGVCPGHHQSAGRATNVGTRPGNRYLKGALGTAALSIAQHNGTFLHAKYVRLAKSRGKSKALVAIEHTLIDIIWSLLTTDSIYDDLGADYYTHRQPERARNRAVATLQQLGYTVTIEPRDVA

SEQ ID NO: 137758 - protein, 372 aa, unidentified
MEHHTEAFVGIDTSKLRNAVAIADSGRGGEVRYLGEFPATEAAIRKLVAKLAVKYRHLTFCYEAGPTGYGLYRLLKSLSHECLVVAPSLIPKKAGDRVKTNRRDAVSLAKLLRAGELTAVWVPDERHEAMRDLSRARQAVKKDLQGKRQQISSLMLRLGRIYPGKTTWGPAHMRWLTSQKLEHREQRIAFEELLEGIRQESERMERLEGAIREVVPEWSLAEVVAALQAMRGIDLIAAVGVLAEIGDLSRFQNPRELMGYLGLVPTENSTGDKIKRGGITKAGNGRARRILVEAAWSYRYPPRVSRDKQLKVEAAPRRAREIAWKAQTRLCGRFRSLERKGKRRTVIVTAIARELSAFIWAINRELMPPRQA

SEQ ID NO: 137759 - protein, 433 aa, unidentified
MQDAQDEPLFVQRVAGLDIAKAGAEVTIRVPSDTTPGRRQQETRTFAATRAGLLSLADWLRCWGVTKLGMEATGDYWKPVFFLLESRGFDCELYNAAQVKALPGRPKTDRADSIWLAKIVERGMIAASFVPPEPIRRLRTHTRYRRHLTQARTAEKQRVGKLLEDGHLKLSSVISNIHGVSGQDMLDAIAAGQRDPKALAQLARGTMRGKIRRLEEALECSFFTDEHAAVLAMMLAVIDHYSAQIEALTATIEALTEPWLHQIAQLDAVDGIGTICAQDIIAEIGTGMSVFPAASHLVSWAQWSPQVHQSAGKRKGSNATGRGNPYLSAALGEAAISAGRTQSFPGARYRRLTRRMPKKKALVATGNSMLVIIHALLSDPAGSYHDLGADYYEQRMHARRQARNHVNSLERLGCKVTIQALSPGTGQPHTAAS

SEQ ID NO: 137760 - protein, 410 aa, unidentified
MEVLYLRCCGLDVHKETVVAGLRVVSGGKVDKDVRTFETTTAGLIALAEWLAENGCTHIAMEATGIYWKPVWHILADGEFELILANAAHVKNVPGRKTDVTDAAWLAELLAHGLIRASFVPDTQTQELRTLLRTRKQLVREKASHILRVQKTLEDANIKLDSVITDVMGMSGRAMMEALIAGESDPAKLARLANYRLKTSQEKLREALRGRVTKHHRFLLRLHLNQIDALDAAIATIDRQVEAGIAPFRAAVEQLSSVPGIRDIGAQVIVSEIGTDMSRFPSEGHLISWAGLCPRNDESAGKRRSNRLRKGAPWLKTTLVQCAWSAVRKKGSYLQAQFLRLKARRGPKKAIMAVAASILTAIYHMLKDGTLYQDLGSNHFQNRSKGQQTNRLIKRLADLGYDVALTPRTS

SEQ ID NO: 137761 - protein, 400 aa, unidentified
MIDTGDIDVFLGLDVGKGEHHATAVTPAGKKAFDKRLPNTEPKLRELFAKLQAKHGTLLVVVDQPASIGALPLAVARDMGCPVAYLPGLTMRRIADLYPGEAKTDARDAFIIADAARAMPHTLRAIDGEDETIAELEMIAGFDDDLAGEATRVANRLHGLLTQIHPSLERVLGPRLQHPAVLTLLERFGSPAQIRKAGRRRLVALLRPKAPRMAERLVEEIFAALDEQTVVVPGTEAAALIVPSLAGSLATVLDQRKLLAGRIEELLEAHPLSKVLTSMPGIGVRTGARILIEVGDGSTFPTAGHLAAYAGLAPATRSSGSSIRGEQPPRRGNKQLKRAFSLSAFAALGDPASRAYYDKKIAQGKHHTQALLCLARRRADVLFAMLRDGTFYEPEPAAAR

SEQ ID NO: 137762 - protein, 459 aa, unidentified
MKPFYMGVDVSKGYGDFMILDHQKCPVVKAFQLDDTFDGHRCLYTALERFFVEHPGSCLHAGMESTGGYENNWYQSLTRFQGSLNIQTARLNPFGVMHNSKADLKKNTTDKISAQNIAEYLVAHPEKVAYQKEDQLSGLRRQWGFIQMLTKQCGQFLNQLNSLMYTACPELLHYCQTGVPDWMLKLLVQYPGSAKLKRAHVKSMAKIPYVTQKRAQQLITEAKISVASATDPAIQQLIIATARQILHKRKTIADQTKQLFDQCNLPEVELLKSFPGISNSSAVGLLIEIQTVKRFANVKKLASFFGIHPVYKISGDGIGGIKMSKQGRKAPRQILYMIALSAIQHNPLIRQVYDKHREQGTHKMAALGICMHKILRIVYGMLKHDKPFDPQIDVANQQQSARIENAQSEKETHRRFQTYDANAPISSRQRKKRLERERPHSVDDAKFGVTTPVPLVNIS

SEQ ID NO: 137763 - protein, 432 aa, unidentified
MPHIATRMGLPRFNASDTAPGKEFDMITVGIDIGKEKHAVAAVTATGEVLMQPVFFAQTAEGFSALLARLKKLGKTADIRIGMEATGRYWLPLRHALAGKGCRVESVNPLITSAEIAKDVRGRKTDKADALAIASALLRNRHNPAPAEDAAIDALKSLTRHRSFLVRQRSNVKRCVHAALDVTFPEAGAILGPLFSATALSVLEAFPSARLLSGASLKTLTALVSKASKGRLAADYAKRLRDAARTSVSAGVVNEGDEAALVPLIQQIRFAAAQIEKAEEKIRAMPAPKAAALLASVKGLGTLLPRVIASEIGDMERFRHPPSGKPPRDMDKRILAFAGAEPRLRESGKWKGRTKISKRGSPALRTALWQASAMCRLHNPLFAGVYQRQVSRGKPHSVALFYVARKLVEVLCGMYKTDMPFSLQTAGGTTCQ

SEQ ID NO: 137764 - protein, 332 aa, unidentified
MLKLLNRWREEAEKAGHRIERIAIAFEAGRDGFWLARWLRARGIEAHVIHASSVAVSREHRRAKTDRLDTELLKRAFLGWLRGERDHCKMVAIPTLAQEDAKRPNREREGLVGEQSRIVNRMKAALARLSIRGFNPKLKKAVERLDGLRTPEGEPIPPNTLAELKHDMERRRLVRSQIRDIEGTRLERLKQAPGDGPHVTVRLLARVIGVGVETADILVQEVLSRNLRDRRAVARYGGLTGSPDESGKKRREKGLARSGNARVRRGMIQLPWRFLMFQKDSALAHWFYARTKNAPQTRKTMIVALARKLLIALWRLAREGAIPVGIVLRPAL

SEQ ID NO: 137765 - protein, 265 aa, unidentified
MEQTNSSVGIDVAKAHLDVALSPTDAIFTVANTEAGLKPLVTQLQQLAPFRIVVEATGGYERLVVRVLVDAGLPIIVVNPRQVRAFAKAIGQLAKTDAIDAQLLALFAARVQPALRAHPDHATAALAALLARRRQLVAMITDEKHRRHLATPPIRKSIQKHLVWLERQLATLDTEFTTTIRHSPVWQEQVDLLQSVPGVGPVVSRTLLVDLPELGTLSRRHIAALVGIAPFNQDSGTRTRASDVLGQASSRPHRPVHGHAGGHQV

SEQ ID NO: 137766 - protein, 409 aa, unidentified
MDLVVERCAGLDVHKDTVVACVRTPGAGRRREQTIVTFGTTTTQLLALRDWLVANGVTLVGMESTGVYWKPVYFVLEEVVECWVLNAQHLRNVPGRKTDVADAAWICQLVEHGLVRPSFVPPRPIRELRNLCRYRRSQVEERTREQQRLDKVLQDAGIKLSSVATRILGLSGRAMLNALVAGTRDPDVLAELAKGNLRKKIPQLRDALEGRFGAHHGLLVGQILAKLDFLDEVIANLSAEIDRMIAPYEPQVAALITIPGIERRSAQELIAEIGVDMTRFPTAGHLASWAGMCPGHHESAGKRRSGQTRPGSKWLHRTLREAAKAAARTKNTYLGAQYTRLRGRRGPAKATTAVGHTILIAAYHMLRDGVTYHELGPDWFDRLSPDQHARRLARQIEALGYTVTISTAA

SEQ ID NO: 137767 - protein, 378 aa, unidentified
MGQVNATEPKVVWAGLDVHKETVAVAVADSAEGPRIVATVANDGRQLPRLLRRLGEQGELRCAYEAGPCGYEIYRVCERMGISCIVVAPSLVPRKPGDRVKTDRRDALKLCRCLRSGDLTPIWVPDPEHEGLRDLVRGREDAIVDRMRIRHRIKKMLLRQGIRHPDGMRTWSKRWRVWLGSIEFAYSSQQVVWREYLGTLDEVDARIGRYNEALHEQAQTSSKAYLIAALQILKGIAEVNAVTLVAELGDLMRFARPTQLFSYSGMVPAEYSSGGERYQGHITKTGNRHVRRAITEAAWAYRYPPSFKGRLALQRQGTPQWLVDLSWRAQERLHRRYRAMIKAHKPTPVGLTAVARELLSFVWELAHELEQRDLKVAS

SEQ ID NO: 137768 - protein, 388 aa, unidentified
MYHVGIDISKFKHNCFIATDAGVKVKEFVFDNNKSGFIELMDSLQSLGNPTDIKIGFESTGHYGTNLKSYLSNLGYTYVELNAYLTHMFSKALSLRKTKTDKVDAKVISSMLGSVDYETLHTKFYHMNDLKELVRQRNVYLNSRSKELIKLTNLLDKTFPEFKPFFKNRLGASALFILKRFKTKARISKLSSSDYELIRSKTNGRITYPKFNGLKQIAKDSIGISSKVYDLLIQTVIHQIEHLTEILKSLDDEIILLFKKTDSKLLTIPGLGVITAATIYAEVGDFKNFSNPAKLVAFAGFDVRIVQSGTQEHYGKLVKHGSSLLRNAIWTYALPAVRFIPTFNDYYHKKKAQGKHHKVILSHICRKLIRMIYYIEYHNVSFDHSMSR

SEQ ID NO: 137769 - protein, 381 aa, unidentified
MKKNTIAKLQGSKSQIRRKAAKKGLTIGLDLGDRSSCYCVLDAVGEKVSEGKLPTTKAGLDSVFGKMGPCRIALEVGTHSPWVSRHLAEMGYEVIVANARKVKLITQSLKKNDRIDAEHLARLARVDPKLLSPIRHRGKEAQADLAVLRARAGLVDVRTELVNTARGLTKPMGERMKKCDPDYVKEVLADELSETTQNAIRPLLKSVEAINEQIEVYDRKIQEMEKRYPEVELLKQVYGVGSLIAVAFILVIEDKERFAQSRDVGPYLGLTPKQRDSGESSPELRISKAGDPLLRRLLVQGAHCMLRKGAPDSDLKAWGMTKLEGSKKGGKKRKKKAVVAVARKLAVLLLRLWATGEVYDPLYNRKAAAAAKAKAKAKVAA

SEQ ID NO: 137770 - protein, 377 aa, unidentified
MRKTIRFVGLDVHAETIAVAVAEPSGEVRSLGVVPNRPEAVRKLVRKLGPPHSLRVCYEAGPCGYVLYWQLSELGVHCEVIAPTLVPVRAGDRIKTDRRDALKLARSYRSGDLTAVWVPDEAHEALRDLVRAREAAKKDQLRARHRLYKFLLRHGLRPGEKIKAWSAKHLAWAKTLRLELPTLEATLLDYLTEVEHACERIARLERAIDQAVESAPATIRAVIDGLQALRGIARVSAATIVAELGQLSRFSRPKQLMGYMGAVPREHSSGEYVRRGAITKTGNAHLRRILVEAAWAYRHRPNVGRELRRRQRGASEEVKEIAWKAQQRLHYRYARLMGRSKLKQKAVTALARELAGFVWAIGVQVERHLALRPVRAA

SEQ ID NO: 137771 - protein, 346 aa, unidentified
MMIIGCDFHPSWQQVSWLDTETGETGEQKLVQSAGDAERFYRQVPAPALIGMEATGNCHWLVDLLADLGHELWVGDAAQIRASYVRQQKTDKRDAAHILKLLVEGRFPRIWMPSSPVRDLRQLLLHRYKLVIIRARVKNELQHLCLNKGVQRKRKLWSKAGPQMLRELPLKPWAGRRRDDLLRLMAMLDQQIEPLDQAVKAEAQRDKMARLLQTQPGVGPITALAYVLTMGDVSRFPRGKQVASYLGLIPREHSSGGRQKLGAITKQGNRMLRMLLVEAAQIAVRYDSEFRKEYLHRCHQKPKAVAKVAAARKLAVRLYWMLRTQKPYPEVVRIESSPRVPLVGAS

SEQ ID NO: 137772 - protein, 315 aa, unidentified
MANLTKSKTVVNVGVDVGKQYLDVCIHEKDIYWREENTVAGIKRIFKRLSYYQVERLVMEATGRYEFELAQLAYSRKIPVCIVKPLLIRKYAGANDQLAKTDKLDAQIIAEFGAVLKPKVTPAKSKNLIAIKDLITRRRQLVNLRTQESNRSGIMGETLAVSCRRIIRHLNAEISRIEKQLARHVAEQAEWTEKQGLLKTVPGVGDTLVYTLLADLPELGELNNKEISKLVGVAPINRDSGRMRGKRRIQGGRANIRTVLYMATLSATQCNPVIKAFYRKLVAQGKHKKVALTACMRKFIIILNTMIKNKTEWAF

SEQ ID NO: 137773 - protein, 437 aa, unidentified
MTRPSGPRWVGIDVSKATLDVAILPDEVTFQLTNDATGWEQLVTRGELATVQGIVLEATGSYHLGVTLALAGADHPPAVINPQRTHAFMVSEGMRSKTDRGDARLLARFGQQKQPAPTPVLSENARILRDLVGCRDDLTKHLVMEKNRRGIASAHVRDVHDTMIAFLIQQIAEVDQRIAALIAADAELTARAAVLRSAPGLGPVLSAVLLARLAELGQRDPKTLASLAGVAPHARDSGTRRGARAIGGGRPAVCKALFQMAQTAVRSNAVMRALPAPAAADAPQTRRDRLCPADAGHPQCDGPQGIDLAGDRGRARPVSARSGLTPNTVTTNTRRRGGGRALFDATRPRPVSSRGSKATRDRPVPQDRSLWRHTPRGFVGCTYEAPKAATRRGSWDDMGRKWRLGSAACRVDRSQSIRPIRGPPARRGSPPRMHRCG

SEQ ID NO: 137774 - protein, 349 aa, unidentified
MEQNEVILGVDTHLDTHVGAVISDTGRLLGTLSVTTDTAGYLDLLTWANSFGQLRRAGVEGTGTYGAGLARVLRDHEIEVLEVNRPDRAMRRSRGKSDPTDAENAARAVLAGRATAIPKEQSGAAEAMRAVSVARRSAVKAKTQAINQLRALLVSAPQEIRDRLLKAKAAACVEGCVRLRSLGKTPMLQTLTTTLRLLAKRWLTLAEELKALDTMLDSLTSQHARRVRERFGVGPQTAAVLVAVAGDNPERLKSEAALAALCGTSPLQASSGKTVRHRLNRGGDRSANNALWTIAMVRMRSDPRTRAYVDRRTKEGMSNKEIHRCLKRYIVRELYPLILADLADSTPVP

SEQ ID NO: 137775 - protein, 369 aa, unidentified
MTSDESIVGKGRFATDRDGHAALRRYVQAWPERVWAIEGCQGIGRHVANRLLAEGEHVLDVPPKLSARARVFATGQGRKTDATDAHSVALVGTRMSGLRPVVNDEQLAVLRILVDRRRSLGEEHTRKMSQVHHLLLGLIPGGAKKDLSAAQAKKLLATVRPRDAAGKTRRRVAAELITDLERIYQRKKAANKELTALVAATGTTLMDLTGIGPSGAARLLVEVGDITRFPDNNHFGSWTGTAPIDASSGDNVRHRLSRGGNRQINRVLHIMATVQLRNPTEGRAYFDRSKARGKTSNESMRLLKRRLSDIVYRTMVNDAARHMATGPGGQRGNDSDSSAAGSQPHTNSSDKPLPGPATTDPRTPLPAAS

SEQ ID NO: 137776 - protein, 321 aa, unidentified
MLYAAIDIHKHAFQAAVFDPESGEVVEARLSADRDSLARWAEEWRDRVSAVAIEATTGWCWVWLELVAMGFDVRLAEPVQARGLLGRRRSAKTDRLDARWLARLLAREMLPESWIPPAEIQQLRDRTRLRKAPAEDRRRWAQRLHAYLLYEGWPCSRSRLLSVEGLRWAASLRLPAHARLQVDSLLAVMAALEAQVATVDHELRRFARNDERCQALQSIYGVGPILACHLLAEIGEASRFRRSEQITRLAGLDPVVEESGETRRRGKLAKAGSPHLRWALVEAAVHAHRATAPDLVLYRATRERRDATIARLTVARKIGPS

SEQ ID NO: 137777 - protein, 368 aa, unidentified
MRMSVGVDLHKKQFTVYWRVKGQPERGEFSRYLTSEAGYREFEQKLRTVASVADAVSVAVESTGNTRYFKNRVEKLGIEVVVVNTLKFKVVNESVKKTDRHDASTLAEFLEKDMLPTARLCTQQSEELRRLVKARSSLVRTVVAVKNQIHGLLLSLGIESKRGELQSKKERRRVQSVLAAQHMTGAAVDPLFDTIDRLTAEVKKLEAVMEELVADDPVVELIRTIPGAGLITATTIRAYVDDIQRFESPKQLAAYAGLTPWVQNSAERERHGRITKRGPNELRTALVQVVLGMVRNKRRTGTYRIIQRYDQMKPQKGSGRTIIATARKLSEIIWHMLHEGQPFDEARMKSPEIRHKAIEMQAAALDVA

SEQ ID NO: 137778 - protein, 313 aa, unidentified
MPQSECFVGIDVSKGSLEAAAHPDGSRLDLTNDGKGRRELVRWLKRKAPRLIVYEPSGGYERPLAESLSQAGLAHRRVDAWRVTRYAEALGRRAKTDRIDAEVLARFAAVALEEQDPEAEETAPPGLVSLMAARAQLVAEQVRLAGQLDQADEPLVKRLLQARLKLVQHQMQVVLEAARKLVAEDPALHRRFQVLCSAPGVGEITALTLLAELPELGRRDSRRIAGLVGVAPRDRQSGKTRGRSAIQGGRSALRRVLYMAALSTARAKGKWANLRQKLTERGKPPKVVLVAIMRRLLVVLNAMLKNDRLYQPA

SEQ ID NO: 137779 - protein, 387 aa, unidentified
MVMEAVDQPAEPAPHRPWGVAGIDPHKRTFTVAVLDERGGLHGVASFDTSEQGLAVALAWLGEVGFDLVRVGVEGSAWLGNQVATFLAAAGYDVREVQASRTAERRRRRRRAKTDAEDAQAIARETLAHPDLPPAGKQHAPDPDWEELVALRNQRRSLIAQRRRLLNEAESVLVGLPLVVRAVLPDTSQVRPRLRALTQGAADQLELTGADRVHLAWLAASAADIGRLDQRIRQLDQRIPAVLARHCCTLTEEVGIAAVGAMELLVEVGDPTRFTTEARFARWCGAAPVAVSSGEGDGEPERHRLDLGGNRRVNSVLHTMHITQARCYQPAKDYLGGKRAEHKTAREARRAHKRLLANVIIRRMWADHQRRRSPTLNLSNPTTPKAA

SEQ ID NO: 137780 - protein, 405 aa, unidentified
MRIVHERCCGLDVHKRTVVACVLTPDGQQTRTFATMTRDLVALSEWLQSLGVSQVAMESTGVFWQPIYNVLEDTGMNVLVANARYIKAVPGRKTDVKDAEWIADLLRHGLIRGSAIPSRARRELRELVRYRLSLSRQRAQVAHRIHKVLEGANIKLSSVVTDIMGVSGRAMLEALITGTDSAETIADLARGPLRRKRNDLIAALEGLVGPNQRLLLASHLRNLEFLTHEIERLTTEIEEQRRPSQELIERLDTIPGVGPRVAQAMLAEIGNDVSRFPTGSHLASWARVCPSNDESAGKRRSSHIGPGNPWLRATLVEAAWAATHAKHTYLAAQYRRLAARRGAKRALVAVAHTILIIAYRIIRDGTTYEDLGSNYFDERDRRATLRRSVQRLERLGYKVTVEEAA

SEQ ID NO: 137781 - protein, 332 aa, unidentified
MAYTPTLLIVRFGGAPIQTTVLYIGADVAKAELVISVAGQRPCIIANTATGITRWLKTVSEHALIAMESTGNYHALLAQLAYLHGLTVYILNARDVFYYARALGSRAKTDNIDAEVIVRYLQEHQSSLQAWQPLTPEQQQLRQLLSRRAQVITHQSALRQAFTDVDLSGVDTQALQHGFDVVLASMDQQIQHLIANDPQLEQGYQRLRSVSGIGQQTAALLTELLNRIPFANADALVAYSGLDPRPNDSGTKRGRRRISKRGPALLRRQLYLAAMSACRSAACKPLYEAYRARGLAGTESIVILARKLLRIAYAVWKSGQAFDPSKLSPKTA

SEQ ID NO: 137782 - protein, 570 aa, unidentified
MVVVGTDAHKYSHTFVATDEVGRQLGEKTVKATTAGHATAIMWAREQFGLELIWGIEDCRNMSARLERDLLAAGQQVVRVPTKLMAQTRKSARSRGKSDPIDALAVARAGMRETDLPLATHDETSRELKLLTDRRDVLVAQRTSAINRLRWLVHELDPERAPAARSLDAAKHQQALRTWLDTQPGLVAELARAELTDIIRLTGEINTLAQRISARVHQVAPALLEIPGCAELTAAKIVGEAAGVTRFKSEAAFACHAAVAPIPVWSGNTAGQMRLSRSGNRQLNAALHRIALTQIRMTDSRGQAYYQRLQDAGKTKRAALRCLKRRLARTVFQALRTVHQPSSEHTQPAAACHRSYCSSHLGEPPRLTDMTQKTRIQPLPPKRAGLLIRALYRIAKRRFGEVPEPFTVTAHHRRLLIANVVHEALLQRASRKLPPSVRELAVFWTARSIGCSWCVDFGAMLQRLDGLDVDRLTDIDNYATSSKFSDDERAAIAYAEAMTADPHSVTDEQVADLRARFGEAGVIELTYQIGVENMRARMNSALGITEQGFNSGDACRVPWAAPDVPSAESR

SEQ ID NO: 137783 - protein, 333 aa, unidentified
MPRANSNLLDWDFMKSATTNEKIFVGVDVSKAALDVYRPDTKEGFKIDNSDEAIALLCSQLKKMKRKVMVVMEGTGGYEYLLLKHLAAHKLEAAVINPRRVRDFAKGIGLDAKTDPIDARVISKYAEVVVPQPMVTKSDHELKHGALVARRNQLLELVNQENNRLKQSWDDDAKQSIRDVLEILKKQLKDIDSQLAKMIQADTENQRAIEVLQSVMGVGPVMISTVLAELPELGKLNRGEIAKLVGVAPINRDSGKKSGKRFIGGGRGQVRRVLYMATIVAIRHNPAIKAFYAHLKSKGKESKVAIVACMRKFITILNLLIKTDQLWEDKMSV

SEQ ID NO: 137784 - protein, 348 aa, unidentified
MAVYIGVDFHARQQTISYLTTEDGEIRHLVLLHENPTEVRAFYEQFVGQHVVVGFESSGYAAWFEELLEELGCEIWIGHATYIRQYAKRRQKNDRRDADLILELLLSGDFPRIHRYSRSTRQMLQQLRYRQRLVKMRTMIVNMLLFMAGSRGHSLRTQLQSKRGQARLAELPLPEPLAQQRDELLSLLGQLDQKVKTIEGWLAEATAADVGVQRLRTHPGIGLLTSICVRYTLEEVTRFATTRKVSAFAGFDPMEDRSDERRRMGAISKQGSRWLRFYLVEAGQVAMRKDADLARVYQRVSRRGGHAKAKVAVGRRLLVRAFIMLRDEIDYAEFQRRGVAARSSRGSA

SEQ ID NO: 137785 - protein, 352 aa, unidentified
MTLYIGVDFHPHQQTISWCDSQTGETETFDLKHDLERVREFYSSLPGSAVVGIEASAKATWFEDMLFENGHKLLVGNPVLIRKRATSRHKNDRRDAELILELLMKNEFPAIWRRPRESDQVIEIVALRHKLVRQRIQVYNRLQSLALNAGLPKGRAKTQKFQKLIKQVEMNEAARLARSQYFALLVSLDERIAELEQWLRTKVSDNKVQLLMSQKGVGYLTALLTVHTLGDVNRFKRVSKEVVSYAGLDPLEKSSAGKVRFGSISKAGSPVLRHHLGQAIMTATRYDPRLKTFYKRLAKKKPRALAKTASARKLLVKLAIMLRDNINADEFDRRGRTAVMPEEIAGSEMTAA

SEQ ID NO: 137786 - protein, 346 aa, unidentified
MYKDNLFAIDLSKNSFQGCLLDKNHHERFNRQFSRNKLTLWLSRQPPLTVAMEACGSAHHWARLVERLGHRPLLVPTRSVCRYREGHKTDATDARATGVAARQPKVKFVAPKTVEQQGMQGIERIREHLSDHLTATSNLIRGLLNEFGLLIPQGISAFKQGVVEILQDAENDLPMPLRMQLIESWQYYRDLEERLKTAKQARDQIIAQHEVCQQLLTLQGVGPVNSLGLYLTLGDRGSSFTNGREAAACIGLTPKQYSTGGEVTLLGISKKCANKRLRSNLIQGARSVIKVLNKRDPQNGLEAWLKAIIARRGEGRAAVALANKTVRLAWAMLHYGEDFKLHPDMA

SEQ ID NO: 137787 - protein, 455 aa, unidentified
MARRLRRPTRPVTMPTLHPDAAGIDIGATELYVCVPLDRDPEPIRRFGTFTEDLQALADWLTRCGVIAVAMESTGVYWIPLYQILETRGLEVCLVNARHVKNVPGRKTDVQDCQWLQYLHSVGLLRGSFRPPETVCAIRTLLRHREALVQQAAAHTQHMQKALNQMNLQLHHVLSDLTGVTGLAILDAILAGERDPTVLAQHRDYRIKASRETIAKALVGDYRSEHLFTLRQSLASYRHCQGLIEACDAEVQARLGTFTSTIDPATHPLPPAAARRKPHRKAPRFDLRTELYRILGTDLTQVPGLQTPTVYTLFAELGADLSPFPAGDHFASWLGLSPDNRISGGKVLSVRTRPVKHRVAQALRLAAQSLSRSQSVLGAFFRRMRAKLGAPKAITATAHKLARIIYHLLTTHEPYDESRLAAAEADHQRRTESRLRAQARTLGFQLVPVIEQSVS

SEQ ID NO: 137788 - protein, 455 aa, unidentified
MAKKRKTRKTDNAILPVMRSNAAGIDIGATEIYVAVPADRDAENVRSFPTFTQDLYRLADWLKRCGIETVAMESTGVYWIPLFQILEERGFEVCLVNARHVKNVPGRRTDVSDCQWLQFLHSVGLLRASYRPEQEVCAVRSLLRHRESLVQMGATHVNHMQKALDQMNLQLHHVISDITGLTGLAIVDAILGGERDAFTLARLRHDRIKASEEVIAKSLVGDYRSEHLFTLRQSVKAYRSYQQLIDDCDREIRAALDKFQPPVTMSGPDADVRPPESRKTRTASADAGLRTELKRVFGVDLTKIPGIRTGIAQMLFGEIGPDFTKFRSASAFASWMGLCPDNDISGGKVLWVGTRKVKCRAATSLRMAAQSLHHSKSGLGDFYRRMRAKLGAPKAITAAAHKLARIIFHLVTTRQEFDDTRFAADQLRFAKRQENKLRLKAKALGFQLIPLENAG

SEQ ID NO: 137789 - protein, 369 aa, unidentified
MEKYSEVFVAFDVAKQKHAVAIAESGRNGEVRFLGDVENSPLPIERTIKRLAERYDRLHVCFEAGPTGYGLYRQIQTLGHDCMVVAPALIPKRAGERIKTNRRDSVTLARLHRAGELTGVWTPDAAHEAVGGLVRAREAAGDDLRRKRQQMLSFLLRHSRIYRGGGHWTLAHGRWLANQKFEHAAQQIVFQEGIDAIEDALQRMRRLEKPLTLIVPGWSMAPVVEAYQAMRGASFLVAVTFAAEIGDVRRFDTPRQLMSFLGLVPAESSTGDTIRRKGLTRAGNRRARRALVEAAWTYRFPARVSDTLRARLEGLPKPVRDIAWKAQVRLCARYRRLSATGKKLPIVVAAIAREMAAFLCAIGREVAPV

SEQ ID NO: 137790 - protein, 350 aa, unidentified
MEYIAFDAHKHYTVASVERPTGEVLRETRLAHHRGVIRDFLQQWTPGSPVAVETVGNWYWLVDEIEEAGMVPRLVHARKAKLMSGMINKTDKLDVRGLNRLQRTGTLPTVWIPHAEIRDQRDLPRTRMVLVRARTRLKNRIHATLAKYALTVTDVSDLFGKQGRIILSDKLTQLPPHSRFSTEHLLEQLKALDAHIAEFEVRIRKVFKKTPALEWVISLPGVGLILGIVILLEVGDIHRFPDAEHLAAYAGTTPRVSGTGGKIRFGRLRPDVNHYLKWAYTEAAEVICQHRADWSHRHVSQLYTRVHHRKNHQKAIGAVARHLAEATYWILTKRESYQEPKRRSDASTKA

SEQ ID NO: 137791 - protein, 482 aa, unidentified
MKKRNIYQNQSQELLSIFEAAGSSAKVMCVPMDYAKKDHLVMFCNGHGDILRKPFSVKNTPEGIKYLIDQLTRSCRRRGIKKEHVFLGGEDANSFAENFVSTLRFKGWLVAGVNAHDAKKQRMNLQASTDRIDLMGIATMLLNCRANCCPAASGIYRNLRTLVRHRRKLVVMLTEVKNRAHGIVDRLFPGFLNETKSGIVPFTQSSLYLMEDRFSPKQIRRRRRQKLIEILRLFGTSKAEETAFKLQQYAEKVLHAPDEYVDTLQISLAQHVKHIRCLQEGIVQLKKEIAVNLAQTQGAFLTSVRGIGIVLAAGVSAEIGNPYEQKPLSNVVSYSGIIPRVKQTGGVDGKTYTGHVAKRCNRILKDYVVKSAYHLGLSGPEDLMADYKRRDASGQHADFGIGRRYLRMAMSLMRTSQVYLPPRLRKADTALEERAGYYLMSWPFLRDKWKRVGALETAFSKDKPLGLWRQIVQELYDIKLKL

SEQ ID NO: 137792 - protein, 420 aa, unidentified
MQVAQDDQEIIARVAALDIGKAEVVCCVRVPGEGPRARRMQEVRTYTTMTRSLLAMADWLTELGVTRVVMEATSDYWKPPFYLLENTFQTWLVNAKDVKHLPGRPKTDRLDAVWLCKVAERQMLRPSFVPPPAFRELRDLTRYRVDLITTRTSEKQRVEKLLEDAQIKLSVVASDIFGVSGRAMMAALVAGERDPKVLADMARGSMRGKTARLEEAFTGRFTDHHAFLLRTMLARVDAIDTDIDVVQARIDEQIAPFAKAVTRLDEIPGIGVTTAQVIIAEVGLDMTRFPTPDHLASWARFAPGISESAGRKKGGSSTGKGNRYLARVLGEAAVGAGRTKTFLGERYRRIAKRRGKKRAIVAVGRSILMIVWELLSDEEKRFIDLGPGYYDSRVNRNRSTRNHVRELQALGYKVTLEPAA

SEQ ID NO: 137793 - protein, 351 aa, unidentified
MTDYKLGFDVHKKYSQIAVLNETGQVTRRERLVHSPEVVKEYLSQFPAGTPVAFETVGNWYWIAEAIEAADCEPLLTHAAKAKVMMGNVNKTDKLDAEGLATLLHLGKLPTVWIPDSSLRDERELLRLRMFLSKIRTGLKNRVHATLAKYALVIEDSDLFIGRGYEHLKKKILELPTHTYTCVAQELETLDQVQKQIDLLEKRIQECVQDTPATILLKTLPGFGKIFSALVAKEMGPAERFPDAEHFASYAGCVPKVSSSGGKTHYGHLRREANDYLKWAFIEAANVIASNRNRPVWRNKHVIRLYERTRQRKGHAVAVGAVARHLAEAAYWMLRRNEPYREPTSDLPRQA

SEQ ID NO: 137794 - protein, 352 aa, unidentified
MAEGSTSGRQIVGLDLSDKQSTFVVLDRRGQTVEEGKVTTSPAGLKKQFGKSPCRIAIEAGCHSPWVSRLLAEMGHEVIVANPRQVALIAQNQRKTDRLDALRLARLARIDPQLLSPIAHRSQQAQADLELLRAREQLVQARTALINHVRAAVKSLGERLPGCSAPIFDRKMVQLLPPGLRAALEPLLAVISQLTQRIRGMDRQVVNLIEERYPAARALMDQLNGVGPLTALAFILTIEDASRFHRSRNVGAYLGLTRRQRDSGERTPQLHISKAGDAFLRRLLVQCAHYILGPFGLDCDLRRWGLGLAGRAGKKRAITAVARKLAVLMHRLWSTGEVYEPLRRQPLAPAAA

SEQ ID NO: 137795 - protein, 343 aa, unidentified
MSVGVDIGKDVFHLVGFDKEGQLVLRKKIKRMALIATFEGLPHCIVGMEACLSAHFVSRTLRKMGFEPRIIPAIYVKPFNKGQKNDYNDAEAIAEAALRPNLKTVSEKTQDQLDLQALHRVRSRLVSRRTATMNQIRAFLIEQGITVRKSVAALRTSLQAILDNRSDEISLRMRKLILGLQQDWIWTDKRIEMTTSEIKSVSESEASCQRLMTIPGIGPIISTAVVAAVGIGEAYDRGRDFAAWLGLVPRQYSTGGRTILGRITKRGSRYLRMLFVQAAQVIMMRPKNWHKFSFGAWLEAAATRMQHNKLGVALANKLARIAWSVLNSGKDFDWKEKELAAAI

SEQ ID NO: 137796 - protein, 345 aa, unidentified
MVVLGADLHKRSHTIVVIDATGRQLAEKTIAATDAGHLELRRWAAQWPERMWGLEDCRHLSRRLDAELVRAGEAVVRVSPKLMAGVRRSGRELGKSDPIDALAVARAVLREPDLPVATLDGPDRQVRLLVDHREDLVGERTRHEQRLRWFLVELAIAEPTPRSLGRVVVQATLASALAGRTEPVARFARDLLDRIVSLSATIRALEHEIEILVRTLAPTLLALPGCGALTAAKIIGESAGISRFRSKEAFARHNGSAPVPVWSGNVVRHRLNRGGNRQLNVALHRIAITQIRLGGQGTTYLDHRQASGDTRTEAIRALRRRLSDEVFRRLRADEAAGSTGLAAAA

SEQ ID NO: 137797 - protein, 345 aa, unidentified
MKLSRVGIDLAKNVFQVHGVDEHGELVWKRSLKRATWLGVFFKTVEPGCEVAMEACTGAHHWARELQARGYKVKLIPPQFVKPFVKSQKNDANDAEAISEAMSRPAMHYVAVKSIEQQDIQAVHRVRSELMSHRTAKANQVRGLVAEYGLVAPQQLGSLRAAIPCWLEDAQNGLTDRFRALLHGLWEDLTGLDQRIKVLDTEIAVIASTHPDARRLQQLRGVGPLIATALVAKFGDASHFKQGRQAAASVGLTPRHHGTGGKNRIFGITKHGDPYLRSILIHGARAVVSQAKRRDDRLSRWTTELAQRSHMNVAAVALANKTVRMAWAMLRNGTDYDPEIAVAEV

SEQ ID NO: 137798 - protein, 360 aa, unidentified
MIVIGADSHKRTHTLVAVDDVGRRLAEKTVRTNTEGHLDLLGWSRRLPGADAGEVRFALEDCRHLTRRLEADLLAGGARVVRVPTRLMAEARKVGREPGKSDPIDAQAVALAALRHPELPVAELDGPAREVKLLSDHRRDLVMQRTRICCQVRWFLHELDPDLEVASRGLRRQSLVADLLIELDQFDGVVARLTRELLERCQELNGQITILEHELRDLVRRLAPSLLAVPGCGVLSAALIVGETAGVHRFRDKDAFARFTGTAPVPVWSGSSKGKVRLNRGGNRSMNYALHMIAVTQARGIGPGRAYLDKQTGRGKDRVAAFRLLRRRLSDAVFASLKADDQVRSPAGPNHLDGELPAAA

SEQ ID NO: 137799 - protein, 404 aa, unidentified
MYYVGIDWADEGHHVYITDDSSQKLDSFPIDHNTAGMSKLQEHIHGFSRKLDNVIFSLETDKGLIVSTLMDWGYTVYPINPKAVDRYRDRYRASGVKSDEFDACVLANILRTDRDRFQPILPDSELARELKVLTRDREKLIGDRTRLSNRLTSTLKAYYPAALELFCDVAQPITLSFLSKYPTYQDAKRISFSEFKAFLSKNRYPNLKRAKEIYQRLQQPHLEPEDMLARTKSRLMLAVVSQLQPLIQQIKAYEKEIKRLLDSHPDAHIFRSLPGAGDTLSARFIAEFGDNRDRYQKAENAQAEAGSAPVTIQSGKMKYVKFRRACKKPFRTTIHEFAFCSITQCAWAREYYDQQVSVGKTHTQAIRSLSNKWMKIIFTLWKRHQTYDEEHHLLMKEKHAMAAV

SEQ ID NO: 137800 - protein, 427 aa, unidentified
MKYTQNAKIMQITEKTLIIGVDIASEVHYARAFDFRGIELGKLIKFDNNAAGFKEFNAWAEEIKAKHSKGNVMVGMEPTGHYWFNIAPYLKDQSMKLVLVNPFHVKRSKELDDNNPTKNDRKDPKTIAMLVKDGRYMEPYIPEGIYSEIRTGMETRWQIVKYLNGIKNRVQRWLSIYFPEFNKVFGDWEGKAALIVLKEFPLPAQIIEQGAMSIVSRWKQDKMRAVGIKRATELVEAAKTSVGVKGGIAAAMNEIMCLLEDYDLKMKQYERVMSMVEKLVIQIPGMEEILSMKGVGLIMAAGYVAEIGDAFRFEHSKQIVKLAGLNLKENSSGKHKGKSTISKRGRSRLRAILFQGMLPIVAKNEEFKALHEYYTTREHNPLKKKQSLILLCCKLIRIFHTLLTKNVTYDPKKMMSDIKRLSMPVAA

SEQ ID NO: 137801 - protein, 412 aa, unidentified
MNAVGIDVSKGKSMVAVRRPFNETVAKPFEVRHTGSELKQLADYLKSLDGETRVVMEHTGRYYEQIAQYLHDAGLYVSAVNPKLIKDYGGGTSLRHVKTDKADARKIAGYALDRWAELRQQTPMDTIRYQLKMLNRQCGLYTKTKTMMKNNLIALLDQTYPGVNALFDSPVREDGTQKWVDFAASFWHVDCVRGMSRTAFVQRYAKWCKQHRYQARAGRAEEIYEHSQDLIAMLPKDAMTKLLVKQSVDAINAVSATLERLKAEMLKLASLLPEFPVVMAMRGVGDTLGPQLMAEIGDVARFAHRSAITSFAGVDPGANQSGTHEAKSVRISKSGSPELRKALFLVMDCLIQTKPQDDPVYLFMDKKRAEGKPYLVYMTAGANKFLRIYYGRVKEHLASLKGNPVPDPEGHT

SEQ ID NO: 137802 - protein, 353 aa, unidentified
MREVSVIGLDLAKQLFQLHGVDAHGRVVLRRRLRRSQMEGFFASLPPCLIGVESCPGAHHWARVLARLGHRVRIMPAAYVRPYRKRGKNDASDAEAICEAVQRPNMRFVAVKTPEQQGVLALHRARALLVRQQVALVNQMRAVLAEQGVVFGRGRRVALRGVARLLGEAEAAAALPEAVRVVLRALLEAHTELEARVRALEAALQAWHQGCEASRRLATIPGIGPLTATALVATVGERAAHFRSGRHLSAWLGLVPGQHSSGARQRLGPISKRGDSYLRRLLVLGAQALLRQVRRRMAAGQPSGLPWAERLLRRRPPNVVAVALANKLARQAWAVLHRGEPWRPQPAAAATGI

SEQ ID NO: 137803 - protein, 410 aa, unidentified
MQVLHPCCCGLDVHKRFVVACLIWSTEDGKQHKELRRFDTLTPDLLRLIDWLQNAACTHVALESTGVYWMPIFNLMEGLFEIVLVNAQHMKAVPGRKTDTKDAEWIANLLSHGLLKASFIPPQPQRDLRDLTRYRTSLKQERTRHVNRIHKLLEETNLKLSSVFGDLMCKTGRAILHELAAGEANPEVLADLALLRAPHKRDALVPARHRCMRAHHRFLLQELLEMVQTLERAIGRLDHEIEERLQPQKELMEQLDAITGVSQRVLETLFAEVGWELDSFPDAAHLASWVGICPGQHESGGKRRSGRTRKGNRHAKTMLVQAAHAAGKTKTYLGAQYRRLSKGRGIKRAAVAVGHSILVIYYHMLTTSQPYEEKGENYFAQHDHQEKQRRLVKQLERLGYTVKLTQEHIA

SEQ ID NO: 137804 - protein, 312 aa, unidentified
MPENTEPDYVGIDIAAERLDYCVSETDEGNCRNDAAGRAELIAKLKQLPHPRVICEASGGYEKLIVAELLAAGIEVCVVQPARVRAFAYAEGLLAKTDRIDARLLRRYAQKVHLRLAVPVAAALATLRELLEHRRALTTQLCEVEGRLPLAGVTLAKLLGRQRTFLKKQIEQIEKMISQHIDTDPDLRGKSERLQQIKGVGPVLASTLLAYVPELGKIESAQLSALIGVAPHPRDSGKNRAPRHVRGGRSQVRNVLYMAAVCAARCNPILAAFYQRLKAHGKPPMVCLIAVMRKMVCLMNRLIQDPNFVLAQ

SEQ ID NO: 137805 - protein, 361 aa, unidentified
MAKSTTIVAFDQHAATTVAAVLLPGQRTPALHTLTSDSPTILRFVQRLRATSVQCCYEAGPCGFELQRALTGHDIQCEVIAPALIPRRAGDRVKTDRRDASQLAVLYRAGALTAIHIPSEDEEAARDLLRCREDVRADLLRARHRLSKFLLRHGRRFTATRKAWTKRHAAWLQAQHWPIAALEQTHRAYLRAVDEAVGRLHAVDTELRDLLTIEPLRARVERLRCFRGIDDLTALTIAAELGDARRFPSAPRVMAFTGLVPSEYSSGAKQARGRITKTGNAHLRRVLVESAWHYRHHPFLGRALRLRQQGAPAVIIERAWQAQHRLHRRYRHLAARGKAKQHIVTAVARELSGFLWAALTH

SEQ ID NO: 137806 - protein, 311 aa, unidentified
MTEHNIGVDISKSHLDVFRLEDGAAQRFDNSAAGFRSLIKWLSKAPVVRIVFEPTGPYHKAFEIALGERFALVKVNPLQARRFVEAHGTRAKTDAVDAQMLARMGAAFGLEPQAPCSKETRILKDLHVARIGLIKDRTRLRNRAQTQHIAVLKRQTKARLDQVNRQIAELDTEIATIIKAGRDTARNRDILCSMPGIGAVTAAAMLTLLPEIGTLERKQVASLAGLAPITRQSGQWQGKSFIGGGRKQLRDALYMPALVAIKHNPDLKAKYEALRGTGKPAKVAIVAVMRKLVEMANALVKADRNWTQKKA

SEQ ID NO: 137807 - protein, 350 aa, unidentified
MRHFIGCDAHKKYSLFVAVDEAGQTKPAVRVNHDRESYRTFLRGLPASSSIAVETVGNWYWIVDEMQQAGHQPRLAHARKAKLMMGQLDKTDKLDARGLATLLGNGTLPEVWIPSRETRDQRELLRLRMTLVGMETRLKNRVHAILAKYALRLEVTDVFSQKGRRLVLEHLENLPEETRQVVRQHLELLESTERQKRTTEQRLQIIVQQRDDVDLLRTLPGVGWILATVIALEIGDIQRFNQAPELASYAGTVPRVHSSGGKTRYGPVHPDVNRYLKWALIEAGNLIVMQQQRLGDIHVVRLYRRLRPRKGHAKAVTAVARHLAEAAFWVLKRQQPYKEPQGCRVSSTHR

SEQ ID NO: 137808 - protein, 366 aa, unidentified
MLDTTSGEVVKTTLQHEGNKVREFYRSLARPVRVGIEATGSMQWFVNLLEELGIECLVGHPEEIGAAEPRKQKHDRRDADLLLLPLVEERFSTIWLPTKERLDLRALLRHRQQWVCLRVKIQNALQAMALANGLRRGSSLWTPAGQQAIASLPLSPHAAYRRDELQALYVKFATEIEKLNQRVEQQAWERSGARLLMTHPGVGPITALATDVFLGDPSRFASSKELASYAGMIPGEHSSGKRQRLGGLTKQGNPLLRFLWSEAAIHAVRRDPELKHFYRRKLIQKGLGKARAAVARKLGIRMWIMLRDRIEYNEFCRRGQMQQKVVMPVRGCLQPTWHSIPNSSSRFRNHCIGPIASMPTTAGCGS

SEQ ID NO: 137809 - protein, 474 aa, unidentified
MPRKTSSPASPESFSLLAQETLYVGVDIGKRAHVAGFLSVTLLTRHQRFEHCPALSFDNSREGFRSLIDRIQTFVPLTQVQVLLEVTGHYHRALMQYLQDLDIPVYIIHVQKRREGLLKSDKRDALGLANMLFNQLEKGIQVDDPLQAVRKLAPPTEAAAQLRGMVQHHAELVRESTQRKNKLTSICDELFPELTRLLRNPNLPTALALRSRFPTPSDLALASFAELRAARGRTCSVSDAKLVELQRLAAHSIGAKDPARVHALVFEQKQLIAELNLLGDHLQLLEAEIIQVVEHSREGKILTSIPGIGPQAAATLIATIGTIANFERPAQLKSYFGWVPKVAQSGSSLDWTRLSPRGVRQMKQTMYLIVWRAMQWDSDWKEIYERLVARKCHTDERTRRLLGREKVMGRLAGQMTAVVYVLLKRDQELLAHLAPGAKPPEPQLYDSALHRQHRMGHYQPVRERSREEIQLPTK

SEQ ID NO: 137810 - protein, 325 aa, unidentified
MESTQVCIVGENGRKLVSEKVESTPEALAAMLERYCPIERAVLETGRMSPAICLGLRELGVAVVCIDARQAHQSLKAMKANKTDPHDAAGLAQLARTGFYKEVHVKSPAAHGVRSVITARSHLVEARVRLDNMIRGLCATFGYRPGAGQGKAFLERIMQAAHIPGLGDAITSLLAVRAELVEQIKEMDRRLRIITSQSQACEILMTIPGVGVQTSAAFAAAVDEAGRFRQSRDAGAYFGLVPRRHQSGELDWTGRITKQGDGTVRKLLYEAANSILTRSRETFALKTWAMKIAKRRGLKKARVALARRLAVIMHAMLRDGTLFQA

SEQ ID NO: 137811 - protein, 387 aa, unidentified
MYFVGIDISKFKHDCAIVDELGDVITPSWSFQNDREWFSLLKELLDALNGEKKIGLKATSHYGQNLKLFLENNDFSFMEFNPLLINRFVHSKSLRKTKTDSIDALMIAQYLMTVEYKPYPPSFYTLEKLKSLTRFRDSLIRQRSKQLVELTNILDKVFPEFKPFFKGRFSATALYILSHYASPEKISNMNSKSYEPLRRLSRGRFSMVDLVELKTLARNTVGSTCNYLLQEMEIIIDIYNQLQSKVEEIEIQINDCVLGLAPPILTIPGIGVASAAVILSEFGDLSKFNSPSKLLSFAGMEPGYFQSGTSESTGKMVKHGSSHLRYAMMNCAQTVINNEPTFAAYYAKKRAEGKEHRVALTHVAKKLLRVIYTLETKELSYNPDLVR

SEQ ID NO: 137812 - protein, 411 aa, unidentified
MRRVIGLDIHRTFAEAVAWEDGRLVRLSRVDMTRTALEIGKGLRPSDEVVVEATGNAMAVVRVLSPFVARVIIANPLQVKAIAHAHVKTDKIDAGVLASLHAAGFLPEVWTPDPETERLRRLVARRNQVVRHRTRIKNEVHSILHAHLIPRCPHADLFNRRGRDWLARQPLPADEKATIDRHVRELDRLAEDLDVLDREVAQDAIGNPSIERLITITGVNVTVAAGLVAAVGDIRRFASPQKLVSYVGLNPRVRQSGLGLAQHGRISKVGRSHARAMLVEAAWAAAKAPGPLHAFFVRIRARRGHQIAAVAVARKLAVLCWHLLTKETDYLWARPALVAIKKRSMELQAGQPARKGNQRGPAYAYNVKELRNREMLVATQAERAYEHFVGQWRPRGPGKGVRERLNPARHE

SEQ ID NO: 137813 - protein, 445 aa, unidentified
MFIQSQDDSHCCYSLFIKVVILMMKLKYSICCGLDVHKNVIVATIVITNKDGISEYRQKSFSTINSDIQRFHSWLIGNNCYHVCMESTGKYWIPIFNYLENDIDVCLTHPKYVKAIKGKKTDKKDSKWIADLYKFDLVRCSFIPPKDFRQLREIARYRFKLVCMKSSEKNRIQNCMTVSNVGIASVLSDPFGKTATEIMAYLLEHTSDSIDEKAVRKLIKKGAKAKSNEIIEAIRGYNIETDQAKKLELARGHLEYLDDMITQTEVELYIRMKPYYEFVEFVSTMPGMTELSSTIALAETGVNMDIFDDAKHLCSWCGLSPANNESAGKKKSVRIAKAGDYLKPMMVQCALAAIKSKKQPYFAIKYGRIKKRRGHKKAIIAIARMMMVCIYHMVSEKKPFTPTDYEELMEPQNHVERVVLNEDNVFAYLESLGYDSSKLVKRNDN

SEQ ID NO: 137814 - protein, 307 aa, unidentified
MRRHVGIDASKAELVIHVLPDEQAWTQPNTPQGQRALAQRLAGMDCERIVLEASGGYERAVLQVLRQADLPVVRMPADRPRKLAQALGLHAKTDALDARLLAIAAQHIPTTPTPVAPEHQQSLRELLDLRATLVSQRDAHRRRLEHITSAKVQHRCREVIALLNQQIQTLTQEIGQQGKTCSSLPKVPGLGTILRAVLAARLPELGTLPPRKLAALVGLAPFNHDSGCWKGQRRIKGGRADVRRVLYMATWASIRAKSPLANTYARLRAAGKPAKVAIVACMHKFLRWLNAIARDQAPYAPPVIAGA

SEQ ID NO: 137815 - protein, 343 aa, unidentified
MQTITTIGLDIAKSAFQVHGIDAGGQVVVRRQLKRRYVLAFFQKLQPCLVGIEACASSHYWSRELQALGHTVRLMPPAYVKPYVKRQKNDATDAEAICEAVTRVSMRFVPTKTPEQQSCLMLHRTRHLFIRQQTAVINSIRAHLAEFGIVAPVGRKGVMELLQVIADPSDKRVTDVARACLAALGTQLLNLKERIVAFDRMIMAWHRSNEASRRLLYLPGVGPMLATALVASVGDPKVFRSGRNFSAWVGLVPKQHSSGGKDRLGSISKQGDRYLRSLFVAGALSVIRYAKIHGTKHRPWLTALLARKPTKVAAIALANKLARMAWAMMARGERYRIPAALAA

SEQ ID NO: 137816 - protein, 330 aa, unidentified
MSVFVGVDIAARSFDVVIREDDKGKKPKRYQQTAQGHAKAIQALKKVRPERIVMEATGIYYLDLAVALTEADLPVSVINPKSFRHFAELTLTRTKTDGVDSALLAEYAERMAPKLWTPPEPVCLELRDLGRQINRLTGSRIQAKNRLHALQSKNSTSSLLLEDEQEGIEFLEKRIKRLREAAETLIAEHEALSRHYNNLQQAPGMGKASTLSILAELCVLPDDMKAPQVSRFAGLDVRLTQSGSSVNRPARLNKAGNAYLRAALYMPAMSAVRSNERAKAFYDALVGRGKKKIQAQCAVMRKYLTGIWACMKNETPFDSALLFSDEHFKA

SEQ ID NO: 137817 - protein, 358 aa, unidentified
MNHIKSNKLDFTGQPLYIGLDVHKKSWSVSIFSRYGEYKTFSQPPEVEKLIFYLGRHFPGAQYYAVYEAGYCGFWIHDQLREKGIQCIVVNPADVPTKNKEQRSKRDRIDCRKLARSLRNGEIEGIYVPSRSKLEDRSLIRTRQSMVRKQTRCKNQIKGMLFFYGLRLSEEATWGHWSRRFIQWIERIRMERASGDIALKAHLEELNHLRQLIASLNRAILRLARTEAYRPLAYWLKTIPGISTLTAMILLTELGEITRFPSMDELSCYVGLIPDIQASGEKEYVGGVTQRRHSQLRWLLVEASWIAVRKDPALLMAFQGYCKRMRKTQAIVKIARKLLNRIRYVLKNQAEYVPCVIQ

SEQ ID NO: 137818 - protein, 420 aa, unidentified
MNPLPGSSFTAFIGMDWADTKHDVCLQAANSELREFDCFPHQADRIEQWAHALQRRFGGTIAIALELAKGPIVYALQKYDFLVLFPINPTTLAKYREAFKPSRAKDDPTDAELALDLLLRHPERFQPLKPQSAGMRTLLTLVEQRRELIGDKTRFTNRLGDTLKQYYPQALEWFEQRDTILFCDFICRWPTLAQAKRAHTSTLESFFKTHNVRFKKVINARIASIKEATPLTLDIAVISPHRLQALVLIEQLRVTLQAIDRYEDEIAALAPTLPDYVLFSTLPGAGPSLAPRLLAAFGEQRERFTSADQLQRYSGVAPVTERSGKKSWVHWRWQCPTFVRQTFVEWAGQTINKSFWAGAYYRQQRDKGSSYQAAVRALAFKWIRILFRCWQTRTPYDESKYLNALRLRRSSLLKTIGSTA

SEQ ID NO: 137819 - protein, 403 aa, unidentified
MESTAGVDWASEEHAVCVVDRAERRMIERRFAHDRKGLRALCRTLSGEKVARVALERPDGLLVEQLLDAGLTVVAIHPNQVAATRERYRAAGGKSDGFDAFVLAELARTDMHRFRVLRPDGDETKALRALSRTREDLVGARVALANQLRAQLDAFWPGAAQIFANVDSPIALAFLERYPSPTDTRGLGAKRLAGFLARHGYSGRRSPSELLERLRSAPTGTAGELELEARRAAVLGLVASLRPLVAQITLLTSQIAGAVRAHADGAIFLSLFLDPKSVVTAASLLAEIGDRRERYPTSEMLAADAGMSPVAVESGKRKVACFRYACDKRLRDAVATLADATRHHHPWARGVYQAARARGHDHPHAIRILGRAWLRILWRIWQDQVPYDPAQHGNLQRLQTTKG

SEQ ID NO: 137820 - protein, 321 aa, unidentified
MQTPSIAMDIGADVGKDEIVIACAEGAFSRRKVRNRRTELSALLKSLPAGSRIGMESTGSYHELLAETGHKLGLVIFVLNPKDVRHYAKGVGLRGKTDRVDAELIARMVAREHEKLHPWIPSTSEQRQIDRLLKRRAKVSRIRVALNQSLKGLSGFGADLKMVNERLDRLIKRIDAKVKALIEANKDRKQQYARLRKIAGLGGVVVRSSVLNTLERVPLHSADAFIAFTGLDPRPEDSGHHVGRRRLSKRGPSELRRLLYIAAMAAVKTTLWKPIYEHYRAKGLSTIAALVVIARRIARTAWSVYTHKTDFDPKRVALALT

SEQ ID NO: 137821 - protein, 315 aa, unidentified
MQGWVMAADSWRYNMFIGIDVSKNKVDVGSACGKLELQGVNPLQAAEALEQYPVQLVVVEATGGYERPVVEALQAKDIPVAIVNPRQARDFAKALGKLAKTDRIDALVLAQFAEKCRPRASVPVSIQMKRLQDLVARRRQLQQALTAEKNRRHQAIDAGVLASVQEVIKALDKSLKEVTSAITLLLRRYTRWRNKQLLLQSIKGIGPVTAATLIAELPELGRVGRKQIASLAGLAPRDRQSGQWRGKSFCSGGRKSVRTALYMATLTAVRHYAPLKAFYQKLVKAGKPPKVALTAAMRRLLVILNAMARDARKPA

SEQ ID NO: 137822 - protein, 341 aa, unidentified
MAEVSTIGLDIAKHVFQAHGADASGRVVFRKKITRAKLIEFLASQPRCVVALEACGGAHYWGREIRKLGHTVRLIPPAYVKPFVKRQKNDTADAEAICEAAQRPSMRFVAVKDEEQQANSVVFRARDVLVRQRTQCINALRGHLTEYGWVVPKGTAHVATLIGQIEDPNCSLPESARSIFKVLITTLASLDENIAVLDAEISRRSKEDPVARRLMTIPGVGPITATAIVALAPPIETFAAGRDFAAWLGLTPLQKSSGGKQRLGAISKMGERTMRRLLIIGASAVVSHACRRGAPEGSWLTRMLARKPRMLVTVALANKMARVVWALLAKGGVYRAPVAAA

SEQ ID NO: 137823 - protein, 392 aa, unidentified
MYIVGIDIGKNHHEASIVSPEGKQIGRSLRFATTHKGADSLMSFIFKNIGNSPCVFGMEATGHYWYPIYSFIKAKGYTIYVINPIQSDSLRKMYIRQTKNDSIDSFLIAEVIRFGQFGTTSLADENILAMRQLCRYRDSVISSRTEIKLRIGTIMEQIFPEYEKQFSSLWVSTSMGILEKYLTPENIENAPIDELFEIIKDKSHNKLTMKKAISIREAAADTFGIKIAQDAFSFQLKQLIDRMNFLDKQIEALDCQILEYYEKFDCYLHTIPGIGMIAAATILAEIGDINRFKSSSALVAFAGIDPTVRQSGEFSSTHNHMSKRGSPYLRHAIFLAATTCSFHNSPLNAYYKKKRDQGKHHLTATGAVARKLTTIIYAVLRDSKPYEPKKFC

SEQ ID NO: 137824 - protein, 366 aa, unidentified
MKKNITVATRGKQIFKGKKLTIGMDLGDRFTYYCVLDEAGEVMVEQNLPTTKQGMQQVFSRIPRSRVALETGVHSPWVSRQLTQLGHEVIVAHARNVRLIGESKRKDDRLDARMLARLARLDPDLLSPVQHRSAEAQAHLTVIRARAALVGARTALVNAARGLAKSYGERLRKCGTQQVGQDLAAGLSAELKAALQPLLAEVESLSQRIAEYDRRIEQIAKEVHPEVALLKQVKGVGTLIALTYVLTLDDPRRFRRSRDAGCFLGLRPGRRNSGNSEPQLHISKEGDRYLRTLLVQGAHYILGPFGQDSDLRRWGLKLAERGGKNAKKRAVVAVARKLAVLLHKLWVSGEVYEPLRNNHKVVSAVA

SEQ ID NO: 137825 - protein, 418 aa, unidentified
MIEDVQWFVGIDWATQSHRVGLLDIEGRHVSERDFAHGGAGMTELRDWLLEKTKVAPGQIAVAIETPHGPVVETLLDHAFQVFAINPKQLDRFRDRFTVAGAKDDSRDARVLGSALRTDRQAFRRLVVDDPLVIELREWSRMADELQQERTRLANRVRQQLWRYYPQAVELTDDVADDWFLALWQQVPTPVTAAEVPEEAITRILKDHRIRRLDATTVLQTLRKTPLFVAPGTTEAACAHIRAVAARLSLVNQQIKQTHRALDGLCAKLEAATESPSGQNREQHDVMILRSWPGIGRIVLATLLTEATEPLRRRDYHALRALAGTAPVTRRSGKQCFVIRRLACNKRLQNAVHHWSRVAIQHDTAARRRYDALRRRGHGHARALRTVGDRLLYALCTTLERQMPYNPNCQTAQVTVGL

SEQ ID NO: 137826 - protein, 371 aa, unidentified
MSRRRGPGPSSVLLTPDHAGNVVGVDPHKRSLSATVVDPRGGLLAGEHFRVSGDGHRALEAWARQFGRWGRHTAVFLARRGYDVRDVCANRTPRSDRARQRGKSDALDSERIARETLAHPLLPIAFKRAGQDRGPDECHELLALWHNQRRSILASRQHLVNEAENMLCELPLELREQLPDSKAVRPRLAALADRNRRRRYDRPTALRLRLLDEYRARIATLDADEKAVCRELSALVRASGSTLDQLCGLSTRSVAEVLIEVGDPRRFTEGGFARFNASAPLAASTAEGPGEPVRHRYNPGGNRRINRILHLMAITQLRCEPRAQAIYAQARARGHTKKEARRILKRHLSDVIYRRMIRDLAAHPAQPLLAA

SEQ ID NO: 137827 - protein, 343 aa, unidentified
MQKIITVGLDLAKSIFQVHGIADDGSIVVRRALRRSQVLDFFRSIDPCRVGIEACASSHYWANAIGQLGHTVRLMPPAYVKAYVKRNKTDAADAEAICEAVSRPTMRFVPIKTPDEQAACMVLRTRELFVRQRGQTANAMRAHMAELGIIAATGMTSIAKLILILRDLEDTRLPIAARAALLEMAEQIETLTARIEKLDTRIVATVKADETARRLTSIPGVGPIIAATVRATIQDPAAFRTGRDLAAWIGITPRANSSGGKERLGRISKQGNKQLRTLLIVGATSILKQARRGVKLPSWIIALMARRPYKVVAVALANKIARTIWALLVKGGTYRAPAIMARA

SEQ ID NO: 137828 - protein, 353 aa, unidentified
MKEHNSNERVVKVVGIDLAKRSFHVYGVDERGQRVISKTFTRTRLSEFMANLPACTVAMEACGSAHHWARQFRGHGHEVRLIAPQFVKPFVKSNKNDAIDAEAICEAAQRPNMRFVAVKSVEQQDIQATHRMRSLVVERRTAQVNQIRGLLLEYGIEIPQGRAAVGQHLPEILDDLNNGLSERFRAELRELAEELRHLDERVTHYDRQIETLAESHPQAQALMTIPGLGAKGATALIAAVGEDPRLFKNGRGLAAWLGLVPRQHSTGGRDRLLGISKRGDVYLRQLLIHGARAVLRWVERKDDATSRWATALKARRHPNVAAVALANKIARIAYTVLTTGQPYDPAKGAFVKV

SEQ ID NO: 137829 - protein, 310 aa, unidentified
MSEEVFVGIDVSATTLELARHGSQETATFANDEAGISELAAKVRAWQACLVVLEATGGWEMAVVSELASAGLAVAIVNPRQMRNFAKAAGKLAKTDRIDALLIAHFAQAMRPKVRPLPDEQAQALAEVVTRRRQLVNMLTMERNRRHGASKTMRARLQGHIEWLQSELEGADDELGKMVRETPMWHDKDELLQSVPGVGPVLSLTLLTELPELATLNRKQISTLVGVAPLNCDSGKSHGKRRTWGGRAAVRAVLYMATTVAVRCNPVLRAFYERLTAAGKLFKIAITACMHKLLIILNAMVRDNRHWQAA

SEQ ID NO: 137830 - protein, 458 aa, unidentified
MYRELQPLRQALSRELSASLPPTTAGIDTEQLLQSYLDRLTVYLGCDVADQTFTLYAQTADGEEVAHRTDIPNRTVGFQQAWKWIEDLRQLRHFRIVLLAMETTGVYYWAWWDFLTGRPNLARVLYNARTTEHMTEVLSKKVRNDLVDAYALAEQVRLGATPETLLTEDPDLQTARYCSRFARDLAQQVNRKKNQLRAMLRAYNPILEQVFPKRQLHHPAVYALLDRYLFPPEFVQAGTEALTQILVEKCRSAFGEKQAQQLVELCAQQLARPIGQAVIHQRVRQLCEDIQTLQRQQKAFLKTGYTLIQDRPQTKLLYRSIGAGMSNTLALVSEVGDVSRFSDGEHLASFLGITTSKHISGTTIFHSKHITKQGSPNGRYAIVNLAQHLCRKVPKYQAMYQRIKARKPPKIGYLIAVVAVARDFTTNILYDMWRNQRPFFLEVADYRKYRQDHSQSPA

SEQ ID NO: 137831 - protein, 322 aa, unidentified
MATVSFCGIDVAKDRLDVVVLPEQRCWSVCNDAAGWAELAKQLGSFSIAAIGLEASGGYERGVMRVLLAADMPVHQINPFKLRQFAKASGVLAKSDRLDARVIASFIAIMPTRRAQRPSPAIERLTEILSVRRQLTDQKIAAQNASAMLQDAMLLRLSCRRIGRLAADIEMLDRSLVEIVRTDAALAHRYRLLTSMPGVGPVLACTLIALLPELGSMSRKQVAALVGVAPYTFESGKLKGKRCIWGGRAPVRHVLYLAAMSASNWNPVLKAFHSRLKIAGKLHKVAIVAVMRKMITMLNAMVRDDVAWAGHLGGRQILPTAR

SEQ ID NO: 137832 - protein, 325 aa, unidentified
MQNQTIVGIDVSSATLDICVSNDQGQHSFIINNEVKAICKFFKTYKESIIIGMENTGRYNWALYEVLKDMHHCVYVISPLHLKRSMGLIRGKNDKIDAVRIAAFIKKNHTELPQWQPSSPVIQKLKILLTERNSRIKSRRQLLKQQYDYAKMKQLGLDKSLQKLNGQQLALIDKQLALLEHQIGLLIKADEQIKRHAELIRSVPGAGKVLCWMMLAKTEGFTTITEPRKMACYSGVVPFSNQSGTSVRGKNRVSSYADKAIKAVLHLAAMSAIRLEYDLRKYYLRKVAEGKNKMSVLNAVRNKIVHRIFAVIKYQIPYQTNLLLS

SEQ ID NO: 137833 - protein, 421 aa, unidentified
MDSNESAQKYDLIIGIDRSDKEIEVVTVDAHGHRSGHSVATEPVQLHDWWKRLCAQYPGAHKAVAFEQPARNLIAFFEYEPDVTIYALNPSSIWAYRQSLTPSRAHTDKTDADCIARFIEHHHGDLKAYVSPDPKARQIQSYCTSRRKLVDQRTGLTNRLQSVLKHYFPEAILLMHENIHRGMNLELLRKWPTAQSIKRARIATVEKFFHAHGSRSAARLEARLAIIGRMQPLTENPAIIEPCVMEMLCVVDQVDMLNGCILRYTQKIRKLMQSDPRAALFEQLPGAGPALAPRLFAAFSIYADNCKDAAAMASLVGMAPVTEQSGKVRRVYRRLRCDRFLAQSFHEWAAESWKHSKWAKAYVRHHQEAGMHFHTIVRKLATRWIRILFRLWKTGGMYDEQRYIQTLLSKGHYLKNALLQP

SEQ ID NO: 137834 - protein, 313 aa, unidentified
MNQPKSIVFIGVDVSKERLDVAVRPSGEHNSFTNDEAGIAQMTDCLGRLSPEMILFEATGGWQMNAVNALAARRLPVVIINPRQVRDFAKATGQLAKTDTIDAGILAHFAEAVRPEIRELKPLEARKLEALNTRRRQIVEMLTAERNRLITAPEWTRPDIEEHIAILKKRLAAINKDIDKLIRQSPLWREKDKILKSFPGVGPVTASTMLSDLPEIGTLNPKAIAALVGVAPLNCDSGNYQGRRKIWGGRACVRSLLYMCAKTAVRCNPVIRGFYERLIGAGKLRKVALTACMHKILIILNAMIRDQVCWRAA

SEQ ID NO: 137835 - protein, 342 aa, unidentified
MYYIGLDVHKKTISYCVKDASGQVHQEGQIGATRWELDGWMKTLPQPWTVAMEATIFTGWIYDHLLPHAQQVKVAHPLMLRAIAAAKKKNDRIDAGKIADCLRCDFLPECHMASTAIRDRRRTLRYRHLLVRQMVQMKNRISDLLMETGVSHNKRRLHKVGYFRELLSSNAEVNESIRPLLRVSRDSIVRLQKTEYALVSSLQRDPLLAERIKRLRTVPGVGPITALTWALEMGEVSRFPSIREAISYCGLCGDEKSSADKVMRTPLSKQRNKHIQRVLVEAAKLAPRQNHDLALVYEREKQKGNANRATLAVARKMVAYLLAVDRGQRDFVPFADPRSVAA

SEQ ID NO: 137836 - protein, 376 aa, unidentified
MSNSIKYVGLDVSKSKIAVAVAEEGRQEARYWGTIVHTKEAVARLMQQLRTTEEITLNVCYEAGPTGYVLYRWLLEMDIHCTVVAPSLIPKRAGDRVKTDKRDALRLAQLFRAGELTPVYVPTPEDEALRDLVRAREDAKEDLNRHKQRLGKFLLRHQLTNAKGAKPGTFAYEEWLDTLRFSNECHRLTFEEYRQSIWETKERIKRYEQEIEKQAEISTQAPLIQAFQALRGVALITAATLSSEIANIARFSRPTSFMSYCGLVASEFSTGDSRRQGGITKAGNAHLRRVLVEAAWSYRHSPAIRRKLRDRIAGLPSEIQAIAWAAQHRLHKKYKSLMGKGKHKGCVTVAIARELAGFVWAIAKETERLQLQKAAG

SEQ ID NO: 137837 - protein, 300 aa, unidentified
MWIIGCDYHPSVQQIAWVDTETGEMEERRLKHSDGEAERFYRELKAKGFSVRVGMEATGHARWFERLLRELGFELWVGNPARIRAKQVKKQKNDRQDAQHLLKLLLKDDFPRIWVPTPENRDRRQLLLHRHRLVQMRTRVMNQLQAVAMNEGIRRKRGLWTRQGRAELESLWLPTWTSRRRQELLELVDQLDPSIDQLSQAIEQEAEQQPEVQRLMTHPGVGPITALAFVLVLGTPQRFSCGKQVASYLGLVPSEDSSGNRRRLGHITKQGNTLLRHLLGQAAQSVANSDEEWRAVGHEA

SEQ ID NO: 137838 - protein, 452 aa, unidentified
MEEKEISMEVVNPHAAGVDVGSRSHWVAVGQREQDVKEFGVFNQDLFEMADWLKESQVRTIAMESTGIYWQNLYAVLISKGFHVILCNGKFTKNIKGKKTDIKDCQWIQKLHSLGLLSSSFLPDGKTEQLRTYCRQRANLLHLAAATSKKMQKNLSLLNLRLDVVVNDVCGLTGLNIIRAICDGETSPEKLASLRHGNCRKSEAEIAKALQSNGRKDYLFALRQELDTYDHLQKKVSECDKMIEEMLNEIIDNDENKKQHFIEPKTYKRINKNTPKDIDLNLKSYQMFEGTDLLAIEGMSYSTVLSIMSEIGIEGIRKFPTAKHFTSWLRLAPNNKISGGKVLSSKVPKGSNRLKIALRNAANAIGNLKESTPLRDFFQRINFRKGRVSAISATARKLAVIIWNMVVKGVPYINPEGYLFLDQKRKLGIVKRIQKQIAKFELTADDLQIIKT

SEQ ID NO: 137839 - protein, 385 aa, unidentified
MEVVGGKAAERSEAGFPPTAGDRSIVPGPLEAVTKRDRRQSRGTSPNSRQSRRSTSSSYLQDGDLSMDGSIALFAGIDVSKRSLDLCLLPDDRRQSFAYDEQGLAQLSEALPAPGTCRIAVEATGGYQRQVVAELVNAGHQVAVVNPRQVRDFARGLGILAKTDRIDAYVLARYSQQAEPRTVAQISEKAVELEQLVVRRRQLIQLHTAETNRKHASPSKAVRSSTQQVIAMLGKQIKQVETAIFALVESDDDWKDKMDRLGSVPGVGAVTAASLLAELPELGQVNRQEIAALVGVAPFNRDSGRFRGKRSIWGGRASVRSVLYMAALTARTHNPILRAFAKRLEAAGKPFKVVITACMRKLLTILNTILKDGTSWQLEKSLVNA

SEQ ID NO: 137840 - protein, 341 aa, unidentified
MDISVLGIDLGKNSCSVVGLDAIGKVVVRRRMRRETVITYAATLPACVVAMEACCGAHHVGRALARQGHAVRLMSPEYVRPYVKAQKNDDRDAEAIAEAATRPTMRFVELKTEEQLDMQTLHRIRDQLVGDRTSLMNQIRSLLLERGYIVPQGRAKLALRLGEMLDGDEPVLGSRIHRLMSDMRLRWRALDERIADLDAEFTDAARADERTRRLLTIPGIGALNATALVAAVGDARTFGRGRDLAAWLGLVPRQATTGGKPRLLGITKRGSRYLRKNLIQGARASLPVMSKSDTRLGAWLRGLLSRSHHNTVVVALAAKMARIVWALLRHQRTYDPVAQAA

SEQ ID NO: 137841 - protein, 319 aa, unidentified
MNTTSAAHINRSERNVGIDIGKSMLDMCIFEVDIYTQYPNTSEGVRQLLKQLSRYKVTRIVVEATGGYERALVEACADKELPLIIIQPMQVRQFAKAQGIIAKTDKLDSRLIAQFGAVMKPEPKPLNSKKIRYIRDLLSRKRQLNDMRTQELNRQHKVPAILAATHKRMIKVLDKEIEWVNKLLAKAVSEVTEWQRTYEIVSSAPGIGDGVAFTLLGELPELGNLSARKIAALCGLAPFNRDSGAMKGRRRIQGGRAPIRTVLYMAMLSAIQCNPIIKRFYQKLVAQGKHKKVALTACMRKMMTMLNAMVRDNCEWQAN

SEQ ID NO: 137842 - protein, 413 aa, unidentified
MKEVYRRCCGMDVHKDTVVVCVLPPVGGEGKAIRKTYSTFRNDLIRMRVWLKQLKVREIAMESTGVYWRPLWNVLEEEGFRLLLVNPAQVKALAGRKSDGRDAQRIAEFLQDRRLDASFVPPAEIRQLRMMLRHRIALLEQRNEVHNQIRDLFETAGLKLSSVVSDLLGVSGRRILEALIAGEQSPEILCWKVRGRLRAKEKLVKESLKGYFTEFHRSMLESHYKHYRFLTSEIGIFEERIARAMKPYDSQIDLLVSIPGVDRIVAWHLIAELGMDPTTFPDADHCASWAGLVPGQNESAGKQKSTRCRKGNRTLRRVLTQAAWAASHCKAGYMPAFFRRVKSRRGWAKAIVATAHKILTIAFNVLRTGTPYHDLGQDYFDRLNPARATKKLVARLEALGHHVQLSPLARSNA

SEQ ID NO: 137843 - protein, 467 aa, unidentified
MENKIFVGIDVSKGYADFCILNSNKQQVEDNFQLDDQKEGHEKLKEKLLDLATSNSVVIVGLENTGGYERNWFNTVKQFSIKHSLIKVYKLNPKAIKHQIQSLMKRVVDDSISAYGIALYVINHYQVHEEDWIKTNDKTTKLTSEQLLHSMIMGLIKQRTAKLNQLEKLIYSAFPELLKFTKNSFPVWVLRLLEKYPTSHRIKMAKINGLTTIKSITSTKAEKLKTLANNSVACLQDELIEAIIGQQSKDILYLNDEIDKLKELLVKTYSETPEVKIINSIKGIGDWTAVSFLIELGDYQRFNSTDQLASFFGVNPSFKQSGDGKYKVRMSKQGCARMRAVLYLIAHNLVIHNTYFRALYAKYRAKGKKHSVVMGILMHKVLRVLWGMLKSGKEFSEDIDIKNQDNNKEINDKPIELINSKSRRYQVLNLDAPVSRTNYKKRKATLEPQSSTMDENNEIMENSQVQT

SEQ ID NO: 137844 - protein, 555 aa, unidentified
MKKSTALHRITAEMAVNAGTFFISALLPMKGGKMASFDNNTMRGFRKEGKYTSSELSSSTLDDGTKVVTAPITNIKRRICGGIDVHKSVLMACACVTDKETLSAVFYVRQFTSSNSEIRRMAEWFAEYGVKDVCMESTGKYWIPVYDILEQNGMKPVLTHPKYVKQAKGRKTDFRDAIHIANLFRMDLVVASFIPPADIRDLRELCRYRLKLTYIRTSEKNRFQNSMTISKIRLDSVFTDPFGKSASRIMEYLINTPEDKIQDEKILSLVDRRVKASSEEILDSIHGYEFIGVQRDKLEIISKHIDDVNKCIDLIDKKLDYYRFKYASIINHLCTIPGVSTESALYILGEIGADMSVWNDSKSLASWAGLSPANNESAGKKKSTKIGKGGHYLKPLLVQCALASIKSTKKQPYFFRKYQTLKKRRGHKKAVIAIARKMLVSIYHMIKEDKDFLPIDYEQVMEQKQNDRELNLKNVILFLGERGVDDKVIRMIESQCSKEELSEGKAAETKPKKTAKEKQPESNTTAKPVKKRGSRKSSTRTKKETPSVQSSAATA

SEQ ID NO: 137845 - protein, 384 aa, unidentified
MDTAATRTRKYSVEGPVLYLAFELGNREWKLGFSIGFGQRPRVRTIPARALEGLQREIELAKKRLGLPETARVVSCYEAGRDGFWLHRYLEEAGIENLVVDSSSIEVNRRFRRAKTDRMDVAKLVDQLMRYDRGEKKVWHIVRVPGVEAEDQRQLHRELADLKAERTQHINRIKGLLAGQGVRLGKIGAGFLKELAAIRLWDGRSIPEGLRARLEREYERLQFIQGQLHELEAERVEAIRRSESPEVDKVRQLLRLKGIGLNSAWVNTMEFFAWRDFHNGKEVGGLAGLVPTPYQSGASSRERGMSKAGNRHVRALAIEIAWGWLRYQPESELSHWYQRRFGDGSSRVRRIGIVALARKLLIALWRYLETGLIPQGAVLKTRLI

SEQ ID NO: 137846 - protein, 343 aa, unidentified
MKIHALGIDLGKTVFHLVGLDSSGQVVVRKRCSRTKLLAFTGNLQVQLIGMEACSGAHFLGKALRAQGHDVRLMPAQYVKPYVKTNKSDYIDAEAIAEAVQRPRMRFVPIKTAEQLDLQALHRVRERWVMRRTAVVNQIRSLLLERGWTLPKGRSHLGQMLAKILEDAELKLSGAFRALLAQLKLELEQLAARIEQMDMVIQQEARENESCQRLTTIPGVGPVTATALIAAVGNGSAFGKGRDLSAWMGIVPGEYSTGGKQKLLGISKRGNQYLRRLFVQGARSLLQHRDKQAPGLSCWWAQLLARTHQNVVVVALANKLVRIAWAVLCKNEKYRAPVLAATT

SEQ ID NO: 137847 - protein, 360 aa, unidentified
MGEITRVGVDLAKRVIQVHAVDATGRVIVAKQLQRDGFTAWCAQLPPGCLVAMEACSGSHHWGRRLRAMGMEVKLIAPHFVSPYRLSGKTGKNDAADAAAICEAASRPSMRFVPVKSVEQQSMMALHRLREGYKEERTACINRIRGLLAEFGLVFAQRPEVLRAALAEVIEDASNELGAIARMALQRAHLHWIELECHIAWCDERIVRHARSDGQAKAAAELCGIGPVTASALVATVDDFKQFKNGRQFSAWMGLVPRQSSSGGKSVLGEITKRGDEYLRTLLIQGAKSAVFTAHRRSDRLSRWIVQLRERVGWQKAAVALANKHARILWSILVNGQSFDPEHVPSKHLMRPPAALPAAG

SEQ ID NO: 137848 - protein, 386 aa, unidentified
MDHQISPSSSAAHDHDATCHVAIELSRSSWVVGVHSPLIDKVGLHKLVAGDHKVLVALLSRLQDRAERRLGRAVRMVSCYEAGYDGFWLHRVLAGHGIDNRVIDPASLQVDRRARRAKSDRIDATAMVRALMAYERGEHQVFSPVRVPEVEEEDAKRGHRERQRLIHERVAHTNRIKGLLALHGIYDFKPLKAGSLQRLDGLRTGDGRPLSAGLKAELGRQLRRLNLVKGMIAEVEAKRDAVVAGPSPTTAEGQKIRNLACLKGIGPEISSRLTHEVFYRDFANRRQIGSYAGLNPSPFNSGKMAREQGISKAGNRIIRTTMIELAWLWLRYQPDSALSLWFKKRVNGAKGRLKRIMIVALARKLLIALWRYTETGLVPDGAVFKA

SEQ ID NO: 137849 - protein, 340 aa, unidentified
MPGPRARIRKAGCSGVLNPSRKEHVNSTREIFVGIDVSKARLDIHVLPSGDTWDTENQTDAIATLVLRLRSLHPSLIVLEATGGLERRVLAALLTANLPAVAMNPRQVRDFAKGMGYLAKTDAIDARVLALFAEKARPEVRPLPDAQTQELEALMVRRRQVVDMLTAEKNRLSSAPPSKRVIRAIRKTISCLEDQLEDLDKDIDNAIRESPAWREKDEVLQSVPGVGRVLSRTLLGHVPELGTISKKKMGILIGVAPLNCDSGKYRGQRHCWGGRTEVRNVLYMATLSAIRRNPVIKAFYDRISSGKLRKVAIVACMHKLLTILNAMVRSNSRWSPAFSP

SEQ ID NO: 137850 - protein, 344 aa, unidentified
MVTSYIGADVDCKMTELAVERRRKVVMRERLPTNIKSLRQFLATVSGSKVMVIEEGPMSGWLFRNLRSEVDRFVVCDPRRNKAIYDDGDKTDPIDAADLAGLCRSGHLREVYHTTDEDRLALKEAVALYHDRVRDAVRQINKLRASCREHGIRIPSKVLKNPKDRSEWLRELGFPALAGRLAILWIGFHAVARQVRMAKRELARRAKKFPMIGYWQELPGIGLIRAATLYAYLDTPWRLGTPKKLWKYCGIGLKRTASGTDKKGRPKAGYVHLFRKVNRKLKAAIQGAALSAIGQGDNPFADYYYRMVQHGMTPSNARHAVARKLLTVMWGMWKTSSRYESRLV

SEQ ID NO: 137851 - protein, 388 aa, unidentified
MPTMTHPDRVEQAPVELICSTVTGGVDTHKDTHTAAALDQTGRLLGHRQFPTTSAGYAALLGWLRSFGLLIVVGMEGTGVYGAGLAQFLQGAGVKLVEVDRPDRKARRWQGKSDPVDAEAAARAAQAGRATGTPKTRGGQVDALRALRTARRSAVAARADAQRRVKALIVTAPDTLRTTLRGLGDRELIAHCATRCPDRATAGDPVTATVLALRALARRHQHLTVEITELDTLIGPLVTAINPALLELPGVGVDVAGQLLVTAGDNPARLRSEAAFAMLCGAAPLPASSGRTVRHRLNRGGDRQANAALYRIVLCRLRWDPRTRAYAARRTAQGMSKPEIIRCLKRYIAREVYTALLNPDPSSVLASPCAVPEESTCSARSASEDERR

SEQ ID NO: 137852 - protein, 478 aa, unidentified
MLLRARVSVSCTDLGLGGRRALSHRRGVPLQEVARRMKVLHERVAGIDVHKDMIKVAIRSPGEKPWTRKTEILEYRTFYGVLQQMAADLRKRGVTHVVMEASGVYTEPVYYALAEQDFAEVAVINPAHAKALRGHKTDAKDCARLAELFECGLLRGSYIPAPELKEVRDLTRYRMKTVQARTSEIQRLAKALESAGIKLGSVVSSITGASATAMIEALIDGERRGGVLADLARGRMREAGKLADLSMALTGRFTGHHALLCRLHQDRVAGFDAAVAGLDERIAGKVTRWQREADLLTSVPGFGDVVAQAWLGEIGPAPHRHFATCEKLASWVTLCPGNNISARKRKHGRTGDAGTYIKPMLVQAAWSAIRVRGRLQARYNRLVRRFGGDKNPAAKKKAITAIAHTLLKIAYQVLKSGTPYQDLGADFYTRRESPEHKHAWLERQLQRLHPGCTVTITISPPEAALTPSYVGVSLQFRV

SEQ ID NO: 137853 - protein, 313 aa, unidentified
MKNLLEICCGLDVHKENIVACLLKGSVNDDKPQKTIRTFSTLLQGLEELKAWLESENCRHVAMESTGIYWQPVYNILESAFNGNMVIIVANARHMKNVPGKKTDMKDAEWIATLLRAGLLNGSFIPSQPVRELRDLTRYRKSIVEEISSQKNRIEKHLQSCGFKLSNFLTDIFGISGRAIIEHIARYGSIAAEEVEYYVKTRARNKLQEIKLSVNGRMNKHQRDFLKLLLKHLDETYEHLREIEENINSELEKFKRQIEQLDGIPGIDKTAAAAIIAEIGIDMSKFKTAEHICSWAGLSPGNNESAGKKSPLE

SEQ ID NO: 137854 - protein, 403 aa, unidentified
MERIIVGVDVGCRKHRVAVGTPDGRIAEEFNILHEKDGFDRFFQRLDFYRSSFGLPVVVAMEGCNGYASPLDQQVQEYGYTLLNVNNLKLCRFKEIFPSPAKTDAIDARKIVELARLQPLLPQAKKVLQEIHEVPEAHRILKRLTRRRRELVEAKKRIMNRMQKDLQAVSPGLNDLVERKDGSVFLRFLTCRPDLRQLARMRRQGLLKIRGLGEKFADKVQFWQQKAWFSQEVDYVGPMIIEDAQEILHLKERIKALEEQIEQITSQSRLSQVIGSIPGFGLTCTAELTAEIGTIDRFENERSLAFYLGVAPLDKSSGATVGVRPSKHVNTRAKAALVTAVAHHARQVEESARYYHKKRGEGKRHNQAVRSLARHMVRVLWAMIKRDCFYEVRNSEQMERQED

SEQ ID NO: 137855 - protein, 354 aa, unidentified
MIYVGIDYHKKYSQVEAMDKEGKTVARAKLANKEDVLRRWFSCLPESCEVVMEACWNWQLMYEILEGIDEVKRIYVANPYKVKAIAEARIKTDTIDASTLAHLLRSNLIPSVYIPSEDTRRRKDLLRQRMFLVRMGTRVKNRLHALIDRYRVAMPSLSDPFGRTGLSFLKNLRLSPPGDLLMRQDIELLEALNLLLREAEREVIHLFSGDERYEVARSLPGLGPILSGVVVAEIDRIDRFPTPGKLLSYAGLIPTTYASGGRVYHGHLIKTSNKWLRWAMVEASWTAQRCSPYCQAYYRRHLHKGHNTAICILARRLLEILWVCLKKRRYYEERVNRFFYSPLPSQKYSHQGCC

SEQ ID NO: 137856 - protein, 364 aa, unidentified
MKGQKKAETRYVGIDLGKRTYEVAIVRKSGVTKSNGKTFVAGRQALYKKLRATDKVALEAGNMAFIIAKELEAAVGCRVYVLNPGSLALIYGSMKKTDKEDSLKLAHILEDFQEARLPLVPVPSEKEMNRRKLLAGYRRAQQSRGREINKLHALFLAQGITTKVRAELAGSEQRKEAIKELSGLEREEAEYLVASLSLHEQRITTLKGQIEKDSEGDAVIERLQSVPGVGPMVAFAFVAHVGAERFENSSQVSNYLGLVPRVYISGQTVRYGRITKRGNGYLRALLTQAAWALIRTKNGGNLKDRYEYMTIEKSIAKKKAIVAIARRIAELLYTLMRDESWYRSRPFILEKKKIEELAQLAMSA

SEQ ID NO: 137857 - protein, 438 aa, unidentified
MSNKVIFNLDELFISVGIDVGADFSWMSIALPNQQFVGKPYKILHNSIDSLTTAVSKIKEAEELYSLESRIFLESTGIYHYPLFCYLRDKGFNCSVINPIITKNSTNINIRKVHNDRFDSKKAALVGLKPDLKVSLMPSDLALNCRNLCREYYDLMDNRSAYVNKLQGELRIAFPQYLGIFSKVTINTSLTLLETYTSPSAFLKADKQEIIDIIKSTARFGLTYAQNKYNAIIQAATDANQFGYIIDSNIKRIRLYISFIRKYDEEINSILESLHELVDANEDSDFVKQIHLIETFKGAGFLSAVSIMGEIGDFSAFSKPKQLFAYFGLDPAVKQSGKFEGTKVQMSKRGSAIARRVIHTLTLQSISISRNIEAKNPVLREYYLKKCDSKPKLVAMGAVSHKVCNMIFAILRDNKPFKIIAPQEHIKQYNSAKCDIAA

SEQ ID NO: 137858 - protein, 307 aa, unidentified
MDHFAGLDVSVKETSVCIVDDTGRIVKEVKAASEPQALLKVLGNPAYRFKRIGLEAGPLSQWLFSGLAEAGLPVVCVETRHMQAVLKAQINKTDRNDARGIAQMMRAGLYRPVHVKTLRSQKLRMLLTHRKLLQSKAIAIENDLRGTLRNFGLKVGMVGQVRFEARIKELVESLPDLAELVEPLLIVRRTLREQIVILHRRLLAIVRDDEVCQRLMTTPGVGPVVALTYRATVDVPARFRKSKAVGAVFGLTCARYQSGEIDWSGRISRCGDEMMRVMLYEAAQSMMRSKNGHGSRPGPCRSPGAAG

SEQ ID NO: 137859 - protein, 352 aa, unidentified
MSVLDLQNAQSGSPDGARPTFCAGVDVSKLTFDASVSPVGAVPEFLSRLPVSSFQMTQAGAEDFKKWLSSCLSGASPTTIVIEATGVYSKRFAELIRPLAIAPVSTVNPRYPQDFRRSLGVKDKTDAVDARILAVYGAMRTPKPDREVSAKEAHLKELHRLCDDMAQDIAAWRNRLEQASAASVRSIIEVTIRSLEKHLEKAQLKLKKLVASDERLSRDLNLICSVPGIGEKTATMLLAELWDLRLWKRSNIVSYCGLFPRCHSSGTSVSKRPRLAKGGGARIRRGLYMCALSATRTKSKLAEFRRHLLQNGKSKMCAIGALMRKLLLTARAVVISGIPYSHHFPLNLTLSP

SEQ ID NO: 137860 - protein, 420 aa, unidentified
MEEVIEEPVELVERVAALDIGKATLVACVRVPHDTKPGRRRQEVRTFATTTRSLLAMADWLYGLGVTRVVMESTSTYWKPAFYVLEEACECWLVNAREAKHVPGRPKTDTQDAVWLAKLAERGMLRPSFVPPPWQRELRDLTRYRRTLTHERTREKQRVEKLLEDAQIKLSVVAADIFGRSGRDMMAALIAGERNPKALAQLAQGRMRSKLGVLAEALTGHFRAHHGYLLQMMLDRIDALGAQVDQLTGRIEELLAPFAHQVAQLDEIPGVGRIGAQELIAEIGVEMGRFPSAGHLVSWAKFAPMTKASAGKTKSSATGKGNPWIGATIGEAAMGASRTTTFLGARYRRLVKRRGTKRALVAVGNSLLTIAYHLLSDPQARFVDLGADFHDRLHPQRRTRQLIRELEHLSDKQVTLHDAA

SEQ ID NO: 137861 - protein, 336 aa, unidentified
MWHVGIDLHRTTVVLAAVNDVGEAMNPITIPCSDTAAIVEVVKALGVFRAVIEATGTYRWLYNLLRPYGAILLAHPMRLRAMIQRRSKTDKLDAQLLANLLRINQIPLAYIPPEPYQQLRDLTRSRARLGRHLAEVKIQLRGLLARQNRESPYRTPFGPRGLGWFRGQDFGPIEDMVRDELLERFQHYARQMTLFDKRLEGLWQAFPQVEALLDIRGIGLYSALLIVAELGEVERFRTAKQVGAYTGLTSRVHQSGGHCYQGSITRQGSPWLRWVLVQAAMKAVHSDDDLALANFYRRIRKRSGAKIARVAAARKLAEICWKRLRQWHRQRAGQAA

SEQ ID NO: 137862 - protein, 371 aa, unidentified
MQEISKVFVGLDISKLKISVALAEEGRQGEVRFLGDIDNTPDAMKRLVRKLSGKYLQLLFCYEAGPTGYGLHRQITALGHDCSVIAPSLIPKRSGEHVKTNRRDSLTLARLHRAGELTTIWVPDLGHEAIRDLVRAREAAMEDLREKRQQLQSFLLRHGRLYPGLRSWTLVHARWLSSLIFEHPAQYLVLREYRQAIEDAEARLKRLTQQVADVVSTWSMAPVVEAYQAMRGVAFLTAVTFVAEIGDVRRFETPRQLMAYLGLVPSERSTGEQVRRGSITKAGNPRARRVLIEGAWTYRYPARLSRPLQVRQESLPEVVRAIAWKAQVRLCARYRRLMAAGKRQTLITTAIAREMAAFLWAIGHEVQPCSA

SEQ ID NO: 137863 - protein, 417 aa, unidentified
MPQNQAPATPQPTRFDSITIGLDWANDKHDYCILDPKGKVLREGVIKHTHSAISELIGSCLDLLTPQGRIHLACESATNAIGRFLRDFSRVDLHIIHPGSFAHYRQSRRNSKAKDDTSDAFLLGDYLRRHIDELPVCVKGQESELEMTCRLRRSEADSRADHYNRLTDTLKMIFPGLTSILAVTSPSLLRFLQIWPTLQDFQAEPPAQIRAKLKGKRLHRKQIDKLIKFGEEARPFVNDKAAVNGFRSRVNASLSHIETYNQIISDLEKRIIELLLDSPVLFALFDSLPGAGKALVPRLVAAFSNLPEGITREDLAAMMGIAPVLISSGKSRQVRMRMSGRGFTCQTLFEFAALSCQQCDWAKEYYDKQKARKASHGTAVRSLALKWLRIIWAMIQSGQAYDEARYLAACQTKRKSA

SEQ ID NO: 137864 - protein, 352 aa, unidentified
MNIIAFDSHKRYTQVCVQDKNQRFLCEQRIDHQKGNIALFLEKWDGGSNVAVETIGNYYWIVDEIEAVGMIPKLVNAHKAKLMLGAVNKTDKLDARGLNKLQFTGTLPTVWIPPMEIRDMRELPRTRMVFANLRTKLKNRIHSVIDKYGLQNDFADTSDMFGTKGKAQMAETIKQLPSETAYTLKCLLRELDEVTEQIERIEKRMKKVFSETPEVKLLMTLPGVGFILAVVIAKEIGDISRFASPEKLAGYSGMTPRVHSSGGRTRFGQLRNDVNHYLKWAYSEAGNSTAVNHKRLPDRHTSRLYAKIRSRAGHAKAVGAVGRHLAEASFWVLTKKVEYKEPKSKSFSSTAV

SEQ ID NO: 137865 - protein, 416 aa, unidentified
MSRNVKNSAKFLNEKTLLVTADVGKFENYCYARTPKGEELEPFKFHNTGSGLIMVYGIIELFRKKHNLDRIVFGIESTGNYGEPLIHYMVNRGIQMVQVNPLHTKKVKEMRGNSPNKNDKKDPKVIADIIALHNGLTVVIPKGAAAELDRLVHLREILLEDKKRAYNQLESAIVPIFPEFLHIFKDLQIKTVEYLLKYYPLPESIIKLGLEDLIEKLHTVSRGRFGRKKAEQFYETALSSAGIKEGVESTLLMINNLYDKINLINNQLKVVEEKIETTLDDVPYSTYIMSIKGIGPIITAAIIGEVGDLRKYSYARQLQKLAGINLYEISSGIQRGQRHITKRGRHLLRKMLFYAAINVTKKGRILYDTYHMHLKKGMTKVQALTAISRKLIGIIYALVRDNSNYIERVEGNKIAA

SEQ ID NO: 137866 - protein, 407 aa, unidentified
MMIKLSGSKQLPNIFKGCGSMIYVGIDIAKQKHFAAAMTADGEVLIPPFGFTNDAEGFKLFLSKIKSFKKENTLIGLESTAHYAENLICHLFDLGYHISVINPIQTSTLRKTNIRKTKTDKVDCLLIIKSMIVNKPRLYSKSDIDSLRLKSLCRFREKIKKAKAKLKIQLVAYVDIIFPELQYFFKSGIHTNTCYQLLKKHSSPDDIAALHLTYLANLLQKASHGRFGKEEAIALKGLAKSSVGTDNTAVSIQITQSIAQIELLEQQLADLDGIIESIMLEMDSVILTIPGIGFLNGAMILGEIGNISRFSNPSKLLAYAGLDPTVNQSGKFNAKSTKMSKRGSKLLRYALINAAWNVSLNNKTFNDYFNLKRSQGNNHYAALGHVAHKLVRIIFKMLKDNVAFNLD

SEQ ID NO: 137867 - protein, 315 aa, unidentified
MIIGFDVSKNELVGTKINKRGDIQETYVIGNNQEEINNFLNKIIDQKLILGSEATAEYHNLLAKSCLKRSIPFYVLNPIVTKQFTKATVRKRKTDLSDAYVIAKCLLQGEGERVCLSSFEPVKPIIRTAASLAQIATAVNHMKKRFVEHFPEEILVQNELDKLNQMIEQTKIIIRDYGYQRTNPALQKLLCSLPGIGDNLASVIISEIGDIRRFKNAKTMVAYAGLDPKVRQSGLTLKRNTHLTKRGSPYLRRALYIAASIAQRCDQELKLYYEKKRSEGKRYKEATVANARHMLFRIYAVWKRQTPYIKLSTNP

SEQ ID NO: 137868 - protein, 357 aa, unidentified
MEKIGNVKDVPSVEEVILGVDTHLDIHVAVALDQLGRRLGEITVPTSTRGYARLLRWAEGFGTVGCVGIEGTSSYGVGLARYLQSAEIPVVEVERPKRRHLRRSGKSDSIDAEAAARAVLAGEAAGEPKNSDGQVGMIRTLRSARQSAVKARSQAANQLQALLVTAPEQLRHSLRKLPTKALLTTCARFRPIKEPDDVHTATKIALRSVARRHDALSEEIAEPDERLDRLVARTSPGLISLPAIGTHHAATLLCVAGDNPRRLASEASFASLCGVSPIEASSGKVVRHRLNRGGNRDANCALHMICVVRMGSDRRTQQYVARRTAEGKSKREIMRCLKRYTAREVYRVLVQPTAATS

SEQ ID NO: 137869 - protein, 337 aa, unidentified
MKHTVIAVDIAKHVFQVHAVDAQTGEIEREKLRREAVREFFARRTPSLVAMEACGSAHYWARELRGLGHEVRLLAPKSVRPFVRSNKTDAADAQAIWTAIQQPEARLVAIKSEAQQAILTLHRMRAQLLKFRVMQSNALRGFLCEFGQVLPEGHRAMAKAWPTALAALAEQLPAMLLDSLREQWRRVQLVDSEMAALERRLAGALRVNASCQQIAAIPGVGLLTATAAVAAMGDPATFKSGREFAAWVGLVPRQTGTGGRVRQLGLSKRGDTYLRTLLIHGARSILARGKPSPWLEALLRRRPYSVAVAALANKLARTIWAVLARGRPLDPAAFGVA

SEQ ID NO: 137870 - protein, 344 aa, unidentified
MIIIGCDFHPSWQMISWLDTETGETGERKLMHATGEARQFYEGLAGAVRVGLESTGNSHWFVDLLTELGHEVWIGDAARIRASQIRKQKTDRRDAEHILHLLVKDSFPRIWTPSREERDQRQLLIHRYKLVTLRARVKNELQHLALNQGMQKGRSLWSKNGQKQLLDLPLQFWAGTRRKNLLELLKQMDQQMVVLDQAVKKAAEENEKARLLMTQPGVGPITSLAYVLTLGDVTRFRRGKQVASYLGLIPREYSSAGKQHLGGISKQGNRFMRMLLVEAAQIAVRFDPGFRNEYLHRCHHKPKGVAKVAAARKLAVRLFWMLRTNTPYPEVVRIESSSRVPLAG

SEQ ID NO: 137871 - protein, 390 aa, unidentified
MDGQNLCPANRGESHSSNPAALYVSLELSSAKWLITLLAPGSEKMSRHIVSGGSGDALLDLLDRLKEKCERSIGSPIRIVAIMEAGRDGFWIHRLLEANQVESHVVEAASMAVSRRHRRAKTDAIDGETLLRTLLAWKRGEPRVCAMVRPPTPDEEDQRRISREREILVEERIGHTNRIKGLLASQGIRDFEPLRKGCRERLEELRTGDGRPLPFRLKAEIARELQRIELLMRQLDAVEAERDALVQPTATEMTSPRPACLLLRLRGIGHQAAAVLYLEALFRQFDNRRQVAAYAGLAPSPWKSGQCDRDQGVSKAGNPRVRKMMIELAWLWLRYQPGSAVSRWFQERVGAERGRVRRISIVAVARKLLVALWRYVTLGEIPEGAVLKTV

SEQ ID NO: 137872 - protein, 365 aa, unidentified
MPLYGGIDLHSNSNQSAILDENRKRIMKRKLANDPALILSFWEPYKADLVGIVVESTFNWYWLVDLLQENGYRVHLANPAAIQKYNGLKHADDNHDAFWLAELLLLGILPEGYIYPKEIRAVRDLLRKRQQLRQLRTCLILSLQNIVTRNGGPKLSAQDLKTLKEDRAQAYLQEFPELLLAGSANKACIDALTQQMARIEAGVEQKLKLQEPYTKLQTLPGVARILAGTILLETGPIHRFATVGDYASYCRKVDSQWTSNEKVKGHGNKKNGNRYLAWAFSEAAEKARIHHRASREFYQRKLRQKKSVSLAHNALAHKLARAAFYILRDHVPFQQEKMFGSPQGRWNQEPGADGEPILKLGKPGD

SEQ ID NO: 137873 - protein, 342 aa, unidentified
MEHFAGLDVSVKDTSVCIVDDTGRIVREVKVASEPEALLAVLENPAYHFKRIGLEAGPLSQWLFSALVEAGLPVICVETRHMRAVLKAQINKTDRNDARGMAQMMRVGLYRPVHVKTLRSQKLRMLLTHRKLLQSKAIAIDNDLRGTLRNFGLKVGMVGKVKFEARIRELVENLPDLAVLVEPMLIVRRVLREQIVILHRRLLAIVRDDEVCQRLMTTPGVGPVVSLTYRATVEVPARFRKSKSVGAVFGLTCAKYQSGEVDWDGRISRCGDEMMRTMLYEAAQAMMRSKKWSWLKAWAMQIARRRGMKKAIVALARRLAVIMHRIWVDGTEFRWTREAATA

SEQ ID NO: 137874 - protein, 331 aa, unidentified
MQISHFVGIDISKETLDAALYPSRDRKTDFLHFANSSKGLGEMMSWLKSRGVKSSELLICAEHTGIYTNTLIAFAHKKGIALSLNSPLDIKRSIGLARGKNDAVDAARIAEFAYTRRDKLRLYEKPSEGIIKLQYLLTERRQYVRQRTAIINLHSAMGQYETSAGRLRNESAINHTEKLIKKVEEQMQIVISEDPAIKRNFELVHSVKGIGLINAINTIVYTNNFKSFESPRKYACYIGVAPFDYTSGTSVRGKTQVSKICRTQQKAELSMAARSAIVHDPGLRRYYQRKMKEKGGDKSAHGIVINAIKFKLILRMFAVVRAGEPYRVLNY

SEQ ID NO: 137875 - protein, 374 aa, unidentified
MGRSIGVDLHRDCFTTATLAENGRCYLREWKLKDLDKFVETLAYDDKVAVEMTTNVRLFRDAVWPHVEKVEVVNTRQFKVVTESVKKTDRNDAVLLARFLDKDMLPTVHLKEKHVAEVASLTRSRDTLVKQRTTLKNQVNNAFAAVGVKLRRERMSSNKALSEVEVEATEAMDALTAVEVKVLLGQIRALNVGIGELEKMIEAEGSKLKGFAEITSIKGIGTISATILLSVIDDVKRFENEGKLAAYLGIVPRVSDSNETEHRGRITKRGSKLARTALVQCALIAKRYSPYLSRYHERLKRKKGGGKANIALARKLLGIVYRTLRNGWVFEDFPSFRLKDGTIPVWSREGARKYAASRRDLSHLTKTGKKKRAT

SEQ ID NO: 137876 - protein, 327 aa, unidentified
MVTVPKLGIDISKKTFDVALIRDSESMKAKQRQFSNTPAGFQDLQNWLAKHGVERVHAVMEATGAYGDALAEYLYAARHQVSIVNPAQIKAFGQSELQRNKTDRADGVLIARFAWRHNPEPWTPPEPEHRELQSLVRHLDDLIEQRTQVSNRLSEGRLTKTVRESWEKVLDSLNERIADVKMQINRHFDDHPGLKRQRELLDSIPGIGPETAARLLAEMPKLGEFDSARSAAAHTGLTPKRRQSGTSINAPTRISKIGNPRVRYALYLPAMTALRSSKEFKELAARLTERGKKKMQIIAAAMHKLVRIAYGVLKNQRPYDPNYAVAV

SEQ ID NO: 137877 - protein, 343 aa, unidentified
MSEVTTIGLDIAKSVFHAHGADERGVMLFSRRLTRGKLLEFFAGQPRCTVALEACGGAHHWARQLQAMGYTVRLIPPAYVKPFVKRHKNDAIDAEAICEAAQRPGMRFVAVKTETQQAAGLVFRTRDLAVRQRTQLTNAIRGHLAEYGWVAPRGKASMTMLADLLEDEMASSLPEAALPMFKLMIDLLAELDERIATLDREIARRAKEDVAARRLMTIPGIGPIAATAIVALAPPVETFRKSRDFAAWLGLAPRQHSTGGKQRLGSISKMGERTIRRLLIIGGSSMVRQACRRGAPAGSWLEGMLARKPRMLVSVALANKMARMVWALLTKNEDYRAPAAVAA

SEQ ID NO: 137878 - protein, 344 aa, unidentified
MYFIGVDHHKQVSVMTVLDEDGQERKNGRVPNLRRYVEQFLEDCRPFTAVLEAGRSSYVMADLLRDLGGEVKIANALQVKAIAHARIKTDKRDSRTLAYLLRANLIPEVYQRGEWNRRAQRVMRMRAYWVCKQTEVKNKVRALLAQQREDVRLEVEKRESGLFSSKGLEFLAKLPLESKEKEVLEDLLQGYKEIQTHIKKSDGMVDALYGEMEEASRIDTVPGFAKMLSVFVAVEIADVKRFARAADLHSYAGVIPSTHSSGERTYHGHITKQGSRWLRWAALEAVYPAIKKDLVLRTLYSRLARRKGPNAAKIAVARRLLTIIYRILTEKREYLPGLMKQTAA

SEQ ID NO: 137879 - protein, 341 aa, unidentified
MYTLYCALDIARNDCRAAWSDGNGNIVREKKIAMTRDALIDTFGREAGRTLLGCEATGKAFWIYDVLSPLGVEMRIAPPNRLKVIYETCYKTDKIDARKMAGLLAKDLFPTVWIPPAHLRDLREMTRLRAQMVRARSQWACRHHALLSRWGVNSPHHGGEVVQDRGLVDGLGAGARIAGREILRFVGDLNERIRLLDRRARAEIRKFPDFERQIHLLMTIPGVGILTATVLVLEIGRIDRFPGPKPFAHYSRLTPGVDSTADRRKDLHLAKDSRADLGCLMVEAGWTARRVDPYFAGQYQRRVALGIKPRRAIVPVARSLSHALYRVWKSQTPYQELFRQN

SEQ ID NO: 137880 - protein, 411 aa, unidentified
MDVYCGIDWAEDHHDIAVVDRDGKLLARRRISDDAGGLATLLALLAEHGDTAGDRVPVAIETPRGLLVACLRATGRAVYPVNPMAVARYRDRHSVSGKKSDHGDAVVLANVLRTDMGMHRPLPADSELAQAIAVLARAQQDAVWDRTAAHNKLRSCLREYFPGFLAAFADARGGITRPEARAILAAAPTPAAAAVLTVAQLRSLLAKAGRSRGIDTEAARLRDAFRIQQMRQLPLVEQAMGQQALALLRQLDAACASADDLEQAAVASFNQHPDAGIITSFPGLGPLTGARVLAEIGDDRSRFQDAKGLKAYAGAAPITRASGKTKSVTRRKVKNNRLSAVGYTWAFSALTASPGARAHYDRRRDAGDKHAGGLRNLFSRLLGCLHHCLTTGQHYDEATAFPAPAKQPAAA

SEQ ID NO: 137881 - protein, 370 aa, unidentified
MAKRSMFVGMDVHKESIDVSLAEEGRDGEVRRYGVIPGDLEAVAKVVRALRAPNRRLRFVYEAGPCGFGIHRYLTGQGEDCVVVNPSSMPKRSGDRIKTDRRDGDALARLHRAGELTAIYIPTPDDEALRDLVRAREDAVGLSTQAKHRLKAFLLRQGRRYPGRAGWTRPYRRWLADLSFPLAPQHSALQEYRDTIDETERRVERITEQLRQLTPSWRWAPVVDALQALRGVSFVTAVGLVTEVGDIRRFTHPRELMAYLGLVPSEYSSGPSVRRGGVTKAGNPHARRLLAEAAWAYQGVPRLGRQMLYRQEALSPAVRDIAWKAQLRLTGRFRRLVARGKAKPKVATAIARELTGFIWAIAREVPAPPA

SEQ ID NO: 137882 - protein, 422 aa, unidentified
MTSPQPSPTEFAAYVGIDWANQKHTCSLRAADSQRIENYELDNTPEAVEKWAAELEQRFQGRPIAVALEQQRGALVALLSQYAHLVLHPVHPSTLDHYRKGFHPSGAKSDPAASDLLRDLLERHRDRLKPLKPDTEATRKLQFLVEGRRKLVDEKTGLSNRLTDTLKQIFPQVLRWFDDVASPLVGDLLRRWPTLPDLQKAKPATVRDFLHQHNCRSEERTEQRLQAIQQAVPATRDGALLQAGSLAVESLVRLIAGLRDSIGRYDKVIAEITKAHPDFPIFDSLPGAGAALAPRLIAAFGTDRDRFGNAADLQCFTGIAPVVQSSGSQRWTHWRWACPKFIRQSVQEWAQHSIPRSVWAGEYYQQQRDGGSSHHAAVRALAFKWLRILYRCWKDRKPYDEQIYLRSREKRLLPLPPTPATT

SEQ ID NO: 137883 - protein, 336 aa, unidentified
MRYIGLDVHKNNTTACVIAANGKPVGSMEVKSNEAGLQKILDYMQGQEFCVMMESTTYAYRIFRFFSRHDVEAHVVHAASLKMVTDTDKKTDRKDAESIGRMLRLWKKGDIELSMSYMPTVEECRVKDICRIKEENSMKIGDESRRIKSHMSRNLEELRGSGNLRMKYVRENLREDYHGDSVLMFRLDEYERLVSEGNWLKRLVENELPGNRYVELIESIPGIGRQTAVQIMSMIVDPNRFEDGKKICAYFGMVPRVRDSGGKEHHGKLTKNGDKMMRSVMERVTIAHVRFCDSPVTSYFRAKEPIMGTKKAVTTASRKMLTMILAILKRGTPFRA

SEQ ID NO: 137884 - protein, 321 aa, unidentified
MNTFYLGIDVAKAKLDCALRLANGKYKNKVIDNNLPGFKLLSEWLVKQQVATLQVCMEATGVYWEAVAEYLADQGVLVSVVNPAQIKAFGKSHGVRSKTDKIDAQSIALFCAEHHPKAWQAPTPGERALRAMVLRLESLQVMRTQESNRLLVARDAVKPGITSHIEWLDKEIKALAKKISEHLDSDPDLKDKQALLDSIPGLGERTIATYLAFYANPADFGNARRAAAFAGLEPRHHESGSSVKHPPRMSKIGHAFLRKAFYMPAMVTLYKTAWGKRFRERLAAAGKPPKLIIGAMMRKLIHVAFGVLKSGKMFDPALHGC

SEQ ID NO: 137885 - protein, 370 aa, unidentified
MSQSSTLFIGMDVHKDTIAVAYVAQEHGAEVTSLGTIGTRQCDIDHLIRKMQSKAKHLIFVYEAGPCGYWLYRYLRKKDYDCWVVAPSLIPKKAGDRVKTDRRDAMQLARLARSGDLTAVYVPQVEDEAIRDLTRAREDTLSDRKDAKFRLKAFLLRHDIRYTGRANWGPAHLRWLSEVICPTPAQQIVFQEYVRAVNEHTERLQRLEQELQEHVQAWRLHPVVEALQALRGVQFTVAVTMVAEIGDLTRFDTPRELMKFLGLIPSEYSSGERRQQGAITKAGNTHARRALVEGAWAYRYPAKVSRHLQLRLEKQPKIIQDISWKAQVRLCKRYRHLVARGKHANIVTVAIARELAGFMWAIAKQLPVAA

SEQ ID NO: 137886 - protein, 381 aa, unidentified
MQSSEGGTAKPPQAEDAVDRCLAEVRERADFSDACCVMGAASVYRRALARCVSSLGAEAKVINPIVTGWRKKNIRKAKTDSEDASSIASVYFAGLCLAQWHMEDPSQDLRSLTRDIDREDEALTKLKVMLRQETRRSFPEYESEFKNARFFSPPALALFERCPTARDVLGHQGRFIAGVIASGSARGKGAYMRKAGRLKSLAKSSLTWIGPGSMEASIIKRLCRQIGEQSEGVALLKSLLEAEAEAQSPALLGMYRGFGFTGYLSARFAVDLGGISRFDNEKRLVAWCGLDPSIRQSGSSVSAKGGISKRGSRTVRKVFYLASLDYISHPGKSKDFADLEAYYRKKRRDGKHHCVAAVACSTKLLRRFCYRYKDLLKETSK

SEQ ID NO: 137887 - protein, 339 aa, unidentified
MFYIGLDISVKRTAVCIVDAAGKLIHETSVSSTPQAVASAIRTAGVEVERVGLEAGVSSAWLARGLLALGFPAIVIDATHAAAALKTGFRNKTDRNDARGIADLMRVNKFRQVWVKSPAAQRDRALLTVREQLRRQSLDARNAIWSILQAEGLQPPKLASPAFGSLVVQLLDDPDIGHLLQPLATIAAQIDQQVADLDRTIAARAKASAACRRLMTVPGVGPLVALTYVTGVDEPGRFRSARTVGAHFGLTPRRFQSGEMDWSGRISRAGDAAVRRALYQAANVLIHHSKGWCALKSWAVRLAKRRGLGKAKVALARKLAVVLHKMWTTGEDYRLRAAA

SEQ ID NO: 137888 - protein, 346 aa, unidentified
MMIIGCDYHPSWQQVAWVETETGECGERKLVHATGEAKVFYQQLGSPALIGMETTGNSQWFIELVEDLGHAIWIGDAAQIRASYVRKQKTDKRDAAHILRLVVENRFPRLWTPDREQRDLRQLVLHRHKLVEMRSRVKNELQHLAMNKGMQKKATLWSQAGQQRLRELPLKPWASCRREDLLGLLGMLNQQVGTLDQAVQKAAEEHAQARLLMTQPGVGPNTALAYVLTLGDVTRFRRGKQVASYLGLIPREESSGGRQKLGAISKQGNRLLRSLLVEAAQIAVRFDPGFRKQYLHRCHQKPKGVAKVAAARRLAVRLYWMLRTQVAYPEIVRIESSPRVPRVGAS

SEQ ID NO: 137889 - protein, 416 aa, unidentified
MLRIVYQICCGMDVHKSFLVACIATTNGQGVTTYKSKRFSTFTGDLRRCAVWLAENNCMDVCMESTGKYWIPIYNILEPTCKIVLAHPKYVKAIRGKKTDQKDAKWIADIFKHDLVSGSFIPPADIRQLRDLVRYRWKLTNFSTGEKNRAQNCLTVSNIKLDDVFTDVFGKASSAIIGRILQNPSEKLTDVSAFRTKHMKASDEEVLAAVDGEMCAEQAEKLRIIRSHMDGLELCKLNLESLILSVVEKFLPQLNLVLTVPGIQSFSAIGIISEIGVDMSVFPSSKHLCSWAGLTPQNNESAGKKKTTRISRAGAYIKPLLVQCALCAIRDKHNPEIRSRYLSLKKRRGHKKAIIAIARMLLTVIYNILKKNEPYNPELYRKGDNPPTHREISADQAIFILQRQGYLASAPKPQRL

SEQ ID NO: 137890 - protein, 330 aa, unidentified
MNVLRRNRMSEAILGVDIAKRKFDVALLINGKLKHKVFSNNQEGFEELELWLKKHGANHVHVCLEASSTYGDELAIYMHDAGHTVSIVNPARIKGFAQSELIRTKNDKVDAGLIARFCLAMHPEPWTPAPPEMRQLQALVRRVDALINMRTQELHRLGTAHTTIEGSIQEHIAYLDRQIDILKQQIADRIKNDPDLKAKRDLLQSIPGIGEATIATILAELPVFERCDHVQKVVAFIGLAPRQFISGSSIKGKPRLSKVGHARLRKALYIPALVSIQCNPIIQILYHRLKGKGKNGKVVVCAIMRKLVHLIFGILKSGRPFDPNYTTNHA

SEQ ID NO: 137891 - protein, 347 aa, unidentified
MRFYTKQHKYYCGIDLHTKKMYLCVLDGTGAIVLHRNIKTDREVFLKTIEPFREDMVVAVECMFTWYWIADLCVEENIPFILGHALYMKAIHGGKAKNDKIDSHKIGALLRGGMIPMAYVYPAKMRATRDLLRRRNHLMRKRAELYAHMQNTRTQYNLPDFLGCIAKPQNRQGIVERFADPSVQKMMETDLAVIEAYDPIIAKMERDIIRMADQHDPAAYALLKSIPGVGRILGLVILYEIEDINRFPTVQDFASYCRLVKSIKESNGKKYGSSGKKIGNAHLKWAFGEAAALFLKGNEPGKTYYEKLANKHSKGKALSILAHKLGRAVYFMLKNKKPFDQDKFLGL

SEQ ID NO: 137892 - protein, 507 aa, unidentified
MTAPTIRGQPASSSSPSGPQAQAQAQAHRQARNRRKTRAQAKSEALRQKEAAQVEALPVQHPHAAGIDIGSRSHWVCVGFTSEAPSCLIREFPAHTAGLKAIAAFLREHQVTTIALESTGIYWIPLYELLQAEGFEVLLVDPSYSHQLRGRPKTDRRDCQWIYRLHSVGLLAAAFRPDEQTCQLRAYLRQRANLIRSASKHVQHLQKALEQMNLKLTEVLSDITGVTGRTILRAILRGTQAPEKLAQYRDKGCKASEAEIAQALTGAYREEHLFALKLAYEACQFTLGQVEKVDGQIALQLGRMKCDRALPPLKPKARPKRRVNSPGFDVRTALYYVVGLDLTEIEGISELTALTLISEIGPGVSRFATVKKFCSWLGLCPQWQKSGGRVKSSRTRRGVNRAAQALRLSAQSLHHSQGALGGFLRRMKGRLGVQAAVTATAHKLARIVYLALKHGMTYVRQSQEEYEVRMKEKQIKALRRKARLLGLEIIEKPSGSEATVVAASVQG

SEQ ID NO: 137893 - protein, 404 aa, unidentified
MWYTGIDWADEHHDALTIDEKGHQIGSIRVDHTPQGFAKLDVFLMQIIGSAPKEHMACIIATTHGLVIVHLLEAGWPVYPVNPRTVDRRRSASGAKTDLIDAYLLAKTGRADFADLRRLTPDSEKVAELKQLTRDQDTLIRTQTRLVNQLTACLKAYYPVALDLFSKLQQKSTLLFLQAYPTLETARAASLKELQQQLKQTRHPHPADAAASMVELLHQPQLQADVVLTRTKSRLMLALVSQLLPLMEQIADYDKEISTLFLTHEDHAIFESLPRAGQHLAPRLLAEIGDDRQRYQDANSLQALGGTSPVLYQSGMYSKAHRRLGCIKPLRNALHQFAWQTTQSEPWAKAYYQRKRAEGKSHTVAVRALANVWVRIIFAMWLHHQCYQTATFEQAQQQHARRAA

SEQ ID NO: 137894 - protein, 312 aa, unidentified
MDASFIGIDVSKDRLDVHVRPGAESFAVARTGIGIDELIARLLTLSPALIALEATGGFESIVAAGLAGAGLPVVVVNPAQVRAFAGALGKRAKTDPIDAAVIAHFVEATKPEIRPLPDEATQLLADLVARRRQIVEMIGAESQREKHASQKRLQKSILRLKKALEKELAEIDASIDDTMRGSPAWRAKEDLLVSVPGIGPTIARTLIAELPELGSLDRREIAALAGLAPWTRQSGQWRGKSFIGGGRTSVRTALFIGAMVASRHNPVLKAFRDQLVANGKPKMVAIIATARKLLTMLNAILRDNQPWQPKNA

SEQ ID NO: 137895 - protein, 449 aa, unidentified
MGNCAGVDWAGEKHDVRVCDEAGEELLAASFVHDEKGLRALCRTLLRLKVELVAIERPDGLLVERLLDAGLRVLPMHPKQVAASRARFRAAGGKSDRFDAFVICELARTDSHRFRVLEPDSDQTKALRALTRTREDLVHARVALSSQLRAELERFWPGPIGLFTKLDSPISLAFLERYPSPADARGLGAQRLAGFLTRQHYSGGQKPAELLAKLRRAPEGRVGDAEMIARRAIVLALVAAITPLVDQIKQLTEQIATALREHPDGEIFLSLFRDPRSVVTAAELLAEIGDCRARYPTRDALAADAGQAAVAVKSGKRKTANFPWGCNKRLRGAFCTLADSTRHWHPWAQDRYAAARARGHEHPRALRTVGRAWSRIVWRCWQDRTPYDPARHRALQQHIAGTIPTPSGPRPDLAATQRMAGEAVTETAARRAEREAFDGKPTSATALGG

SEQ ID NO: 137896 - protein, 367 aa, unidentified
MKKVSTVGAKPSKKISQQKLTVGLDLGDRNSWYCVLDESGQIQLEQRIRSNAKALREVFGQLPHSRIALEVGTHSPWISRLLSELGHEVIVANARKVRLIGESRKKDDRLDAQTLARLARIDPGFLSPVKHRSAQAQADLMMIRARAGLVRARTALVNTVRGLAKSYGERLRGCNVRNMNPEKADGLSPELQSALEPLLAGIEELSEQIREYNQRIEKLAQESYPQVALLRQIKGVGTLIALTFLLTLEDPHRFRKSRDVGCYLGLQPGRRNSGQSEPQLHISKEGDPYLRTLLVQGAQHILGPFGVDCDLRRWGLKLAERGGRSGKKRAIVATARKLAVLLHHLWVSGEVYEPLHNSRRTAVAAAA

SEQ ID NO: 137897 - protein, 366 aa, unidentified
MVKMLAETSRGGLAQKPSQEDPMPTIDYIGFDIHKKTISFCDKAQDGTILEEGTIPALRKKLLAWAKTRPRPWIGAMEATLFTGWIYDLLKPLAQALQVAHPPMVQAIAAAKKKNDKVDARMIADLLRCNLLPECYMAPVAIRDLRRVLRYRNLVVRQATRMKNRIAGLLMETGTAYNKERLHGKAYFSELLGSLQEMPRSVVELLQLSRGQVELFAAIQRRLLQGLRKHPELSQRVMRLQSIPGVGEILALSWALEVGEVDRFPSLAQAVSYCGLTSAQHSSAGKEQRGPISKQRNRHLQTILIEAAKLAPRYNPQLAAVHQRELQRGNRNRATLAVARKLVAYLMAVDKSGQPFQMRASGEEAA

SEQ ID NO: 137898 - protein, 347 aa, unidentified
MEYFVGLDVSLETVNVCIVNAAGDILLEKKIAAEPAAIVHLLKSFGSPFKRIGLEAGPTSSWLYGELRAAGYGAICLECRHVKAGLSAMRNKTDRNDARGIAQLVRLGWFRQVHVKSEEAQRTRMLLVNRQQLLTKALDIENSVRGSLKVFGLRVGVVARRGFEARVLELVADDPILLAVTEPMLRVRQALLEEFERLDRLCQQLARRDPVCRRLMTVPGVGVVVALTYRTGVDAPERFSKSRDVGAHFGLTPKRYSSGQTDYDGRISRCGDEMVRTALYQAANVMLHHGRWSSLRSWAMRIAKRGSVKGAKVALARRLAVVMHRMWTDGTDFRWSDTSRMTVPTAA

SEQ ID NO: 137899 - protein, 401 aa, unidentified
MNAVGIDVSKNKSTIAILRPFGEIVAKPFDVKHTSSDITYLISQLKSLNGDTRIVMEHTGRYYEPMAQWLSDAGLFVSAINPKLIKDFGNNTLRKVKTDKADAIKIARYTLDNWCELKPYNNTDELRRQLKNMNRQFDFYMKQKTAMKNNLIALLDETFPGINTFFDSPARNDGSQKWVDFVTIFWHVDCVRRHSISSFSERYQSWCKKKKYNFQSQKPNDIYEFSHDLIATLSKDNVTKLLIQQAVDQLNIASKNVESLRLLMNQTAAKLPEYPIVLDMAGVGTTLGPQLIAEIGDVSRFSHKGALTAYAGVDPGANQSGDYEQQSVRTSKRGAPQLRKTLFLIMDSLMKLAPPDDPVYGFMMKKRAQGKDYYVYMTAGANKFLRIYYGRVNEYLSSLTS

SEQ ID NO: 137900 - protein, 410 aa, unidentified
MKRIHDRVAGLDVHRDSVVACVELFDGHSVEIDKARFATTATGVRQLGEWLAEREVELVVMEATGVYWRPVYYGLEDRFGELWLVNAYHVKNVPGRKTDMSDAEWLADVAAHGMVRSSFVPPPEIRGLRELTRYRKTQIRARAQEIQRLEKLLQDAGIKLTSVASRVWSQSSRAMVEMLIAGETDPAVLAELAKGRMRPKIPALIDALENHWMSHHSVVARRILAHIDFLDDTIDTLSTDIVERVDPFDAAVELLKTIPGVSELTAQTIIAEIGVDMSRFPTAGHLAAWAGVAPASHESAGKHRPAGTRHASGHLRDNLIEAAHAAARSKGTFLSARYTRIVRRRGPNKAAVAIAHSILVAAHHMLTTGEIYEDLGADFYQKRTDPHREIRRHIAQLEAAGYTVTLTPAA

SEQ ID NO: 137901 - protein, 523 aa, unidentified
MEEVGELELHVERIAALDLGKAVLEACVRVPHPSKPGRRMQELRTYSTTTRSLLELADWLRCHRVTRVVMESTSSYWKGVYYLLEAAGFECWLVNAREVKNVPGRAKTDKIDSAWLCKVAERGMCSPSLVHPAPIRQLRDLTRYRRSLVRDRTREMQRVEKLLEDAQIKLSSVISNIFGVSGRAMLAALAAGQRDPAVLAEMAKGSMRSKTAVVKEALTGFFTDHHGVILSMMLDNIDRLSGQITVLDARIEEAVAPFSPQAEQLAEISGCGPVAAQELIAEIGVDMGRFPSDAHLVSWAKFCPQTHESAGKRKNTKRPKGNPWLGATLGAVAATVARTDTFLGARYRRIAKRRGKGKAMVAIGNSVLTIAYHLLSDPAARFHDLGSDYYESRINRERRARNLAAALEAVTGQKILIREGKVIVIRRVPSACPLTTPIFGSDTRRLPDEDRLQTPDLVPGASTHPTHATPKSPEPTHHPRHSTYPRREAPDHSPKPLISLALPPRPAHPPGSARRTPPTPRCR

SEQ ID NO: 137902 - protein, 404 aa, unidentified
MIFVGIDWAEAHHDVCVLDHNGDVLATRRIPEGLEGVARLHALLGEHATEPGEVIVGIETDRGLLVGALVAAGYVVHAVNPLAASRYRDRHSTSRAKSDKTDAKLLADLVRTDRHNHRTVATDSELHGAIKVLARSHQNLIWTRGRQTNTLRSALREYYPGALAAFSELGHADALAVLAIAPDPERGRKLSAARIVTALRRAGRQRNLERRAQEIKVALRRPQLAAPPLVVEAQAANTTALVAVITTLNEQIARLEAELVEAFDRHPDAEILRSLPGLGAILGARVLAEFGDAPGRYLDAKARRNYAGTAPITRASGTSHVVVARFVRNKRLFDPLYAAAFSAIRTSPGARAYYDAHDPGPNTAKTARRKVANKLVGIVHGCLAHRTLYDEEIAWGRPVAELAA

SEQ ID NO: 137903 - protein, 343 aa, unidentified
MQVTTVGLDLAKRIFQVHGVDAAGKVVIRRRLQRSEIAAFFADLPACLVGIEACATAHHWARLIGASGHQVRLIPPSYVKPYVRRSKTDAADAEAICEAVGRPSMRFVPVKSAHQQAALLHHRARDLLVRQRTMLINAIRGHLGEFGIIAPAGRRRVADLVNLLQGADDAEVPALAREALQSLFAELSALEIRIKVVEAVIMREHRSNAVSRRLTTIPGIGPITASALAGTIADPFAFKSGRELAAWIGLVPRQHSSGGKQKMGRVSKQGDRYLRRLLTVGATAVMRRLPGKTDGLSLWVRALLDRRPFRLVSLALANKMARIAWAIMVRPETYKASAMTAPA

SEQ ID NO: 137904 - protein, 388 aa, unidentified
MIYVGIDIAKLNHFAAAISSDGEILIEPFKFTNDYDGFYLLLSKLAPLDQNSIIIGLESTAHYGDNLVRFLISKDFKVCVLNPIQTSSMRKNNVRKTKTDKVDTFVIAKTLMMQDSLRFMTLKDLDYIELKELGRFRQKLVKQRTRLKIQLTSYVDQVFPELQYFFKSGLHQHSVYALLKEAPTPTAIASMHMTHLAHLLEVASHGHFGKDRARELRVLAQKSVGVNDSSLSIQITHTIKQIELLDSQLFHTELEMANLVTCLHSVIMTIPGISFINGGMILGEIGDIHRFSEPKKLLAFAGLDPSVHQSGNFQAQRTRMSKRGSRVLRYALINAAHNVVKNNATFKAYYDAKRAEGRTHYNALGHCAGKLVRVIWKMLTDEVEFNLE

SEQ ID NO: 137905 - protein, 349 aa, unidentified
MAMTIVEAVPGITGGVDTHLDKHVAAALDPLGRLVGTESFPADAGGYRALLGWLEGFGQVTKVGVEGTGSYGVGLSRFLRSKGVEVVEVNRPNRQSRRNQGKSDPLDAVEAARAAISGRASGTGKTKDGPVEAIRVLVVAKRSARQARVKAIVQMRHLGITAPDQLHSKLKGLTVTALVTEAAKLRSTRSPDPVTAATKASFSSLAHRIQGLDQEIAELNEKIESLLLATAPDLLGLFGVGPDTAASLLVAAGDNPQRLHSEAAWAHLCGVSPVPADSGRNTGHLRRHNGGDRQANSALWRIAMVRIAHDPETTHYFDRRVKEGRTKRDVIRILQRYIAREVYRYLPRG

SEQ ID NO: 137906 - protein, 428 aa, unidentified
MNYNQNHKIAQITAETLIIGVDIAKFNHVARAQDFRGMDLGKSITFENTQSGFDGLIGWIKQLQVDNQMNKVFVGMEPTGHYWLNLAHYLKELNIKCVVVNPLHTKKSKELDDNSPTKNDVKDAKVIAQLVKDGRYAEPSIPEGVYAELRGAMKVRELLSTDLRSVQGKIHNRLDRYFPEFFTAFKDWEGKAALRTLKLNLLPHELLKLSDGEILKHLKKGAQRGVGLSRVRRLKEAACCSVGIKQGNNMAKLELKTLLAQYDLLKEKFEELDAHLDELLKQVPGVHNMVAITGIGKDTVAAFLAEVGDLRNYSHPKQIIKLAGLNLRENTSGLHKGRTTITKRGRKKLRALLFRVVMPLVAKNQAFKDLHEYYTTRPDNPLKKMPSLIAICNKLIRILFTVGTKQCEFSEEKMLSDIPHFNNLQEAA

SEQ ID NO: 137907 - protein, 354 aa, unidentified
MNTTQVFEKRKIAVAIGIDLAKDHCDVVAYNADNKICFTKANWAYPHLMEWLANAQPAVVLMESCKGCHVRARDIADLGHDTRLVKGADVKALRNVCQKNDIRDADYIARLLYVPGTKFVFVKNQRQQSLQFLQNEYKSIQELRIQVGNQIHAGLEEFGCPGPKSKKFIQSRMMAHLEKNAELIPDEVMSSFLRRREMWLNLFEQEEEAKKRMEEIAKTDDDAQRIMTVPGVGAQTAVGMLVHIGGDIGRFKNSGQFAASIGLVPKQNSTGGNTTLNGITKCGPKRLRANLVQCGQVILMHADKLKGNFGDWVRKLRDSGKKRGVIACAIAAKLARIIYRLMKDKVDYTPVPSR

SEQ ID NO: 137908 - protein, 323 aa, unidentified
MSSFVGVDVAKNTFDIATHLPNGKHKTKAKLANDSKGFKEFEAWLVKQVEPSALIVMEATSIYHLELAEFVYNKGYRVCVVNPATTHAYADSELRRIKTDKSDAKLIADFAREKNERLALWAPEPLKYRQLKALVRRLDDLQEMERMECNRLDVSDEKVKASINSVLRHIEKEIAETHKAIKNHIDDDPDMREMRDLIVTIDGIGEKTIERLLAELGDLRKYDDPRKLVAAAGLNPKLHDSGKLKGRTTISKIGSVSVRAGLYMPGLVALQHNEAIKAMKDRLKANGKAPKQIICAAMRKLLHFVYGVLKSGQPYDPKLALAR

SEQ ID NO: 137909 - protein, 355 aa, unidentified
MGRQDFISIILYDHANTNFIGIDVFKLNIHIYQLEIKEYLSIKNDYKVLLKFKFFKKFNKSSFFVYEPTGVYSKNLEKVFNDLWLQHFQVHPNDMHHLGKSLLGLNKTDKIDSKHIAQIWKLLYTQYQDLWWKNKFITPVPNYINQINHHMSQIRFMKKEISRAKNWIECLLNNPYESKTALGTYNKVISDLEKSIEKLEKEIDNLLNKNELHGKIENIKTIPWIADTTALELFVFFISLASKWMKKEDHKKVIAYSGLNPIENSSWTSLHKEKISKKWNKNVRKALYLPWIQRSQLCEKEKYKNTTIGKFCVRMKNKFTTAKNKRWKSVACAVAKKLLHTAWAMFCDNTQYSFV

SEQ ID NO: 137910 - protein, 432 aa, unidentified
MDRVIIGVDPHKLSVTIEARDNREILRATGQFRTDMRSYHQLLDVARQWPERVWAVEGANGIGRPITSRLLASGERVLDVPAKLAARARVFDTGQGRKTDAADAHAIVMVALRDKGLREVSGDPDLAVLRMLCDRRDELSRARAQTLNRMHRLFLDLIPGGAPVKKSVSQYQELLARVRPRDLAGKTRRRMAAEELQDLTRLDAKLKAMKAELKAAVTATGSHLMDIHGIGPAGAARILADVGDITRFPDRNHFASWTGTAPIDASSGQHLRHRLSRAGNRRLNHVLYIAGIVQLRNDTPGRAYYRRKRAAGKTSMEAMRCLRRRLSDAVYRQLVADARGQEHASPGGHPGASVSSSAAGLSPDTGTSDQPLPGPAQPTLPPPQPLPHPPMAPAAARPRRRARGVNVERPTGRTTLTPTSAAAPSTTARPCP

SEQ ID NO: 137911 - protein, 345 aa, unidentified
MVQQGLLFFFKYKNMKNVKETVGIDVSKLTLDVHLHKAGMHQQFGNDLSGFKKILAWVKSKELKSDDVLFCFEHTGWYCVLLGYFLHEKGIDYCCVNPTEIKRSMGLKRGKSDKADAKEIAYYAWLRREDLKPSQPPAANLIELQRMMSMREQFVKQAVALKNLRCGMEQLTGKKSHDFSILAITETIEHLESQARKVEKAMEALIKSDEAMQVNYKLSKSVKGVGLVLAVQMLLHTHNYTRFDSWRQFSSYCGLVPFPYQSGTSINGRSKIHPIADRKMKSLLSMSAISAIQHDKELKMYYTKRVSEGKPKMLVLNIIRNKLVSRIFATVNRGTPFVELNQFVA

SEQ ID NO: 137912 - protein, 380 aa, unidentified
MDIHPTLFSACALENTNAKTAKELAMHHQVDMDDLERWYKKNHLPSDLYVMESCNNSFETATRLRELGAHVVVLESFRIGQIHKAYLKDDKVDARKIARVYLSGLAVAVWQPDEQTRERREVLAVYERVKRDSVRCRNRLWSWLTQHGVKRPKGLKLAEKEGLNWILNCREWSERQRFLIQTMHSNLVEAQKKRKELMRLMAKEIAEDPELLKLQQLCGLRLIVIYALAAIIGDISRFKNPKKLVAYIGLQPSVNYSGENGRNGGLKHTGRKDLRALLVQSAHSILRMAPASNRLATWGRALIFRKGRNIAAIAVARKLTVYIWYLLRGFFTPLQNLSTSFRIKLQKLAVEIGTEERRKMGYKTIKEFIRKKEEILLVSG

SEQ ID NO: 137913 - protein, 355 aa, unidentified
MNSEKYIGLDVHQATISVAVMDSRGKVVMESILETKASTILEFFAGLRGTLSVTFEEGTWAAWLYDLLKPHVAKVVVCNPRKNALLKDGNKSDRIDARKLAELLRLDNLKPVYHGETGVRMLRELARSYLTIVKDLTRVMNRLKALYRSWAIPCAGRDVYYTRHRTEWLGKIREAGVRRRAEQLYQQLDMLQHLRQQARRELLAESRKHPITAKLRKIPSLGPIRSALAVALIQTPHRFRTKRQLWAYSGLALETRTSGEHRYVRGQLRRSKKQVSIRGLNKDHNHDLKGLFKAAATRASVQPGPFQDFYQRSLAKGIKPTMVRLTLARKIAAITLTLWKKGENFDAEKLKSQAA

SEQ ID NO: 137914 - protein, 333 aa, unidentified
MKKLIHFIGIDVSKLTIDVAIIINNDIGKIIQLVFTNDSKGFKELKYRLNKEKISFPETVFCMEHTGYYSKQLSRFIIAQRGNLWMEMSLKIIRSLGVQRGKNDKLDAKRIALFAQRNQQDFVPYNPPRLIVENLKTFLMLREKLINSKTALVVPVNELTSVDKTAGKIALKAISKALQGIENNIGTLDAKIDELIASDKELFEKFKLVSSVPGVARITFCYLVYFTNEFKNYTQAKQLACYCGVVPFEYTSGSSVKGKPKVHNIANKKMKKLLHTAALCAVTYYPEFKQYYERKIKEGKPKMLILNNVRNKIVLRIAAVIKNNLPYKTNTAA

SEQ ID NO: 137915 - protein, 314 aa, unidentified
MSTTNSVYVGIDVSKARLDVAVQPTGDAWSCAHEEAQLPTLVSRLHALAPALIVLEATGGYEVLVASALAAAGLPVVVVNPRQVRDFAKALGRLAKTDDIDAHVLALFAERVRPPLRPLPDPALQDLAARVARRRQLVDMLTAERNRHAQAPEGRVRRDIAQHIRWLERRVSDSTDDIGRLLHDSPVWRVQDDLLRSTPGIGPGTAAVLIAHLPELGTLSRRQIAALVGVAPFNCDSGTLAGTRHIWGGRVAVRQALYMATLAATRCNPAIRTFYQHLLAAGKQKKVALVAAMRKLLTILNAMVKHQQSWRTAA

SEQ ID NO: 137916 - protein, 409 aa, unidentified
MDIMLERVAGLDVHKQTVTVCVRVPGPSGRRVQEVRTFGTMVADLLALREWLEGHGVTHVAMESTGVYWKPVFYVLEEAVTCVLANAAHIARVPGRKTDVQDCVWIAQLVEHGLVRGSFVPPAPIRDLRDLTRYRKAVSQERTRCANRVHKVLEDAGIKLGSVANDILGVSGRAMLEALVGGTTDPGVLADLARGKLRAKLPALRQALTGRFRAHHAFLVGQLLAQLDFLEESIEQISARIAEVLAPYTAEVERLDAIPGVNQRTAEVLIAEIGVDMRQFPSAKHLASWAGLCPGNRESAGKRKPATTRKGNRWLRTALVEAALSASRASRSALAARYRRVMQHRGHKKAVIAVAHAILTSAYHILARQVPYQDLGPDYYERRHTERVRRRAIATLERQGYRVRLERAA

SEQ ID NO: 137917 - protein, 425 aa, unidentified
MATKVREVAYVGLEAVLAYCCGLDVHKKRITACLLVGPVDQPPKEFLSTFTTTTKGLTALRDWLASYGCTHVAMESTGIFWRPVFNILEGSVTILLANARYMKQLPGHKTDINDSQWIARLLRWGLLKPSLIPPKPIRELREMCRYRKKLTQEVGAEKNRVHKTLEDANIKIASVATEIFGVSGLAMMDALIAGNLSPQETAELARGRMRSKIPELAEALVGKVEEHHRLLLRKHLDHLSYLQQAIAEMNRLIEEKIQPYQPQVELLRTIPGIGTVSAQQAFVEMGGDINAFPSEDHFASWIGICPGNNESAGKQKRAKALKGNRWLCSLLVQSAYAVGRTKGTYAGAFYHRIARRRGNERAAVATGHYLSKCIYHVLMDGKPYRDLGADYLNHRNDDSLRKQLLRRLERLGYQVELTPQTTTVS

SEQ ID NO: 137918 - protein, 331 aa, unidentified
MNPSVANAFLGLDVSKASFHAALSTTTQAAMRQRAFTNDAGGFAALEQWLRRQPVVPKTLHACMECTSRYGEALALNLHGYVGSVSMVNARLVHRYGQALNLRAKSDPADARLLAQYCAERHPRPWSPPSPERAILQELNRRLHQLTQQKIAESNRLEAARIAPVRADIQQHLAQLQRRMDRLGSVILAHVQGHPKLRQQSALLQSVPGIGAKTAAALLGELPEDLVAHYAHARQLAAHSGLTPRHQQSGAQRAPTRLSRIGSSRLRALLYMPALVGAKHCPPFAHFRAKLMARGKTPKQSICALMRKLVHIIFGILKHQKPFNPSLLSSA

SEQ ID NO: 137919 - protein, 452 aa, unidentified
MGRKKKMKMDIINPSAAGIDVGSRSHFVAVGQSTEDVKEFGVYAEDLTSLCEWLKSYEITTVAMESTGDYWQNLYVELEKYGFEVLLANGKFTKNIRGRKTDVLDCMWIQRLHSLGLLSSSFLPDEITEQLRTFCRQRSNMVDLAASASRKMQKYLKLLNFRLDVVVNDVCGLTGMAIIADICKGNHDPILLSKHRHYNCRKSEQEIAKALQGNERQDYLFGLQQEFESYQFYQKKIAACDKEIERFVRQELKKDPTRKKLKTTEKPYKRQNKNAPKIKNFNQVAFRYFNGVDLMAIEGVSHATILTIMSEVGPDGFSKFKSAKQFASWIRLAPNNKISGGKVLSNHIPKGSNRLKIALRNAANSIGNLKDTHLSDFFRRIAYKKGRVAAITATARKLAVILWNMITKREAYKPPTQYLFLDQKRKRGLVKRIKNQINKFDLNPKDLGFVTD

SEQ ID NO: 137920 - protein, 430 aa, unidentified
MTKSKAYAAVPVNRVLLERLTQGRQDLEVVVGADIGKFEILAVPRWPDAVFGRPWCVHNPHQIPDLIGLLLRLAQGRRLRVALEPSGTYGDPLRQALHDAGLDVWRVSPKAAHDYAEIFDGVPSQHDGKDAAVVAELATLGKASPWPYQARADWEQELAYWVDWLDAQRRLLALWAGRLEGLLARHWPEATRVLKLTSATLLQTLAQYGGPQALAADVQAAGQLARWGGRRLDPDKVQRLLAEAHSSVGVRLGTVETLRLQEYARQAWAARQQMRRSRGQLAELVRGRPVLEAQAQVVGRATACVLWACVGDPRHYPCGAAYRKAMGLNLTERSSGVHAGKLHISKRGSPQARRWLYLAALRLSRQAGVREWYLAKKSRDGQEAKRAVVGVMRKLVLALYQVGAQGARFEIGRLFPGAAGVAVGEGAAEE

SEQ ID NO: 137921 - protein, 353 aa, unidentified
MAEDRSGVSAVIGIDIGKNTFHVVGLEGSGAIVLRQKWSRGQVEARFANMPRCLIGMEACVGAHHLSRRLRALGHDARLMPAKYVRPYSKGQKNDFRDAEAIAEAVQRPTMKFVATKSADQLDLQALHRVRARLVRQRTGISNQIRAFLLERGVAVRQGLRFLRAELPVILAKRCDALSPRMVRLIEDLAGDWRRLDERIESLSHEIDALARQDAGCDRLMSVPGIGPIISSAMVAAIGTGDAFEKGRDFAAWLGLVPRQISTGDRTILGKISKCGNRYLRALFVQAAWVVLIKPKSWERCGLKPWIEAAKRRLHHNVLAIALANKLARIAWSVLARGRGFEARLIVGAAQPV

SEQ ID NO: 137922 - protein, 482 aa, unidentified
MKEPRMKDNRRSPAPRQAAATKHRSWSPLLKRIQPDAAGVDCGATSHYVAVAEDREPQPVRAFSTFTADLHRLADWLVQCGITTVAMESTGVYWIPLYEVLEERGLEVVLVNARQLHNVRGRKSDVQDCQWLQELHSVGLLQASFRPAGEIVALRSYMRHRQSLVEAAATCIRRMQKALTQMNLKLHHLLSDLTGVTGMAIVRDTLAGVRDPQALAAHRDGRCKASEQDIAAALTGHYRPEHLFALRQNFAAFEFHQRQIAQCDQAIEAQLASLAESRPPASRELPAARPRVKLSKNEPRGELRAPLHRITGGADLSQIDGIGPYGALQLIAEIGTDMSRWRSEKHFSAWLTLAPNNKISGGRLLSSKTQPSANRAAVVLRRCAMSLTRSATALGAYYRRLAYRLGQPKAITATARKLAILVYRVLGGEMVYRDPGATAYDQLHRKRLINGLRRRAQEFGLSLINLETGEVLDHALVPQSVS

SEQ ID NO: 137923 - protein, 358 aa, unidentified
MNNKDNQINFAGVNIFIGIDVHLKSWKVSIMIDNIMYKAFSMDPDPNQLHKYLINHFPNGNYFSAYEAGFSGFSLHRNLSKLGIKNIIVNPADIPTTDKENRQKEDKRDSRKIARSLRNGELTGIYIPSCEVEELRGLVRYRKKIVEDISRQKTRIKSFLHFHGIAIPIEHTLGSQHWSSRFTAWLESIELNTTYGASVIKSSVEVVNFQRKKLLEINRTLKQISNEEPYGKQIKLLRSIPGIGQVVAFTLLTELEDINRFKSLDNLCSFVGLIPTTNSSGEKEKTGRITYRRNQALRAIIVESAWVAIRHDPVLSIAYHKLCKRMQANKAIIRIAKKLLSRIRYVMKNEIEYKYVIT

SEQ ID NO: 137924 - protein, 350 aa, unidentified
MSEVCTIGLDIAKNVFQVHGVDRNGNQLFNKKIARSGIKAFFANTPPCLVGIEACGGAHYWARELQALGHTVKLIPPHIVKPFVMRNKTDAADAQAICEVVRRPGTKFVSMKTEEQQDLTALHCIRERLIAARTSLVNQTRGLLYERGIIFSQGIPAFEKGIKEFLEMESNGGIFMDMLQEQWKEYVSLNERIKVLTERLKDMATSDATCQRLMKIPGVGPLTATAVVGKIGKAQEFKNGRQFAAFLGLTPREHSSGGKQRLLGISKRGDSYVRKLLIQGARAVCMVWNAGECVPKGDRRKLWLREITLRRGKYCASVAQANKTARILWNVLAKGEEYDAQKNGNKAETM

SEQ ID NO: 137925 - protein, 344 aa, unidentified
MRVTTIGLDIAKSVFQVHGVDETGEAILTRRFTRRKLLPFFAKLPSCLIGIEACATAHHWARELAALGHEVKLMPPAYVKAYVKRGKSDAADAEAICEALTRPTMRFVPVKSPEQQAILMVHRTRSLVVRQRTMAANAMRAHLAEFGLVANPGIRNLLKLIARVFDEVEPEPGMPLMARTALSVFVRRLAELEEELRELDKTLHDWHRQNAMSQRLATIPGIGVITATAIVATVSDIQAFRSGRQFAAWLGLVPKQNSSGDKIRLGGISKQGDRYLRRLLVVGATAVIRHSKQKDTPLANWLRGLLDKKPVRLVSVALANKTARVVWALMARDQPYHPYHVAKH

SEQ ID NO: 137926 - protein, 417 aa, unidentified
MQVVYTHCAGLDVHKRTVVACCLTPDPEGGWHSETRTFHTMTVDLLGLSDWLRGHGVTHVAMESTGEYWRPVYNILEAEFETLLVNAAHVKNVPGRKTDVRDAQWLAELLQHGLLRPSFIPPAPIRELRDLVRHRSNFVRERATLVNRVQKVLEGANIKLASVATDVMGVSGRRMLEAIIGGEAEPEVMAELARGRLRAKRVELAKALDGRVRAHHRFVLTELLSQIDSLDETITRFDEQIAEASRPFVEAVARLDTIPGVGRETAEMIVAEIGVDMTRFPSANHLAAWAGVAPGNHESGGKRLSGRVRKGNQALRKGLVQAAHAAAHTKNTFLAAQYQRLQRRRGRKRAVLAVAHSILVIAYHLLAREEEYRELGGDYFDRQRPEATAQRLTQRLEKLGYHVILQQPESAEVCASA

SEQ ID NO: 137927 - protein, 467 aa, unidentified
MRRRIDSFPRRVFSSPASGPATRFNVDQTGGDTLGAASLYRLTGHRFHLAISSDRGAVLNPTCTPMTTHAILGLDAAQAGVAFHLQQLDAHLLAQGRCAASTAGWNELTAMLKTHHLGWADCLVAIESTGQWHLPWAEAAAKAGATVYALNPLIAKRVRSVGNAIRDQKSDPLDAAALAETLARYHAALARFIYQSRPANFRLRRLLTARRAVRSALTNLRKSAGDLQDLCFPELADSDLSTERQRRLLRTAAHPAAVLALPAARLQELAGEHAKTVRTLARSSFAPATLAAAAAPALQALLETDAELSDRLEELDRQIAIAAAEGLDPVQLQRARTVPGFGDRTTPAILACIPPDLFVTHTSHRSRANALQALFGCEPRLLTSGKWTGKIKISKRGIREARTALYQAAFSTLANEPDFKSYYDRLRARGKSHKTALVDIMRKLLRRLVAALDPAAPPSTAKTPCVA

SEQ ID NO: 137928 - protein, 411 aa, unidentified
MDLLHSRCAGLDVHKESVVACVRIVEDNQVKRFVRTFGTTTERLLQLAEFLAEHGVTHVAMEATGIYWRPVWHILEPEGLEMVLGNAGHIRNVPGRKSDTNDAMWISDLLAHGLIRPSFVPPTPVEQLRMLTRTRKQLVREAAQHTQRIHKVLEDCNLKLTSVVTDVMGKTGRSILEALVLGQTDPEKLAELAAGSLRSKRAELIAALRGCVTAHHRFMLKLHLGLYDSVHAAVASIDHQLEEQLTPFRQATDLLETMPGVGRIVAEVILAEIGPDMERFPTAGHLRSWAGLCPRMDESAGKKRSTRIRKGAPWLKTTLVQAAWAAIRKKDSYYRSLYGSVKRASSSANKAIVAVAAAMLTSAYYMLKRGEPYRELGADYRDRRDKTRTAQRLIRRVQALGFDVQLQARAA

SEQ ID NO: 137929 - protein, 460 aa, unidentified
MALLAKIGQELPQRYYVGIDIGYREHVASGISLQTFVQGGDGWKRAKTLGFPTTQTGFERLQRYLDRFSTDPQAFLILCEPTGGYYGAALYQYVLDHHYPTFWIDNATTRHMREKIFGNIPKTDEIDARVMARIAYLHEAVGEEFSLRPLRLPSQDDAELLSLCRNSWKLNTMVNRVRNQFSQLMAVIFPELKFFYTSSVSSVAPVSLMARYPSPAEIAAAPYEDVYEVLWKARSYPHAKQVHELQAIARQSAGLLPDPERAWRLKWLTDYLLSNFQLLGELEQRIEQVIQNHPGYAYVVGVPYSGPTTLGTILAASGEIRRFPNYRHYVAYTGYFAGLEKSQTIDRTHMSKRGNRDLKRAYFQIIAPMVWFDKGNNPYKKLYERKMAEGRAWYAAMPFACAALARHIYHCLKVQEPYDLDKAFPGSVSSPASKQALADFQADLEEEFEVMDARLSQVDV

SEQ ID NO: 137930 - protein, 345 aa, unidentified
MEHVTTVAIDLAKKVFQLCGVNHRHKVVFNRSVKRGQLLAVVREHPDALFAMEACATSQYWARTLTSMGLSVVLIPAQHVKAFTRGNKNDAKDALAIAEAAHRPGIHGVPIKSMHQQEIQTLLRIRSGYVDGRTALVNQVRGLLAEYGVVMPRGVGRFRKLLPQVLADTEHALTPLVRAAMGMQYQALVDLCDRIRAADAELREVAAQDPICRQLLRLRGIGPMTALALYASVGGAGQFANARQFAAWLGLVPKHTGSGGKVTLGPMSKRGDPTLRTLLVHGARSVLTWAHRRDDAFSHWALAVAQRRGKHKATVAIANKTARMVWVALNRGIDALPRHHLSAAA

SEQ ID NO: 137931 - protein, 360 aa, unidentified
METNHDTSLSFKNQDFYIGIDVHKNQWTLSIMFSNMLIKRRLSIDPSPSALLNYMQRHYPDGNYFAAYESGFSSFWAARQLNNLGIKCMVVHPPDVPSSQKERLNKNDRVDSRKIARSLSNGELVPIYIPKKVAEEYRHLNRYRLRTVKDQTRLKNRIKSALHQFGVTVPLQYQERRWSGVFIKWLLTIKFDTEYGQFAHEDLVDQLIGIRTRITKQLLKMRLMTEEQKPFSIIIPLLLSIPGIGFITAMTLTTEIIDMSRFKTLEKLAAYVGLIPSIHSSDETEINYGITPRRNKYLRTMMIEAAWKAVKIDPALTMKFNQLSKRMNRNKAIVRIAKILLNRIRYVWKNQKPYVLSVVN

SEQ ID NO: 137932 - protein, 326 aa, unidentified
MEWTVAIGVDTHREAHVAVAVDRLGQRLGSLEFRVDERGFAQLRRFALALGRPAFAVEGTGSYGASLARALLAEGFDVFECERPQRRGQNAKNDLIDAELAARRLLTGEELPLPRNGDKREQLRLLLLERRSAQHARQQALNQLKAAIITLDPHLRTQLEPRRPAALQHSKLLRDELAPLARLAKRIVLLERELAETDRELRQLTRALCPQLLRQPGVGPLCAGQLLVSTANPQRIRSEPAFAALAGVSPVEASSGPIKRHRLNRRGDRQLNWALHMSALNRIRYHHETRAYYQRQLDRGKTKREAIRIVKRALARRLYRTLTTTT

SEQ ID NO: 137933 - protein, 432 aa, unidentified
MPSTTAKTNPTQPDFAALIGLDWGDKAHAIALACADGQREQQTLQHSAENLHRWLEQLQQRFGGRPVALAFEYHTGPLLHVLVQYPWLTIYPVAPVTSARYRQAWKPSGASDDGPDALHILDLLEHHRDKLSPLVQNELLTRKLEGLVQARRGAVDARSALTNQLGSVLKTYYPQALELVGKDLASQLALDFLAKWPDLISLKTARTTTIKGFFHRHNLRRPERLEEHLQAIDQAVALTTDEAIVTVAMAQVALLIEQLGVLQKHIATFDDAIKTAFAQHPDAALFRELPGAGPALGPRLTVAFGDDRGRYPAAANFSQYAGVAPVREKSGQREWIHWRWNAPVFLRQTLVEWAAQTVVWCPWAKEFYQTMQKRGKNRQTILRALAFKWARILWRCWQERTPYDEAKYMAALRRRNSPYAVSLPNAGEAQIG

SEQ ID NO: 137934 - protein, 355 aa, unidentified
MTSIKYIGMDVHKESISIAVRNSAGKVVMECVIETKASMILQFIDGLRGDVQVTFEEGTWAAWLYDLLKPHVSKLVVCDPRKNKSMREGNQSDKIDARRLAELLRLDHLAPVYHGEHGLRTLKETVRSYLTITKDLARVKTRLKAIYRSWAIPCTGKQVYARCHRAEWLGKINEPGVRRRAEFYYLQLDALRVLRLNARRDLLAESKKQKAWKRLCEIPSIGPIRAAVLLGILQTPHRFRSKRPLWNYGGLAIEMHSSADHRRVDGQLQRSRKNVLVRGLNRNCNHDLKNLFKGAAAVASSKPGPFKEFYTALIARGMRPEMARLTLARKIATIVLIVWKKGVCFDANHLKPQTA

SEQ ID NO: 137935 - protein, 378 aa, unidentified
MLEAMSANDAVDGSTAGIAMCHGGYLNRQKGEPPKMDVSTIGLDIAKSVFQVHGIDAAGQVVVRRQLRRRQLLGFFEKLAPCLVGIEACATAHHWGREIAALGHEVRLMPAHYVKAYVKRGKNDATDAEAICEAVQRPTMRFVGLKSPKQQSLLMLHRTRELLVRQRTMLVNAIRGHMAEFGIVTRVGLPQLKELLAVIADRDDHRLPPDARACLESLGRQFLSLNEEICAADKRLQAWHRSSELSRRLATIPGIGPITASALVASITDPSAFRTGREMAAWIGLVPRQNSTGGKPRLGKISKQGDQYLRWLLVAGAMAVIRHAKRRGTANHPWLDDLIARRPTKVAAVALANKMARMAWALLSHGGAYRQPVITANL

SEQ ID NO: 137936 - protein, 468 aa, unidentified
MGDNRSRVRQRGGRKAKPPSLLKRINRHAAGIDCGSETHFVAVPSDRESEPVRSFKTFTSDLHRLADWLSACNIKTVAMESTGVYWIPIFEILEDRGFEVVLVNSRHVKNVPGRKSDVLDCQWIQELHSVGLLRGSFRPTAEIASLRAYLRHREKLIQDAASHIQRMQKALIEMNLQLHNVISDITGVTGMRILRDIVAGVTDPAALATHRDYRCRATEDDIAASLTGNYRAEHLFSLRQNLDLFDTFQRQIQECDGEIESLLLRLAPKQSKPKRSVPPPRCKFKFCDNEPRFDIRDPLFRLSGVDLTQIDGIAPYTALRLIAEIGTDMTRWPTYKHFTSWLTLAPKNKISGARLISSRTQPSANKAAGLLRMSAMVLGRTSTALGAYYRRIAYRIGKPKAITATARKLAILVYRMLKGELDYADPGASAYDEQHRERTLRNVRSRAKRLGFGLVDLETGELLQGAVT

SEQ ID NO: 137937 - protein, 414 aa, unidentified
MNNRRKKFQKVNKKVLIATIDIGKKSNIGYWRCYNGIDCKTFEFSNTREGFDRFWRKIFTAKVNNKADRIIVGYESTGPYGKPLTHYLKDRPVKQVLVNPMHTKRLKELDDNSPLKTDRKDPRVLADIIELGHWLSVVVPVGAAAELRELAHSRDRLMVLRTAEYNRLQNLLSIFFPEFLTVMRNVRTKSALCLLSRYPSTDDIVAAGCDSLAEILHNISRGQLGVERSRMLFEAAEHSVGVREGKESMADEVRFIIERILLYNRQIFEKEEMIKRYLSEIPVSSNLLSIKGIGPITVGVIIGEIGNFDTFSSPRAVIKLAGLNLYEVSSGKHIGIRRISKRGRHLLRKILFFAAINVIRKDGILHDYYHKLIDNGMLRMKALIAVMRKLLKIIFSLARNKTFYMPEYSLKKVA

SEQ ID NO: 137938 - protein, 415 aa, unidentified
MEIIYSRVAGIDVGKREVAVAVRMPGDIPRQRRQLVRKYKTFYQVLREMVAWLVEQGVTHVAMEATGVYWKPVFHALCEAEQIEVLLVNARHAKNVPGRKTDVKDSEWLAQLLECGLLRGSFIPPKDIAAIRELTRYRKKLIEERTRELQRLSKVLEDGGIKIDSVASSIATLSARDMIEALIAGERDPRVLAELARGVMRNKIPDLTMACAGRFGDHHALLARMHTDHIDHLTTMIEGLDHRIEEVVDPFAEPLRLLRSIPGIGERAAQVIISEIGVDMSRFPTAAHLASWAGLCPGNNESAGKHKTGRTRKGNVEVRTILTECAWSAGRTGTYVGAQFRRMHRRFGKTGGGKAAIAIAHTLIVIIWHVLHDRAEYRDLGADYFTRYDNPDARKRRLIHDLQSMGYEVTIAPAA

SEQ ID NO: 137939 - protein, 365 aa, unidentified
MLKAELSCEADSENDLGGSSETMYYIGLDVHKRTISYCVKDAAGKVHQEGKIGSTRRDLDSWIKTLPQPRMMAMEATIFTGWIYDHLLPHAEKVKVAHPLMLRAIAAAKKKNDRIDAGKIADCLRCDFLPECHMASTEIRDRRRTLRYRGLLVRQMVQMKNRVSGLLMESGVSYNKQRLHKLGYFTDLLSTNEEISQSILPLLKLGREHIVRAQRLDSALIGSLEKDPLLSERLRRLRTIPGVGPITALTWALEIGDYTRFRSVKEAISYCGLCSAEKSSADKVMRMPISKQRNKHIQHVLVEAAKMAPRYSPELALVREREIQRGNKNRATFAVARKMVAYMLAVERRKQDFVPAEEMAGRAVA

SEQ ID NO: 137940 - protein, 341 aa, unidentified
MEQVNTIGLDIAKHVFQVHGADAAGHALFRKRVTRAKLLGFLAAQPACVVAMEACAGAHYWGREIGKLGHRVRLIAPAYVKPFVKRQKNDAADAEAICEAAQRPSMRFVPVKTDEQQANGIVFRARDLLVRQRTQCVNALRGHLFEYGHVFPQGITHVATLVALVEDPQSSLPESARVVLKLLVNTFTALDGQIAALDAEINQRSKTDPTARRLMTIPGVGPIVSTAITALVPIAEDFRAGRDFAARLGLTPLQKSTGGKQKLGAVSKRGERTIRRLLIIGASAVVQQARRRRAPKGSWLAQMLARKPKMLVTVALANKMARIVWALLVKGGVNRAPVAAA

SEQ ID NO: 137941 - protein, 407 aa, unidentified
MNEKGKQYIGLDVHKHYLIAVGVDAELNVVLPARRVELFRLEAWMKKNLTKQDEVVLEMTTNTWQMYDELVQYAGKVMVVHPPHVALITRSQVMNDKIAASILARLLAKGLLVGIWIPPQEIREARGLAAQRQKMVRLATQAKNRLHAVIQRHHLVPPAGNPFKADNTEWWQSLSLGKLEKLNLQSDLETLRFAEQQAKAMTETMEGMAAEQEEIGRLLHLAGFGVVTAMTVWAAIGDIRRFAEPQKLVGYAGLGSRVHDSGMTSRSGKITKAGRRDLRTVLVEAANAAANSHPHWKAELARLEPRLGRNKAIVAIARKLLIAVWYVLQGKPDKYAEPEAVAQKMLRFAYTVGKSNRPQGQTAAQFARVRMDALGLGAELTSIPWGSKKPIPLPPSALKERSDVPNR

SEQ ID NO: 137942 - protein, 385 aa, unidentified
MVIIGVDPHKRIHVASVVEPATNHQVAALQIEASLAGYRRLLRWADKFGERSWAVENTRGLGCHLAQWLLARGEAVEDVPSTATARVRELSRGGRRKNDVIDAAAAASVAALHGDATPVLAEDITTVLGLLDERRANLTTQRTRLINQLHAVFRDVLPGGAPKGLTAAIASALLAGIRPVGPVEVARKQLARDLVAEIRDADRRLKLLTAQIAQTVAATGSRLMEVDGVGPVVSGRLLARTHRMSRFATAAAFASYAGVAPVEVSSADRLRHRLSRGGDRQLNLALHIVAVNQIRMPGSAGRAYYDTKIAAGKTEKEARRCLKRRLADHIWRLMIKDEHGAAGPGGQQGATMQSSAAGSTPTTSSSDKSLPEPATPDSTTGQTAA

SEQ ID NO: 137943 - protein, 376 aa, unidentified
MTTPKEVFVGIDVAKRRHAVAIADAGRDGEIRYMGEFDASPESMTRLIRKLAAKHGKLHVCYEAGPTGYGLYRQILALGHECIVVAPSLIPRRSGDRVKTNRRDAQSLARLLRAGELTAVWVPDETHEAVRDLVRTRAMAVEDYRRKRQHVSAFLLRHGRSFDGKTSWRGRHKRWLDGQNFSHPAQRLAYQEMLNAVQATVERMDRLEAALIELVPAWTMAPVVAAFQAMRGVQFMTAVTMVAEAGDLRRFDHPRQLMAFLGLVPSERSTGETRHQGGITKTGNSSARKVLVEAAWTYRHSAGLGVDHQRRQKDLPASVRDIAWKAQTRLCARFRRLLAKGKRNTLVVVAIAREIAAFLWAIARLIEPRPLPAVAA

SEQ ID NO: 137944 - protein, 341 aa, unidentified
MSIVGAFDVHRRQLTFEYLDTSSGELKRGRVVPADRQHLREWLARFAGQDDGHFALEGCTGWRYVVEELLAAGITPHLAEPAGTAALRGKKRHAKTDKTGTRHLRVHLMAGDLAECWIPPGHVLEARAVVRLYKDLLDERGAWHQRIAATLFHQGVPLIGSMATAEGRAAVEQVDLSPAGRQAVQAGLRQIDRLTGELDVLRRQLGMLSRHQPGCAALRATWFGVGPVTAVAIWAELGDVRRFGNSDDVVRHTGLDITVYSSDTKRAAGHLSRQGPPLLRWALYESAKCAARAAAPDHGYYAAVRDQRTAGLATLSVARKLARRCYHTLRELGEEALAPAA

SEQ ID NO: 137945 - protein, 418 aa, unidentified
MNSMEITAVGIDVSKSKSTVAIRRPGGVIVARPFDISHSNHDLEKLVSILKTTGGDIRVVMEHTSNYWKPIALTLKNAGFYVSVVNAMLIHDFSDNSIRKLKTDRADSLKIANYALTFWNELPPFNDEDETRLVLREQSRMYERLASTATSLRNGLIALADQPFPSIDQAFGHAIKNAEGHEKWVDFFSIYWHRDCVLRLSIEKFTESYRKWCLRRNYKFRTNTAHKLYALAQDAVPTLPKNNGTKALVLQACKSLNAVCEAKQSTQEEMNRLASLLPEYEVVMQMEGTGPITGPALMAEIGDVRRFKNKKALVAFAGIDAPPFQSGNFESKSRHVSKRGSPHLRRTVFLVANIILTLSHKDNSVFCFMDKKRAEGKHYYVYTIAGSAKFLRIYYARVTEYLRVQERPVAASCPNGNS

SEQ ID NO: 137946 - protein, 342 aa, unidentified
MKQYAGIDVSLEYSSVCVVDADGRIVRETKVLSEPDALTAWFAEHGVAMERIGLEAGPLSQWLYAAMKQAGLAVELLETRHVRDAFKAMPVKSDRNDARGIAQLMRLGWFRPVHCKSMAAQEVRAILTARKLVQSKLLDVENSLRGILRGFGLKVGRTTRTNFAGRIRELVKGHPNLETIGKALLSVRAVLRGEFNAFEKQVRAMSRLNANARMLMSTPAVGPIVALTYASAIDDPARFRSSKRAGPLFGLTPKKHQSGETDRSGRISKIGDTAVRAALYEAAHIILTKPIKGCSRLKSWAMRIARRAGMSKAKVALARKLAVILHRMLVTATPFNDAAAAA

SEQ ID NO: 137947 - protein, 339 aa, unidentified
MKEVTTVGIDLAKNIFHLHGVDKNGKVVFSKTLRRKQLMPFILNLQPCLIGIEACCSSYYWCRQFKKHGHTVRLISPQFVKPYVKTNKSDKNDAEAICEAVARPNMRFVPEKNVHQQDVQVIHRVRSRLMTEKTRLTNAVRGFLAERGIFMTVGKWNLHKELPVILETENEEFTPMLRELVLEMYEELKQIEDRISKMDKKIQQVFKSNEVCKRISEIEGIGPITATAIVAAVGDAHNFENGRHMAAWLGLVPKQHSSGGKVRLMGISKRGDSYIRSLLVHGGRSVVYKATNKTDSRSEWITDKAIRRGNNKAAVAVANKNVRIIWKMMVSGEDYRKTA

SEQ ID NO: 137948 - protein, 356 aa, unidentified
MEPIKSNCVGCDAHRRYSVFVLMDERGHTGKETRVEHSRELYRHFLSTLPPGSPIALESIGNWYWMIEEMERAGHQPILAHAKKAKLMMGLTNKTDKLDARGLALLLRNGTLPSVWIPPGELRDQRELPRMRMVFARIRTMLKNRIQSTLAKYGIQIDEVSDLFGVMGRGLLQNRLNELPQETQRSIQEHLKLLDGVLEQIEGTEKRIKEVIKETPQMQLLMSLPGVGPILAIVIILEIGDIERFPGAPQLASYAGTVPQVKSSGGKTYYGKVRPDVNRYLKWAFIEAANSIVVHQRRMPNRHVVQVYHRIMKRKGHPKAIVAVARHLAEATYWMLKKSEAYREPTSSRWISPTQK

SEQ ID NO: 137949 - protein, 338 aa, unidentified
MNYYAGIDVSLEALSVCVIDASGKIFRETKVASEPEALIAWFGSLGVSLTRIGLEAGPLSQWLYAAMRQAGLAVELLETRHVRNAFKIMPVKTDRKDARGIAELMRLGWFRLVHCKSMEAQETRAILTSRKLVQKMLHETEMSLRGTLRNFGLKVGKVAAGQFEFCIRELVEGHPTLATIAASLLATRATLRREFNALEKRLRAIARSDTRARLLMSTPGVGMIVALTYACAIDDPSWFKSSKIVGAHFGMTPTRYQSGETDRTGRISKIGDSSVRAVLYEAAHVILTKPVKGCTALKSWAMRIAKRAGMNKAKVALARKLAVIMHRMLADGTTFRPA

SEQ ID NO: 137950 - protein, 424 aa, unidentified
MTTLLQVGIDPGPKECVGQAVDQYGVVCGKPIRFRPNREGVERLVARTIALAPEAERRFYVEASGSHWYGLVGWLRAQKEPVSLISPSYTKAQRRVSSRYAKSDARDAEALARAAFQMGERAQHPADLPEGPRLNLRLLCRHRYRLQRDATAIKLRLLGWLGFTTPGLAEWLGGDFSPADRALIARYPVVAKVVRRGKARVREFLECHAKGAVDEATLDALFELARQAYSPRDLDDALVAEQFRMELQRLALNEKLIRELDVRIAQVLPRCDPHGWARSLPGFGAVIAPILVAEAGTDLSRFANPHRFAAWAGVVGRAHGSAGRQTEGLPITKAGRGIVKAALFLAANVARQHDPHLRTVYENLRAKGKHHNQAVIAVARRLAELYWYIMTEQRPYEIQPPPPPSDPTGQPLPPSGTLPPPDGG

SEQ ID NO: 137951 - protein, 340 aa, unidentified
MKEFIRIGVDIAKSVFHIHALESEGGGVTTRKLNRAGMRKFFSSIAPCLVGMEACGSAHYWGRELRTFGHEVRLMPPAYVKAYVQRGKNDAIDAAAACEAVSRPRMRFVAIKSEEQQATLMAHKTRDLLVKQRTMLVNSLRGSLAEFGVVAAKGIERVEELIAKAAEARLPAMARLSAQVVIEQLERLDALIADLAKRIVAAHRGDGVVRLLKEVPGVGDLFATRATATVSDPHAFKSGRDFSAWLGLTQRQDTTGGKTKLGAITKQGNHALRRLLVLGATSLLKVAHMHKGALGDWLKAIKARKRFKVAAVAVANKLARIVWAIMTRGEAFRAEAFARA

SEQ ID NO: 137952 - protein, 412 aa, unidentified
MNLVGVDVSKGRSMVAVRRPFNEIVVKPFEVRYTGSELSKLADYLKSLDGETRVVMEHTGRYYEQIAQYLHDAGLYVSAVNPKLIKDNSGGNTLRHVKTDKADAKKIAKYALDNWAELRQYAPIDTIRYQLKTLNRQCGLYTKTKTMMKNNLIALLDQTYPGVNALFNSPVREDGTQKWVDFAASFWHVDCVRSMSQTAFTERYRKWCRKHGYNFNSVKANEVYEKARDQIAMLPKDGMTKLLVKQAIESLNAVSATLERLKGEMLKLASQLPEFTVVMDMRGVGDSLGPQLMAEIGDVSRFAHRSAITSFAGVDPGTDQSGDHEAKSVRTTKSGSPKLRRALFLVMDCLLKTMPQDEPVYRFMDKKRAEGKPYLVYMTAGANKFLRIYYGRVKEYLAKLEELSAPDPSPHI

SEQ ID NO: 137953 - protein, 355 aa, unidentified
MERYIGMDVHAASCTLAVISQTGKRLKDFPVETNGQALVEAIRMIPGRKRLVFEEGLQSAWLYETLSPHVDEIVVAGITESRGPKSDKHDAYGLAEKLRVGDLGKTVFKAPRQFTRLRELSRIHMTLVGDVVRAQARIKSLYRSRGILVSGVNVYGVRPREGWQKQLCSSAQTRATRLYDHLDFLLEQKKQAEADLLREAKKHPIVRVLETAPGFGPIRAARLVPIVVTPHRFRTKRQFWSYCGLGIVTRSSSDWVQTADGGWIKARVAQTRGLSRQHNRVLKSIFKGAATTVITQRNKDPIHARYQRLLDGGTKPTLAKLSLARMIAATVLRMWKDEEEYDPERADSFTETREG

SEQ ID NO: 137954 - protein, 355 aa, unidentified
MAIRDFDKEVEMVTTIGIDPHKATHTAVAIDGSETVLGEITIPADRYQTEKLIDWAQNLDGDGRVWAVEAAGGLGFLLSQQLIADGEHVVDVPPVLASRVRVLGSGKSDKNDPNDAFSVAVAALRQPGLAVVRPEDHTQVLRMLAKRHLELTSLRTQAACRLHAVLTQLRPGGMGQRLSAKQASRMLGGIRALDPVGEQRRLTARTHLGDIRRLDGDLKANRVLIRQAVAAAKTTVTDVYGVGPIVAAFLIGYTGDPSRFASADHYAAYNGTAPIEVSSGGKKRHRLSMRGNRTLNHAIHMAAVTQIRHDTPGRVYYDKKQAEGKTKKEALRALKRRISDVVYQRLLADQQTKTS

SEQ ID NO: 137955 - protein, 352 aa, unidentified
MEIIALDSHKRYSQVCVQDNSGKFLNEKRIEHQREQIAGFLSRWSTGSAVAVETVGNWYWIVDEIESAGMIPKLVHAHKAKLMLGSINKTDKLDARGLNKLQFTGTLPTVWIPSGDIRDNRELPRTRMVFANLRIRLKNRIHSVIDKYGLHTDFSGISDIFGSKGRERMGLTLKKLPPQTRYAFQRLLRQLDTVEDQIQQIEKRMKKVFSQTEQVKRLMTLPGIGFILAVTIANEIGDISRFSTPQRLASYCGTVPRVHSSGGYTRYGKLRNDVNHYLKWAYSEAGNSTAVNHKRFAIRHTSQLYKRIKEKKGHAKAVGAVARHLAEASFWVLTRNENYKEPSVKSVSSTAV

SEQ ID NO: 137956 - protein, 287 aa, unidentified
MAEVVTIGLDIAKSVFQVHGIDAAGAVVLRRQVRRAHLLLFFAKQPKCLIGIEACASAHYWGRELSKLGHQVRLMPPSYVKPYVKRQKNDAADAEAICEAVTRPTMRFVAIKSPEQQSVMVLHRVRMMLMRQRTQLSNAIRAHMAEFGLVAPIGREGLQNLIKLVETSDARVPEEASACLQLLATQLKLLNSQILATDRRIRTSARATETGRRLMGIPGVGPLLASALVATVPDPKAFKSGRNLAAWVGLVPKQNSSGGKERMGGITKQGVTVHIPPPFRRRASRGS

SEQ ID NO: 137957 - protein, 344 aa, unidentified
MKKLTTIAIDLAKKVFQVAVYNKYGNQKSNKAMNATQMMEVIHQHPEAQICMEACGSAHYWGRRFEALEHDVYLVPAHLAAQYRRGNKNDLNDVDGIYEAAKRPKTYFVSVRTLEQQDLAVQHKLRHGYVNQRTQAANRIRGFAREYGVNFSWGIHRLRHEVPDALEDADNELTPSGRSSLRELLDQLLALDRLIEAATREIKRMGKLIKACQELVKIPGIGWITATMLYVRFGNGAAFRCGRDASASIGLVPAHQGSGGYNRLGKISKRGDKYLRWLIIHGARAVINNLRDKQDGLSCWIRNQLAHKHPNNTTVALANKLVRMALAILKSGESYRAPVAQVAP

SEQ ID NO: 137958 - protein, 348 aa, unidentified
MITVSEKYAHVIGVDTHARTHTYTIVSTTTGARAGCEAFPVTSAGMKSAIAWIRLCTSGQVLASVEGTPSYGASLTRALTAEGITVVEAKPSRKAVRAGVGKTDEIDATAAATGVLGTDVDRLLHPRTDGARAALSMLLASRRRVEKQSTANRNALNALVRQIDLSLDTRCAVTDKQVAEIRAWRPRTTDSVEQQIAREEAIDLARGITAAAARVKLIKAHLAELDEQLTPGLQAQPGLGPVTVGIILAAYSRSGRVRNEAAFASLAGVSPLQASSGNTTRHRLNRHDERQLNMALDVIVKTRMRFDETTKKYVERRTAQGLSYREIKRVLKRDLARDLFRQLQQLFS

SEQ ID NO: 137959 - protein, 431 aa, unidentified
MNKTLLSTLFVGVDVSLRSHYAVILDFFGNQLDAFPFQNNLSGASVITSKITAVAAASEATHVVIAMESTSFYSFHLCNYLFQSPELASLHAKVYCLNPKVTSAYQNTFVDVDKTDPSDAYGIADFARTGKITSEPFNGSAFVALQRLTRTRLHLVESLAREKSYALTNIFIKFSELAVLSPRDKEDNPFSDRFGATCVAVLTDFLSPDEIAKASLEELIDFLCEKGKNRFSDPEAKAKLLQKAARDSYRLDKTQYEPLNAAIAASFNCIRAFDKELKNIDKAIEKAVKGLSSNEYQCLLSIRGFGPVISAGIIAEIGFIDRFQSEEKLAKFAGLTWRKKQSGRLTSDITYMTKSGNKYLRYYIGEAVMSLLKNHNPEYTAFYYKKRNEAVRFQHKRALALTSRKLIRLIYALLRNNQLYIPTKDVIDIAN

SEQ ID NO: 137960 - protein, 321 aa, unidentified
MSDQHCVFVGIDVSKARLDVCVLAGEQRESFAADNTPGGVASLVERLARQPVAALVVIESTGRYERRCAAELMDGGFEVAIVNPRRPREFARATGQLAKSDRIDAFVLAQFGKLIGPRPSVKPRENQLLLDELVARRRQVVQMLAGERMREQQAFDKRIVARIRKVMRVLDQQREDLEREIADLLDRDDDWRGKLHLLKTVPGVGEVTAAALIAELPELGQLNRQQIAALVGVAPFCSDSGQHRGPRHIRGGRPALRSVLYMATLTARTFNPLIRATADRLTRGGKPFKVMMIACMRKLLTMLNTIVRTGQAWRAPTPALA

SEQ ID NO: 137961 - protein, 341 aa, unidentified
MGEISMIGLDLAKNVFQVHGVDASGAVVLRRQLRRGQVVKFFAQQAPTLVGMEACAGAHHWARVIGEQGHQVRLMPPSYVKPYVKRNKNDGRDAEAICEAMSRPSMRFVAVKSVEQQARLVVHTTRALLVRQRTQAANALRAALNEIGLVAAQGVKGLRQLMQQLEPPSADIPEVMRGTLLLLAQQWERLDAAERALEREIKKAALADQAARRLIEVPTVGPITASATVAKVTDVRVFRTARDFSAWVGLTGRDRGTGGKHRVGPISKQGDRMLRTLLINGASSYLRQQKAHGMKDPWVRAMLARRPYKVVMVALAARTARIIWALLITGERYRAPLPAAA

SEQ ID NO: 137962 - protein, 385 aa, unidentified
MQTPNDLSQSGIVLKQDSTLIAVIEMSLSSWLVAGMVPSVERQPLKKLAIDENALLKLLYRWREEAEKAGRKIERIAVAFEAGRDGFWLARWLRARGIEAHVIHASSVAVSREHRRAKTDRLDTELLKRAFLGWLRGERDHCKMVAIPTIEDEDAKRPNREREGLVGEQTRIINRMKAALSRLGIRGFNPKMKKAAQRLEDLRTPEDEPIPPNTLAELRRDMERRRLISEQIRQIENARLERIEHAPRHGPHAMVRVLARVIGVGIETADMLVQEALSRNMRDRRAVARYAGLTGSPDESGTRRREKGLARSGNARVRRGMIQLAWRFLMFQKDSALARWFRARTENARGARKTMIVALARKLLIALWRLVREGVVPDGVVLRPV

SEQ ID NO: 137963 - protein, 403 aa, unidentified
MNSVGIDISKGRSTIAVMRPFGEVVISPFEVRHTDSELSELARQLKILDGETRVVMEATGNYHTPVAKLLHDAGLYVSVVNAKLVHDYGNNDLRRVKTDKKDAVKLANYGLDRWLTLPRYIPEEDTRLLLKNCYRQYRQYSKVQTVLKNNLISLLDTVFPNANRLFSSPIRGDGSEKWVDFVAEFWHCRCVSEKSEKAFANKYQRWCRKYGYNFNEAKAHTIHAEASGHIGVMPMSETTKLLVEQAVAQLRATSTALAALKHEMQSLASQLPEYPVVMDLFGVGPTLGPQLIAEIGDVRRFYSKKALVAYAGLDAPPNDSGDVTGRHKSMSKIGASSLRRTLFLVMSVYLQTAPLDEPVYQFMDRKRAEGKPYRVYMMASANKFLRIYYATVKAYLESLEHTA

SEQ ID NO: 137964 - protein, 351 aa, unidentified
MPRTAIPGSVKAIGIDPGKNTFHVIGLDAVGSIVLREKVSRHKIATRLANVPTCLIGIEAGIATHYVARELAAFGHDVKQVPPAYAKPFRQTHKNDYRDARAVAEAVQRPTTLFVPAKSDEQLDLQALHRVRTRLVSERTAVINQIRGFLLERGVVVRQGHHFLRRQLPDILAQRTDVVSPRMVRLLGDLAGDWRRLDDRIEAVTGEIQAVAREDLDCQRLMSVPGIGPIIASAMVAAVGNGAAFAKGRNFAAWLGLVPKQMSTGDRTILGRITKHGNTYLRTLFILGARSVLLHPASWPKHGFGPWLSNAAQRLHRNILVTALANKLARIAWTVLAENRSYEARVATVEA

SEQ ID NO: 137965 - protein, 434 aa, unidentified
MNPLSVSPEPPKVAAWVGLDWADQQHVICLYDVSTGQREIARLEQKPEAFEDWLSQLRQRFSEAKVAIVLEQARGAVIYALLSVDFLLLYPVNPQSLASYRKAYVPSGAKSDPADAVLLMEMVRHSPERFRPWKPDDADTRSLQLLTENRRQLVNQKTAFTNQLTSLLKNYYPQALELAGDLESLQACDFLKKWPTLEALQQARPAQIRKVYLDHGRPRPEQLQQRIEQIRRARPLTQDPAAVLSGSMMVAVLVEQVRPLLGAIERFDQQIAAIFRKHPDRSLFECLPGAGHVLAPRLLAAFGTDRDRFQTAQQVQQLSGIAPVTEQSGKQRWVHWRWACSKFLRQSFHEFADHSRKWCGWAKALYQQLRRRGQAHHAAVRMLAFKWIRILFHCWKTRTRYDESIYLKSLQKRNPSLWADIQALPPRARKQPAA

SEQ ID NO: 137966 - protein, 327 aa, unidentified
MILPILGIDIAKLKFNVCLINTSGKLKHKVFANTADGFQQLAAWLIKQGAQRAHACMEATGAYGEALALHLHHNEHLVSVVNPAAIKAFAGSRLSRTKTDKVDAELIARFCVAHQPLAWMPPAPEVRQLQALVRRLESLVEMRTMESNRLEAIITIDVVKASVQDHLAYLDRQIKQTETLIRTHINDHPRLKQQSELLDSIPGIGATTAATLLAEITDITQYENARQVAAFAGLVPRERQSGSSVRGRTRLSKIGNARLRKALYFPAITALRCSAFFKQWAEGLRQRGKCKMSVIGAAMRKLIHLAYGVLKTGKPFDPEWAQSAKTA

SEQ ID NO: 137967 - protein, 352 aa, unidentified
MKKIVVGIDISKEKIDASAIDVREGQIGLVKLGYQVFENRPMGFRRMIVWAKRLIKGTRHEEVLFCCETTGGYDRALCDYVYAKGLDIWRESALQIKRSMGVRKGKDDKADSLMIAEYAMRHMDKAVFYETPSEAVRELKTLFLYRYKLVQEKTEKTVRMKEMEATAAKSKSMTFILRDARKSIKAIDKSIKECERQILQIYSDNENLKKNYDHINSVSGIGIVNATAFIAYTNNFANFTTANKIASYWNCASFRERSGTSVDKKAYVKCYSSSLLKAYLTQAAECTVKNHGIYHDYYLRLNAAGKPYGVIINNVRNKLIHMVFSLVNNDMDYEENHEFIREKRKGKQKLST

SEQ ID NO: 137968 - protein, 355 aa, unidentified
MAADGIAVIGGIDTHTDLRQAAVIDGIGRHLATEAFETTPAGYQRLLDWLHSHAEVLAVGIEGTGAYGAEIARFLTANGITVVEVDRPDREARRDNGKSDPIDAYGAATAVLSGRAGGTPKARNGIVEAIRALRVVRKSAVKARTQTINQIRTLIVTAPSGVRDKLRGLSARDLIDTLARSRPTGELADPACAVRTVLRRLARRYQALSEEIKDADKEIGPLVTQAAPRLIALPGIGPETAGQLLTSAGDNPDRLRSEAAFAHLCGAAPVPASSGHTNRHRLNRGGDRAANNALHTIVLVRMKYDQRTQEYVARRTAQGMAKKDIVRCLKRFVAREIYRHLPHVTHTTEPLRQTA

SEQ ID NO: 137969 - protein, 407 aa, unidentified
MIFVGDDWSEDHHDVHISDGEGRRLASRRFGEGLEGIGGFHALVAQYVSEPGEVVIGIETDRGLWVQTLLASGYQVFVVNPLSLSRYRKMLHLGGGKSDPADAATLADMVRSYRHQLRPAASDTALAEGIKALARAHQGLIWERTRHTNRLRSALREYYPSALTAFKDLDHPDTLAVLETAPTPARGRSLTKPQIKAALRRGGRQRNLDQRTDEIQTALRSPQLETSTVIGDAYGAVTKATVGIISELNTGIGALKDELGTHFEQHPDAVIVRSLPGLGVILGARVLGEFGDNPNRYHDAKARKNYAATSPITRASGTTRVVSARWIGNKRLVDAINQWAFCSIKRSPGSRMFYDQRRAKGDTHNQALRALGNRLVGILHGCLKHRTIYDEHTAWGHRQPSLKHIAA

SEQ ID NO: 137970 - protein, 349 aa, unidentified
METILSIDLGKNKSVACIFDKKSFNAKFKTIKTTAAVLRELVDKVKPDIVLFEVGSSAGWIADMLNDMSVPFKVANTNHPAWKWRNNSKKTDRDDAYRMVAMYLNNSLPTVYIPNKEVRQKRSLVNYRQSLVGRITQSKNTIRSILSSVDISMPSGKKGWSQKSLEELKKIAINIQEIGSDEDFWQGELYAELEVLEKLCEQLKNITAKLNSLAEKDENIQLIKTIPGVGNRVAEAVVAILDDPHRFKSAKQVGSYAGLVPRCYQSGQMEKNGRITRQGDSLIRALLVQVSWLGLRYEWMREIFDRVQKGSKSRNKIAIVALARHILVRCWAMLRDGSKWHGSVAMVKK

SEQ ID NO: 137971 - protein, 371 aa, unidentified
MLTLLGIDPHKVSHQAVAVDANGAPLGRLQVKARPAGHAELLGWARREFPGPRLWAVEDERNMAGQLLRDLLAAGERVVTVPAHIAADYRKQGRRRGKSDAIDATAVARAALREQLPDLVLDEASRDLKMLTDHRTSLVEERVRLQNRLRDLLHQLDPDLAAEIPSGGLTRYCWLDDIIAAYTAQSGVSAAIVVDLAQACRDLTEKIKKLERQLTPLVTAAVPDLLAMPGCGVLTAARIVGEVAGVRRFRSEAALATYAGIAPLDASSGQQQHHRLNRHGNRLLNAAIYQLAITQLRIHPPARAYLERRIGAGNTWKVAMRALKRQLIRAVYNTSPAKPPHPQRPRLDKRDDIGETISARSGGRRRLRRRE

SEQ ID NO: 137972 - protein, 376 aa, unidentified
MENDSTVYVGLDVHKDSITVAYALGTDEVELPGKIGTTKTDIDRLCKRLQSKARHIRVVYEAGPCGYGLYRQLLQKGFDCMVCAPSLIPRKPGERVKTDRRDAVKLVRSLRAGDLSEVHVPTVEDEAFRDLARAWMTAKDDLRQARQRLKSFLLAHDVRYVGHADWGPAHRRWVSQYAFGSEWQQFAFEELRRTIEDRLAQCQRVEAALREAATTWRFYPAVLGLQAMRGVQFTTAVGMLAELGDLSRFDHPRQLMAWLGVTPSEHSSGDKRRRGSITKTGNGYARKLLVEAAWSYRHPARVSADIQRRHEGIPKAIVDRAWDAQIRLCRRYRRLAARGKNANTTVVAVARELSGFIWDIGRLAMSLALPRSTEAT

SEQ ID NO: 137973 - protein, 391 aa, unidentified
MRFVGIDIGAERHVVAWVDEQGTILQRPTAFGEAREGYQQLLTQLGSPAETLIVMEATGHYWQNLFAALAAEGFAIALINPLRTRRFAEEDLVRTKTDAIDALGLARFGQQKRPPATELPDLATRDLRELVRLRVRFLQDFGDRTRQLHRAVDLSFPEFTRFVVELDSPRATALLHAFPTAAAVRAASERQIATVRGGQRTVGRELAGALKAAAGTSVGQHHTEVYARQVRFFCEDLDLLRRRLAEIERDIEQLLTKHQVGQLLTTIDGIGPQTAARLVAELGDPAKFRSAAALTAYVGAIPGLRQSGKQSWDRAGLARCGHAKLRAALWMPTLVAVRCNPWLRAYYERLRARGKLPKVALMAAMRKLLVAIYVVAKHRRPFVPLVPMSAP

SEQ ID NO: 137974 - protein, 340 aa, unidentified
MKKLYGAFDLHSSNNYLGISDEKDRRVYKRRLPNQPDVILAELEPYRNELVGIVVESTFNWYWLVDLLMKEGYRMHLANPAGIQKYKGLKHSDDQDDTFWLAHLLRLGILPEGYIYPKEERPVRDLLRKRGHLVKLRTSLINSLQSIIHRNCGVKLNARKIKALRKNNVAPLLDGQEDLALSGIVSKEAIDYLGQQIRKVENLVLGKIKLKKEYLSLLTIPGIGKILALTIMLEAGPISRFQKVGNLSSYCRKVPTKWTSNNKKKGKGNKKNGNKYLAWAFSEAAEMARRFDDHARAFYNRKAAKKNFMVAHSALAHKLARAAYYVMRDQVAFDPQKLFA

SEQ ID NO: 137975 - protein, 331 aa, unidentified
MSSQSTAISSRPNWVGIDVSKAKLDVYELESAQAQRFTNDRKGIEQLHQRLMQLPQASVVCESTGGLERLAAETLSASGIPVSIINAAQMHSFAKASGVLAKTDTLDARTIARYGECFKPTPTVFASEQEQELKAWLVRRKQLSNTLTEEKNRLGQLTGQRQAGVRGQVEAHIEWLNAQIKAAEAKIEALAEQQAQWQADRALLMSVKGIGKVISISLLVHLPELGKATNKQIAALAGLAPFNRDSGNYQGKRSTWGGRAPARSALYMAAMVAVRYNPPIKAFYNQLLARGKTKKVALIACARKLLCCLNAMLKQRTEWQDERVTAFFTTT

SEQ ID NO: 137976 - protein, 428 aa, unidentified
MDEVNRNRLEEFRQLRQEIRHSEEYLIVGIDIAKDQHHAFFGTATGKTLLRRLVFGNDHEGFRKLLDQAEALRVAHGLKKVVYGMEPTANYHKPLGEYLINLGRTVVLVSGVTVKRNRESLDGRWDKHDVKDSANVADLISQGKCLYYEYPSAELRGLRGLLSLKRRLKKQEHSYRVRIRNHLIAQYFPEMDRDYERLGAVGLSMVRWCFPTSQITALDIEPFIERVTSRRIRMETRRRLEAIWETAGKSIGCDAVPGVEHEAKVMVEGLRQIREAIKETEDEIQDLCEQFPEYHCVLTISGFGPDVSAKVLGAIGDPDRFQNGKQVLKMSGLDLSADRSGKDSDKAIPEISKRGKADLRYALYQAALIATTRNQDFMRYLTNKIRGREKEKGIHRKLLVKLSAKMLLIAWTLMKKKEPFDPSYLKIE

SEQ ID NO: 137977 - protein, 342 aa, unidentified
MEFYVGLDVSLKQTSICVVDQTGLIVREGVVDSDPEAISVFMKSKAPDAVRIGLETGPTSTWLWTELKRLGLSVICIDARHAKAVLKMQINKSDRNDAIGIARIMQTGWFKEVHVKDIDSHSVRALLGSRALLVKIKRDLENQVRGLFKNLGLVIGRGTFNVFAVRAEELIEDRPELVAAVRPLLEARNAVEQQVRELDRKVTKLARRDAQVRRFMTVPGVGPVTALAFKATIDDPARFARSRSVGAYVGLTSRRHASGEVDWSGRISKCGDAMLRSYLFEAAGVLLTRVPKWCAVKAWGRRLAKRNGLSKAKVAVARKLAVILHRMWIDGTEFNWSKEIAA

SEQ ID NO: 137978 - protein, 433 aa, unidentified
MREVEDEPLFAERVAGLDIAKAGVEVTIRVPGDTAAGRRQQETRAFGATRAELESLGDWLRSWGVTKAGMEATGDYWKPVFFLLEARGFDCELYNAAHVKSLPGRPKTDRADSIWLAKIVERGMISSSFVPPEPIRRLRTHTRYRRHLTQARTSQKQRVEKLLEDGHLKLSSVISDIHGVSGRDMLNALVAGQRQPKALAQLARGTMRGKIARLEQALDCSFFTAEHAAVVAMMLTTIDHYSAQIQALTATIEALIEPYLRQAGQLDAVHGIGQVCAQDIIAEIGADMTVFPTAAHLVSWARWSPQVTQSAGKRKGSNATGRGNPYLSAALGEAAISAGRTQSFLGARYRRLAKRMPKKKALVATGNTMLTIIHTLLSDPQASYHDLGADYYEQRMHTRRQARNHIRSLQRLGYKVTIQPINPGTGEPIPATG

SEQ ID NO: 137979 - protein, 339 aa, unidentified
MTLYTGFDLHSNNNYLGIIDNYGKRIFKRKLHNQPEQILNTLNPYQHDIAGIVVESTYNWYWLVDLLMENGYKVHLANPSAITPYKGLKHCDDNHDAFWLAELLRLGILPEGYIYPKEQRPFRDLLRKRGHLVKTRSSLIISLQNIISRNCGHRINVNDVKRLKQDMVHPLLQDNEDIALSGKASKETIDFLTRKIRDIESAIEKKAMLTSNYRHLLSMPGVGKILGLTIQLESGPIERFPKAGNYVSYCRKVNSKWTSNGKQKGKGNKKNGNKYLCWAFSEAAELARRYDESVRSYFNRKMHRTNRMVAHGALSHKLAKAAYYIMRDGVPFDSAKLFS

SEQ ID NO: 137980 - protein, 308 aa, unidentified
MSYVGIDVSKDRLDVHVAPAGEVWQVSRDAAGLDELVAKLAGLTPECIGVEATGGYETVVAATLAAAGLPVVVLNPAQVRHFANALGKRAKTDPIDAAVIAQFIKATTPAIRPLPDEATRMLADLVTRRRQIIAMIVAERLRLKRASNRRLIKSITRLLTALQKELSDLESGIDEAIKASPVWKAKEDLLASIPGIGPATARTLIAELPELGTLDRRQIAALVGLAPWTRQSGKWRGKSVIGGGRAQVRSALYMAALVASRYNTVLKAVYQRLLSAGKAKKVALIAIARKLLIACNAIIRTQKTWQSA

SEQ ID NO: 137981 - protein, 416 aa, unidentified
MWLTMDVIHQRCAGIDISKADVKVCIRVPGHGTRRRTEVRTFTSMTRDLLAMRDWLLSEQVTLVGMEATGAYWKPIFYLLESQVECWLLNARHMKTVPGRKTDVKDAEWIAKLVEHGLVRPSFVPPQPIRRLRDLTRYRTEVVRERTREAQRLHNLLEDAGIKLTSVLSDVLGKSGRAMLEALITGQRDPQALAELALGRLRGKCSTLIEALTGNFTDHHAFLARAMLDRIDTATAMQTRLNTRIDREIQPYRRRIELLATIPGVSEHTAQTILAEIGTDIARFPTAGHLASWAGVCPGNNESAGKHSSGTTRPGDPWLKGVLGQAAISAARGKNTYLGARYRRLMARRGRKRALVALQHSILIATWHMFTNDLTYRDLGENYFLERAGKARATRRLIGQLNHLGYQVNLNPLAVT

SEQ ID NO: 137982 - protein, 353 aa, unidentified
MRTYYVGMDVHRATIAIVVVNGAGKVVEQLVVETSAMRVRSYLKQLKGRVYVTFEEGTQAQWLYDVVQPLVTEVIVCDPRHNKLLKAGNKSDRIDAQKLAELLRNGSLKAVDHRDHGVRALKELVRNYDCLVSDTTRVMNRLKAMFRGQAIACGGHEVYRQDRRELWLSKLTERGAKERASSLYRQLAALQALRHEAKLAMVREARRSAAYLWLMSVPRLGAVSVAQLLAVVGTPHRFRTKRQFWTYIGLAVVTSSTADMEVVDGVLRRSRRPVATRGLNRNHNHLLKRVFKNASRSACQHEPFQQHYELRLQQGMDPALARLTVARQLSAITLSLWKRGEQFQAERMKRQAA

SEQ ID NO: 137983 - protein, 419 aa, unidentified
MRAHRNCCGLDVHKKIIAACLLTEDAEGNNVTEKRLFGSMTRELHALAQWLCAAQVTAVAMEATGVYWMPVWNVLEHYGLQLLLINPEHYKAVRGKKTDLKDGTRIAELLQDGRLAGSYVPPVAIRVLRDLTRYRTKLVQHQSAIANRIQKLLEQCNIKLASVASDTLGVSAMAMLRALAQGETDATRMADMAKRQLRKKIPELQLALEGCLLPHHRLLLSEMIEDLDHVGAKITRIEQTIEQQMRPFQKSVNTWLTVPGIKHRLAWTLVAEVGPTVEAFPSAADMVSWAGVCPGNNQTAGKRKSGTTRAGNPWLRRALCEAAWAASKSKGTYLQAQFRRLAALRGPKRALIAVANSILTAGYYMLQRATTYQELGPDYFDKRNTLRTTNRLVKRLEALGHRVTLQPRFTAYAPQASGT

SEQ ID NO: 137984 - protein, 341 aa, unidentified
MEKVSIVGLDIAKNSFHAHGAAEDGSKVFSKALPRGRVLEFFGRVEPCIIALEACAGAHHWSRELSGLGHDVKLIAPQYVKPYVKRQKNDANDAAAIAEAASRPTMRFVATKTTAQQGQSMVLKTRDLLTGQRTQTINALRGHLAEHGIVAPKGPQHLPRLERDVAENAERLPADVTSLCQMFFDMIDGLSERIDELTRRLRQIARQNDVARRLMTMPGIGPVTAVSIAVLAAPPEVFSKGRDFAAWIGLAPRQHSTGGKTRLGKISKMGQRDLRRLLIIGAMSAIQATQKRGGAPEGSWLARMLMRKPKMLVAVALANKMARMAWAIMAHGGVYKKPANA

SEQ ID NO: 137985 - protein, 342 aa, unidentified
MNHSKRVVRLGMDMGKNTFHLVGVDETGLPAVKKKLRRKQVLTYFANLPACLVAMEACCGSHYWAREIGKLGHDVKLISPQFVKPYVKGNKNDYNDAEGICEAAGRPNMRFVTVKTVEQQDIQGLHRIRQSVVKQRTALANQIRGLLGEYGIVVGYGISQVRCRIPEILEDGENGLTDRFRGWLAELLESFRVLDERIKQYDGEVQQAYATNQACRRLGVIEGIGPQIATAVIASYGDGKQFRSSRHFAASIGLVPRQHTTGDRPVLLGISKRGDRYLRTLLIHGARATIRWMEGKDDRRSRWLQALVARRGKNRAAVALANKNARIIWALLTRGECYRATA

SEQ ID NO: 137986 - protein, 463 aa, unidentified
MAAVMIGVDPHKASHTAVVINAAEEELGELRVRACAGQAERLLAWAAAWPQRTWAVEGAGGMGHLLAQQLLSAGERVLDVQPKLGARVRLLAAGDVNKNDPNDARSVAVAALRSPGVRQVRAEDHAAVLKVWSKRYRDLGRARTQVVCRLHAVLCELVPGGISKAITAGQAAQLLGTVTPPDSVAAARCELAADFTDDLRRIDAQRRAATKRLATAVQAAGTSLTSLFGVGPVIAAAVLGDVRDVSRFQDRDHFAAYNGSAPIEVSSGPRRVYRLSRRGNRRLNHAVHMAAVTQIRYRHSKGRAYYDRKLAEGKTPKEALRSLKRQVSNAIFACLRADAQRTAARGKDPGGQQGNGSDASAAGLHPRDRLFGKATPGSRHHTTTAASSPGTPGLSSTAAIPSPPAKPRVQVERPQRSEDERPGGAARRRPHSATRKVPGQDPLVNTHSPKDTSHTRRKTGRTP

SEQ ID NO: 137987 - protein, 347 aa, unidentified
MRFYTKQHKYYCGIDLHTKKMYVCILDGEGQIRLHQNIKTEPESLLRILTPFREDVVVAVECMFTWYWIADLCIQENISFVLGHALYMKAIHGGKAKNDKIDSHKIATLLRGEMLPQGYVYPVKMRATRDLLRRRNHFMRKRAELFAHIQNTRSQYNLPDPLGCIAKPQNREGIVERFDDPSVQKSMAANLEMIKAYDHTLTQLEHDIIASAKEHDLRSYALLQTIPGVGRILALVILYEIESIERFPSVQDFVSYSRLVKCIKESNGKSYGPSGKKIGNAHLKWAFSEAAVLFLKGNEPGKRYLERLAHKHGKAKALSILAHKLGRAAYFMLKNKEAFNQKQFLNL

SEQ ID NO: 137988 - protein, 390 aa, unidentified
MRFAGIDVGSEHHTIAIVDEHGDPIQRSLSITEDADGYRRLRDVLGDPTDCLVAMEAPGHYWRNLFASLTTDGFTIALLNPIRTRRFAEEELQRTKTDNVDALGIARFAAQKRPKATQLPHQATQELRQLVHLRRQAIQHLGDRVRNLHRAIDLTFPEFTRYVRGLDTELANAILSRYPSALSLAAVTVTKLAKLCFDGRRRVGPTLARALIAAKQSVGSLQTAPFELEVRYACQDICEMRERCRQLEGDIQRRIDSHDLGKLFTTIKGISTLTAAAIIAEAGDPARFPNAATFASYVGVVPRLHHSGKRKFSGNGAIPLGNARLRHALWMPVLVAIRVNPWLRAYYQRLRAVGKRPKVAIVACMHKLLAAVYSVAKNRRPFVPRLSADL

SEQ ID NO: 137989 - protein, 349 aa, unidentified
MSQTVQTAVSTVGIDIGKNSFHIIGHDDRGAIVLRQKWSRGQVETRLANMPPCLIGMEACVGAHHLSRRLKALGHDARLMPAKYVRPYSKGQKNDFRDAEAIAEAVQRPTMKFVATKTADQLDLQALHRVRERLVSQRTGIINQIRAFLLERGIAVRQGQRFLRAELPRILATPPDVLSPRMARVIEDLTGDWRRLDGRIEGLSAEIGMLARADSGCERLMSVPGIGPIISSAMVAAIGAGDAFTKGRDFAAWLGLVPRQMSTGDRTILGKISKRGNRYLRVLFVQAAWVVLIKPKSWERHGLKPWIEAAKKRLHHNVLAIALANKLARIAWSVLARGRGFEASKLQVA

SEQ ID NO: 137990 - protein, 388 aa, unidentified
MPQSNDLSRSFTALNQDNTLIVVIEMGQSSWLVAGMVPGVERQPLKKLDPEEDQLLKLINRWRHEALQAAHAIERVVVAYEAGRDGFWLARWLRERGVEAYVMHASSIAVSREHRRAKTDRLDTELLMRAFLGWLRGERRHCSMAAIPTIEEEDAKRPNREHEKLVGDRTRIVNRMKSTLSRFGIRGFKPTLRKADEKLGELRTAEGTLLPENTRAELRRDMTRLRIVREQLKEIEQQRLRKLEAAAPAKKDPHAMVGLIARVTGIGIETADMLVNEILSRHLRDSKAVARYAGLTGSPDESGKRRREKGLARAGNARVRRGMIQLAWRFLRFQKDSVLAQWFRARAADGRSGTRKTMIVALARKLLIALWRMTTTGEIPEGVILRVA

SEQ ID NO: 137991 - protein, 282 aa, unidentified
MAHAVIGIDVAKERLDVALNVSQHMLFTWVENDPAGYQRLVTWLHKQRVVQAHVCLEATGQYSEGVAEYLYLQGYLVSVVNPARIRHYGNSKLRRNKTDKADAELIAEYGLRENPPLWCPPPASFKHLQALIRHLDDLQVSLTRETNRLSSGVRTPEVIEHLKTLIDVLKQQIQQTKSMIQEHINQYPDLKKKQLLLMSIPGIGALTAAKVLGEVREVTDFDDARQLSAYAGLTPRNFLSGSSVHKKSRLSKTGNSNLRKALYLPAISAKHHNRIVREFCAR

SEQ ID NO: 137992 - protein, 345 aa, unidentified
MAEVTTIGLDIAKHVFQAHGVDADGHKVFSRRLTRAKVLEFFSAQPRSLVALEACGGAHHWARELAKLGHDVRLIPPAYVKPFVKRNQNNDANDAEAISEAAQRPNMRFVAVKSEEQQASALVFRTRDLLVRQRTQLINAIRGHMAEYGWVAPKGRMWMASLREVIDSDNSLPVAARDMLRVMLVMLDGLDGLDFQIADLDKEIARRAREDEDVRRLMTIPGIGPIAATAICALAPPAETFARGRDFAAWVGLTPLQKSTGGKPRQRRTTKMGERTLRRLLIIGASTLIRHASKKGPTEGGWLASMLTRKPRMLVTVAQANKTARIVWAVLTKKEDYRASVAAAV

SEQ ID NO: 137993 - protein, 355 aa, unidentified
MTGTKYIGMDVHKESISIAVRNSAGKVVMECVIETKASMILQFIDGLRGDLHVTFEEGTSAAWLYDLLKPHVTKLVVCDPRKNKSMREGNQNDQIDARRLADLLRLDHLTPVYHGEHGLRTLKELVRSYLTVTKDLARVMTRVKAIYRSWAIPCTGKQVYARCHRAEWLGKINEPGVRRRAEFYYLQLDALRVLRQGVRRDLLVESKKHKAWKRLCQIPAIGPIRAAVLLGILQTPHRFRTKRPLWKYGGLAIETHSSADHRSVNGQLQRAKRQVSVRGLNRDCNHDLRNLFKGAAVIASSKPGPFQEFYAALLAKGMRPEMARLTLARKIATIVLIVWKKGVCFDAQHLKPQTA

SEQ ID NO: 137994 - protein, 374 aa, unidentified
MSKVRFLGLDVHADTIAAAIAEPNGEVRQLGIIPNRLESVRKLVNKLQPVSSLRACYEAGPTGYVLYWQLTALGVACEVVAPSLVPTKAGDRVKTDRRDAAKLARSLRSGDLTAVWVPDPAHEALRDLVRAREDAKQDQTRARHRLGKFLLRHEKRPEGTMKSWTGKYMEWLKRQVHFDQPALEATFLDYVHEVSHQAERLSDLEKAIDTAIAGAPVQIRAVIEALQALRGVAKITAVTIVAEVGSFSRFENPRLLMGYSGMVSSEFTTGNRIRRGSITKTGNAHLRRVIGEAAWAYQRRPWVGGFLAKRQHGLDQQVKDIAWKAQGRLHSRYTKLTAKGKNKNQTVVAVGRELLGFIWAIATQTEAKYQRQAA

SEQ ID NO: 137995 - protein, 400 aa, unidentified
MLSIGIDVSKGKSTVCGMKPGGEIVYAPFEVQHTIEGMSELVSLLRSSGEEVRAVLESTGSYHCPVVAALLENGIFVSVVNSLRMKRFCSQSIRKVKTDRIDAMQIALYGLAYWQELQPARLPEDTYRELQLLARQYYQMTSLLIKAKVDFNAICDQVLPGMQELMSDHAGRHKLSDFVLRYRHTTHILEMGETRFRKDYCKWAEKKGYRNCERMAALIFATAQNGIPVLPNAPSTQIVITEAIRVLHTVEASRDAILTQMQALAKTLPEYSLVREMPCIGDTLAPRLIAEIGDVRRFHSKRALIAYAGIDAPPYQSGKFCANNRHISKRGNRYLRKTGYEVMQSYVMHKPANDPIFTFIEKKRGEGKSGKLAMVAGLNKFLRVYYGKVTELYRSLPTIE

SEQ ID NO: 137996 - protein, 404 aa, unidentified
MVKYHVGIDVSKSSHKACIYNLAQDSYSGVFSITINLQGFEKFLGTLSKLSKNKDDFLIGIEATGNYGITLAYFLLSRGYQLVEINPYRANQFRKAQGKKAKTDRIDARSLAALISLGDHKSLNIPAPMIDNLRELTRFRADMVNDRATLLNQLHETLSTIYPEFKQIMVRLDSPTCLALLVAYPGPEYISHAGESSVTATLSVSSRDKIGKAVARELVESAQRTVGVLQRQPALATKVSILGERIIGLTETVHRVEKQIRDLFSQLPYKPSDFPVGDITSLATLISEIDDIHQFANLKQFLSHFGWCPQNRQSGNYNLEHPRMSHAGNSYVRRIIWMLSIVAIRTIPRYRDYFERRAKEGKAKMHILVAVGRKLLSVFYAILKKNTHYDPEWEVNSHLALART

SEQ ID NO: 137997 - protein, 356 aa, unidentified
MSREVKYIGMDVHKEAIVIAVLNSSGQLVMESIVETKASSLLQFIHGLQGELHVTWEEGTWAAWLYDLLQPHVQQVLVCDPRRNALLKEGNKSDKIDARKLADLLRTGMLRPVYHGEHGLRTLRELARSYQTISKDLIRVMNRIKALYRGWSIPCAGTQVYAPRYREEWLHKIEQVGVHRRAELLYQQLDGLQTLRRTLRPELLAESRKHKAAKLLRQIPCIGPIRAARLIALMQTPHRFRSKRQLWTYSGLGIETRDSGQYRFVRGQLQRAKKPQQIRGLNRNHNHEMKEIFKGAATRASCGVGPLRDFYVALLDKGMKPEMARLTLARKIAAIALTLWKKGERFDAEQLKTQAA

SEQ ID NO: 137998 - protein, 359 aa, unidentified
MDAQEGAVRHIVGGVDTHKDLHVAAVVDEQDRVLGTRSFASTRQGYRQMLAWMRCFGQIQRVGVESTGSYGAGLLRFLQQAGIAVLEVTTPDRQDRRRRGKNDDFDAQNAAHAAFAGIRTVTPKSRDGMIEALRVLSACRKTAVAARRIALQMIQNTIVCAPESLREGLRRMTRMQLVRTLAAWRPDLTAYRDVEVAYRISLKSLARRYLELHDEIADLDAMIAAIVNELAPNLVARNSIGHVGAAQLLLTAGDNPERLRSEAGFAALCGVSPVPASSGKTARHRLNRGGDRAANSALHIIAIGRLRTDARTQAYVAKRIGEGHSKMEAIRCLKRYIAREVFILIKQRQREINQTRIAA

SEQ ID NO: 137999 - protein, 366 aa, unidentified
METIYIGVDFHARQQTICYLKTETGELVISELKHQDKEQLRAFYQRFPGPLIIGLEASGYSPWFEALLEQLGHEVWLGDASEIRRRARWRQKSDRRDAELIWDLMVHNEFPRLHQPSAQSREVLRMLRYRQKLIKVRTMTKNSLQAIALQAGLAKGKGLFTRDGQAEFKFVAMSPALQWQRDHWLDLLKPLNQQLLETMVWFKAQSKDDAVISRLRTHPGIGLLTALCLWHTLQPISRFRNQRKVVAYAGFDPMVRSSAERAIYLGISKAGSRMLRYLLVEAVHTAVRYDDDLKRFYKRVAERRGRPKAKVAAARKLLIRAYIMLRDEIDYAEFRRRAVAVDLPEEVKGQAKVPEVLIGQSASPGA

SEQ ID NO: 138000 - protein, 328 aa, unidentified
MNVIGIDVSKQKLHCTLLREQLPDKKLDKVVANNVEGVKLLLSFASKKAKLAATDLLIVLEATSTYHEVAAEALFHAGCKVIVANPAQARNLAKGLGIRNKNDQIDALVLAQLGQQCHNKLRLWQPPPAEYKQLKQLQARKQALETDRQRESNRLEKLHATYTEAFILESSERMLQHLDHELVLVNEAIDTHIQTHPELEHDRGLLRSIPAIGTVLSTLLLAILQRNRFQSARQAAAYLGVVPVTEESGTSIKKRPRLSKTGNPTIRAKLYMAAVVATQHNPDIKLFYHRLLEQGKSKMSALGAGMRKLIHICFAVLDKQTEYSPQIA

SEQ ID NO: 138001 - protein, 345 aa, unidentified
MENMYYIGLDVHKKTISYCVKDGGGRIYAEAEIPATRLGLDMWMKTLPQPWTAAMEATIFTAWIYDHIKPHAVAVKVAHPLMLRAIAAAKKKNDRIDAHKIADCLRCDFLPECYMASTEIRERRRTLRYRNLLVRQAVQMKNKIAVLLMEAGVSYNKQKLHKVGYFRELLATNPDIDEGLKPLLRLCRETVVRLGKTESALVRSLQRDSLLMERVGRLMTIPAVGPITALTWALEVGDVQRFSSIKKAISYCGLCGAENSSANIIKRTPLSKQRNKHLQTTLIEAAKMAPRNSPELAMIYDREKQKGNANRATLAVARKLVAYLVAVDRRQKDFLIVERENRTAA

SEQ ID NO: 138002 - protein, 342 aa, unidentified
MEITTVGIDLAKSIFQVHAIDAAGQVVVRKALRRAQVVPFFAKLPRCLVGMEACGTSHHWARELMRIGHDVRLMPPAYVKPYVKRGKTDANDAAAICEAVTRPSMRFVPVKSTEQQAALALHRTRDLLVKQRTQLVNMIRGLLAEFGIEMARGLRHALELAARLSAGDAAEVPPLAQRVVTGLADQIGAVQIQLTRLEKELLAWHRDNDLSQRLATIPGIGIVSATALAASVSEPERFRSGRQFAASLGLTPLQNCSGGKERLGRISRMGDRYLRRLLVVGMTSLIRRAKATPTSVDPRLPTLLQRKPVRVVTVAAANRTARVAWAIMTRGGTYRAPAATAA

SEQ ID NO: 138003 - protein, 320 aa, unidentified
MSDRFAVGIDADSRTLVVAYHGTKGSFRIANSASAINKWLSSLPAKSRIGVEATNRYHELVVQAAQKAGHAVFVLNPRDIKHYAKGVACRGKTDSGDAQVIARYIAKEADNLHEHVARSPAQEQLHLLLQQRDSLVRNKATLRLSLGDDAADSAIFGRIFRGLKEAIAMLDREIQRLCSSGEQRDLYRRIMTIPGVGPTVAAFVTHHITRWPLASSDAWVACTGLDPRPNESGARIGRRRLSKRGNAGLRQILYMAAMGLTRSKGGKPLYLAIRERGHSSTASFNILARKLARIAWGVFKSGQNFDPAMLKVGQVCFQQA

SEQ ID NO: 138004 - protein, 360 aa, unidentified
MLYLSIDQHRKQLTVNLRNETGDVIVKRQVSTEWKRVHAFFMELGERSRPEGGFVAILEVCGFNDWLLKRLEEYGCRETILIQPEKQSRKKTDRRDANALGEVLWVNRHRLLAGTKVQGIRRVVLPTEQEARDRQLTAWRQRLGQSRTRSINRIKRLLRKHNLEQECPTKGIDTIKGKQWLAQVSLGQIDRREMDQLLAQWKLEDEQVEQVEVEIRRRQAENPVAALIATIPGAGAYGSLALASRIGRIERFPRSKSLASYWGLTPGCRNSGEATDRLGSITKQGSAMARFILAQITLHVLRRDAGMRTWYQRIKRRRGAKIGRVAVMRRLATIIWHMVKYNEPYAIGGPQRKQRQPQLA

SEQ ID NO: 138005 - protein, 481 aa, unidentified
MKTKPPEKIQQATNPSTRGHWNKMNRKQRREMMRQIQSEDLSLEVVHPHAAGIDIGNESHYVAVPPTRDSQPVRHFGCTTVELKALAEWLKQCGIQTVAMQSTGVYWIAVYDILETAGLDVYLVNARDTKNLPGRKSDVQESQWLMKLHTYGLLRNSFRPSQEIRTMRTYWRQRNDLIRAAVSHMQRIQKALTQMNIQLGNVLSDVSGVTGQAILKAILAGERDPHKLAALRDPRVKASEEQIARYLEGNWQEDLLFVLKQEQAGYEFCQQQIAECDRQLEQYLQLREDRSQGASLPQEMRKGRLVRKKGNKPVFALRAELFRITGTDLTQVDGIDVVTAATILSEAGWDMSKWEDEHHFVSWLRLCPDNRISGNKVLGKGRLPTNNRASIALRMAASTLRVSNTYLGAQFRRFRTKLGAPVAIKAMAAKLARLVYRMLRYGMKYVDQGAKIYEAQHRQRQIGQLKWNAAKLGFRVVEAAT

SEQ ID NO: 138006 - protein, 396 aa, unidentified
MDRAWAGVDVGKQHHHAVVVDDQGTRVLSRRVANDQVALVELIGRVTELAGAVTWAVDLHSSEAALLVALLLAHDQTVVYVPGVMVNRAASAYRGAGKTDAKDAYVIAEQARMRRDLQVLRADDELIVELRLLVARRQDLRADRTRAVNRLHDRLVAVCPALERVLDLGNRGALVLLTGFQTPAALRAQGVAGLEAWLGSHKVRGAGKLAAAAVDAANAQTIRLPGEQVAACLIADLAEGVLALDEQIKQVDELIQGRFRRHPAAEVILSLPGMGVLLGAEFLAATGGDMAAFGTPDRLASLAGVAPVPVTPGRVVGNLHRPQRYHRGLQRVFYTSALISIRCCPESRAFYDRKRAEGKRHTQAVLALARRRVNVLWALLRDQRCYQQTPPEPKAA

SEQ ID NO: 138007 - protein, 342 aa, unidentified
MDVQVLGIDLGKNSCSLVGLDTAGRVVVRRRMRRESIAAFAAKAPGCVVAMEACCGAHHLGRQLALQGHEVRLMSPEYVRPYVKAQKNDDRDAEAIAEAATRPTMRFVALKSEAQLDVQILHRARDRLVSQRTALTNQMRSLLLERGITVPQGRRKLQEQLAELFAEEASSVSARIRRLLADMLEQWRLLDERIAAFDDEFAAMARTDPAARRLATIPGIGVLNATALVAAIGTGETFGRGRDLAAWLGLVPRQVTTGGRPKLLGITKRGSKYLRKLLIQGARAAMPTLARMTTPLGSWLRGLLARAHGNAVVVALAAKLARVAWSLLRHETDFAVMRPAAA

SEQ ID NO: 138008 - protein, 350 aa, unidentified
MMIIGCDLHTRYQQIAMVDTDTGELVERRLEHESGEARAFYAELKGAVRVGIEATGHTAWFEALLAELGYELWMGDAAKIRAAVVRKQKTDARDAAHLLELLCANRFPTIWRPSLEERDLRQLLWHRQKLVWMWGAVKNQMHALAMGEGVCRKKKLFTAKGRTELEGLKLGPWASYRRQELLRMFDELQSSVKKLDQAVEIAARSEPLAARLMTHPGVGPITSLAFVLIIGPVERFDRSKQVVSYLGLNPQEHSSGGRQRLGSISKQGNPMMRSLLVEAGHTAARLDPQLRRVYQRLKFRRGAAVAKVAIARKLAVRLYWMLRSTADYAQLVRMRGSSWATLVEDSPSLG

SEQ ID NO: 138009 - protein, 465 aa, unidentified
MKKTRKKTQRSMSKKNLVTSGGRVVEARASGELNRVNEHAAGIDVGGERHYVAVPPGSTEHPVREFGVFTKDLYAIADWLRECGVETVAMESTGVYWVPLYEVLEERGFKVKLVDARKVKNVSGRKSDVLDCQWLQQLESYGLLQAAYRPADEIVVLRSYVRQREMLVKSAATHIQHMQKALQQMNLRLDNVVSDITGQTGMRIIKAVLAGERDAKKLGEMRDFRCHASAEEIAQSLVGNYRQEHLFSLKQAVELFEYYQEKIAECEAEMEKYLANLPHVTEEEPPELPFKEKRNLMSFNVQDHAYKMLGVDLFRIRGLNSETVLRIVSEVGVDLKAFPSEKHFASWLCLSPNRRVSGGKVLSSHTNPSSNRAAAAFRQAAVSVKGSQSELGAFYRRKRSQKGPASAATATAHKIARLYYSLVKNGTEYQEQGARAYEERERERVVANLKKRAKSLGFELVAKAA

SEQ ID NO: 138010 - protein, 338 aa, unidentified
MSLYAAIDLHSSNSVLAVMDGDGKAVLRCRRPNDLPRLLADLAPYRDELVGVAVESTYNWYWLVDGLMDHGYAVHLVNTTAIPQYDGLKHGDDDSDALHLAQLMRLGLLPEGYIYPREQRGTRDLLRRRFSLVRQAVRLMLSIQSSFSRSTGQQLSANQLRQLATSQLVDLFPELSTRYGVLIQFKLWLTLQDQITALERWIRKDLARPDLLMRLQSVPGIGPILGMTILLESGAIERFASVDDYASYCRMVESVRLSNGKRKGHGNRKCGNRYLCWAFMEAANYAVRFDPLIRRWYERKRARKHRVVAIKAVAHKLARACYHMLHEGTTFDLTRAFG

SEQ ID NO: 138011 - protein, 326 aa, unidentified
MEHELHYIGIDTAKEKLDVDVLLPDGRHRTKKFANTTKGHDELVSWLKGHKIDHAHICIEATGTYMEPVAECLYDAGYIVSVINPALGKAFAQSEGLRNKTDTVDARMLAEFCRQKRPAAWEAPHPLERALRALVVRHHALTDMHTQELNRTETAREVQRPSIDAHLLWLEAELKRLEKQIKDLTDDDPDMKHRRKLLESIPGIGEKTSAVLLAYIGLKDRFAHARQFAAFAGLTPRRYESGSSVRGASRMSKAGHVSLRRALYMPAMVATSKTEWGRAFRDRLAANGKKGKVILGAMMRKLAQVAYGVLKSGVPFDASRHNPVAA

SEQ ID NO: 138012 - protein, 412 aa, unidentified
MNQDKLYVGIDVSSKNNVCYLMYSDGSKHSSFSVPNNRNGAKIIVDRVTSVLLLQDIPQVVIGMEATSVYGDNLMRFLRESGSLGRFERSLHMLNPKQVKKFRDAYSDLPKNDHVDSYVIADHLRFGRINKEVYMDDYKYQALKMYTRARHQLVQELTREKQRFLNTVFISFSGLTQEKIFSNKFGATSMALIEEFSSLDELAYMSTDELVDYIRKKGKNHFENPEEIAEAVQRAAKNSYRPPQVIADAAKQMLAISMNTIRLLQKQIKEYDKAIEKMLEAFPQTLTSVKGIGNIYAAGIIAEIGDINRFPSQASLAKYAGLVWTQHQSSDFEAEDKRMIQGGNHHLKYYLCEAANALRRCDPEFKRFYALKYKEANKHNHKRALALTARKLVRLVYTLLKTNRLYIPPEEY

SEQ ID NO: 138013 - protein, 406 aa, unidentified
MLNAVGIDVSKGKSTVAVMRPAGEIVRKPFNVQHTSEDLSDLVSYVESLPGDTRVVMETTGHYHEPVLNAFLDADIFVSALNPKLIKLHDSDENPLRKVKSDPADAKKIAQYTLDKWQFLRQHSAMDTIRAQLKTLNTQFDFFIQQKISLKNNLISLLDMTYPGVNELFNSPVRSDGSEKWIDYAHSFWHADCVRKIGLAAFTKRYQNFCKHHGYNFQPSKPKELFDASKKLITTAPKDRTYKMMILSDIEQLDSVSAQVEKLRAQLDELASTMPEYQTVMSMYGVGHTYGPQLIAEIGDISRFDHRSAITAFAGVDPGVNGSGKVVQESNQASKHGAPRLRKTLFQIMSTLLQCAPADDPVYLFMMKKKAEGKPYQVYMTAGANKFLRIYYGKVKECLAAQNSEN

SEQ ID NO: 138014 - protein, 312 aa, unidentified
MYYIGIDVSKKDLSVFDGKKDLKFANKEGLKSFKKYLKKKYHLQEIVIIFEPTGIYSFYLKEFCAENSIKAYIVNPKQSHNFTRALGKRSKTDKIDAQILYQFHKHIDLKDIKVPKIDQQAKTLASYLVSYEFALKQRISLSNHLESLRDKRLIALLKKDLKRAKKLEDKLFHDILEYVSKNQNLREDFQRLLTISGVGDKTAIALLTLFKTYQGTNRAQITALAGLDPIKRESGTSVKYKVKISKNGKGVYRKIFYLPTICATIHNQKIRVFYQRLLANHKIKKLAIIASMRKLLLIAHAMYRDKTEYIAA

SEQ ID NO: 138015 - protein, 337 aa, unidentified
MDRIRVFVGLDYHQLSVQVCVLDASGRVLHNRRCSNDWRAVVKRVEAFGLVVRVAIESCAGAADLAEELVHRAGWSVDLAHPGFVSRMKQNPDKTDFSDARMLADLTRVGYLPRVWLAPAEVRELRRLVRYRQQLVDERRNIKLRISALLRDQRIMNAPARRWTLAWVHWLRETDDFGEHSRWIVDRHLARFGSLVEDIRQVESRLEQTTRDDLVVSRLMSYKGIGAVTAWVLRAEIGRFDRFHNGKQLARFCGLSPRNASSGERQADAGLIKAGNRQLRATLIEAAHRLIRFDPRWMMFADRLIRKGKPKCVVVAAAGNRWVRWLFHQMQPETLAA

SEQ ID NO: 138016 - protein, 342 aa, unidentified
MQITTIGLDIAKHVFQVHGIDASENVVVRKQLRRSQVLAFFKALSPCLIGMEACATAHYWARELTTLGHEVRLMPAKDVKAYVKRNKNDAADAEAICEAVRRPTMRFVQAKSAEQQGRLMQHRTRDLLMRQRTQLINALRAHMAELGIVAAQGREGIKQLLTIVASERDARLPVDAHASLVVLAAGLQAVQTMIGSIERRIIIQHRSNEASKRLKSIPGIGIVGATAITATVPDPRAFRSGRDFAAWIGLVPRQDSTGGKQKLGPISKQGDQYLRRILVVGAHAVLKRARHQPEKYPWLTRLLARKPFRVAAVALANKMARVAWALLAKGGTYRAPALAAPA

SEQ ID NO: 138017 - protein, 262 aa, unidentified
MSSETVIGIDLSRDWLDGFCLPEKQRFRFQNSPDGHARLLEILQSMPDDLKVGFEATGGQEWALWRVLISMGINAVQLPPALIKAFACSMGKRAKTDQIDAELIARFMAFRPEAGRTLPDAKLQILRALTVRRAQMVEARKRLSAQISARRKQGVSAELEEMDSSLKAFLESQISELEHRIEGVIAEAAELSAKAELLRSILGIGPVSVAMLLAEMPELGRMTATEAAAVTGLAPMAHDSGVMRVKRNPRSPTTITPSPFRD

SEQ ID NO: 138018 - protein, 381 aa, unidentified
MDQQLIRQCVGIDISKESFTACVCSYYRSGEEQLTEVVEFKNQKTGFNQLVKWSRKITSASVPVGFVMEATGVYYEALAYHLHRLNQPVSVLLPNKVKYFAKSWNVKTKTDIVDARIIARMGAERKLSLWEPPLPIFKQLRDLTRAYSELMKEKTAFSNRLHALNSSYEPLALIVKSNKSIIKKLDEQLVRFKAEIEKVIYSESWLAEKVKKVLTIKGVGLTTVAVILAETQGFEFVDNIRQLCSYAGYDVVQRESGTSVQGKTRISKKGNSWIRAALHFPALVASRHNENLKNTYLRINEKKPSKMIGATALQRKILVLIYTLWKNDTVYDEAFEKKRKADRSEVHKKTLRQNKTKAGRSINNLPAQDELKVKDLLSSLV

SEQ ID NO: 138019 - protein, 325 aa, unidentified
MQGKEASEQETRKCTAGIDVSKSWLDAHVLPSHESLRVANTREGIRKLKRWLLQRGPELVAVEATGRWHRELCRSLTASAVAVAVTDPYRVRNFARAQGIFAKTDQIDARVLAMFAAMMTPACRAPAPQTLVAMQELVTARASAVAEQTALKNQLSAATESFLKRQLTRRIAQLKVHITALEQHCHKSINSDEGLARRHAILTSIPGIGAVVATTLIACLAELGSLNNKQIGALAGLAPVPDDSGKRLGVRVIWGGRGHVRKILYLAALSAARCNADMNVFYRRLIANGKSPKETLIAVARKLVLLANTLITQDRTWQSHAPHNA

SEQ ID NO: 138020 - protein, 330 aa, unidentified
MNYLFVGVDISKEVLDYAIVDQTHKRVVDQGQVENNMEGINEFIKQLKKLQINTTVWVCAEHTGRYGDLLVARMENKELRYSMVNSIEIIRSSGMVRGKSDHIDAKRIGTYAATHYHKLKPTTSPSQTIRKIKVLLTSRDQYVRYRTAMKNALKALEITSETLDLKKEIKCRKKEIKTLKQRVKDLEQEIVELIKSDYQLDENYQKTTQVTGVGPIAGAKFLVTTNNFTLFDNPRKFSCYCGLAPFEHTSGSSVKGKAKTSKLRNKDMKGIMFNAATSAIQYDQQLRTYYKRKIKQGKHKLSVINAVANKLVLRVFAVVNREKPYVNFSI

SEQ ID NO: 138021 - protein, 341 aa, unidentified
MKNVSIIGLDLAKNVFQAHGADAAGAVVFRKKLRRAQMLEFFGSQPPCTVAMEACGGSHFWGREIGKLGHTVRLIPPAYVKPFVKRQKNDAADAEAICEAAQRPTMLFVAVKSEAAQGAAVVFRTRDLLVRQRTQIINALRGHLTEFGLVVAKGPAHVAKLVMTVQDPKQPLPEAARPILCVLVDMLGLLDQRIKLLDIAIARRAKEDEFARRLMSIPGVGPVIATAVAALAPPAETFKRGRDFAAWLGLTPLQHSTGGKQRLGATSKMGDRTLRRLLIIGASSVVRWAARKGAPAGSWLANMIARKPAMLVRVALANKMARVIWALMANGGTYRAPVAAV

SEQ ID NO: 138022 - protein, 415 aa, unidentified
MVQPRNKVCGVDIHKKFLVATILARDGTRMQKRFGADIDDLLNFRDWVLEENCDCVAIESTGVYWYPVNAVLENKVELILANAHQIKHTPGRKTDALDSEWIAEVALNNLIDPSRILPKEDRDLRRLTRTRKSLVKIRSQMKNQVHQGLESCNIKLSSVLSDSFGKSGRHILDGLINGKSIDEIIDGIPAKRVRKNGDQIRTAIKTGIDQTQVFLIESHLDTIDGLTQKLDKIDLEIKQRISGRKDDLKIAMSVPGIGFTAATTILAEIGNFKDFSTPDRLAAWCGLVPSVYQSADKLLTGSITKQGSKHIRWIMVQVAQAAAKKRGSKLRKFFLRVKARKGHNVAVVALARKILCILHHLLMNQEMYQEDGVEKSRPSKIDWSSAATDRMSLQVMIETIAKAGYEVKKIKRDGG

SEQ ID NO: 138023 - protein, 323 aa, unidentified
MGESAVYVGVDVSKHQLDYARSDRDEVFTVPNTEVGVQELVEGLHEVSPALVVMEATGGFEVPAAAALAAADVAVVVANPRQVRDFAKSTGQLAKTDQIDARILALFAERVRPAVRPLPDEEARALDAIMTRRRQIIDMIAAEKNRLGFAVPAVQKGIKKHIRWLERQLADVDSDLDERIRSSPVWKAKNDLLQEVPGVGPNLARTLIAELPELGRLSNKEIAALAGVAPFPRDSGLMRGRRVVWGGRAPVRTALFLSAWSACRWNPVISVFYTRLRAAGKRPKVAQVACMRKLLTILNAMVRDGRRWDPSIPLNQLRLQHSC

SEQ ID NO: 138024 - protein, 328 aa, unidentified
MTRMTPPAPLDQETSDIVLGVDTHRDIHVAAVVTAAGAFIESRSFPTTAEGYEHLLHWARALGHLNRAGVECTGSYCAALSRYLLSQGITVFEVNQPDKATRRRRGKSDIIDAEAAARAVITGRATATARAGDGPVEMLRLFKMARASATKSRAQAINQRKAVLVATDPDLCQSMAGLSNPKLIRACAGLDGSAVGAAGAAAHTLRLLACYGVGPDTAATLLIAAGDNPERLHSEASFAALCGVSPVEATSAKTQRRRLNRGGDRQANSAPYTIVLAHLRWDTRTRGYIDRRVCEGETRREALRCLKRYVAREIHRLITHTTTHVPAA

SEQ ID NO: 138025 - protein, 357 aa, unidentified
MKINEKKFIGKAFVGIDVHKSNWKICVLGELKFKKEFSCDPYPKALQTSLKNLLTDFEFECAYEAGFCGFWIHDALNEMEGINCIVVNAADIPTSDKERAQKEDKRDARKIAILLKAGVLNGIHVPDKDFVALREIQRLHFTVTKDLTRSKNRVKSFLFRHGIEICKEQFKKPNTHWSNKFIKWINSLELCPKLKFALDELMANVLRLRNQKLRILKIIRNEIQSNEELESIYNKLIKINGIGLISCITIITEVGNIKRFKTYEKFHSFAGLIPSTNSSADIEKIRGITNRANKRLRSILVEVAWISMSKEPTLLHYYNELKQRMSSNKAIIRVAKKIATKIRYELLKDDQELKVAA

SEQ ID NO: 138026 - protein, 387 aa, unidentified
MARKRTLSTLDTSIAYEAVGLDLAKTDVALAAFDSDHKEPYLIDRIPYDKLYELLADMAPTLVAMEPCSGAHQIAEQIQELGHEVMMISGRHVQAWVKDHCNGQKTDLNDAFAILNLAYDRWLTPIRGKTREECRLLALQASYRQLKGQRTKTMVHVKATLHAWGFPIRAGSFNQKALQELIDANREAFGDEVVETLHLMINRVHDLDHDIATVLKLLTEATQRDPRASLLRSIPGFGVLTTSRWCAVVGDIARFDSPKQTMAFIGLVPNNRITGHHTETSSGREARGQGKMSKRGDKMLRSLCILGAGALCLMVRNDRLPDCPFVASIKERLASPRPWFKVLVYVAAKLVRIATALLKYGETFSFEKAGISKAVLKQWELEQAKAA

SEQ ID NO: 138027 - protein, 340 aa, unidentified
MSVIRIGLDVAKNVFQVHGVDEDGNIVIRKRLRRQNLLMFFGSLPPCLIGVEACSASHHWARELTALGHQVRMMPARYVKPYVQRGKNDALDAEAICEAVSRPTMRFAAIKTTEQQSVLALHRTRQLLVKQETMLANLIRGCLGEFGIVAPLGIRRVTELIGVIRDDADNRVPHEARIAMTAVADQLCDLQRRIKGIERAIQTWHRSNEASRRLATIPGVGTITASAIVATVGNPGEFKSARHFAAFLGLTPKEHSTGGRHRLGRISKQGDVYIRRLLILGGTSLVRYARGAGGSAWARQLLARRPTRIVTVALANKAARIIWALLARGGVYQPALAQAA

SEQ ID NO: 138028 - protein, 315 aa, unidentified
MEVICHAKFVGIDVSKEWIDIAIDKECFRVEQIEQALQEIIKSKIKPYDASLCVVESTGGYERLITECLKKEKIKVHVAHPSRVRDFAKAKGFLAKTDKLDAFILASYGAFIGAERITPPLSVSEQKLRDLRARHEQLKQMRHAESCRLQNYVDKAVKRNIQKIYDFLTVELEALENEIQKLIEQSDELKNRQKILCSMKGVGVKTSQAILIHLPELGKLSRKKIASLVGVAPVTKQSGKKCGHARIQQGRANVRCVLYMAALVAARYNPVFKSFYERLIKKGKPAKVALVAVMRKMLVTLNAMVRSNHLWQNAS

SEQ ID NO: 138029 - protein, 319 aa, unidentified
MAQNGLVVAGIDVAKDKADVSIRALSQRQTFPSTAAGRRQLISWLRKHKVTKAVMEASGGYERQWAKALRDAGIEVRIVDPKRVRSFAQSAGRLAKNDGIDSDTIGWFAEVFVEAPSQAHDAARETLQQMVNARQGLLDIRTMLSNKAEQDVPEPVQKSHACLLKTVAVELAKLEAAITALVKATPHFARRAEIIESVPGLAATTAAGLIAAMPELGEVSNEAIAALLGVAPYDDDSGKRQGERQIKGGRRKVRNLFYMASLGAATRHNPALNAFYRRLIAKGKKAKVALVACMRKLIVILNTMIARGEKWDANRYLVS

SEQ ID NO: 138030 - protein, 426 aa, unidentified
MISAAIERCAGIDVGKKFLAVCVMVGPLEGEPRVEIRKFGTIRGELEGLRDWLKQQGVTHVVMESTGSYWKPVFNVLEGAVQVYLANPQEVKNRKGHKTDNKDGWWLAHLLRHAMIHPSFIPPRAIRELRDLTRRRKRLLGAGTSERNRVQKVLEDANVKLGNVLSDLFGVSGQLMLEALLRGQAHPEEIAQFAKGRAKKKIPEMIAALEGHQMSDHHRRMIRYSVDHMRFLEEQIEQLDQDIAMKIREAGLEPQWQLVQSVPGVQETSAAAILAETGADMTQFPSEKHISSWAGICPGNNRSAGKNKSSHTTGGNRWLRGTLTECAWAASAKKNCFIKDKFWRITTKSGGKKAPAVVAIAHTLLILVYQALITGQAYQDKQAPVLDLRQKQRLIRHHIRRLGKLGVAVSSPRPGSPATANSPPDN

SEQ ID NO: 138031 - protein, 423 aa, unidentified
MNPYTDDPYTAYIGIDWADTKHDVCMQVAGCEQREFTCLPHQVNDIEQWALSLRRRFGGPIAIALELAQGPIVYALQKYDFLVLFPINPSTLAKYREAFTPSRAKDDPTDAELALDLLLRHPERFRPLVPQSVELRALATLVEQRRGLVNDRVRITNRLRSTLKQYYPQVLEWFNRINTPLFCDFITRWPTLEQAKRARRSTLERFFRQHSMRFAQVLENRYQAIKAASPLTRDVAVVAPHRLYTLVLAEQLQVILQAIRRYDEEIAQLAPQHPDYELFSALPGAGPSLAPRLLVAFGEQRERFTSAAEVQKYSGVAPVTERSGRKHWVHWRWQCSTFLRQTFVEWAAQTVNKSFWAGAYYRQQKAKGSSHQAAVRALAFKWIRILYRCWQTRTPYDELTYLEALRRRGSPLLEHLGAIAEST

SEQ ID NO: 138032 - protein, 323 aa, unidentified
MSSIVGIDIAKHSFDIATLQANGKYRTKSKLTNKATGFQTFQQWLAKYAEPGAWVVMEATGVYHEALAEYLHQLGYRVCVMNPAQISSYAQSQLQRVKTDRVDAKLIADYGQRHMDKLRAWQPEPLAVRRLRALVRRLEDLKEIEQMELNRLDVSHASVQDSIRSVLQHVQEQIADTLKAIQDHIDNDPDLRGKRDLLVSIDGIGDKTAALLLAELGDPLGFTSARAITAFAGLNPKLQDSGKHKGHVVISRMGSARLRSGLYMPAVAALVHNPAIKALKERLQARGKAGKQIVCAAMRKLLHIAFGVLKSGEPFDVQKALAR

SEQ ID NO: 138033 - protein, 339 aa, unidentified
MNITTIGIDLAKTSFSLVGSDKYGKIVLRKTVNRGKLLSVIAQCPPCLIGLEACSGAHYWAREFEKLGHQVRIIAVKFIEPYRKGGKNDNNDAEAICEAVRRPNIWFVPVKSADQQAELCVHRVRQGVVRERTAWINRVRGLLAEFGVVMPKGRYSVQSAIPAILGDDENGLPELARQMIHDLWLSIQHANDQILGYDRTLARLAREDETAKRLLTIPGVGEQIATGVVASVPDPRLFKNSRQFAAWLGLVPRQYTTGGKIRLGRITKRGDKYLRMCLVHGARAVVAKLGDKQDHVSCWVRDLIERRGYLRAVVALAARNARLIWTLMMKRENYRAIDV

SEQ ID NO: 138034 - protein, 343 aa, unidentified
MQVSTIGLDIAKNVFQVHGVDEEGKVVITRQLRRGQVIVFFKKLAPCLIGMEACATAHHWGRELTALGHTVRLMPASYVKAYVKRSKNDAVDAAASCEAVTRPSMRFVPIKTIDQQAALMLHRSRSLLIRQRTQLINALRAHLAELGLIAAKGKDGVKGLVTIVIDGANSSQLPEPMRQALQPLVMQLAALQEQIGQIERSIHAQHRASDDSRRLETVPGIGVIGATALAATITDPSVFKSGRECAAWIGLVPRQNSTGGKERLGGISKQGDRYLRRLLVNGAMAVIRQARLHPDKYPWVTKLLAKKPAKVVAVAPANKMARIAWAILAKGETYRAPALATAA

SEQ ID NO: 138035 - protein, 412 aa, unidentified
MQTLIERGCGLDVHQATVVACLLMVRRDGKVQKQMRTFGTTTRELVGLREWLLSEGCTHVAMESTGVYWKPIYAILEGALEIVVANAQHIKKVPGRKTDVKDAEWIADLLCHGLLRSSFVPPKPIRELRDLMRYRRKLVESQAAERNRLLKVLETANIKLANVATDVFGMSGRLMLRALIAGKATPQEMAELAKGLLRKKIPELELALEGKLEQHHRFLLELQLQRLEAAEKDLAVLEQRIRQMLEPYAAQLALLDEIPGVDWTLAAVIIAELGVDMSVFGNVSQLASWAGVCPGNNESAGKRKSSRIPSGNVYLKSGLVEAANAAARAKGTYLRDKFFRLKARRGYKRAVVAIAHKILVAIYPMLSHQVSYNDLGDLYLDKLNQNHLTRNLVHRLERLGYAVTLTLQQKAA

SEQ ID NO: 138036 - protein, 417 aa, unidentified
MKDGEKSSVCRYIALDIHKHYSVVAGVDRDGEEILAPCRVEHLDLESWLEKHLLPSDRVVIESTTNAWHVYDLLAPLVAEVLVANPIKVKQIACARVKTDNRDTLILARLLAANLVPTVWVPPKHVRELRQFISHRRRLAQMHTQVVNRMHSVAHRHHLNHPKGKRFLPKTTGWQQDDSLSKLEKLQLGLDMATRAHLEEQVEQMTRELGRMSHEEPWASQMLYLMQIPGCGVVTGMTILAAIGDITRFETPKALASYSGLTPGLEQSGVKLRGKGITKEGRRELRWALVEVAWRAVKADPHWKKYFEELKKRMHPNQAIVTIAHHLLVVVWYVLTKHEPYRHYSPERIAYKYLTWSWALDEEQRQGMTRPQFARYYLMRLGIGNELKRVALNPQFPYRLASVEEVLALRPELRPPE

SEQ ID NO: 138037 - protein, 332 aa, unidentified
MNFCGIDVGAQELVLEVRQEAKAGAVRRFDNTPAGHKALIQHLRGYGQQPIRVCLEATGNYSLDIALALSACPQIELEVINPKAAHRFAEALDQRSRNDPISARLLAEYAMRMPFVHWDPPSTQRLQLRAITRQITALTQDRAALRCRLHAARATDSVPACVTRELNRAIAQLDRSLVRLTQEALQLVRQDAALQRRFQLLDSPKGIGSATALVLLGELMIAGDRSARELTKHAGLDVVECSSGTSVHKKPHISHAGNQYLRKALFMSALSAAHHEPYLRAFYQRLLVAGKKKMQALVAVMRKLLHAIVGMFKHDRLYDGALLCPPSLEKVA

SEQ ID NO: 138038 - protein, 372 aa, unidentified
MENIIYIGMDVHKESFSLCALHGTTGEIVGEARCASNVSLVKKFVEKLKTKYGEDIKIKAGYEAGCLGYSLHNLLEENGIDCDILAPTTMYSSSKNKMVKNDRFDAKMIALNLANGTYKEVYVPEEEDVAVKEYIRMLGDFKTSLKKIKQQIKAFLLRHGYVYEGKSSWTIAYMKWVKNLDLQGLFKETLDEYLLQYDVLVDKIERFSLRLEELSHSERYEEPVAKLRCLKGIDTTSAMTVHVEIADFTRFPTAKAFMAYVGLTPSESSSGEKISRNSITKQGNSIVRSTLVECANALVKGTIGLKSKRVKARQKGQRSEVISYADQAVERLQRKYHRMMYQGKPRNVAVTAIARELGCFIWGLETGKIHRK

SEQ ID NO: 138039 - protein, 429 aa, unidentified
MTESNHTPQRLTLVAVDIAKNHHEVLIEPPSPGRRRRIRVANNRQDFEHLAGYLRGLRSSVLIGFEATGNYHRPLAYFLYQQGFELRLIPTLALARTREAMHNSWDKNDPKDAQVILHLLKTGLAQTWHDPIVNGINDVQELSKTHFQVTLARVRVWHTLRNHYFALYFPEIDRFIRSDHSVWLVQLLASFPTPASIAALSEGEFQKQAWNLVGRKVSKKALLAEIYAAARRSIGVPVALESAAVAMFRLVLEQYLALNRLRERIAEQAGILLGDSPDSRRLMTVPGIGPANALTILAEAGDLRRFQHHRQFLSFCGLNLSTLQSGKSRGQSRISKYGNARLRTALWLAAQTAVRMRENSFRRKFELYVRRDPPDADLRRKAYTAVAAKLARVIFGLIKNGTDYRPFFEHEFQVEEPSRTRSVGAFSTP

SEQ ID NO: 138040 - protein, 402 aa, unidentified
MNAVGIDVSKGKSMVAIMRPFGEIVSPPFEIKHTTSDINSLVELINSVEGESRIVMEHTGRYYEVLAHQLSKANLFVSAINPKLIKDFDNDSLRKVKSDKADSVKIARYALDKWQNLKQYNVMDELRNQLKTMNRQFGFYMKHKTAMKNNLIGILDQTYPGVNTYFDSPARSDGSQKWVDFASTYWHVDCVRKMSINAFIDHYENWCKRKKYNFSKSKAEEIYGKAKELVPVLPKDDITKLIIKQAVDQLNSASITVESLRTLMNETASKLPEYPVVMAMKGVGTSLGPQLMAEIGDVSRFTHKGAITAFAGVDPGVNESGSYEQKSVPTSKRGSSDLRKTLFQVMDVLIKTHPQDDPVYQFLDKKRAQKKPYYVYMTAGANKFLRIYYGRVKEYLASLPES

SEQ ID NO: 138041 - protein, 387 aa, unidentified
MYYVGIDIAKLNHFASVVSSDGEVLVKPFKFTNDNDGFCTLLSALASYDRSSLIIGLESTAHYADNLVEFLVSKRYQVCVINPIQTSTMRKNNIRKTKTDKVDTLVIARTLIAQPHRFFSQEDIDLMHLKNLGRFRQKNIKERTRLKIQLTAYVDRVFPELQYFFKSGLHQKTIYALLKEAPTPELVASMHLTHLAHLLEVSSHGHFNKEQAKELRILAQKSVGSSDRALSLQVIQSVEQIELLDRQITDVESEMTEIMLGLDSVIMTIPGIGYVNGGMILGEIGDIHRFSKPCQLLAFAGLDPSVYQSGNFNASHTRMSKRGSRVLRYALINAAHNVVKNNNTFKAYYDAKMAESRNNYNALGHCVGKLVRILFKMLTDDVAFNLE

SEQ ID NO: 138042 - protein, 339 aa, unidentified
MLSTIGLDIAKWVFQAHGADATGRVVFRKRLVRAKVLEFFAGQPPCLVALEACGGAHYWARELGKLGHTVRLIPPAYVKPFVKRQKNDVADAEAICEAAQRPGMRFVPVKDEAQQANTVVFRARDLLVRQRTQCINALRGHLAEYGHVVPQGPAHVDSLVALVEDPKSSVPESARGILQVLIRMLNALEEQLKELDGEIARRAKADPVARRLMTIPGIGPIAATAITALVPAPEGFRAGRDFAAWLGLTPLQRSTGGKHKLGAISKMGERTIRRLLILGASAVVRWASRRGAAAGSWLARMLARKPRMLVTTALANKMARIVWALLVKGGTYRAPAVAA

SEQ ID NO: 138043 - protein, 343 aa, unidentified
MQTITTIGFDIAKSVFQVHGVDTAGQVVIRRQLKRRHVLAFFEKLPPCLVGIEACASSHHWSRELQALGHTVRLMPPAYVKPYVKRQKNDMADAEAICEAVTRANMRFVPTKTPEQQSCLMLHRTRHLFIRQQIAVINSIRAHLSEFGIVAPVGRKGVTELLHIIADTNDKRVSEVARACLAALGTQLLSIKKQILEFDRMIMAWHRSNQTSKRLHYIPGVGPLLATALVASVADPSTFRSARNFSAWIGLVPKQHSSGGKERLGSISKQGDRYLRSLFVAGALAVIRYAKIHGTGHRPWLTALLGRRPTKVAAIALANKIARMAWAMMAKGERYKNPVALAR

SEQ ID NO: 138044 - protein, 387 aa, unidentified
MTKNKGRVVGLDVHPDSFAGAVVEGRDPASAVVSSTSTRVELERLEEWALRHTSTEDTLVLEASGNAFAVGARLRAIGREVEILDSHRAGKVGKVYCANDRVDAVKIARIYLSALSPIVWQPDQKTLERREIFSAYQAVVKESTRAKQQLRSMLNEHCVRLEKGLRLCHPYAIGRLLKVREWTPARRMLLQQLHGSLLAARARRTMLRRHMAQEIVAEEALLRLSRLCGINLITLYGVVAAVGDVRRFTHSKKLVAYLGLNPSVSQSGNFQGSGALKRHGRGALRALLIQSGKKLLEVNNPLQKWGLAVAARRGRNKAAVAVARKLCVALWHLMMGHAIGTLERLDTLQTKLSKFATEIGPAALTAFGYNNRADFVQKKLYVLRSYP

SEQ ID NO: 138045 - protein, 519 aa, unidentified
MRTHPAMYANSITVNSVNKMISAKQKKPSIERIRRTPRNPEVVKVLKEVTAFGIGLDVHKDSIALCMSGRLPSGETLVIREHTFRNHHQGVEELCRFLRPYQAKATILMECTGVYHVALYQTLQQRFPSRREFLIAMNPLLVHNRIADLGTKSDRADARTLSNLAFYERILRPSYVGSPEFFTVRDYMRSYHRTRTQTTTCKNRIHRHLHLANQKFSFNLNTEWGLQLLDRYIAQSRPLGEVYEEFLAELKTNGQGRVLERQATEIVPHAEVRLTEPQCFLLQVEVIRLLESQAAAAILLKEAETYVLNHPTLRTHYEQLCFIPGFNAVTVLTILTEVGNYSRFRTADAFSKFCGVVPTVEQSGTFRSKGHVNRFTNKHLRSALSQAAAIILSRPDRNTDIGAYAYKQLLLRKLPFKKAMMKVAFKYSRIVFGMLTGIRQYDPYHETMEKKRARLQKHLTNQGTLLESHRTRALRRNISKLLVTNSDLLNSTSKYHLVHGFKRLIRKSKYQDKHTSTRK

SEQ ID NO: 138046 - protein, 340 aa, unidentified
MVLIGIDPHKATHTAVVVDESEREPARIKVKADRSQVSALLEFADGYRPRRWAVESAGGLGFLLAQQLVRAGEDVVDVPATLAARVRLLGSGRGSKNDPNDALSTAIAALRDPHLRTVMVEDHAMVLRLLADRHQDLTSLRTQAVCRLHALIAAMVAGGVQRRISADSAASRLRTIHPDNTVEAARKEMALELVADVRRLDKSLAEVKKRITAAVAASGTSVTEVYGVGPIVAALLIGHSGDITRFPTKGHYASYNGTAPIEASSGKVVRHRLNQRGNRQLNHALHMAAVTQISRDNPGRAYYLGKIEEGKSTKEARRALKRKISDAVFRQLRDDARPQT

SEQ ID NO: 138047 - protein, 331 aa, unidentified
MYSIFVGCDISKAYFDASYCSTNKLIYLGRFDNQISGFKEMVRQLKQVTESKSGSWMICFENTGVYSKPLLEWLISQEIPCKEENALQIMKSSGLRRGKDDKIDSKMICRYAFEKRDSLKPSKLPSPKITLLKKLLSRRTLMIKHKTALSNSLKEQKSILDPDVYQTLNDQNEELIEMYQKHVDEINQQIEELMMSDEELKKNYQLAQSVVGVGPVISAFVISFTENFQCFTEPRKFASFSGVAPFSNESGIKKGPKRVSHMANKQIKALLSNAAQAAIQYDPQIRGYYQRKIAQGKHSGLIYNAIKNKLIHRVFAVIRRQTPYVKLPAYI

SEQ ID NO: 138048 - protein, 345 aa, unidentified
METMYYIGLDVHKKTISYCVKDGSGRIHTEGTIPATRLDLDMWMKTLPQPWTAAMEATIFTSWIYDHLLPYAAAVKVAHPLMLRAIAAAKKKNDRIDANKIADCLRCDFLPECYMASTEIRERRRTLRYRNLLVRQAVQMKNKIAVLLMEAGVSYNKQKLHKVGYFRELLATNQDIDEGLKPLLRLCRETVVRLGKTESALVRSLQRDSLLMERVEKLMTIPAVGPITALTWALEVGDVQRFSSIKKAISYCGLCGTEKSSANITMRTPLSKQRNKHLQTVLIEAAKMAPRNSPELAMVYEQEKQKGNANRATLAVARKMVAYLVAVDRRQKGFLVVENKNRTAA

SEQ ID NO: 138049 - protein, 349 aa, unidentified
MSIVCGLDLHRQQITFDVLETESGEVWRGRVWQPDRERFRRRLRHDVAQRADGQSVAMAVEGCTGWRYVVEEIVAAGFEAHLAERADTQAARGRKQHAKTDRSDARMLRDLLQTGDLPESWIPPTDVLEWRERVRLYKSLVDQRRVWIQRIHAELFQHGVAVSEGAIRSTGTRDRLLGDDVDLTPAGRQRVRVGYSMLEATDVEAQSLKRDLQRFGQRQPACRALVEATYGIGGLIAVAVWSELGDCRRFSRSEQVVRHSGLDVSVDSSDRHRAHGYLTRQGPPTLRWALFEAAMNASHHRSPDHAYYSAVKDRHDGKLAAISVARQFARRCYHVLRNLDPDLVYTMPA

SEQ ID NO: 138050 - protein, 413 aa, unidentified
MLNIYYYNCCGIDVHKKILVATIAKTDDHKVTTYQTKQFSTLTKDIKHLKQWLSDNDCKDVCMESTGKYWIPIFNILEDACHVVITHPKYVRAIPGKKTDKKDSIWIADIFKHGLVSPSFMPPLEIRQLRDLMRYRFKLLNCRTSEKNRFQNSLTMSNIMISNVVTDTFGKTAQSIMKKMLSKNDNLTLEEISPLLRKNLKATPQEILESIEGNLTKEQNSKMEICLDHYDYINKCVDKLEEAILPLVANYQNEINLLLTIPGVQDVSAIYILSEIGSNMNVFVDDKHLCSWAGLTPQNNESAGKKKSVRISRAGVYIKPLLVQCANNAIKDKACEYFKLRYEAIKKRRGHKRAIIAIARMLLTCAYHMLSKNEPFNIELYKQYTESNFKSKHTKLNINNAIKFLEQQGYKVS

SEQ ID NO: 138051 - protein, 350 aa, unidentified
MDILGGFDVHRKQITFDYMQMDSGEVHRGKIRPADRESLREWLESFTERFPEHETAIAVEATTGWRYVVEELRRAGVEPHLAEPAETQSLQGRKKRRAKTDRLDAGHLRDLMVIERLPESWIPPDHVQEITTLTRLRHNLIEERTTHKQRIHAQLFHNGHPQQKNLDSMEGRAQLEEVELPAAARQVVDLSLQMIDHINEGLEPVEARLRDYARVQASCQALMEHHGVGELTSVALFSELGDTRRFSSSKKAVRYAGLDVTVHSSDDKRAAGKLSRQGPPVLRWAAFEAAKGAWRKNSPDHEYYLGNKERIGANRASLSVARKLIRRAHHTLRELGEEAMSEPVFASSRA

SEQ ID NO: 138052 - protein, 320 aa, unidentified
MRNAVGLDISKLTFDASAMVGNAEYSAKFDNDSKGLDQFSDRLKSLGCQNLHICMEATGNYYEEVADYFAQYYSVYVVNPLKISKYAESRFKRTKTDKQDAKLIAQYCRSAQESELVKRQKPTDEQYRLLRMTAAYAQIKSECAAMKNRHHAAKDEEAAKAYAEIIKAMNEQLEVLKEKIKEQTEKPKCKEGVKCLETIPGIGRMTAAVLFHHLTSSKFETSNKFAAFAGLSPQQKESGTSVRGKGKLTKFGNRKLRAVLFMPAMVAYRIRAFPDFIKRLEEKKKPKKVIIAALMRKLAVIAYHVHKKGGDYDPSRYKSA

SEQ ID NO: 138053 - protein, 398 aa, unidentified
MRFAGIDIGGERHAVAVVNEGGTVLVKSAFFGEDAAGYQRVRDLLGDPHDCVVAMEATGHYWRNLFAFLVGHGFKVALLNPLRTRRFAEEELERTKTDSVDALGIARFAAQKGPTPTPIAEEVTAELRELVRLRTRYVDEHSDRMRQLHRAVDLGFPEFTRHVRMNTVLATAILARYPTARSFANVSVRKLARLAYDGRHQVGEVLARALIETAKISVGSHYTEAYQLQVKYTCSDMELLRNRVKQLDQEIERKLQTHEVGRLLTTIDGIGARTAACLIAELGDPSRFRDAAALASYVGVVPRLRQSGKRAFSGARGLPLGNARLRHRLWMPTLVAVRKNPWLQAHYDRLLAAGKRPKVAIVACMRKLLGAIYSVARNRRPFVPHLATALHVQPMTAN

SEQ ID NO: 138054 - protein, 434 aa, unidentified
MNESKDIVLVVDYHLENLEVRQLNQATGEERCFNRKNTATGILRLVRQAQEEAAVSGGKVVWIMESTTGWARVKELLGDQVEFLLANVLQMPLPPKARRRKTDKIDTGRIQREYGNGSLPLAYQPPRGLREVRRLVDCRRDLVRRQTALKNWISHYLSHETWYGTKNLWSQCGLQRLKSLALSVPDRWLLDRKITELEHVQALLEQVEDRMMEVYRAWPDAQRLDEVRGIGPISAVTILAYIGPIDRFASAEQLISFAGLAPGVHRSDGRGYGLRIGGGGTHSQLRFFLIEATRWLKEIPRYAAAYDRMEARRGKKVAKVALARMFLRSIDKMLRTGASFAPEGGLAGVPSKRGPDTTGRRNRMGPQRPSRPPRLLRPPASAVLAAAHAIPAGRGQRGAGQENESEGSRTARRPVGLAVHRGARQEAFCATTNE

SEQ ID NO: 138055 - protein, 390 aa, unidentified
MRYFIGIDVAKFKHTACVIDTDGTVLVESFDFTNDIIGFQSLLKNIKPFLKKKHLVGMEDTGHYGDNLRNFLLEKQYTVVMLNPIVTSHIRKASNKAKNDRIDCFVIANTMMNPNFYRDQQAQSIDYATVRQLTRMHHTHMEEINRYKCQLQKSIDIVFPEFNSLLNTKYSKTYLEILDTYHSAYTIANTDIRLLRNTLKNVGVGRSVSISAEQLKKAAKESIGQHNLAIEMDIPFLISLIRRLTSILGEIDKKIEEFSHQLNSPILDISGISHFSAMSIISELGDITYFSNEKKLIKFAGVNPCVYESGTYSMTHTRLEKKGSKYLRKTLYQIIDVVIRFNPIFQAFYQKKISQGKSYRCAQGHCIRKLLRVIYKILSTGERFNPAKLK

SEQ ID NO: 138056 - protein, 334 aa, unidentified
MENIALIGIDLGKNSFHIHCQDHRGKAVYRKKFTRLKLIEFLATCPATTIAMEACGGSHFMARKLAELGHFPKLISPQFVRPFVKSNKNDFVDAEAICEAASRPSMRFVQPRTESQQAMRALHRVRESLVQDKVKTTNQMHAFLLEFGISVPRGAAVISRLSTLLEDSSLPLYLSQLLLKLQQHYHYLVEQIKDLESQLKRKLDEDEVGQRLLSIPCVGTLTASTISTEIGDGKQYASSRDFAAATGLVPRQYSTGGRTTLLGISKRGNKKIRTLLVQCARVFIQKLEHQSGKLADWVRELLCRKSNFVVTCALANKLARIVWALTARQQTYEA

SEQ ID NO: 138057 - protein, 341 aa, unidentified
MLHAGLDLSRRRLDVCLVDDAGEVVAQIAAAPDADGLRHLAMRVSAARVRAVIESMNGARFVHDTLEELGWEVLIADAQKVKGLAPLACKTDKIDARVLAVLSQRDLVPAIWLPDPTIRRERELARFRLHLVRHRSTLKNRIHATLITFGHPCPVSDLFGHAGRELLDRLQIPDPWRGTVDVSLELIDDLELQIANLTCELKRQGVDHRYIPLLVTAPGFGWINAYTVASEIGDIERFASPAKLVGYTGLCPRVIQSGNTDRRGPISKHGPRYLRWGLFEAAMNACKHPIYAERYQHTKRRLGRQRGPKVAQIELSRKLTEAIWHMLTRNQPFAPAGAGFV

SEQ ID NO: 138058 - protein, 366 aa, unidentified
MKKTSTVRVNGNMIFKGHKLTIGLDLGDHWSCYCVLDEAGKIILEQKVAMTPEAMKQTFAKIPQSLIALETGTHSPWVSRLLTELGYKVIVAHAQKVQLITKSNRKDDRHDARTLARLARIDPELLGPVRHRSAQAQIHLTVIRARAELVRARTALVNAARGLVKSYGQRLPKCGTQQVSRELGAGLHAELREVLEPLLKEVESLNERIQEYEVRMEKIAKKSYPHVELLKQVKGVGTQIALTYVLTLDDPHRFPKSREVGCFLGLCPGRRDSGESQPQMNISKEGDRYLRTMLVQGAHYILGPFGADSDLRRWGLKLAARGGKSAKKRAVVAVARKLAVLLHRLWVSGEVYEPLRNSQKAIRAAA

SEQ ID NO: 138059 - protein, 341 aa, unidentified
MERYFAGLDVSKDETAICIRDHDGRSVLTTKKATDADAITDALSASGLPIVTVVMETGRMANWLYHELAGRGVPIVCVDARQAHAVLSQMHNKTDANDAAMLADLARTGFYRKVIVKSQDAQERRALLRAREVAIKTRMNVENTIRGLLASFGVVFPRHLRTFEQRTADAVARAPMLTDIILPLLRIRTEALRQVAQLSKAMLRHAREDEACRRLMSIPGVGAVSAVTFVATIDNPARFRRSRSVGAYAGLTSRRFQSGEMDYGGRISRRGDQMLRTVLYEAANSLLCRAKAVSGQGLKDWATALKKRTSHKKAVVALARKLAVIMHAIWRDGTTFKLQEA

SEQ ID NO: 138060 - protein, 403 aa, unidentified
MIFAGIDWAEDHHDVCIVDADGRVLWRRRIGHDPAGVRQLREAIAHIEPDPLQVAVGIETGRGLLVGELVQAGYVVFPINPKAAERFRDRRAVSGRKDDRLDAEVLAQAVRTDRASLRVLLPDSPQALEIATLARDHANLTRQQTRLRNQLRSALLEYFPAAVGSFELGAKSTLAFLERYAEPETAARLSVGAVARFLRSQRANRDANAKAEAIVAALRAPALRARPEIARAKARLVRTLCTQLLALHPALRAYERELADLLKTHPEGEIFLSFPGLGVVLASRVLAGTGDNPQRFATGYGPYAGTAPIVVQSGKRRVVKARVAAPKYFRDAVQQWADQARRWSPWAAAYYARHRARGHLHNESTRALADQLLRLLFDVRRLGVPYEESVHIANVERAAARAA

SEQ ID NO: 138061 - protein, 353 aa, unidentified
MSTKSNKSIANVAVIGIDIGKNSFHIVGQDQRGAIVLRQKWSRSQLATRLANLPACLIGMEACVGAHHLAHRLTALGHDARMMPAKYVRPYAMGQKNDFNDAEAIAEAVQRPTMKFVPIKSADQLDLQAMHRIRERAVSQRTRVVNQIRAFLLERGIAVRQGMRFLRSELPIILATRDDVLSPRMMRLIEDLSADWRQLDERIENLSDEIEGLAKQDACCTRAMTVPGIGPIISSAVVSAIGNGAAFSKGRDFGAWLGLVPRQMSTGDRTILGKISKRGNRYLRKLFVQAAWVVLIKPMNWERHGLKQWIEAAKKRLHHNVLAIALANKLARITWAVLNGEHNFHARAEPDAV

SEQ ID NO: 138062 - protein, 394 aa, unidentified
MKITFGIDNAILSHSVSIIDETRKIINSFEIENTLAGFKVLGNSLIKYPGASIGFEISQGPLVDYLRTLQLPLYSLNPLKVKRHKESFVVSGNKTDRIDAFAIADYVRSHEKDLRPMIFNSADIETLKYLNIAHERLTREHTRNTNRLLAIFRQYFPLYAGLFSNSAPKTLLNMVISYPIWSKLRDETSENIEKFLKQNKYYNSKYIQRILQKIDMYTHCVSPEVENAIQYEAVAIAELLLGLKSNLEKLRKEMVRITSTHPMGEVFKSLPGAGDILSAKLLGHFGDNKTRFNTAGEVGASFGTAPINYQSGGYHKVIIRKACNKRQRSVMYDFAFCSMRFSVWAKEYYKQQRKLGKRHSVAVRALSNKWVKVIFAMWKNHHCYDESKKICDAA

SEQ ID NO: 138063 - protein, 391 aa, unidentified
MRKAKGTLQREDSTKGLVLKMALELSMSKWKVAFGWEDQTRYVTIEARDLDRLQEEIGKAKKRFGLAEGVGVLSCYEAGRDGFWLHRYLKSSGVESLVVDSSSIEVSRRKRRAKTDRLDARKLLGMLVRHAGGERGFWSVVRVPGEEEEGARHLHRELEVLWKERTMHRNRIQSLLILQGVVVKNPSGRKFLVELEGMRRWDGEGIPEEMKRRIIREHGRLRMVEEQIYGLKKEQEKRVKEEASEAMGKARKLMSLVGIGVVSSYKFVREAFGWREFRNRKEVGALAGLTPTPYDSGGRGREQGVSKAGNGRIRALAVEMAWMWNRFQPRSKLSRWYQERFEGGGKRMRRIGIVALARRLLIALWRYLEKGVIPEGARLRPARALISGPKA

SEQ ID NO: 138064 - protein, 366 aa, unidentified
MLTVIRKEALMATYYIGADVHSNSTELAIEKRGKIVARYSVPTSIPAITNVLDSLQGKKYLAVEEGPMSGWLYRNLNKKLDQFISSDPRRNKLIASEGDKDDKIDSAKLASLLRGGFLREVYHSDDDDRAELKHWDSLYHDRVRDAVRGINKIRARCRMHGVTISRATLRDPASRLKWLLKTKHNALANQLKMLWIGYDATVQQVKSAKRQLSTLSKKHNIIKQWSQLPGIGLIRATTIFAFLDTPWRFKKKNKLWKYCGVGLQRTTSGTDKKGRPKPARLQLPWAVNRTLKNAVLGAALSAINQKGNVFKDYYERMVKNGIIPSNARHAVARKMLTVMWAMWKTNSSFDEKMVCNELNMPTVSVI

SEQ ID NO: 138065 - protein, 460 aa, unidentified
MACDPDKQSGPRCIEVPFFVAPGNGEHAWQCLDYTCGVTVAFLWMEAKMQVIIERCCGLDVHQETVVACVLIGAPGERPRKEVRTFRTMTRDLEALRDWLLELGVTQVGMESTGVYWRPVYAVLEGHFDLIVGNARHIRNVPGRKTDVKDAEWIADLVRHGLVAKSFVPPAPQRELRELLRYRRKLVESQAAERNRLLKLLETANIKLASVASDVFGVSGRAMLKALIEGSASPEAMADLARGQLRRKRDDLVLALEGRMEEHHRFLLATQLRRLEAAEHDIAALDDRIEAKLAPYCVQHALLMQIPGVDWVVAAALIAEIGVDMSVFLSVYHLAAWAGVCPGNHESAGKQKSGRARKGNVHLRTMLVGAAISAARTKGSYLKDKFHRLKARRGAMRAALAIAHKILVAAYHMLAKGLPYRELGEAYLDQIGQTRTVANLKRRIERLGYNVTLEPKAEPA

SEQ ID NO: 138066 - protein, 445 aa, unidentified
MPKELSKKSRGVLDRINLNAAGIDLGARSHYVALPPDLGVPVREFGCFTKDLEEMAAWLKAHGISTVAMESTGVYWVPVFQILERRGFDVQLVSTRNLKSVAGRKTDVADCQWIQHLHECGLLRGSFRPEDAICVVRGYVRHRDSLREESTRHVLRMQKALEQMNVQLHKVVSDVTGETGMAIIDAILNGERDGQKLAALRNYRCHQSAEQIACALAGDFREELLFCLKQNVAAYRFIEQQIAACDAEVLVLLKSFQAKAELKDLPEPKNKRDNPEVRRVLFSAAGADLSLIPGLGSKNLQTIFAEVGFDLSKFPSERAFASWATLAPRNFVTGGKRKRAPQSGASRVSNAFRVAAATLAHSDTAFGAFYRRMRGRKGGPFAVAVTAHKLAKLFYRLLRYGERYVERGVDYYQERYKAQQVRAAMKTLATHGIHVGVEPISIAVP

SEQ ID NO: 138067 - protein, 403 aa, unidentified
MNAVGIDVSKGKSMVSVLRPFGEVVAKPFEVRHSASELKELANYLKSLDGETRIILEHTGRYYEPVAQLLHDSGLFVSAVNPKLIKDYGNNSLRRVKTDKADSRKIARYGLDNWVELRQHTPMDTIRYQLKTMNRQYSLYSKSKVSMKNNLISLLDQTFPCVNTLFSSPAREDGSQKWVDFAASFWHLDCVRGLSLAAFTQRYQKWCKRHGYNFSSGKAAEIHESTKNQIAMLPKDAMTKMLVHQAIEQLNAASKAVELLRTEMNHLAQQLPEYPVVMAMGGVGKSLGPQLMAEIGDVTRFAHKGSLAAYAGVDPGANQSGTHEAKSTASSKSGSPELRKTLFMVMSVLLQNSLANDPVFQFLDKKRAEGKPYYVYMTAGANKFLRVYYGRVKEYLLSLESAD

SEQ ID NO: 138068 - protein, 412 aa, unidentified
MVELLVARCAGLDVAKDEVVACVRVPDGRGDRDQEVRTFQTFTSGLEALAAWLAGEEVTQVVMEATGQYWKPVWYVLEERGFELLLVNARHVKILPGRKTDVCDAAWLAELLEHGLLRGSFVPPAPIRELRDLTRYRKRLIQAHSAECQRVQKTLEDAGIKLDSVAADVLGVSGRAMLTALINGERDPGVLAELARGRLRAKLPQLRQALRGRFGDHHALLVRLALEHLEHLEGAIAALDRRVEEVIAPFARARDQLATITGVGKRAAETIIAEIGVDMTVFPTAGHLASWAGRCPGNNLTGGKRRSGKPTKGNRWLGEVLIECAWAAARSRDTYLSAQYWRLARRIGKKKAAVAVGHSILVIAWHLLADDCDYADLGGDYFVRRDTQRQQQRAVAQLQALGYQVTLEPLVA

SEQ ID NO: 138069 - protein, 324 aa, unidentified
MTPSSTPAADDVFVGIDVSKDVLDLVRLDQPDALLRFPNSPEGVQQIVELMLECKPARIAIESTGKLETPLLMALLQQRLNACHVNPQRVRQFARAVGHNAKTDALDALVLARYAKAVGPRITEEKSENQRELAELVNCRRQLIEGRTAHLHQSRRARSEFAQKQLKAVIAQLDERIEELEQAIGKLIESDEQMRPIDSIIRSFIGAGAVLSATLLAHLSEIGRLDHAPLSALVGVAPFNDDSGKRTGQRHIRGGRPGVRHVLYLCTISAIRCNQQIKAKYKQLLAQGKHKKVAIIACARKVLRVLNAMIRDRQNYRPTPTKIT

SEQ ID NO: 138070 - protein, 353 aa, unidentified
MPIVAEEYQFVIGVDTHAASHSFAVIAPATTAVGQEAQFPATAAGLSRAVAWAGSHAGSPEVALVVVEGIGSYGAGVARAFMAAGYRVVEGGAQSAGDRRGQGKSDALDAVRIARSVTGTDTAQLREPRADGIRNALRILIISREMMTRERTAAVNALTALVRTTDLGLDARKALTIGQLRVIAAWRARTGDAIDVAVARAEATRLARHALDLGTQAAANARQLDGLVRQVAPDLLDRRGVGPVTAAVLVVSWSHHGRVRSEAAFAALAGTCPIPASSGNTTRHRLNRGGDRRLNWAIHTIALGRMAHDPDTKAYIARRVAEGKTKREAMRCLKRYLTRSLHRTLENSPAMAA

SEQ ID NO: 138071 - protein, 338 aa, unidentified
MTVAFIGIDLAKNVFQLHGANADGQAVLKRRIRREGLLAEVAELEPCVIGVEACTGAFYWQRQFETLGHTVKVIAPQYVKPFVKHQKNDQNDAEAICTALMLPNMKFVPTKSEEQQDIQALHRARRRLVNHRTALVSQMRGLLLDRGIPIALSIGRARRAIPEILEDRTNGLSAMSREIIGDLFDFMGQLDARITAFDRRIDTVFKSNANCRRIARICGVGPKTATAVVAAVGDGREFKNGRHLAAWMGLVPRQHSSGDKRLLMGISKRGDKHLRTLLIHGARSVVRVAQRKTDPFSQWVNRLRERRGMNRAIVAVANKNARIIWAMLNRNEEFRAPV

SEQ ID NO: 138072 - protein, 345 aa, unidentified
MIIGCDFHPSWQQVDWLDTETGDYGERKLVHASGDAKQFYQQLAAPVLIGMEATGNSQWFVELVEDLGHEIWIGDAAQIRASYVRKQKTDKRDAAHILKLVVEGRFPKLWTPDREQRDQRQLVLHRHKLVEIRSRVKNELQHLSLNKGMQRKRKLWSEAGMQLLCELPLRPWAGCRREDLLGLLAMLNQQIGKLDQSVEQAAKENPQAKLLLTQPGVGPNTALAFVLTIGDVRRFPRGKQVASYLGLIPREESSGGRQKLGAITKQGNRMLRSLLVEAAQIAVRYDPQFRREYLHRCHTKPKAVAKVAAARKLAARLYWMLRTQTAYPEIVRVESSSRVALVGAS

SEQ ID NO: 138073 - protein, 455 aa, unidentified
MLRDAIGIDPDSKGCQCALVNLGECQTQQRGYLTTEEGMTRFIRWVKKQEDVIVAIEGSNGLSKPIEKALRSAEIVFYSFKPSDVAKFRKAVLGQNKNNKKDAESTARYAMALEAQGKLDNWKRVWSPDEELQGLTRSYAQRTKESTREINKLWKLLREASVDLYLALGGDHPDIDITENILQNEGILTLLITKPDIFEWKTLPETDFLAVMGGCNYKGRNKLIKELQKVSMSFKPISQAVSLMIKNATEQIILLKQQLTEIKKMIEVLTKSYKAVKTLEQYKGIGIMTASILYAEIVDIRRFAKDDNLASYAGLAKREHKTGNNEKEVSNCFFNRRLKNVFMTAARNYVLFNPDSHLAGYYRNLVKEGMKKTEARKRVARALVRVFFRDLYSLVELDNSDKIEDEKRGIEDDMANGLSRSDKDHSNISFPSPIKNNIKGLGKVKVEKREKLLMK

SEQ ID NO: 138074 - protein, 345 aa, unidentified
MTYYTGIDVSLRSVSICIVDEKGEVCLEAKEAAEIDAIVDRLRRFSSEVRSVGFEAGTLTQYLTYGLQAAGFEVICLEARQVSVTLAAMRNKTDRNDARGLAQILRTGWYSRVHVKSLTSHQVRALLASRKTILKKCVDLENELRGLLKVFGIRLPSRVGHGSFDAELRETVSNDEMLACALVPLLDARTVLYKTYLKLDNAVKGLVRVDPICRRLMSIPGVGPVTALTFKAAVDDPTRFKSSRTVAAHFGLTPRRFQSGELDNPGHISRAGDADVRSALYVAAHSLLTRNAQWSTLKAWGIRLAKTRGHRRAVIAVARKLAVILHRMWMEGSEFRWGSPAHTGS

SEQ ID NO: 138075 - protein, 386 aa, unidentified
MGKSITSGVYVGLDVHKDSIDIAVAEAGRDGEVRHVGSIGGDLVALDKALRKLISRGAPLHIVYEAGPCGFVIWRHLSAQGLHCEVVAPSSIPKRSGDRVKTDRRDAILLARLARAGELTAVRVPDVADEAVRDLVRAREDAVREQRSARHRLKALLLRNGIGYAGKSAWTAAHLRWLATLKMAHATQQIGFQEYLHAITEATARIVRLEQAMRDALPEWTLRPLVQALQALRGVQLIASMTLVAELQDFVRFANPRQLMSYVGLVPGEYSSGPKRRQGSITKAGNSAARRMLVEVAWHYQHSPRVSPIIAKRQDQLPKEITDIAWKAQLRLNAKFKRLTARRVMKTKAVVAVARELAGFVWAIGREVQTSGWQGIEIEAATAAAH

SEQ ID NO: 138076 - protein, 317 aa, unidentified
MTRIICGVDIASSSLAARIGRDGSASTFANTQQGIAELAGFCESHGVELVAMEATGGYEQRAFAQLSERGLPVAVVNPRAVRQFAQSMGALEKTDAIDSGMIAWYAETKKSQPLCLAPKTQLELRARVTRLRQLTEMRTAQLNQQRLVIDPAVQKGFRKMLKFLAQQIEELEQAVAALIQSDPLWRELDQAFRTIKGVADRTVARIMAEMPEIGTLSNKTISKLAGLAPLANDSGKHQGRRAVRGGRSAVREILFIVGSVVARHEPDFIAFQQRLRAAGKPPKVVRIAVAHKLLVRLNAKAREVRNLHALEPFVCPG

SEQ ID NO: 138077 - protein, 336 aa, unidentified
MYSGIDLHSNNSVIAIIDDGDRVVAQKRLPNDVTKIAGFLARWQEQLAGVVVESTYNWYWLVDGLQDAGFHMHLANTAAIKQYEGLKHSGDETDAQHLAHLLRLGILPTGTILPREHRAVRDLARKRMQLVQSCTAHVLAVENIMARQLGGRMTSNQIKRLTNDAIDNLPVAADVGLAIKANVAVIATLQSQIELLEKRLQERVKPRPQYGLLTSVPGIGQTLATVILLETGPIDRFAEVGNFASYARCVDSILTSNRKKKGEGNVKNGNKYLAWAFVEAANFARRFCPEAKRFHERKKAKTNNIVATKALAHKLARACYHILKEGKSFDVTRCFA

SEQ ID NO: 138078 - protein, 325 aa, unidentified
MFYLGIDVSKAKLDCALRNADSGKVKTKVIPNTAEGFKKLLEWLKKNDAPSPHIIMEPTGVYHELAAFFFVDAGLTISLVNPAQLREYAGGLGVRTKTDKMDSQVLARFGAERKPAPWQPPSAAARTLKALLARRDAVADDLLREKNRQEKLEATETPQLVAESVEGSIKFIEAELKRLQKCIDDLIDNDPDMRGKKELLNSIPGVGERVSNHMTCLLAGRDFKSGEQLAAYLGLIPVSWESGTSVRVPPHMSKAGPAHLRKLLYMPAIVAVKRNPHIKALYERLLERGKSKMSAIGAAMRKLAHLCFGVVKTGRAYDKNFAIQS

SEQ ID NO: 138079 - protein, 340 aa, unidentified
MSEVSIIGLDIAKHVFQVHGADASGRAVLRKKISRAKLLPFFAAQPHCRVVLEACGGAHHWARELIKLGHHVQLIAPAYVKPFVKRQKNDAADAEAICEAAQRPSMRFVAVKSEAQQAAAMVFRGRDLLVRQRTQISNALRSHMAEHGWIAPKGLAHLDKLATLIADPSAVPDGVRSVCVVLLDSLAVLDRQIALLDKEIARRAREDEVARRLMTILGVGPITATAIAALAPPPGTFAKGRDFAAWVGLTPRQHSTGGKQKLGAISKMGERTLRRLLIIGSSAVVLQASKRGAPKGSWLEQMLARKPRMLVTVALANKTARIVWAMLTSNEDYRAPVAAA

SEQ ID NO: 138080 - protein, 445 aa, unidentified
MTTLAGVMVAVPSASCLSEAPDMRITVSDDFRKPVNIMPTPTIDIAGPVAGIDTHTDTHTVAIVTETGKHLATDTFPTNSNGYQQVTEFLTAHRVTVVGVEGTNSYGAALTRHLIDHGHVVFEVLRPTRALRRRDGKSDPVDALAAARQVLTGQALSTPKDTTGPVESLRMLQITRHQLVATAAKLVTLIKSLLVTAPVTVRQRYTAMTTPLIMTLSRCRPPADVTDPVNGTLTSLKSLATTYNMLRAQCDELDNKITDLVEVINPAMTQIFGCRAINAAELIVSVGENPQRIRSQAALAHLWGVAPIPASSGRTNRHRLNRGGDRQANAALHRIVLVRMCHDERTRDYVQRRTKEGLSKKEIMRCLKRAIVREIYQVLCLGRPVKQSSGLSSDEFRALRSKKGLSQTQVARKLGCAPARISDIETGKRRLSKLKSTYEEFLKTA

SEQ ID NO: 138081 - protein, 408 aa, unidentified
MNAVGIDVSKGKSMVAALRPMGEVALLPQEFLHTEVGLEQMAYAIVALGEDTRVIMEATGRYHEPIAAALHEYGIYVCVLNPLFIKQSGGGSIRKVKTDKADAMKIAKYGLDNWVELREYTPMDTVRQQLKLCSRQYNLYMKTVVSLQNNLISLTDKTFPGVNELFSSPERADGHQKWVDFVMTFWHCDCICRVSEKAFTDRYQKWCKRKGYHFSTEKALDLYAGSCGHFTTLPKNDNTKLLITTAAQQLLAGKTTLAALRAEMTHLAKQLPEYDTVRAMYGVGETTAAQLMAEIGDVRRFPRRSSIVGFAGVDPAVDQSGKHSAKSVPTTKRGSPHLRKTLYQIVCTYLKRSPADEPVYQFLDKKRAEGKPYFVYMTAAQNKFLRIYYARVKECLEAFDERQDTVQN

SEQ ID NO: 138082 - protein, 344 aa, unidentified
MAYYAGLDVSLRSCALCIVDEKGSFRLERELPCEIEAIADALADFPNPVARVGFEAGTMSQHLYFGLWDRGFDVVCMEARQVNAALSAMRNKTDRNDARGIAKVLRTGWFSPVHMKSRESHGVRALLSARRALLSKTIDLANEVRGLLKIFGIRLPSSVSHGRFDEVARGLVEMDEVLAHAMLPLLDTRRALCDQFLELDRRVKRAASRDEVCLRMMTVPGVGPIAALTFKAAVDDPARFRKSRTVAAHFGLTPRRYQSGETDNPGRISKAGDRDVRSTLYAAANALLMRTMAGSRIKSWGMRLMRTKGRRRAVVAVARKLAVILHRLWIDGTQFRPTVEEAAT

SEQ ID NO: 138083 - protein, 421 aa, unidentified
MIEEIAEEPAELLQRAAALDIGKASLVCCVRVPHESRPGARRQEVRTYDTVTPALLELRDWLICQGVTRVVMEATSAYWKPPFYLLEDDIECWVVNARDVKNVPGRPKTDKLDAVWLAKLAERGMLRPSFIPGRPQRQLRDLTRYRRTLVQERSREKQRAEKLLEDAQVKLSSVISDIFGVSGRDMLAALIAGQRDPYALADLARKSMRAKMSVLRQALTGHFTDHHAFLLGMMLDRTDALTAQIDALTARIEEAIAPFAAQIAQLDEIPGVGITTAQEIIAETGTDMSRFPTPGHLVSWAKFAPKARESAGRAKAAATGKGSPWLGGTIGEAAVSAARTQTFLAARYKRIVRRRGKKRALVAVGNSILTITWHLLSDPGAHFTDLGPDWHDRLAPQRRKRQLIAELERLSGKKVTLHDAA

SEQ ID NO: 138084 - protein, 342 aa, unidentified
METAVTIGLDLAKSVFQVHGVDASGEVVVRRRLIRAKVLDFFARLPRCLVGMEACAASHYWGREIRKLGHDVRLMPPSYVKAYVKRQKNDAADAEAICEAVTRPSMRFVEIKSIEQQSVLVLHRVRQTLTRQRTQLSNAIRGHMGEHGLVAPVGRNGLARLIAIICNEDDDRLPEDTRASLRFLVEQLDLVNAQILENDRRIRTNARATETGRRLMEIPGVGPVLASAIVAAVPDPRAFKCGRNLAAWIGLVPKQNSSGGKERLGGITKQGDRYLRQLLVIGSLAVIRYAQRHGTKRPWMVQLLARRTPKVAAVAYANKMARMIWAMMVSGEHYREPQPAAA

SEQ ID NO: 138085 - protein, 351 aa, unidentified
MELEEGPVSIVGGLDIHRKQITFDWLDLETGEVERGKIAPADREHLAAWLDARMRAGADVHLAFEGCTGWRYVAEELARVGVVGHLAEPADTAALRGPKRRAKTDRADAQHLRRLLADGRIPECWIPPAHVLEGRALLETYRDLRAEHTGWLQRIHAVLFHQGTPCPSRGVCSVDGRAELAVLTSRLSPAGQDQVMVALAMLAASEAQLDVVHRKLLLAARQLTGAKVLAANIYGVGPITGLALTCWLGGAGRFSSTRKAVRFAGLDVTVHSSDGKRSSGRLSRQGPAVLRWCLFEAGKTHARTDATDHDYYSAVKDRIDGKRAALSEARKIVRQACHILTELGDDAFAPT

SEQ ID NO: 138086 - protein, 359 aa, unidentified
MYYSGIDLHKNMCMITTLNEAGVIIKQARLPNDDYTILNYFFSLGKEHKAVVESTTNWYWLSDLLRDHQIDLVLAHAKHLTAICCAKVKTDKYDSHTLAQLLRLNLIPIAHQINASLRGPRDLMRARLRLVFKKTSCLNSIHRILEKFNLDPLGNHDIDDLTVPDSLNQLNLNPQYQLQINILQEQIKLIEKQLLYLEKSLHPTLIPNTDVQILLQLPGIGKISAFTIYLEIDNCNRFNDIKNFYSYCRLAPGADNSNRKIKHKSGNKEGNRYLKIAFTEAAFRAIQHYPEIRQFYKNKLRKKHIGIARNLVAKELAKMCYYLLKYKTDYNNTFKGVKLSKPKAQVWPRLASPAEALEN

SEQ ID NO: 138087 - protein, 398 aa, unidentified
MKTAGLDVHKDSIFCAVFDGKHYSDVEVFETFCTGIRKLGEYLRTSDVKRVAMESTSIYWIPVWNILSEMGFDLMLVNPFLIKQLPGRKSDVKDAQWIAQLLHKDMLRGSFVPGERIQELRSYTRSYSKLQQRIVRMLTKMDNILVQAGIRLGSLVSDIGGKSMLSVIDALITGERDAICLSKLVYASKKNKENGKLAAALTGCMKEHHRFNLQMAKAEYDLLIKQSAEYIEKIEAICLRDFPRQSALLKTIPGVSRISSAVIIAETGADMQVFENSGKLSGWVGLRPKNDESAGKYKSTAITKGNRYLKPILVQVAWAASRCKGSYFKDKFNRLSIRKSSKKALIAIARKISVVIWNILKDLTPYNPELQVIYEPAKLDAKIRYHQKEMERITKLKP

SEQ ID NO: 138088 - protein, 341 aa, unidentified
MSIVFAGLDVHRSQITFDALDTETGEIATGRISATPEAVEKWTERFSGRELHVALEACTGWYFVVRALERAGAVAHLAEVTETRALRGRKRRAKTDRADARWLRTLLAEGRLPEAWIAPDHICWLRIRTRLRKTLSDESTSWRQRLQATLFHLGLPSLPERLKGEPATRWLAELELPAAAAERVEVCLAMMQAIEAQLAPIDAELRAYSRRQPGCRALCRHFGIAGATAPTILAELGDVSRLRRSRQAVRLAGIDIGVDRSDRRSRVGKLTKQGSPELRWALYEAAQSACRSTSPDHAQYLELKERGLSHTRASLTISRKLARRCYHTLRELGPAALQEAA

SEQ ID NO: 138089 - protein, 341 aa, unidentified
MSNTNTYIGVDLHKKTCYITVMDYEGKIEKQIEISTDRDEVRKFFEKYREAKVVVESTMNWIPFYENLESLGCKVFLSNPLQTKAIASARIKNDKVDSRVLADLLRTNLLPTAYIQPRAIRDLKELVRQRAHFVELRTRIKNKIHSALFKTNVKHNFTNLYGVAGMEWLRNLELRDVYKQELERYLLTLKHLNGQIEEVSEVIKKTAKLDYDCKLLMTIPGISFYSALMIKSEIGNISRFRNAQKLCSYAGLIPSTYASAEKVRHGRITKQGSKWLRKTVIDAITSGSRNPNRIAIFYKKLKMSKGTGKAKVAAGRKLCSVIFAMLTDQQPFRDFTPVKQR

SEQ ID NO: 138090 - protein, 398 aa, unidentified
MAIGATMKPWLRYDLFGRVSTSDTLSPLYLLRHKARTVSKAALFEKQSLHLQAGAGARKDYHQKELNLMKSSIIIAAALGIDIAKAKFDVCLLKENGRAKHKVFLNTRHGFEQLIRWLDSHQVGDHSRACLEATGSYGEPLALFLFEAGFTVSIANPAAVRAFANAGLSRTKTDRVDAELIARFCLAQQPQAWQPPAPELRELQALVRRLDALIEMRVAEENRLSSGGLTETVRHSLEEHIAYLLAEIKQTEALIRQHINNHSDLKEQSDLLDSIPGIGETTAALLLAEIVNIKQYTSARQVAAYAGLVPRERRSGSSVRGRTCLSKIGNARLRKALYFPAITALRSSDFFKQWAEPLRTRGKSKMSVIGAAMRKLIHLAYGVLKTGQPFDPNWAKTV

SEQ ID NO: 138091 - protein, 349 aa, unidentified
MEGSCHDTHPAARPCVDTHCDVHVAVLLDRLGRKLATATFATSDAANAALLAWTRCYGQVTLAGVEGTGSYGYRLAQHLAAHAINVVEVNRPDRARRRRKGKNDPIDAEAAARTVLAGDATAIPKSRSGPVGQLRALVMARRSAIKARTQATNQLRALLVDGDDELRGQLGPLRKHHLAHACAELHPDGGAFHLALRSLGRRWLALHREIIDLDQAITTIVARLTPRLLARHSVGVHTAARLLITAGDNPTRLRSEAAFAALCGASPVEASSGKTARHRLNRGGDRAANSALWTIAFVRLIHDPRTRAYAAKRTSQGSSRKEILRCLKRAIARELYPLILEALTAPSPA

SEQ ID NO: 138092 - protein, 412 aa, unidentified
MKDLLEISCGLDVHKDKIVACILTGPLGKPTNSEIREFTTLIPDMIALRDWIVSQNCHHVAMESTGIYWMPIYEILEEAFGGDITLLVVNARHMKNVPGKKTDMRDSEWISTLLRAGLLNGSFIPEKRIREFRDLNRYRKSVIRDITSQKNRVEKFLQSSGFRLSSFISDIFGASGRNIIRHLTEHGQIDRSALDSCLKTKTRNRIDEILMSVNGTLSEHQKAFLKILMDHYDSLKEHLAEIEKSLEADMAPFALQVEQLSSIYGISTTASCAIIAEIGIDMKPFKTAEHICSWAGLCPGNNESAGKRKSTSVTKGNPYIKSMLCEIAWVIAGKRNTYLSAWYWRIKQKKGAKKAIIALARKLLVIIYTMLKQGTLFDESCFEARRKSCEQKQLSRYIRELEKHGYHVEAQA

SEQ ID NO: 138093 - protein, 343 aa, unidentified
MDTTTIAVDLAKSVFQIAVSRRPGHVCENHRLSRTRFKRFFAEHQPATVLLEACSSAHHWARELQGLGHSVILLPPHTVRPYVLRNKTDPADAKALLEAFRNKDIHPVPVKSIDQHVIMTLHRFRSAYMAQRTARINATRGVLREIGIFIPAGAKRVVTSVYDLIGDPDSAVPRSLRSILNEACTEITDLEIRVRDIEQDLRVLSKNNPVIGHLRTIPGIGLLSSTALVAFVGDITRFPSGRHFSSYLGLTPREHSSGLQRRLGRISKRGDSYIRMLLVHGARSVLWASKKAKNPDHLRSWALEIERTRGHNKAAVALANKLARIAWAVWNRNMCFESVKEVG

SEQ ID NO: 138094 - protein, 419 aa, unidentified
MSFKILKNNCCGLDVHKTWIYACIGITDSLKRTEYKEARFSSFTKGLNELCEWLSKHNCTDVCMESTGKYWIPVFNVLEKNNIWVTLSHPKYTKPQKGNKTDRKDAKWICDLYMCGMVKPSFIPPADIRELRDLVRYRFKLTCMITGEKNRAHNCLTVSNLKLDDVFSDIFGKSSRSITEQILQHPGETFDVAPFVDGRCKTPVEEIQAAVDGAISKEQAVKLRQCLNHIDELEMHKAEIEREIFRLSDKYESVLSLIRTVPGFDKTPMTAIQVLSEIGGDMSVFPTAKNLVSWAGCCPRNDQSNHKIKSTRISRAGSYFKPVLVQVANALIKSKKHPEFTTRYRRIKARRGHKKAIIAICRMILTAIWHILTDLKPYTPEGFLESRPVNESKILTTSQALNLMKQRGYIIKDDVVPVT

SEQ ID NO: 138095 - protein, 350 aa, unidentified
MLYTGLDYHRSFSYITTVNDRGEIISQKKLPSNGQILDFLKQFNDSMEVAIESTPSWYWLYDQLEDEGFKVKLSHPLKTKAIAYAKVKTDKVDSATLAHLLRSNLLPLSYVPEKPVRLNRELLRYRASLVKIQTGVKNKIHTILAKNNVSHGYSDLFGKEGMTFLHSLTLPENYRIALEGYITVLDAVRREIREASRKVQQLAEEDRDALLLMTIPGMGYYSALLTKSEIGDVKRFRSAKPLCAYAGLVPSTYASGNTCFHGHITKQGSRWLRWILIEAAIHAVKRPGVLRRFYFKVERKKGGQIAKVATARKLLEWIYHILRDGKTYQEMEKIADLLGRGEPGNSSGSA

SEQ ID NO: 138096 - protein, 313 aa, unidentified
MSYVGIDISKAWFDAYCLRRRQVKRFANDEQGWGQLWQWTGPDAHIVMEASGPYYLRGACWSQARGFSVSVLNRRYCQMRLTRVKTDTKDAQLIAEYAQAHRPALWSPPSKENQAMRQLVSLHEGLLRQQTQLRGQREAFSYAPEEEAVVGQVIAEQLKAIRQGLRHIEHRLEMLANQQYQRSYRQLQTIPGIGAKTALLLICVTDGFSKFDDSRKLASYVGICPRIYQSGSSINGRGSICKLGCSQLRKLLYMCSWTAKTCNPGCAELYERMKSKGKPERVIKVAIAHKLLRQAFAVGKSGEGFDKEKAMAA

SEQ ID NO: 138097 - protein, 392 aa, unidentified
MEKHSTEFVGLDVHKESTAIGRASAGRAAGRFVGTVGPILAELLKSLKSLGPPEDLSIVYEAGPCGYGLVRELRARGYACEVIAPSKIPRRSGDRVKTDRRDAVRLAELARAGELVSVMVPDERDEAIRDLSRARVDAVRARLAARHQLKAMLLRHGHRYGRSSWTQAHERYLAKITFAHAAQDATFAEYRQAVSEANERAQRIVEALRDQCTTWRMQPVLEALMTLRGIDFVAAVTLVAELGDLKRFAHPRELMSFLGLVPSEYTSGDSRRLGKITKAGNGHVRRILIEAAWNYRFPARMSVVLQKRQEGQPKVVRDIAWRAQLRLAQRYRRLSARHLHHNKVCVAIARELAGFIWDIGRHVPIRDIPVKAAKTRGSEHKGCRAIAAPAPL

SEQ ID NO: 138098 - protein, 408 aa, unidentified
MIKPIVKCAAGLDVHQASVMCTVLEEQHSGVVRPQTRRYTTYPRHLQELGHWLQERGVELAVMESTGIYWKSVYAALEEAGIQTYLVNARHVKQVPGRKTDVADSEWLAELARCGLLKASFVPPRDLRELRLLSRYRRKMSGYLAAEKNRLQKVLEDAGVRLSCVVSDIDGVSAQRMIAALVAGEKDPVKIADLAVRSLRRKKEELVLALEGDLSDRHRFLLQRISHHIRWLEEQLQEMDSQIVAAMAPYQEEWRLMQTIPGINQLNAAMLLAEIGPHMGRFGSKERLSSWAGMSPGNHESAGKKKRVGTPPGNKYIRSLLCEAAHSAIKTKSQFQGFFQGLVIRRGTKRAIIAVGHKLLEIIYVLLSKKEPYRDPGVDYERLIVNRNAPRWIKALQKYGYLPQAQSA

SEQ ID NO: 138099 - protein, 338 aa, unidentified
MNITTLGIDLAKNSMQLHGIDEFGKVTMKKKLPRSKFPEFIANLPPCLIGMEACGGANYWARKFIEFGHNVKLMNPKFVKPYVKSNKSDANDAEAICEAVTRPNMRFVNLKTVEQQDMQTLHRVRSQIIKARTSAINQTRGLLAEYGIIIPKQIQNVGKYLPDILEDAENELTVIARELFNNSYQQLKYYDKQVSFYDKKIENMSKESERCKRITKIEGVGPIIATAISSILGDAKAFKNGREFSAFLGLVPRQSSTGGKQNLLGISKRGDTYMRTMLIHGARSVVCKAANKTDARSVWVQNIRQTRGFNKACVALANKNARIIWAMLDKNEEYRAAA

SEQ ID NO: 138100 - protein, 339 aa, unidentified
MHNSQLFVGLDVSAGWIDAARQLRDGPPEHRRFGNDADGHAALTRWLTDAGATTGHPARVVMEASGVYSIDLALALHEATAAEVMVLNPRAAKDYRRAHMHRSKTDEIDAAVLCDYALRMPFTPWCPPDGDAGELRQLARRIADLTVERAREKNRLRTARATRTTSAVVTNDIAVNLRHLDRRIDEMVRQALRVVAGSARLSGAYGHLTSVRGIAEKSAVLLLGELLCLPAGMSVREWVAYAGLDVRQHRSGRSVEARPRISKEGSAHVRRALYMPALVAVRCEPAVGAFYDRLVGEGKAKMVAVVAVMRKLLHAIYGMLKHDADFDGALCFRAVPARA

SEQ ID NO: 138101 - protein, 322 aa, unidentified
MSVSNQRCAGIDVSKSTLDIAISNIAQSFTVLNEDGGFNQILKELKRNETQLILMEATGGLESGVAGYLQSEGFDVVVINPRQARDFARAMVYLAKTDQIDARVLLQMAKVINQHPEREKYIRPLPDAHRQLLAAMVVRRRQLTIMLTAERNRLHPSHPQNHESIRFIISVLKSEMARIEAEMSAYISKNFSELSALLSAVKGVGAATVAVLLAEVPELGTLPRREISALIGVAPVNRDSGTMRGRRTVFGGRASVRIALYMSALVGTRHNPVIKEFYTRLVAAGKPKKVALTACIRKLLTILNAMLKNNEAWDPLYHQHAS

SEQ ID NO: 138102 - protein, 429 aa, unidentified
MNCTQNKKIEQVKETTMIVGIDVGSEKHYFRAFNWRGIELTRKPVAFSNSMEGFNSFYNTIVELMQKSELEEALVGIEPTGHYWFDLGQFMGEKDIKFVMVNPHHVHKTKELDDNSPSKNDRKDPRVIAGLVRDGRYFYSYMPTGAYAELRNASNRRFVLVEEQTRAKNRLQKWIAVYFPEYKGIYTHIDAKGGMLVLKKAPTPEEIVRLGVEGIIKIWKDAKLRGNGHKKAMLILAAAMRSIGLKAGLTEARMEIQDLIEDYELQTKRLERVNDLIKGLCQQVRYADKLLEIKGIGITTVAGFIAEVGDITRFDSTKELQKLAGLELGADSSGKHNGKTKISKRGRKRLRYLLFEAAISVVGKNEEFKEIHRYYTTREKNPLKKMQSLIVVACKLIRVFHAILTKGIRYDASKMLKDIRHPGEQLKAA

SEQ ID NO: 138103 - protein, 272 aa, unidentified
MRLYGGIDLHSNNSVVVIQDEADRRLFEKRLRNDLPTILRALEPFAPELEGLVVESTYNWYWLVDGLMEAGYRVHLAHTTAIQTYAGLKHGDDLTDAGWLAHLLRLGLLAEGYIYPKAERGLRDLLRKRSQLVRQRTTQLLSIQNQVLRVTAQRLSGNRIKQLTAEEVADLLPEADVALAVTSNLAVMDCLVEQIQRLEHVIRKRVRPRPELDCLCTVDGIGPILAWTILLEIGDIGRFGRVGQFASYCRCVEAHRFTNGKKNGENNHFTLR

SEQ ID NO: 138104 - protein, 407 aa, unidentified
MNAVGIDVSKGKSTVAVLRPFGEIVASPFDVSHSPKELSELVTLLKTLDGDTKVVMEYTGNYYLPIALFLRNNGLFVSVVNPILVKDYSTKSLTVRKVKTDKKDSLKLASFALDRWKELSPFSAQSEARLLLKSYNRQYNQYNKLKIILKNNLIALLDQTFPGANTLFSTPTRKSDGHEKWVDFVLKFSHSECISKKSFSFFLKSYLSWCKKFGYKFSKSKAQAVYDFACNCSPSLSFSDSSALLVSNAIIQLNSINETLASLASEMNKIAATLPEYDSVMSMFGVGSVLGSQLIAEIGDVSRFPNKKALVGFAGLDASPFQSGNFNPQSRSISKRGSAALRKTLFQVMSVVMQRAPTNNVIFQFMDKKRSEGKHFYVYMTAAANKFLRIYYARVTEHLNLFTTTTA

SEQ ID NO: 138105 - protein, 438 aa, unidentified
MHRIGYVQKRALVAGLAVLGIDPGKEKHVGQLLNPEGLPLGKAFTVPVSHAGYTETLWKELATRLPAHDPAHLVIAIETACNLWNTLAAYLHDQGYTVLLVSPLTTHHARPLHNHDFSRTDPRDAFLIAEQAYRGHFDAYRVFDDQLETMHQLSLAYYKLAKDKQRVRQRLRSLMEMYFPEYLQAFDLESKTSLYLLERAFLPHHFLEMDLQTEARQIGARSRQKHGLKTLQRLQAWAATSIGVPARPREEALRLVLDGWLAELRTLHAQIAQLQKVLIQQAQSLPVFQILVSIPNLAPWLVALFIAECRGLDANTHYKQIEKFAGTNLRLADSGNYNGPRRISRLGNRRLRKVLFQMTVQTAKVVPQVRRRFLQRQLQKGAYRKSIIAASSQLLRLIHALIKENRIYQPVRKWNRQLAPLEKAYAEKKAAAKRRAAA

SEQ ID NO: 138106 - protein, 356 aa, unidentified
MDNRKYIGMDVHQASISIAVSDAAGKVLMESIIETKAATVLEFIQGLRGSLWLTFEEGTSAAWLYDLLKPHVTKVVVCDPRKNSLLKAGNKNDRVDARKLSDLLRAGLVTPVYHGESGVRTLRELSRSYLAASKDLTRVMNRLKAIYRSWAIPCAGQQVYSPRHRTAWLEKLREAGVRRRAEQTYQQLDFLMGIRKETRKELLAESRKHPAREILEQIPRLGPIRVALLIALLQTPHRFRTKRQLWNYCGLGLRTRSSGEYRYTGGQLQHARKPPALRGLNVNHNHDLKNLFKSAATQAGTSKDDPLGEFYRNLLARGMEPPMARLTLARKIAAIALKIWKKGERFDPAKLKQQAA

SEQ ID NO: 138107 - protein, 357 aa, unidentified
MSKPTILKQSIGIDVSKDKIAVCFAVEQTDKKFRILATRKFDNNASGFAQLHGWIKKHQKADLPVNVLMEATGVYYESLAYFLREINVRVSVVLPNKTKAFAKSLDYKTKTDGIDAKILAQMSLEREVSEWAPAGKNMLKLKRLCRERIELLMDKTSVNNRLHAKKHSYKGEGSSMKRAEKILAFLKKQIEEVEQEITKLIASDPELKGKVEKICSIKGIGIITAATIIGETNGFALIKNKAQLVSYAGYDVVENQSGTSINGKTKISKRGNSFIRRALHFPALTTIKHNPSLKALYDRVFESTRIKMKAAVAVQRKLLVLVYTLYRKDECFDPQGLISNKSNLPNKNRQEQQSVPA

SEQ ID NO: 138108 - protein, 411 aa, unidentified
MHEKQKHFYVGVDLHKHHHVAVIINCWQEKLGEIKLENKPSAFSTFLLDIDKLMEEGLTPVFGLEDVGGYGRALAKFLTDHGQFVKEVNPALSFAERKSHMTTQKSDSWDAECVARILLNQLNHLPDAKPHDLFWSIQQLVTRRNALVKAQGALKNQLHIQLCHHYPSYKKFFSEVDGKTALAFWERYPSPSCLEGVSVKHLTTFLLEVSNNTCSVKKANEILKLVKEDGNTTKEHQETRNFLVESIVRHILFGKQEIGKVERELKELMSLLDFQLDSMPGIDLVTASALIAEIGDVSRFPNANKLARFAGIAPVYFGSGGKGKEQKSKQGNRALHALFYNLAVQQVQVAKGSKLPRNPVFYTYYQRKLKEGKTKGQALVCIMRRLVNIVYGMMKYKTAYKLPIVQEKEVV

SEQ ID NO: 138109 - protein, 349 aa, unidentified
MRFYLQQHRFYCGVDLHARTMYLCILDDAGQPLLHREFPAQAGAFLDAIAPYRDGLVVAVECMFAWYWLADLCAEHGIPFVLGHALYMKAIHQGKSKNDRLDAAKIAGLLKGKLLPQAYVYPKAMRATRDLLRRRSFLVRRRADLLAHVVNTNSQYNLPPLNKKLVYPANRAELNLAERFTDPSAKKLIECDLALIDALDAQIHDLELHLVRTAKIDDPQAYARLQSIPGVGKILGLTLLYEIHDVARFPEAGNFLSYARLVRPTHESAGKPQGFGNKKIGNAHLRWALGEAACLYLRSSDQAKRWQARMHKKHAPGKTLGILAAKLGRTVYHLLRTKTVFDERRFFAS

SEQ ID NO: 138110 - protein, 466 aa, unidentified
MENNYILYVGMDASKGKADAAILKVSDRRSVKPKFLCKKLSFKFVKSEVASFLETVRSYSDVNCTSICFALEVTGIYSTNVYNYIKANLYENESIKFLNTDFVNQWRNAHNIAKSDPLDAQTISTIIGTDSDVQYVNDNVFENKNGYQDLKALVHRHYQIKKIYSQEINRLIAQCDCLFPELQYVFEPKSAAFIAVLSSYPTTHDIINASRVEVFDVVYEATKHRCSMDKVDKLFELCQDTLVPDDISSYGKSIILDLVENIKNIKGQLKSIERYIRDVVSLNPAYKLLLTITGCDPITTATVIAETGNIRRFKNADCFVSYSGTSPRNKRSGTSVETMGKISKKGSRYLRHAIYMIAEFARRHNPVLKHQFEKIKNGNKKRHKLANIAMANKIARYIYSIMKNKSSFVILHDHIMRLPEETRYTFFNSISLDFPKNTRKQIYQYSDINGEVHRFVYIKTDEMIPV

SEQ ID NO: 138111 - protein, 308 aa, unidentified
MTTIYTGLDIAKLNLQLHLLGRRHDLPNTAAGHRRLVKLLAALPEAHVICEATGGYERDLVAALHDARIPVSVLNPARVRHFARATGQRAKTDPLDAAILTAYGQALQPPPTAPRTPQEHHLSELIRRRVQVLALLVAQRQQAQRLTVPALRRQAQSLVRRLERDLKQIETQLGQLQAQAKALDERVQKLIAITGVGTITALGVLAELPELGTLNRRQAAALAGLAPHPRESGQWHGRRRIGGGRAPVRRALYMAALVAARSNRQLKAFYQRLRAAGKPAKVALTAVMRKLIILMNHTLKNPNFVPQN

SEQ ID NO: 138112 - protein, 405 aa, unidentified
MAQIEDKICGADIHKRFLVATVLSRDGFRMQERFGTNSDELLKFRDWIIENRCSKVAVESTGSYWYPIYAALEGKVEFVLANAYQIKHIPGKKTDMLDSEWIAELCLNNLIKPSRIFPRNYRNLRSLTRGREALIKARTQLKNRVHKILDSCCIKLSSVVSDIFGKSGRHIVEGLLKGESLDEIISEIPSKRIRNKKDQLIEAVRTSLEPAQIFQIQSLLHVIDGLSKEIDETSNEIRIESTTLKEDLRIAISMPGMGFASASVILSEIGDYKDFSTSDQIASYFGIVPSVYQSADKLNTGAITKHGSPHLRRMLVEVAHAIVRSKTESKLKRFFLRIKARRGTKIAIVALARKVLCILHHLLVHREEYREDGVSRPKWVNKGCNPTPEMTLDKMIEVLMKAGYL

SEQ ID NO: 138113 - protein, 343 aa, unidentified
MQTITTIGLDIAKSVFQVHGVDAPGQVVIRRQLKRRHVLSFFAKLPPCLVGIEACASSHYWSRELQALGHTVRLMPPAYVKPYVKRQKNDMADAEAICEAVTRANMRFVPTKTPEQQSCLMLHRTRHLFIRQQTAVINSIRAHLAEFGIVAPVGRKGVTELLHVVADPNDGRVPEVARACLAALGTQLLRLKEQILEFDRMIIAWHRSNQTSKRLHCIPGVGPMLATALVASVADPKTFRSGRNFSAWIGLVPKQHSSGGKDRLGSISKQGDRYLRSLFVAGALAVIRYAKIHGTGHRPWLTALLGRRPTKVAAIALANKIARMAWAMMAKGERYKQPVALAR

SEQ ID NO: 138114 - protein, 375 aa, unidentified
MEGAPMLDTTTFIGLDVHARSIKAVSLDVMTGEVRAATFGYDAGAVAEWVRSVDPRARCVYESGVTGFDLQKRLSGLGVGCVVGAVSKMIKPSADRRRKNDRNDAEFLARMLSVGNVVEVWVPDDECEAARDLTRALEDARDDLSRSKQRLSKFLLRHGLVFDERTPTGRRKGNWTRAHWSWIESIRFAERADNDVLAYYVDAVRRAAEEKARLEGLVEAEARKPRWRKRVDSLRCLKGVDTASAADLVFEAGEFSRFRNARSFAAWVGLTPSEHSSGESDRRGAITKAGNKHLRKTLVEAAWHYLTCSGRPKGLAKGQAPDRGARRHAAKGVRRLVERREALLARGVHGNKANVATARELACWVWAVGLMAEEA

SEQ ID NO: 138115 - protein, 427 aa, unidentified
MNNTQNDKIAQVTNETMVIGIDIGSEKHWARAFDNRGMELSKKAFGFSNTAEGFASFEVWYENQRRAAGMKRIMVGLEPTGHYWFNLNQFLTENGVRVVLVAPQHVKHSKELDDNTQRKDDLKDPRVIAKLVTEGRYFLPYRPTGVYADLRDGFNRRCGIVESMTRAKNRLHRWFSINFPEYLHAYGSVTAKTGLMVLKKAPLPKDIVELGVEGIDKIWRDAKVRGAGKKRAMTLVALAEQSIGEKAANEAARLELWQLLEDYDHFAHQFEVIEEMLKRKIHEVPHADNLLAIPGIGYFTVMGFFAEVGSIDRFDDPKQIQKLAGLAVVENSSGKRKGLPGISKRGRDRLRGVLFQAAMSAVKNNQEFREIHLYFTTRKDNPLKKMQSLMAIAGKIIRVFYGMVRTGGTYDPERLLRDIRRPEKDAA

SEQ ID NO: 138116 - protein, 321 aa, unidentified
MDKDIKIVGVDVSKLKLDVYSEEEGHGEFTNTSEGFKNLVEVYGASSHYVMESTGCYHVLLALYLSNKGIKVSVENPLKIKRFIQMGLIRVKTDKADAKMICNYGLSHCPKLWIAPDEVHQSSNSLFSLLQYYEKQRTSLKNKIHREESLGSPSREVISSLKKLLKTYDKEMDQLELSLEKLVSSIYKEELKLLRSIPGIGVKTSILLVLMSNGMQNFESSGQLCSYAGLTPVIRESGKSVRSRPRISKMGNGLLRRHLFMCSFNAVKYNGSCKALYERIKGKGKSGKVGMIAVCNKLLKQSFGVLKSGQPYSENFSLKTV

SEQ ID NO: 138117 - protein, 423 aa, unidentified
MEVMHRRVAGLDVHKETVVACVRVMDGRSPTRECRTFTTPTQGLLELLGWLTASRVTHVAMEATGVYWTPVWKILSEGDFTLIVANAAHIKQVPGRKTDMNDAMWIADLLACGLLKASFVPPEEIQELRSLMRTRKQLVREQTRHVQRIEKTLEEANIKLGTVLGDLMGASGRRMIEAMIAGERDPHRLAALAERSVKASPKALHDALHGRLREHHRFLLQLHLRQWDALDAAIRQIDEQVAGHIARVDQQAADGQPPFGELIARLCAIPGVSFLSATAILAEIGRDMSRFATAGHLIAWAGLCPGQNESAGKRKSSRLRKGAPWLKTMLVQCAWAAKRAKHSYYSAQFHRLCGRRGPQKAICAVAASILTAIYHMVRSGASHRDLGADYFDRRTPQARAKRLVAQLAKLGFAAQLQPLAVAA

SEQ ID NO: 138118 - protein, 401 aa, unidentified
MNAVGIDVSKGKSMVAALRPMGEVALLPREFLHTEVGLEQMAHTIIALGEDTRVIMEATGRYHEPVAAALHEYGIYVCVLNPLFIKQSGGGSIRKVKTDKADAMKIAKYGLDNWVDLREYTPMDTIRQQLKLCSRQYNLYMKTVVSLQNNLISLTDKTFPGVNELFTSPERADAHQKWVDFVMTFWHCDCICRVSEKAFTERYQKWCKRKGYHFSAEKALDIYAGSCGHFTTLPKNDNTKLLITTAAQQLLAGKMTLAALRAEMMRLASQLPEYETVRAMYGVGETTAAQLMAEIGDVRRFPRRSSIVGFAGVDPGVDESGKHSAKSVPTTKRGSPHLRKTLYQIVCTYLKKSPADEPVYQFMNKKRSEGKPYRVYMMASANKFLRIYYATVKQYLDSLEV

SEQ ID NO: 138119 - protein, 334 aa, unidentified
MRFVGLDIHWRRTTMCILDRHGKQVKQATIRGGWEKVLAVVADLPKPIAVCYEASCGYGHLHDRLSKLADRVVVAHPGQLRLIFRAKRKHDRVDAGKLAKLLFLDEVPPVYVPSGQVRSWRQLIEYRRRVIDKRTRSKNGIRTLLRSHGIVSPRGLWTGKGRQWLRQVALPELGGFQRDLLLEELEQFDRQVEGMTRLLNRMGRGHPGVVLLQTIPGVGPRTAETIVAYMDDPSRFSQARQVGAYFGLVPCQDASAAANRLGHITREGPPTARKLLVEATWQGIRQSESIRGYFERIVGGKPERRKIAVVATAHHLLRCMHAMLRTQQAWREAA

SEQ ID NO: 138120 - protein, 429 aa, unidentified
MNSTQNKKIEQVKETTMIVGIDVGSEKHYFRAFNWRGIELTRKPVAFSNSMEGFNSFYNTIVELMQKSELEEALVGIEPTGHYWFDLGQFMGEKSIKFVMVNPHHVHKTKELDDNSPSKNDRKDPRVIAGLVRDGRYFYSYMPTGVYAELRNASNRRFVLVEEQTRAKNRLQKWIAVYFPEYKGIYTHIDAKGGLLVLKQAPTPEEIVKLGEEGIIKIWKDAKLRRNGNKKALKILNAAMRSIGLRTGLTEARMEIQDLIEDYELQTKRLERVNDLIKELCQQIRYADKLLEIKGIGITTVAGFIAEVGDITRFDSTKELQKLAGLELVADSSGKHNGKTKISKRGRKRLRYLLFEAAISVVGKNEEFKEIHSYYTTREKNPLKKMQSLIAVACKLIRVFHVILTKGVSYDASKMLEGIRHPGEQLKAA

SEQ ID NO: 138121 - protein, 312 aa, unidentified
MIDYDAYIGLDVHKASISVAIADAGRSGEVRLFGTIPNEPEAISKLVKKLGNRRIEFVYEAGPCGYNVYRQIEALGFDCRVVAPSHTPVRPGSRQKNDTRDAMMLARLLRAGELTFVWVPDAVHEAMRDLVRARSVASHDGRKARTLIQMFLLKHDLRYPAKSWTCSHRTWLRNRQFHHHAQQIAFQSYLNRLEQAEARKKELEEQIALVSQTWSLGRTVLNLQAFKGVGLVIAATLVAEVGTFSRFDNPRKLMAYLGLVPGEHSSGGSIRPRGITKTGNCALRALLFEAAWSYRGQAKVGDWMHKRRPDVP

SEQ ID NO: 138122 - protein, 393 aa, unidentified
MQSVLAIDVAKGKSMVALINSCGEVLIEPYEINHSIKDFSNLLNRIKQLKLDNISVIMESTGIYHRPVERFFLENNFKVYTINALYSKMYKRNLRKTKTDKLDCLSLSELYFTNNFKQYIRPDNIYLNMNALARQYFALDQLCTNLKNRYKNLVYLCFPEYELLFKKEAIYSDIALSFIADYPHAEIISNTRIDHLQHYFKNNNYKRWKQKPTLIKEAAKNSYPSVSKDDEIVSDLSQLAKLIRNYQNEINSIKLKLINYGKQTKYFTAINSIFGIGEFTASIMIAELNDINRFNNIKELTAYCGLDPSIKQSGKSINIHGPISKSGNKYMRKLLFVSCLNIIRLSSKCHVKNDIEIYYRKKRNEGKHHYAAMIACTTKLLRQILALCKQLDK

SEQ ID NO: 138123 - protein, 343 aa, unidentified
MYYIGLDVHKKTISFCVKDAAGCVHREGKIGSTRHELDAWIRTVPQPRMIAMEATIFTGWIYDHLLPHAEKVKVAHPLMLRAIAAAKRKNDRIDAVKIADCLRCDFLPECHMASTEIRNRRRILRYRGLVLRQAVQMKNRVSGLLMETGVSYNKLRLHRMGYFAELMTTNEEVSESIRPLLKLCREHIDRSIRLDTTLLRSLEQDPLLADRLRRLRTIPGVGPITALTWALEVGDTSRFRSIKQAISYCGLCSAEKSSADKVMRTPISKQRNKHIQQVLVEAARLAPRYSDELALLYEKERQRGNGNRATLAVARKMVALMLAVERRNTDFVPAAEFRRTAAA

SEQ ID NO: 138124 - protein, 342 aa, unidentified
MSMVVIGIDPHKSSHTAVAVDQTGRRLGQKTVTADPDGLLRLRSWATQFGTGPRWAVEDGRGVAGRLVRTLIGTGATVVWVPPKLMAACRASARTRGKSDPIDALAIARAALREPDLPTAHLDQTALDLRLLSDRREHLVNRRTASINQLRWHLHDLDPALDQTHPRLTGPRAQHTLTTALSTLPASVRRDLALDLLTEITTLTQQITQLEHQLRTRVQPLAPTLLAITGVSTVLAAKIIGETAGITRFRSPAAYAMHTGTAPIPTWTANKPHYRLNRGGNRQLNTCLHRIAITQLTHHPPARTYRDNWTKHHPHATTKAALRALKRHLVNTIYRALTTDLT

SEQ ID NO: 138125 - protein, 518 aa, unidentified
MKVLYERVAGIDVHKDMVKVAIRSPGEKPWTRKTEILEFRTFYGVLQEMARELRRRGVTHVVMEASGVYTEPVYYALCEQDFEQVAVINPAHAKALRGHKTDAKDCARLAELFECGLLRGSYIPPAELKEMRDLTRYRMKTVQARTSEIQRLGKALESAGIKLGSVASSITGVASTAMIEALIDGERRGGVLADLAIGRMRAAGKLTDLSMALAGRFTEHHALLCRLHLDRIAVFDDAVDGLDKRITGKAARWQREAGLLTSVPGFGDVVAQAWLGEIGPAPHRHFATHEKLASWVTLCPGNNISARKRKHGRTGDAGTYIKPMLVQAAWAAIRVRGRLQARYNRLVRRFGGDKNPGAKKKAITAIAHTLLKIAYQVLKSGTPYQEPGADFYTRRESPEHKQAWLERQLQKLHPGCTITVTISPPEAALPAGTKTTSPIPTAPEPPPTQAPRPSRRTSQRHCPALATAQARVHCRAPTGDPVIVSGADDGTSTRSGGAGPRSERTGGPGPQLGRHRLA

SEQ ID NO: 138126 - protein, 458 aa, unidentified
MTATRVRHSTTPGRILYLALELGWNGWKLGFSTSPAQPVRQRSLRARDLAGLLKEIAAAKQRFGLPPETPVRSCYEAGRDGFWLHRYLTDQGIDNVVVDSASIEVNRRARRAKSDSLDAEKLVKMLMRYHGGDQKIWSVVRVPSVADEERRHLHRDLQEMKAERTRHNNRIKGLLAGVGLDVEVAADFPERLKELRTWDGAEVPGQLRQRLLREFERWQFVHQQILALDSERARRIRQGTSKQVQMVRDLLRLRAIGDSSAWLFVMEFFGWRRIRNRRELAALAGLTPTPYQSGNRDREQGISKAGNRRVRMMAVEIAWCWLRFQPQSQLSLWYQKRFGKGASRLRKIGIVALARKLLVALWRYLEARGGTRRGGDQGRGPAAARLRGGGLHVTVLRPDDAKPWSKRADNGEHHSEFKGVKTVVRGNGRRNRRNLVQAAVTVPGFPSGMPSVRWVRLV

SEQ ID NO: 138127 - protein, 322 aa, unidentified
MAMQALITKPIVGVDVAKDELVIYRADLDLLEPIPNNQTAIKKWLKPLSGNAAIAIEATNIYHVMFVDLAFEAGCDVYMVDGFELSHYRKGVKIRAKTDAIDARLLARYLKNEAEELRPWTPPSPLYRQLLSLFRRRAALVQARTGLAQSWANEPLLKTAFAAQVRSMQRLEALLEKMIKSLLEKAGLMDQLKRCMKVEGVGFLTAARLLASFQRGEFSGGNAFIAFLGLDLRVAKSGKKQGRPCLTKRGDGEARRLLHNAAMSASRTAAWKPYYEEQRARGFSTTQALVMLARKLARVVFALLKNQSEYESKGGLRASPQP

SEQ ID NO: 138128 - protein, 351 aa, unidentified
MFFNKINLTKDDDVYIGIDAHKDSYNIGIWLNDAPAIDYVMPANNKKLIRDVEKIRPAIKNIVYEAGPTGYALARELQNQDLPVQVIAPAITPRPATKQTKTDRLDCRKLAQYAAKGLLRQVAIPTRQQEADRQLTRMRAHIVDKLKRIKIQIKSFLLQHGIEQPAGLKNWSLEAVNSLKRINLNEYLRFSLDLMIEQLDFLKNKLKGVESKLKELFEQKRHSKKIELMQTHPGVGPVVAGMFRTEIFNPKRFKDKAQIAKYIGLSPQITQSGQSLRDGPIIKTGRAQLRSTLIQAAWRWVAKDPAAKRIYRRLLVNTAQPNKAIVAMARRLAVNLWKISCNNHAYIAPVY

SEQ ID NO: 138129 - protein, 370 aa, unidentified
MAKRSMFVGMDVHKESIDISLAEEGRDGAVRHYGVIPGDLEALAKVVRAVRAPDRRLRFVYEAGPCGLGIHRYLTAQGEDCVVGNPSSMPKRSGDRIKTDRRDGNALARLHRAGELTAIYIPTADDEALRDLVRAREDAVGLSTQAQHRLKAFLLRQGRRSPGRAGWTQPYRRWLADLSFPLAPQHIALQEYRDTIDETERRVARLADQRRQITPTWRWAPVVDALQALRGVSFVTAVGLVAEIGDIRRFTHPRHLMAFRGLVPSEYSSGPSVRRGGITKAGNPHARRLLAEAAWAYQGVARIGRQMLYRQEALPKAICDIAWKAQLRLTSRFRKLVARGKAKPKVATAVARELTGFIWAIAREVPAPPA

SEQ ID NO: 138130 - protein, 348 aa, unidentified
MLHAGLDLSRTRLDYCLLDERGDRVDVGAVPPDGDGLRGFARRVDLRHGPVPVRAAIESMNGARFVHDTLEREGWEVEVADAQKVKGLAPLACKTDRIDAWVLAELSRRDLVPAIWLPSFELRAERERARFRLFLVHKRSSLKHRVHAQLLAFGHRCPVSDLFGRQGRELLARLEFPEPWRGGVLAAVAMIDDLDRQIAGIDTGLRALGADHAYVPLLMSAPGIAWVLGYTIASEIGDIHRFSSPTKLCGDTGLCPRVYQSGRTDRRGALTHAGPRYLRWALMEAATHACRHPVYRERYQRNKARLGKQRGAKVAQVDIARRLAEAIWHMLTTNTPFAPAGATVALAA

SEQ ID NO: 138131 - protein, 348 aa, unidentified
MKNKSFVGIDISKNVIDVSIFREDTNIKMFPHEVFNNTRKGFGDMCSWLKKSRVVLSQALFGMEFTGCYSLDLEKFLTSKNYSFCMLSTRIVKHHPMGTIDKRDKNDSAKIADFLYRYDGTECAKPYKLPSKAMQQLKQLVNERKFLVEQRTNFMNRMQMFETKEDSAMYESYIKKLNHDIEKIDQEECELMSKEEDVFDTFQNLLTIPGIGFVNATNIIAITRNFTAFDTARQYARYVGVAPCSHTSGTSVKWRARPSAHCNGQVKADLSMAALRAVEYDVEMQIFYNRKLGGRKDSDTKRKALNAVKFKLIRRMFAIGKQKRKWEVLNTSDDRKNLHIEKSKASEL

SEQ ID NO: 138132 - protein, 351 aa, unidentified
MKTKNTACPKLFIGIDIHKASWSIRMATDLFQGKRMTMPSDPENLKRYVEKYYMDHEIHCAYEAGCCGYSAHRAFSSFGWHSIVFNPADVSRTGKSQFQKTDGIDADLICRELRDQRLVGITVPDVEREHLRCLFRRRNDLVKDIRQIKSQIKGQLLFMGIKIPQEHDNSYWTHAFRKWIESLILANETAKSAITSRLLQFEFLDKNVREVSNELRKYCRTHYRKDYRLLRSIPGIGGIVACGILSEIGDLRRFGNFKQLAAYVGLMPAIHQSGDNTRSSGINPRGNSIMRSYFVEAAWQALRFDPVMQKYYRTHAGRDSKSILIKVARKLLSRVHSVIKTETPYQIGVIA

SEQ ID NO: 138133 - protein, 327 aa, unidentified
MKVVYEVCCGIDVHAKMLVACLIGADGTKQIRTYSTMTDDLLKLHEWLVAAGCTQVAIESTGVYWKPVFNVLEDALTVILVNPEHARALRGRKTDVKDAEWLADLLRHDLLQPSFIPPPEIRELRELTRYRESLVGEQAAVANRIQKLIESANIKLGQVATDVLGASGRAMLRALAEGETEPSKLADLAGGQLKEKRALLIRALPGRLTTAQRLVLGELLARWSELETAEARVIKEIDQQLQSPAHPRLARAREILDTIPGLGPRVVEVAIAEAGVQMREVFPTDAHLASWAGQCPGNKASGGKRLRAAPAKATPTCARRWCKRLWV

SEQ ID NO: 138134 - protein, 368 aa, unidentified
MPDAITGDRPELKPVNIGAAAIDIGSKMHVAAVNPTCTDVPVRAFGTFTQDLHDMADWFKACGVTSVAMESTGVYWIPAYEILEQHGFEVILVNARYAKNVPGRKTDVSDAAWLRQLHSYGLLRGSFRPDAEIATLRAYLRQRERLVEYAAAHIQHMQKALMEMNLQLHHVVSDITGATGMRIIRAIVAGERNPAVLATYRDVRCHSSIETIRAALVGNNRDEHLFALTQSLELYDTYQAKMLDCDRKLEALIAALSDKGAKPVGKLSRPRVKTKQVNTPSFDVRAALYGVLGVDLTEIHGLGPSLALKLIGECGTDLRAWPTAKHFTSWLCLAPGNKISGGKVLSSRTRRSSSRAAALLRLAATTIG

SEQ ID NO: 138135 - protein, 487 aa, unidentified
MAEEKVLCVGIDVSSRSLQVAYCDGAGTPVGRVQSFPNDALGVASLCRAVASTARTMGRQVGVIAAVESTGDFHRLAARALSEQTRLPVEVHVLNPREVKWFRKLELKDSKTDRVDAELIARFLAKIRPQPRAPMPQAFEALQDATRTRRRCIEERTALKNRLHRLLRTHFPGYRQALGAKFSVRTLVVLAACPSPHDLLRRGVSRLAELRNCDGKRIGPAFAQKVIALAKAALVRSLPAMARLSLQDAAARILQLNRFLHGMDAAIAQELDELFPNNVLLSVPGLGPVSVASILAEVGDIRRFPDKETFVGYCGLYPVAWESGDTRLRFRMTRKGNRMLKMTLLVASAAARQYNPAIRQFYARLRARGKGKKAAGGAIARKLAEIVWAVLTSNQPWSEEIALRGIARGEEMAEKRRGERRLTGDAAGQAPTEPERPHQPATKTTGPAAPRSCAPRPDSTISKHNRKGIRTTNRRRAHPLTGGPISP

SEQ ID NO: 138136 - protein, 349 aa, unidentified
MNQDEIILGVDTHLDKHVGAVISAAGKLIATQSVETTSAGYLQLLAWARSLGELRRAGIEGTATYGAGLTRVLRDNNIDVFEINRPDRATRRLRGKADPTDAESAACAVLSGRATAIPKKQAGAAYAMRAVSVARRSAVKARTQAINQLRGILVSAPQEVRERLLHTKAEACVSACARIRSLGKTPLLQSLTTTLRLLAKRWLALAAEIKLLDTQLEHLTNNHAPRLRKEFGVGAQTAAVLVCVAGDNPDRIKSEAALAALCGVSPLQASSGKTTRHRLNRGGDRAANNALWTIAMVRMRSDARTQAYVARRTAQGLSPKEIQRCLKRYIVRALYPLILADLGKLAAAS

SEQ ID NO: 138137 - protein, 452 aa, unidentified
MGKAIGVSRGDRNRNARLARLREQVPLVNAIVAIDLADVKQMVVVCDHDSKVLARRTFGCKAWDLGRALDWAADRAAAQGFAGVTVACEPTGHRWRVLGQLATERSMRFVCVQPIQTAYARRSEDLTFDKTDEKDAVLIARLTAQLRCYVPEPADESTATWARLRHLGARRHKLLTETTAQVQEVRDLLECVWPAALSTAAQPFKSRTWAAAMTVIVDRDGGDLDRTRRLGWARFERAVRREITRRGGQKPSLRIARNLYTALTDTTGLVAHRAGALERVAMVLADWEVDHTRLRQTEHRMTAVLDELGLTTLATSIHGISPVGAAAILAETGDPRRFATGRALVKHAGLAPREKKSGTFTGKTKLTGVGRPRLRAAAWRAAWGALQTNTVYATRYRHLTDREHNPLKPTQAQAVIAATILRQLHAVITTERAWDPHIATAGTAEAEVTLAA

SEQ ID NO: 138138 - protein, 324 aa, unidentified
MISVNYVGVDISKAYFDVAIRNNERYSYHKFSNDKKGFNTFKGLLKDNQQVVMEASGPYYLSLARFLYQEGFTVSVVNPLVIRRFCQMRLTRAKTDKKDSRMIAEYGYTEQPVGWKPEANYMLELRQLQAATDLMNKSRTGFLRQLQALQINPHVCEEAICSIKKAIEKLEKELLKLEALMLKLIKTNHGEMYSRLHSIPGLGKRSTMLLIVLSGGFSKFNSSKQLSSYIGLSPRIFESGSSVKGRARITKMGMSKIRAVLYVCAWSAKRCNAACKALYERLVAKGKAKRQALIAVANKLIKQAFAIAKSQTLFIENYSKNTCF

SEQ ID NO: 138139 - protein, 391 aa, unidentified
MIYIGIDVAKDKHDCFITNSDSKVLFKAFTIFNNLDGFNDLYQKIESVMDDVTKVKVGLEATGHYSYNLLGYLIDKGLPTYVINPLHTNLYRKSLSLRQTKTDKVDARTIASMLMSDVNLKSYSDTSYHNKELKSLTRYRFDKVKERAKLKTSVSRLVCILFPELEKLVPTLHMASVYALLSEFPSAKHVATAHLTRLTNLLSESSKGRYGKDTAITFRDSARASIGSNMPAKSLELKHTIKLIQELDSEIDEIENEIKIIMDEINSPILSIPGINYRMGAMIIAEIGDFNRFDSPDKILAYAGFSPSTYQSGQLDGAYAHMEKRGSRYLRYALYNATKYVCHWDPTFAAYLAKKRAEGKHYNVAISHAVKKLVRVIYHLEKTKQQYIKAA

SEQ ID NO: 138140 - protein, 404 aa, unidentified
MELKPLYRCVAALDVHQAKLTVCVLQEDAEGEVQVELREFGGFKRDRREMAEWVASFHPEEVVMESTGIYWKSPYAALERCGIHALVVNARHVKQVPGRKTDIADAQWLAILARSGLLRGGFVPPANFRELRLTSRQMQKLTGILAAEKNRLHKVLTDAGIRLAVVVSDIHGQSARAMVKGLIAGESPEQVLKLASKRLKSTEEELLDALDGELSAEHRFVLGELMDHIEDLEQRIARFSGHLLQGLAPQQGLLQALQTIPGLDERGAAMLLVEIGDDMDAFGSGEKLASWAGVCPGNHESAGKRKSGKKRKGNPYVRRILCEAANAAARTRSALAELFKPLLIRRGRKRAIFALAHKILKIVFVLISRGDYYRDATVDYEAMSVERNAPRWMRMLRKYGYISA

SEQ ID NO: 138141 - protein, 402 aa, unidentified
MERCAGVDWAKDEHVVCVVDEQGVVVERSRHASDGHGVQGLVEGLVALAVSQVAIERPDGPVVAALLEAGIVVLPVHPNQIKAARPRFRSAGKSDAFDAYVLAELARTDRRRLTPLMPDSDATRALRAATRARDDLVALRVRLANQLRDQLERFWPGAAEIFSEVDSPIALSFLERYPAPEDAARLDAQRLRAFLARNHYCGRRAPEELLDRLRRAAQVAVAALECETRRGIVLGLVRALRPVVEEIARLTAQIGQALAEHPDGAIFRSLFRDPKSAVTAAQLLAEIGDVRARYPTKEALMADAGMCPVAVESGRSRTAVFRWACDKRLRDAVGVLADASRHHNAWAADLYTRARARGKDHPHAIRILGRAWLGVIWRLWQDRTTYDPARHRALQALVGVGG

SEQ ID NO: 138142 - protein, 375 aa, unidentified
MSFTSDAILVALELSNSNWLVGVRMPGARKSQMHRIDAGDTTALMGLLNGLKSRHERASQIVAPIFCCFEAGRDGFWIQRYLVDRGIPTHVVEPTSILVNRRAKRAKTDRLDAEGLLRVLAAYLAGDTEICSMVRVPTPEEEDRKRMHREREHLVQEKTRIENRIAALLATQGVRSRPSLRSWERDMAALRTGDGREIPDHLATELGRLRRRLVLTRELIRELDEQREAFLAAAPADDKTTAKVVALSTLYGIGDNFSAVLGREIFYRDFGNRKQLASYVGLTPMPHQSGSMDKDRRIARAGNGRARKTLVQAAWLWLRYQPASGLSAWFRERVGDLKGRTRRIAIVAMARKLLIALWRFAENGEIPQGAVLRAA

SEQ ID NO: 138143 - protein, 345 aa, unidentified
MNKLVSTFPSTVFCGIDVSANSLAVAVIEPDGAVSQREFANSASGHKALLVWLSKHDAKVRISLEATGIYSLDLALALDAAAYIELAVLNPKLVNRFAQTLCRSKTDKADAVVLAEYSQRMPFTVWQRPGVNQLRLRTLGRHIAMLVLEQATLKNRLHNAESTATVPRAVTLDLKQAQAALLRRLARMRREAMKLVQAEDQLRQHFALLVSIPGIAEVSALHILSELVLLAPAMTVRQWVAYSGLDPAHHVSGTSVHKPSHISRAGNRHLRRALYMPTLSAVRYDPHLRAFYRALRERHKTGLQALMAVARKLLHAIYGIFKSGMPYDGRRLFPQIQLAVESTAG

SEQ ID NO: 138144 - protein, 380 aa, unidentified
MKKELYLGLDVHKDCISTAVAEEGRKGEVRDTGAISNDLHAVEKWITRLRKAHGKETRLRACYEAGPCGFGLARRLGQLGVECQVVAPSLTPTRSGDRVKTDKRDACKLARLLRAGELTPVYIPEPTDEAIRDLCRARSDAVDDRRRSRHRLKGFLLRHGYRYQGKSSWSAAHERYLRELVLPHPAMKVILEEYLQGITAAGERIARCEEAMRDLLEQWRLAPAVRALMAMKGFQSVAAMILVSELGEVHRFTHPRQVMAYLGLVPTENSSSERRRQGHITKCGNVHARWLLVECAQHYAAPPKVSRELSRRQEGQSHEVRAISWRAQNRLHRRYTRLLARRLQRNKAMVAIARELCGFIWELLRTQPCYQAQSQVGLKS

SEQ ID NO: 138145 - protein, 365 aa, unidentified
MTTRQRSTSSSTDPPVRREVVLGVDTHGEVHVAAVISPLGKILGTESFPATAAGYRQLLVWARKRGTVRRAGVEGTGTFGAGLSRYLLAQQVEVYEVNRPDRSARRLLGKSDPLDAQAAARAVLSGRARARAKSGDGPVHSARLFKLAKDSAVKARTQAINQLKAVLVIADPALRERLSSLGNRELFRTCARLGLPGGGGDEDAVTQATHLTLRMLAERVEQLTGQIDELNQRLTRLVERHAPQLLVPVGIGPDSAVTLLITMGDNPERLNTEASFAALCGVSPIEYSSGRRRTRRLNHGGDRQANAALHRIVFTRLRHDPRTQAYYERRTQEGKTRREIIRCLKRYAAREVFNLVRPVSRAPAL

SEQ ID NO: 138146 - protein, 397 aa, unidentified
MIAVGIDVSKSKSTVAILNGDGSIRAKPFDVHHVADELQALVDYIKRTSEPPTILMEPTSHYHYPLLKAFTEAELPVCLINPYQMKKYGDTELRKAKTDKRDSLRIAQYALEKSYSLIPYTPQDQKYEDLRFLSRQYSQRISTLTVAKVQLLSLLDETMPGITTILPLKSRDPDNCVLLCFIKRFKSFDVIRKMGKTRFLDSYQVLVKKTKDRFAGSKGLAIYELVLNSVTTRGENPLSAMTQDQCVDLVSTSQKAADEINLQMRILAETMPEYKVLRSMAGVGDRLGPIILGEIGDIRRFHSGKALNAYAGNDAPPYQSGQFESRNRHISKRGNPALRKACFEVMQALKLTKPQDDPVYLFLLKKEQEGKPYNVAKMAAVNKFLRIYYARAMELYK

SEQ ID NO: 138147 - protein, 356 aa, unidentified
MRFYERQHRFYAGVDLHTRTMHVCVLDATGTVVYDDNLPTKPEAFLAALAPFRDDLIVGCECMFGWYWLADCCAQEKVAFVLGHALYMKAIHGGKVKNDRIDAGKIAKLLKGGNFPLAYVYPKGMRATRDLLRRRTYFVRQRSALFTHLQIVNAQYNLPPFPKKLSFAANRAELDIAGRFGERSVQKTAAADLAVIDCLDAQIADLELYLTRTAKADDVQTYHRLQTIPGVGKVLALVLLYEVHDIKRFANCGQFLSYARLVRCTHESAGKVQGTGNTKIGNAHLRWALAEAACLFLRASERARAWKQKQTKKRGEGKALGILAAKLARAVYHLWRRGEAFDEARFWQGNLLSAKA

SEQ ID NO: 138148 - protein, 411 aa, unidentified
MQRVIGMDIHRTFAEVVFWEAGRLRSGGRVDMTRSGLEGFGRSLSKEDEVVVEATGNAMAVVRVLSPYVARVIVANPLQVKAIAHAHVKTDKIDAGVLASLRAAGFLPEVWVPDADTECLRRLVARRNQVVRHRTRIKNEVHAILQAHLIPPCPHADLFGRLGRSWLGRQVLPVDERAAIERHLRELDRLGEDLELLDREIAERVIEDPSVKRLLTITGVNIIVAAGLVAAIGDIRRFSSPQKLVSYVGLNPRVRQSGLGLAQHGRISKRGRSHARAMLVEAAWAASKAPGPLRSFFLRIRARRGHQVAAVAVARKLAVLCWHLLTKDAEYQWVRPALVANKIRAMQLQAGQPARKGNKRGAAYAYNIKELRDREIDVARHAEHAYEQFVSRWQPRGPGKRRTGAANEERR

SEQ ID NO: 138149 - protein, 325 aa, unidentified
MGLDVHKDTIAVAVAESGGEVRSLGTIPNLADSVRGLIRKLGGPAGLRVCYEAGPCGYVLYWQLAKLGVRCEVVAPTLIPVKAGDRVKTDRRDAEKLARLHRAGELTPVWVPDAEHEALRDLVRAREAAKSDQRRSRQRLLKFLLRRGCTPPAKMRSWTDKHRAWVMELKFEQRALEETLTDYATEVDHQAKRVARLERSLDEAVDKVPVKMRAVIDALQSLRGVSKLTATTIVAEVGELSRFERAAQLMGYSGAVPSEHSSGGKTRRGGITKTGNSHLRRVLIEAAWTYRHRPRIYGALRARQEGIEEPVKEGSRDGLVGVESA

SEQ ID NO: 138150 - protein, 354 aa, unidentified
MSITKQSVGIDISKSTFTACLCQRDETGALTFSKATSFSQDQKGYNQLLRWVKQIAVKGPEVVFLMEATGVYYEPLAYHLHKIKKTVHVVLPNTSKHYFSSLNIKTKTDHVDARVLSQFGAERLHKSWEPPSPVLRQLRNLTRYYVQLQEQKTALGNIKHSKDSSYEIQAFILKSNTKLIEQIDKHIQECLSAIKKLIASDNALQDKVQRLSTIKGAGLITIATIIAETNGFEGFSSARQLTSFAGYDVVQRESGTSIKGKTRISKKGNRYIRNALYFPAMVACRFNPHLKAAYLRIVINKPSKMIAQVAIQRKLLTLIYTLWKKDTIFIHQYKAGSPNLTIETTQDSSVAELP

SEQ ID NO: 138151 - protein, 355 aa, unidentified
MDSKKYIGMDVHKESISIAVMNGAGKFVMECVIETKASTILQFIQGLSGSLHVTFEEGTWAAWLYDLLKPHVTRLVVCDPRKNASMKEGNKSDKIDACRLAELLRLDHLSPVYHGEHGLRTLKELVRSYLTITKDLGRVMSRVKAIYRSWAIPCTGKQVYAPQHRAEWLAKITEPGVRRRAEFYYQQLDALRSLRREVRRELLEESKKHQAWKLLCQIPSIGPIRAAVLLGILQTPHRFRAKRQLWTFGGLGIETHSSADHRYVEGQLQRSKKPVLIRGLNENCNHDLKNLFKGAAIIASTKPGPFQEFYAALLAKGIRPEMARLTLARKIATIVLIVWKRGVCFDAQHLKPQTA

SEQ ID NO: 138152 - protein, 346 aa, unidentified
MMIIGCDFHPSWQQVSWLNTETGDCGERKLVHASGDAKMFYEQLAAPVLIGMEATGNSQWFVELVEDLGHEIWIGDAAQIRASYVRKQKTDKRDAAHILKLVVEGRFPRLWTPDREQRDLRQLVLHRHKLVEIRSRVKNELQHLSLNKGVQRKHKLWSQAGQKMLRELPLKPWASCRREDLLGLLAMLNQQVGQLDTAVKIAAEENPQAKLLMTQPGVGPNTALAYVLTIGDVSRFPRGKQVASYLGLIPREESSGGRQKLGAITKQGNRMLRSLLVEAAQIAVRFDPDMKKQYLHRCHQKPKGVAKVAAARKLAVRLYWMLRTQVGYPEIVRIESSPRVPLVGAS

SEQ ID NO: 138153 - protein, 383 aa, unidentified
MKKTKGTLTRDDTKKETVLHLAFELSETKWKLGFSDGNKMRFKGMAARNLGQLEEEIEMAKGRFKLEGEIKIVSCYEAGRDGFWLHRYLLSCGIENIVVDSSSIEVNRRKRRTKTDRIDARKLLQMLMRYRGGERKLWSVVNVPGVEAEDGRQLHRELEVLNKERTMHRSRIRGLLIQQGLEVSNPSGKGFFEELESLRTWDGRALAEDLKERVVREHERLRNVEDQMKLLRKEREIRVESMATPSLRMVEQLRSLYGVGKTSSWDFVMEMYGWRKFRNRKEVGAFAGLTPTPYDSGGSRREQGISKTGRGRVRGLSIQISWGWLRFQPQSKLSKWFWERFGHGGKRMRKIGIVAVARRLLIDMWRYLEYGVIPDGARLRPSA

SEQ ID NO: 138154 - protein, 325 aa, unidentified
MFVGLDLHKNYLQAAVVDDEGKMLKEERIPNTQEDIETFSANLETNAEIVIESSSTWYHAYELLARDHHVILSNPVKTKAIASAKVKTDKVDAVTLANLLRGGYIPECYIPPRRIMDLREIVRYRASLVRMRVSAKNKIHAILLMRGVSIEAKPFTKEFVEELRKIGDYRIDGYLTVISSMNEQINAVSQKIRKQAVEDESTKLLMTIPGVGYYSALLIAGEIGDVNRFPDSHHLCSYAGLTPSTHSSGGVTYHGAITRTGSKYLRWILTECAKAYIRTEKDSDLSKFYHRLAKKRGASKASVASASKLLRIVYWVLKEKRPYHG

SEQ ID NO: 138155 - protein, 348 aa, unidentified
MLTIGGEKQMQIEKNQTEYYLGVDLHRDSFTVFGCNEKEEEIVKGKYPNDMLTLQNVIDSFPQKPKVVVEATRNWMWFVQACQAAGCNVTLAHPFRTKAIAYARIKSDSIDAKTLCSLLRSNMIPSSYIATQDEWEAREISRARIQMVRDQTKTKNRVMAILGKVNLRFAGSNVFGIKGTEWLKKQILTPAKQFVIGLLLKRLDSLKDAILEIDKVIKEKGNNSPAVQRLMSIPSIGAVTAFIILAEVGNIERFSSSDKFSAYLGLVPRLDQSGSHTHLGRITKLGNTYVRWALIQAAHRLYRMERWAKIFVDRIAKRGGRKKAIVALGRKLAVIIYSVLKERRSYYK

SEQ ID NO: 138156 - protein, 346 aa, unidentified
MLYAGLDLSRKRLDFHLLDGEGETVDVGAAPPDADGLLGLTRRLDRHREPIRAAIESMNGARFVHDQLELHGWQVEVADAQKVKGLAPLACKTDRIDAWVLAELTRRDLVPAIWLPDPMVRAERERARWRLHLVRHRSSLKQRVHAVLLTHGKPCPVSDLFGVRGRQLLARLGLPDPWQATIEASLRLIDELEREITDCERELRRLGADHRYVPLLLTVPGIGWVLAYTIAAEIGDIGRFASPRKLAGYTGLCPRVYQSGERDLRGPLAKQGPKYLRWALVEAATHACTAPIYRDRYQQTKARIGKQRGAKVAQIDLARRLSEAIWHMLSREQPFAPKGATDPLAA

SEQ ID NO: 138157 - protein, 312 aa, unidentified
MMDAVYVGIDVSKDRLDVHALPQGAAFMVARNGEGVAQLVERLKGLSPALIALEATGGFETVVAAALAAARLPVVVVNPAQVRHFAQALGQRAKTDPIDAAVIARFAQATQPAARPLPDEMTQLLADLVARRRQIVEMMAAEGQRERRADKRLKKSIARLRKALEKELAELDGEIDDYMRGTPAWAEKQDLLASVPGVGPVIARTLIAELPELGALDRRRIAALAGLAPYTRQSGQWRGKSFIGGGRKSVRSMLFLGAMVAARHNPVLKAFRDKLVNSGKPKIVALIAVARKLLTILNAIIRDAKPWRTQNA

SEQ ID NO: 138158 - protein, 360 aa, unidentified
MQRQITTLDFKGQNIFVGIDVHLKSWTVTILTEELTHKTFTQPACAETLCNYLTRNFPGGDYNSVYEAGFSGFWAHYKLKGMGINNIVTNPADVHISQKEHLQKDDPTDSRKLARSLRNNELKAIFVPSPAILEDRSLVRMRATLVKDMTRFKQRIKSFLYFYGISYPPQFEKSGTHWSKRFMKWLEEEISLQHESGIQALKILVQEAEQQRKLMLEVLKKIRLLSRSEKYAKNIVLLRTIPGVGLITAITFLVEIENIERFANTDNFAGFVGLVPNRHSSGPKTSDGEMTFRGQKMLKSLLVESSWTAARTDPALIMSYHSYVKRMEPNKAVVRIAKKVLNRMYFVLKNKMEYVPGVVK

SEQ ID NO: 138159 - protein, 458 aa, unidentified
MAKRRKKKTKNVKLLNVIKLNAAGIDIGATEIYIAVPGDRDNKPVRHFDTFTADLHAAAKWLKSCDIDSIAMESTGVYWIPVFQILESYGFDVVLVNARHVKNVPGRKTDVQDCQWLQYLHSVGLLRGSYRPPQEVCAVRSLLRHRDGLIKTASSHILHMQKALTQMNLQIHNVISDITGVTGLAIIDAVLSGERNPQKLAALKHGRIKATKDTIAKSLNGDYLPEHVFTLKQSLQVYRHYQKMITECDQEIENHLNNFDSRIDVDKKPPPPATSTSRRGKGNEPNFDLRTHMYRIIGTDLTQIEGISAVTAHVFFSEVGCEVSKFPKAGNFVSWLNLCPNNKITGGKVLSSRTLPGKNRLAKALQMSAMSLWRSQSYLGNYYRRKRAKNGAPSAITDTAHKLARIIYHLVKTGKQFDESVFYAQEEAHQKRTLKNLTKRAKRMGFQLIECETGNLVT

SEQ ID NO: 138160 - protein, 422 aa, unidentified
MLAQTQDEEQIIARVAALDIGKAELVCCVRVPDEDRPGRRLQEVQAYSTMTRPLLGMADRLRCLGVTRVVMEATSDYWKPAFYLLEAHGFETWLVNARDVKHLPGRPKTGKLDAVWLCKVAERQMIRASFVPPPQIRQLRDVTRYRADLVAVRTAEKQRVEKLLEDAQIKLSVVISDIFGVSGRQMLAALIAGQRDPWALAQLARGVMRGKITALQEAFTGYFTDHHAFLLAKMLARVDAIDTDLATLDVTIEQMAAPFAAAVRRLAEIPGISITAACAILAEIGTDMGRFPTAGHLVSWAKFAPGVKESAGKKKGKGTTGHGNRYLARVLGNAAASAGRTDTFLGERYRRIARRRGSKKAVVAVGRSMLVIIWHLLADPAIGYADLGSDFYNTRINPERRKHNHIRQLEALGYKVTLEPAA

SEQ ID NO: 138161 - protein, 373 aa, unidentified
MYYNTLFVGMDVHKENFTLCCYDMMQDKIFYTQKLEPDYIQILKYLTFVRKALRKEVDFVCGYEAGCLGFTLYHQLTQHGVNCVILAPTTMLKPAGKKKIKTDKRDAALIARCLASNNFSPVHVPTTQDEEVKEFLRMRDDHKLALKKVKQQILAFCLRHGYSYTATKNHWTAAHIAWLRSLKPEGLYAEILSEYLLTFQTLSDKLERLDQRIEELAAMESYREGVKKLSCFLGIKTHTALATMVEVGDFQRFASANQFASYIGLVPGEDSSSESVNRLGITKAGNTHVRRLLVEAAQSYTRGQVGYKSAALKKRQAGNTPEVIAYADRANERLRRKYYKMVLSKSKRTNVAKTAVARELSCFIWGMMTNRIA

SEQ ID NO: 138162 - protein, 410 aa, unidentified
MEVVHARCAGLDILKKDAKVCVRVAGAARRKTVETVTTWSSMTSQILALREHLIAERITCAVMEATSDYWKPFYYLLEDAGFDVLLVNSRHVRNLPGRKTVADATWLAQLGAHGLVRASFVPPEPIRQLRDLTRTRTAITRERSREVQRLEKLLEDAGIKLSAVASDIVGVSGRAMLESLIAGNSDPAALADLAKRRLRSKIPALTEALSGRFTDHHAFLARVHLDLIDQHTAAIDEITIRIEQMIAPFHGFRDLICTIPGISTLTADVIIAETGADMTRFPTAAQLASWAGTTPGNNASAGKVKSSRTRPGNPYLQGALGAAAMSCAQNPRTYLGARYRRIASRRGPQKANVAIQHSILIAIWHMGTNGCLYDDPGADYFNRLHPDRAKKRAINQLEAMGYQVTLTHAS

SEQ ID NO: 138163 - protein, 396 aa, unidentified
MPQEKEAVISAEDAPTGGDVFASVEMSRSKWVVGLHTRMTDKIALHTLACGDVDALLRLIDQARTKLALAATGTPTVVVCYEAGYEGFWLHRRLVALGIRVVVIDPASLLVDRRAKRAKTDRIDARAMVRALMAWARGERQVLSEVRVPTVEQDDARRGLRERQRLVKERTAHGNRIKGLLKTQGIMGFDPRATDAVARLDAIVTGDGRPLGPCLKREIVRELERLALVMRQIAQLEAERDAVVRECGDQADSAANAAEPERDAAMIAVLNRLKGIGMNDATILVREAFWRDFRNRREVGGWSGLAPSPWASGSVSRDQGITKAGPPMLRAHMIQMSWRWLFWQPDSDLARWFSKRTEGATGRMRRIMVVALARKLLIALWRYATTGMVPHGAIVT

SEQ ID NO: 138164 - protein, 380 aa, unidentified
MIVKYSLGLDVSSKDIKACLATIDNEQRVKVKSSKTITNTQKGMHELLAWIEKWYSDLEIPLSVCMEATGVYHENCAYFLYDKGFNVSIVLPNKAKKYLQAIGIKSKNDSIDAKGLAQMGAEQKLEVWEPMGMFYYELRVLTRQHQSLKESLTAEQSRLHAANAASRQINFEIKQIKSHINFLEKQVEKLEAEIKRLIHSDETLKKKFEKVMKLHGISYLSSATIIAETGGFLLFKNYKQLVSYAGYDVIENQSGQHVGKTKISKKGNSRIRRILHMPSLTAIGKQDTTFNQLYRRVVERSGVKMKGIVAVQKKLLLMIYYIWTKDIDYNPNFRNIQEEEQAPSSPLSITVIKKATQSAASQGRHPASNHSMPPLRLVKV

SEQ ID NO: 138165 - protein, 446 aa, unidentified
MMQKVMAMTSFHHSRRTLMNCTQNEKLNQVTPHTLIVGVDIAKFKHVARAQDDRGKILGKALVFTNTKEGFEAFFSWVEEMQHKHEKSDVLVGMEPTGHYWLNLAYTLKERLVSFGVVNPLHVKRSKELDDNSPTKNDIKDARVIAQLIKDGRFSYPRLPMDEDAEIKAGITIRNQIVGDLQVLQGRVHNWLDKYFPEFFTVFKDWSGKMALATLEHIALPGQLNQTTPERVAEIWSTYGGVQRPSLKRIQRLQEAAASSVGLNVGLQMAQREIATNIKRYKMLKEEVRALEKELETLVLTLPGIAEMLTVPGVGMVTVIELYSELGDIKNFKNPRQILKYAGLNLRESSSGKHKGQARITKRGRAKLRALLFRTVMPLVRHNRAFKALHQYYTTRQENPLRKKQSLIVLCGKLVRVLHTVGQKQCPFDEERMIQDIPHLSLALKA

SEQ ID NO: 138166 - protein, 351 aa, unidentified
MLIIGVDYHPSFQQIAFLDQDTGECGERRLNHGDGEAEKFYRDLQQKGVRVRVGMEATGYSRWFERLLAELSVEVWIGDAAKIKTKRVRKQKTDRQDAQLLLKLLLENNFPRVWAPSPENRDLRQLLWHRHRLVQMRTRIMNQLQALAMNEGTRWKNRLWSEQGRSQLEKIPLAPWASRRRQDLLELLDRMNPTIAELTAAVEQEAKKRPEVLRLMTHPGVGPITALAFVIIIMTPDRFPCGKQIGSYVGLIPCEDSRAGRQRLGHISKQGNALLRFLLVEAAQAAVRYDPDWRRRYLHLAMRRERRIAKVAMARKVAVRLYWMWRNGWEYSQSVEFGSHAGQLATGHGVK

SEQ ID NO: 138167 - protein, 403 aa, unidentified
MNNVAGIDVSKGKSMVSVLRPFGEVVAKPFSVGHTGSELKELADYLKSLDGETRVVMEHTGRYYEPVARFLHEEGVFVSAVNPKLIKDYGNNTLRKVKTDKADSRKIARYGLDNWAELRQHTPMDTIRMQLKTLNRQQSLYAKTKTMMKNNLIALLDQTYPGVNALFDSPVREDGSQKWVDFATTFWHVDCVRNMSLTAFAERYRKWCKRHGYNFSQSKAVEVHAGAQDLIAMLPRDALTKTMVRQAIDALNAISTSLERLKAEMQALAAQLPEYPVVMAMHGVGDSLGPQLMAELGDVTRFTHRNAITAFAGVDPGADQSGTHEAKSTRVSKSGPPELRRALFLVMDCLLKTQPQDDPVYRFMDKKRAEGKPYLVYMTAGANKFLRIYYGRVKEYLASLEGN

SEQ ID NO: 138168 - protein, 383 aa, unidentified
MRTTQETLQSQGTTDQDIMYIAFELSNSTWRMAFSDGNKKRHVTIKARDLKQLEVEINKAKRCFRLKDKTQVKSCYEAGRDGFWIHRYLLNKNIDNLVVDSSSIEVSRRKRRAKSDRLDAGNLLRLLMRYHGNERQVWKVVTAPTVEEEDARHLHREIETLLRERTRYRNRIKALLVQHGLDVKNPSRKNFLKVFSTLRSWDGQALPESMKARVVREYERLRMIEDHIKLLKKKREQRVESQETVSLRQVAQLRELSGIGVNSSWVFVMEFFGWRRFRNRREVAALAGLTPTPYDSGGSQREQGISKAGNKRIRTMAVEIGWCWLRFQPQSKLSQWFNERFTSGGKRMRRIGIVALARKLLISLWLYLEHGVVPEGATVKSSC

SEQ ID NO: 138169 - protein, 337 aa, unidentified
MIVIGVDVHKHSLTAAAVDELGRTVAEHAGLVDAQVIGWARSLGEERLWAVEDCRHVTRGLEQTLLEAGERLVRVPPRLTAPQRRRGRSRGKSDSIDALAVARAALQEPKLDGPRAGEETLRELKLLVDHRDDLVAERRRCRQRLRWHLHELDPTLRVPLGALDRAVWLDRLTRKLARRGQTTQVQIARDLLGRCRVLTREIVALDRVLHDRTRSLAPRLLELAGCGPLSAAKLLCEIGPIDRFPSDAQLARHAGVAPLDASSGKHQRHRLDRGGNRQLNCALHRIAVTQGRVHPPARAYLERKQAEGKTRREAIRCLKRQLARTVYTTLKSEPLLT

SEQ ID NO: 138170 - protein, 358 aa, unidentified
MAVNEGTRRIVGGVDTHKDLHVAAVVDEQDRVIETRSFATTRQGYRQMLAWMRAFGDLQHIGVESTGSYGAGLLRFMQQAGIAVLEVTTPDKQDRRRRGKNDDLDAQNAAHAAFAGQRTVTPRSRDGMIESLRVLMACRKTGVNARRVALQMIHNTIVCAPDGLRDQLRSLTRMQLVRTLASWRPDLTAYRDLESAYRIGLKSLARRYLELHDEIADLDVMIAAIVDELAPNLVACNSIGHIGAAQLLLTAGDNPERLRSEASFASLCGVSPVPASSGKTVRHRLNRGGDRAANSALHIIAIGRLRTDQRTKDYVARRITEGHSKLDAIRALKRYLAREVFTLITQRRREINATRIAA

SEQ ID NO: 138171 - protein, 356 aa, unidentified
MNYIAFDSHKRYTLASVSTDKGKILCEKRLEHEHGVLHNFLSQWEAGTPVAVETIGNWYWIVDEIEQAGMAPRLVNARKAKMMMCSVNKTDKLDVRGLNRLQCTGTLPTVWIPPADLRDKRDLPRTRMVLSRERTRLKNRIHATLGKYRQELTGVSDIFGSKSADTLADHVAKLPIHTRYSTELLLEQLRLVTDQIGLLEKRMKEVFKDSADLKRIMSLPGVGHVLGTVILLELGDIQRFGGAPQFASYAGCTPRVRASGGKVRYGQLRSDVNHYLKWAFSEAANVVCAHREKHPHRHAMRLYTRIAAKKGHQKAVGAVARHLAEGTYWMICKGEDYREPKQIGEVINRKISATSN

SEQ ID NO: 138172 - protein, 339 aa, unidentified
MKVYAAFDLHSRSSHLAVLDEQGEKLLNKKLSNDAENMILALEPYRQKLQAVAVESTFNWYWLVDALMESGYPVRLANPAAIQKYSGLKHSDDASDARWLAEMLRLDILPQGYIYPREHRPVRDLLRKRMHLAKLRTSMINSLSNIIARNAGVSLKADKIKQTTCDNVSPLLAGDDDLALSGWVSKDTIDYLTRQIKTVEKVVVSKIKLRPEYKLLLTMPGVGIVLCLTIMLETGPIDRFPHVGNYASYCRKVPTRWTSAGKGKGRGNKKNGNKYLSWAFSEAAEIGRRHDPKLKAYYDRKAARTNTTVAHSALAHKLCRAAYHIMRDQVPFEVNKLFG

SEQ ID NO: 138173 - protein, 462 aa, unidentified
MPERNDRESGESNRRQLQGLPVIRRNVAGVDLGSERHWVCAPTQDGSGREIASFGATTPELLRLAEWLKARQVESVAMESTGVYWIAPHEVLEAQGLQVLLVDTRQLARVPGRDKKTDPSDCEWIQRLHSCGLLRGSFRPEEAVCMLRTLVRDKANLVADSADWLRRMQKSLDQMNVRVHRAVSDIDGVTGMAILRAIAAGERDAQKLAQLRDRRCNKTQQEIAEQLTGHWREDHLFSLQQALKMYDAVQERIAAYEQEILRQLEEMEEPGQRGQTAPPLNNANKTKAIKRRGQEAKRQALYRMSGVDITQIDAIGVETVEVVLSEYGPDLSRFPTEKEFVAHVTLAPRVPRSGGKPLKKKKRNSASTRVAAALRMAALSLRHSQTALGAYYRKLAQRLGGDVAVFATARKLATLIYRLLRWGQPYIDEGAAAYENRYRQLRIGRLAATAKQLGYQLTPVSA

SEQ ID NO: 138174 - protein, 361 aa, unidentified
MTGTMTWVGMDVHARSTHAAAIDSMTGELVRRKFGPGVDEAVGWLQGLSGPVRACYEAGPTGYGLYRAAVAAGVAIDVIAPGKTPRGPSDRVKTDRKDAEPLARCLLAGSLTRVVVPPPEVEAARELTRAHDACRRDLGAARNRVSKMLLRHGVVYPDASTWTARHRAWLSRQKFDETSSELVFADLVAAVDGITARKMAIASRLSELATDELWWPTVSRLRAFRGLDTLTAFTIHLELGGDWARFERPTALSAWLGLTPSMAQSGESSHQGGITKTGSMLARRLLVEAAWHYTREPRLGVTLRNRQAGQPAHVLQISNRAQQRLYRVHKKMRARGKPGNVTVVACARELSCFLWAAATAD

SEQ ID NO: 138175 - protein, 370 aa, unidentified
MKEPTTSYIGLDIHKESIAMAIADADRAAPRFIGTINPVPAELCKAMRRVCTKESTLVVYEAGPCGYGWVRYLRKQGWVCDVIAPSRITRKPSEKRIKTDRRDAQLLARESRSGNLTSILVPDERDEAIRDLSRARDDARVARQRVRLQMQAMMLRHGRHYQGKSSWTQAHDRHLSTIRFEHPAQELAFNEYRLASKEACERVERITEALRVQCEDWRMNPVVKALMCLKGFDFVAAVTFVAEMGDLTRFAHPRALMAYLGLVPSEFSSGKSRRLGEITKSGNKHARRILVEAAWNNRFKAQVTRCLEVRQEGQPKIIRDISWKAQLRLSKRWRSLSMGRKLAQNKICVAIARELSGFIWDVARHVKMSP

SEQ ID NO: 138176 - protein, 386 aa, unidentified
MQKLNDFSRSLVALEPDSTLIAVVEMSLSSWLVAGIVPGVERQPLKKLAADESALLKLLHRWREEAEKAGRRIERIAVAFEAGRDGFWLARWLKARSIEAHVIHAASVAVSREHRRAKTDRLDTELLKRAFLGWLRGERDHCKMVAIPSINDEDVKRPNRERENLVSEQSRIINRMKAALIRLGIRGFNPKLKRAAGRLDDLRTPEDEPIPPNMLAELRRDMERRRLVRDQIRQIEQARLQHLDHAPGDGPHAMVRLLARVIGVGIETADMLVHEVLSRNMRDRRAIARYAGLTGSPDESGRKRREKGLARSGNGRVRHGLIQLAWRFLLHQKDSALAQWFRARTENARGTRKPMIVALARKLLIALWRLVRQGVVPDGVVLRSAQ

SEQ ID NO: 138177 - protein, 411 aa, unidentified
MEKVYDKCCGIDVHKKLIVACFRNGNKQEIRDFGATTRELLEMCDWLKEGGCEMVAMESTASYWKPLYNILETCELNAIVVNARHMKAVPGRKTDVKDAEWIADLLQHGLLQASYIPNRDQRELRELVRYRKSLVGERNRELNRLQKMLEGANIKISGTITDINGKSARNILEHILSGKMIDSAEYDILYEKKIIAHNLKASKEQIIDDLNGVLSNLQKKMMRLLLKHLDELDAIIGELDDDIDNFMKPDEKKSAEVIQDIPGIGNTSAQAIISVIGTDMSRFPTDSHISSWSGLCPGNNESAHKRKSGKTRKGNALLRETLVVCANAAVRNKSSYFYAQFTRISAHRGRKRALVAVAHSMLIAIYHILKDGVVFKDLGADYYNQFNKERKINAYLKKLKALGWEAPVVAA

SEQ ID NO: 138178 - protein, 348 aa, unidentified
MLIIGCDYHPGFQQIAFVDTETGEVAERRLTHREEAEQFYRTLKTRKVRIGMEASGHARWFERLLIELQFELWIGDAAEIRTKRVRKQKTDRQDAQLLLKLLMEDRFPRIWVPDAENRDLRQLLWHRHRLVQMRTRIMNQLHVVALNEGVRRKKALWRPAGRSELESLVLAPWALRRRRDLLDLFDQLTPKIHDLTRALEEEVEKRPIARRLMTHPGVGVLTALAFELVIGTPERFHCGKQIASYVGLVPTEESSGDRRRLGHISKQGNALLRFLLVEAAQVTVRSQPQWRSKFFHLAMRRGRKIAKVAMARKLAVHLYWMWRQGCEYGQFEKLGSHAGEPGNRHGAQ

SEQ ID NO: 138179 - protein, 320 aa, unidentified
MPATTAQTAIAVVGIDIGKNSFHIVGLDNRGSIVLHQKWSRGQVESRFANMAPCLVGMEACVGAHHLSRKLKALGHDARLMPAKYVRPYSKGQKNDFRDAEAIAEAVQRPTMKFVATKTADQLDLQALHRVRERLVSQRTGVINQIRAFLLERGIAVRQGQRFLRAELPRILAAPPDVLSPRMVRIIQELASDWRLLDERVEKVSTEIEELAKGDAGCERLMSIPGIGPIISSAIVAAIGTGDAFSKGRDFAAWLGLVPKQISTGDRTILGKISKRGNRYLRTLFVQAAWVVLVKIKPTRWGSHGLKPWIEAAKKRLHHQ

SEQ ID NO: 138180 - protein, 351 aa, unidentified
MVEERTEAKSSVKGVTNPYRRTEHCGKIHEYRCDKEVGVIGIDVSKDYLITSRGRERKYKNNLKGYEEILEMKPCIIVLEPTGVYAIRPSQYFKEKGIKVLQVSPNVLLREKEFRGKKTDFYDAEKLENMADKAKEYEYNPLKELVTLYLFLKDMEVKYENRLKRTLFLVSDNDKINKERLEKLANGDFTQEELYNLEYTPIVLEEIRVLAKTLLETQERLKEVRRMIEEQVPDNHVLLTIPGIGKLAAGIIMGIVNDIRRFPKPESFVAYCGLDPVVERSGRVVVSRGISKRGNKYFRSLFYFLAKMNYSRSFPNLIILPSSIRITPLSIIFSPSKTFFPFTASISYERI

SEQ ID NO: 138181 - protein, 417 aa, unidentified
MSTDVRFFVGIDWASETHQVCLVAADGKIIGERAFAHGGAGLAEMCDWLVTTSGKEPPKIAVAIEVPHGPIVEILLERRFQVDAVNPKQLDRFRDRFTVAGAKDDRRDAYVLGDALRTDRHCFRRLAVEDPVVIELREWSRMAEDLSQERNRLANRVREQLWRYYPQALELGDDLAADWFLDLWVLAPTPAKAVRLRESRVTSLLKAHRIRRLEAAEVLRILRQKPLVVASGTIEAATAHITAVAARLKLVNQQIKQAHRRLDELADKLAEGREEDAPGQKSKQRDVTILRSLPGVGRIVLATLLGEAAEPLRKRDYHALRTLSGVAPVTRRSGKRCVVLMRQACHLRLRTAVYHWARVAIQHDARSRARYAELRKRGHSHGRALRSVADRLLAVACAMLKTQSTFNPEHAAEAATA

SEQ ID NO: 138182 - protein, 300 aa, unidentified
MSTIKTIGVDLAKNVFSIHGVDAYGKCVLRKTVKRNKLLDTFAKLPPCLIGMEACSGAHHWARELLKLGHNPKIMASKFVIPYRQNEKNDANDAEAICEAVSRPKTRFVSIKSEEQQAVLCLHRIRQGLIKTRTATINQLRGLLSEFGIVMPQGRYSAQNTIGSVLEDAENGLPILARELLQDLSNKIQHLNLEVLHYDRRVSALVREMASAKALMDIPGVGEHSASAIVATVNDAKQFGSSRQFAAWIGLVPRQYSTGGHVHLGRISKRGEKHIRTLLIHGARAVIARCKEKTDRNSIW

SEQ ID NO: 138183 - protein, 385 aa, unidentified
MTDPAPVSSFIPRDYDVFGGLDVDKRSMAVTFRDHGTMRKSLRLPYNATQLLNYTRKHFPGQRVAFVYEAGPTGFGLHDELTASRHPCLVVSPSMVPTVTRKRVKTNRLDSNKLAEGLRGGQLRGIHVPPPSYRELRHLVQLRDTQVAQLRATKCRIKSLLLYEGIPFPAANGKWSGRVLRELETLPCNATVRFKLDQLIDALQFHFLSAAKVQQHIRHFCQNDPELRQSISFLASLPGVGTITATHALARLGDWRQIENVRSIAGFLGLVSSENSTGDKQNRGEITRIGDSRLRNKLIQCAWTAIRKDPELRAFYRSVYQRQPQKVAARKAIVAVARKLTTRMYAVLKQQRPYVIRPDSSIAPLTAEETVGPRERLDTAQNDQP

SEQ ID NO: 138184 - protein, 440 aa, unidentified
MTVKVAILFLERAVAFMMKLAYPKCCGADIHKNSIVATIVTTDKNGISEYLQKSFSTINSDIQRFHDWLIENDCKHVCMESTGKYWIPIFNYLEHDIHVCLTHPKYVKAIKGKKTDKKDSKWIADLFKFDLVRSSFIPPKDFRQLREIARYRFKLVCMKASEKNRIQNCMTVSNIGIASVLSDPFGKTATEIMSYLLEHTAESMDEKAVRKLIRKGAKAKSDDIIEAIKGYCIEADQSKKLELARGHLDYLDNMITQTEVELYVRIKPYYEFVEYVSTMPGMTELSTTIVLAETGVDMSIFEDEKHLCSWCGLSPTNNESAGKKKSVRISKAGDYLKPIMVQCALAAIKSKKEPYFANKYQPIKHRRGHKKAIIAIARMMIVCIYHMVSEKKPFNPTDYTETVDPHFSQRKVVLNDKNVFAYLEAQGYDISLMLKSNDNQ

SEQ ID NO: 138185 - protein, 412 aa, unidentified
MEVLYTSCCGLDVHQATVVACVRRAGKGRRRASTVRTFGATTAELLRLADWLTEQEVTHVAMESTGVLWKPVFNILEGTCEVILVNPQHFKAVPGRKTDVRDCEWLAQLLEHGLLRGSFIPPQPIRELRDLTRYRKVLIQQRVTEANRVRKLLESANIKLGVVATDVLGASGRAMLRALQSGERDGAVLAELAKGTLRQKRAALADALTGRFTGHHAALLGDLMEHIEFLEATIARVSQRIATAVMPMAEQVAHLQSIPGVDRVAAETILAEIGPDMSRFPSAAHLASWAGICPGNNESAGKRKTGKTRKGNRWLKPLLVECGWGAGRGRRTYLGAQYARLAHRRGKKKAALATGHSILVAAYHILRTGVAYRDLGPDHFDRLASDRLTCHYVHRLEQLGHRVTLNTVPGVA

SEQ ID NO: 138186 - protein, 389 aa, unidentified
MIYVGIDVAKDKHDCFICNGDGEVLANVFTIENSKSRFEHLLSIINTCTGVDDKKKVGLEATGHYSYNLLGFLLDNGLPTYVINPLHTNLYRKSLSLRKTKTDKVDARTIASMLMSDVSLKPYSQTLYHNEDLKSLSRYRFDKVKECSKLKTSVSRLINILFPELDKLVCSVHMTSIYALLSEFPSAKDISSAHLTRLTNLLYSVSKGHYNRDTAIKFRDAARNSIGCYMPAKALELKHTIKLIRELNTEIKEIDIEIKRIMDDINSPILSVPGIGYSLCAMIVSEIGDFNNFSTPDKILAFAGLSPSTYQSGKLDNAYAHMEKRGSRYLRYALFNAAKLVCTWDNTFSAYLAKKRNEGKHYNVAVSHAAKKLVRLIFALEKSGRPYKV

SEQ ID NO: 138187 - protein, 428 aa, unidentified
MPYNIAGIDVHKKMLHVVFSDVEVDGEYQFVRQKFDTSPSQLRMLADWLLEQQVEEVAMESTAQYWKPVWETLERYWKPVCEKREGAKPESGTLHLAQALSNRGRRGRKKDFRDAERLVKRLVANELILSFVPDPEQRLWRTVMRTKYQMTCNRVQLQNRLEALLEEAHIKLSGLVSDLLGASARRMLKAIADGESDPAALAALADRKLRATPQQLSDALGACTELNPVYRRLIKMALEDLESIEKRIVQLEQGMADLLRPHEDQVKRLAEVPGLGVDSAQQIMAEVGATAATFPSAEHLSSWVGVCPGDEESAEVSQSHRSPQGNRHMRRILNQAANAAVKLKGGIFEILYRRYVPRLGHNQTIGVIAHKLCRLVWKILHQGVHYEERGPAVSKVSKQKRTQRMLRELRALGYRIELAATQAGSPSA

SEQ ID NO: 138188 - protein, 348 aa, unidentified
MIIIGCDYHPSFQQIAWVDTETGECSEQRLAHSDGEAEKYYRGLNGHGVRVGIEATGHARWFERLLAELKYELWVGDPAQIWAMRVRKQKTDRQDAQHLLKLLVEDRFPRVWVPSAENRDLRQLLWHRHRLVQMRTRIMNQLQAIAMNEGVRRKKRLWSKQGRRQLESFPLAPWATRRRQDLLELLDRLNPSIQELSIAIEQEAMQRPEVKRLMTHPGVGPLTALAFVLIIGSPQRFRCGKQIGSYLGLVPCEDSSADHQRLGHISKQGNALLRFLLVEAAQATVRSDPEWRRQFLHLAMRRERAIAKVAMARKLAVRLYWMWHKGWDYQQMQFGSHVGQPVVSHGVK

SEQ ID NO: 138189 - protein, 346 aa, unidentified
MEHYVGLDVSLKLTAICVVDQTGSVLREGVVDSAPETIAEFVRSNAPSVVRIGLEAGPTATWLWTELKQLGLPVICIDARHAKAVLKMQINKSDRNDAAGIARIMQTGWFKEVRVKDLDSHAVRALLASRALLVKIKRDLENQVRGLLKNLGLVIGRAKFNVFAVRAEELVEGRPELAAAVRPLLEARKSIELQIDDLDRKVLRLARINAQVRRFMTAPGVGPITALCFLATIDDPTRFKRSRSVGAYVGLTTRRYASGEVDWTGRISKCGDKMLRSYLYEAANVLLTRVAKWSALKAWGIRLAKRSGLRKAKVAVARKLAVILHRMWIESTEFKWSSKEATNQPA

SEQ ID NO: 138190 - protein, 348 aa, unidentified
MTEYFIALDVHCAFSEWAVVTGQGKLVSRNRTATSIPALREALAQVRRPRYLTFEEGPLADWLARELSRSVDQLVVCEPRRNHWIARDGDKDDPIDARKLADLFRGGYLKAVHQSGSLERSLLKQQVSLYHDRVRERVRQGNQLAGLFRRHGVFIRAALLLNDEEWALRMARLPKSATLERGLTRVRQAYRLLADQEAAWREELIGLAKNEPPVRRFEALPGMGWIRAVTFYAYIDTPHRFRGKAALWRYSGIGLQRRHSGQGPLRTRLAHQGNRRLKNVLLGAAKSAIAQGNNPFADKYHYWVEEEGLPLPNARRNVARAIAATLWSLWKTGQAYDERRVAAPATGG

SEQ ID NO: 138191 - protein, 344 aa, unidentified
MSNHDSCGIEVSAKELLVKVRRAEEGVRERSFTNTPQDHPAIVGYLRRAGRVVRVCMESTGLYGLDLALALSGQEGIELMVANPRAVRHFAHALMRRSKNDPIDAGVLEEFAARMPFQPWVRPSPAALALHALARRLHELVEIQTAEKNRQHAAGLSQAIPAAVRRDLVRSLRAQQGAIERLTREARKLIAQDAQLRERFELLISVPGIAETSAVQLLGELGVLAPDLSARQWVAYAGLDPRCFDSGSSVHKKPRISKAGNKHLRHTLYMPALVAVQYDPHFRGFYQHLQAAGKLKMQALVAVMRKLLHALHAMFASHQPYDGSKLFQLTSTPAQEVASAPALA

SEQ ID NO: 138192 - protein, 337 aa, unidentified
MDISSKSFMVHAIDLKKKVVFKGEIKPTRSGIRQMIKALGRETKLVVFEAGNQLKWVALTIKKIPEVDLHVVHPNEIKWIHQSSAKTDKIDARKLSQLARGDLLPPKVHIVKGKVRQIRELVSARHTLQSKRVALINSLRGCLKQEGYRLPQKFFGRKDWRQQLERMRIGKAQKLILKSYMESIESLHKAELELTQEIVQIENADIKRLRTIPGIGELSSRVIVGAVDRVDRFTGKKQIAKYGALAPRIYQSGGVIHLGRISRDGRHEVRRVLLQCAHMVARMKSYEAKPLRQFFERIKKRCGKKIAIVALARKLLVVVYGVLKAKTVYNPAVLLGG

SEQ ID NO: 138193 - protein, 372 aa, unidentified
MGLDVHKETITVAVGEPDGSVVDVGKIPNRPEAVRRLIKRLGPVERLRVCYEAGPCGYVLYWELTGLHVECEVVAPSRIPHEPGDRVKTDRRDARKLAMMNRAGMLTAVWVPDAAHEALRDLVRAREAAKKDELRARHRLGKFLLRSGRRAPDGVKAWGKAHGRWLDGVSFERVEQEVVFLDYRHEVNHAVERILRLERALDDAVERVPASQRAVIEGLQALRGVSKLTAVTIISEVGEVSRFDRPRLLMGYTGMVSSEDSSGKRVKRGAITRTGNAHLRRVLVQAAWAYCRRPKLSPALKKRQVSVSEEVKEISWKAQHRLYGRYRHLVSKGKLPQKAITAVARELVGFIWDIAVRVEDQLRRQKRGQTAA

SEQ ID NO: 138194 - protein, 356 aa, unidentified
MSRDTKYIGMDVHKEAVVIAVRNSTGQLVMESIVETKASSLLQFIHGVQGELHVTWEEGTWAAWLYDLLKPHVHEVLVCNPRRNALLKEGSKNDKVDARKLSDWLRTGMLRPVYHGEHGLRTLRELARSYQTISQDLNRVMNRVKALYRGWGIACSGTQVYAPRYRQEWFDKIEHAGVRRRAELLYQQLDGLQTLRRTLRPELLAESRKHKASKLLRQIPCIGPIRAARLLALMQTPHRFRSKRQLWTYSGLGIETRDSAQYRFVRGPLQRAKKPQQIRGLNRNHNHEMKEIFKGAATRASCGVGPLRDFYEALLAKGMKPEMARLTLARKIAAIALTLWKKEERFDAQQLKTQAA

SEQ ID NO: 138195 - protein, 339 aa, unidentified
MRLYVGMDLHSSNCYTGIIDENSKKLFGRKITNDQRKIISALSPYKEDITGIAVESTYNWYWLVDALMEEGYKLHLANPSAMKQYEGIKYLDDRHDAFWLANMLRLGILPEGYIYPRETRGIRDLLRQRSRFVVQKTSLKHTLQQIYCNNTGVILSNNTIYGLEEEEIRNALSDEYLSYNGVSILATIRFIEGQIKTIETQILNKLQGEPPYTSLTTVPGIGVVLGLTIVLESGPIDRFASAGNYASYCRCVPTTYWSNSKQKGGGNKKNGNKYLSWAFAEAANFAIRYCKEAKTFYQRKCAKTNQPSAYRAVANKLSKACYYMMKDQTPFDAQRLFQK

SEQ ID NO: 138196 - protein, 361 aa, unidentified
MSDGSTEHKGMTVGLDLGDKYSHICLLDTESGELVEESRLRTTPEAFGRRFGYERGFRVAIEVGTHSPWVNRLLKDCGHEVLVANPRRTRLIYGEGRKTDKIDAQKLARLARADPELLYPIEHRGEDSQATLSLIHSREALIRSRSQLISHVRGAVKSFGSRLPGCSAPSFHKKVREHLPSELVEGLGPIVDTIASLTEKIGDYDRRMEQLASEQYPETELLRQVQGVGTLTALTFVLTLENPRRFAKSRDVGAYLGLVPGSDQSGDKDVQRGITCAGDKMLRAMLVSSTHYILGPFSQDSDLKRHGQKIAERGGKNAKKRAVVAVARKLSVLLHHLWSSAEVYEPLHNARCSGAIGEEIA

SEQ ID NO: 138197 - protein, 360 aa, unidentified
MCQTCSVITFKLNGEETNMNITVSGLDLAKNVFHFVGCNKAGKIIRKKMLRRNEVLSFFAKLPPCLVGMEACSSAHYWAREIEKLGHTVKQIAPQHVKAFLRGNKNDYNDALAISEAVVRPQMRFVVTKTQTQQDIQSIHIFRKKCERDRTANSNEVRGLLSEYGIAIPQGIHNVFKTLPKLFDKTEDNGLSDLFKTLLAQHYEKLVELNKHLDFYTKKIKVLSKSDECQRLQSIPGFGPIVASAFYQHVGNGSGFKNGRCVSASLGVVPKQYSSGGKDKLLGISKRGDKYLRTLLVHGARAVINTLKDKKTPLANWLNRLIVTRGKNKATLALANKLARIGWAILKSGGCYSAEHAAAN

SEQ ID NO: 138198 - protein, 349 aa, unidentified
MNEVRIIGLDLAKRIFQVHGIDQQGQVVIQKRLQRSEVLSWFSLLKPCLIGMEACATAHYWARELSTLGHEVKMIPPSYVKPYVRRQKNDRADAAAICEAVSRPSMRFVAVKSVDQQAIQVLHRSRELLIRQRTQLINALRAHLAEFGVIFPQGNAGVAQAINAVRETDKPDLPVFVKQVLSGLADHIERLKQEIAALDRRMTAWHKDHADSRRLATIPGIGIVTASAIIAAVGDGRQFKSAREFAAWIGLVPRQSSSGGKERLGRISKKGNTYLRQLLVIGATTQLRHRKKGMAPGGLWFEQLLIRKPARVASVALANKLARIAWAILTGCTEYRAPSPSIVVTASPA

SEQ ID NO: 138199 - protein, 393 aa, unidentified
MYFVGIDVSKYKHDCFIVTEEAVVIKETFSFDNNRTGFNEFFSILSSLGPPNKIRIGLEATGHYGNNLMKHLSVKGYSFVLLNPIIVSRFRKSETLRRTKTDKLDAMLIAEVIASRDFKNYPLLAYHFNDLKSLTRLRDRYVKQRSQYLVHLTNQLDLVFPEFKPFFDKSLKSKTALYILTKYTLPSRIANMNAQSAENLRKLSRGKFSYAKFVRLKELAKDTIGSSSEVDEFAINSILRLYNQIEEEISTIEAKIEAIMLALDPPTASIPGIGPMSAATIVAEYGDVTRFPNDAKMLAYAGLDAGRYQSGQADHKGHMVKHGSRFLRQALMNVAVSTIRSIPALYDYYHKKHTEGKNHRVALSHVARKLVRLIYKLETSRTRFDLSLYNSHQ

SEQ ID NO: 138200 - protein, 345 aa, unidentified
MKIVGCDLHTRYQQIAMLEEETGELVERRLEHESGEARAFYAALSAPVRVGIEATGHTRWFERMLGELGHELWIGDAAQIRASMVRKQKTDARDAAHLLDLLLSDRFPRIWRPTLEERDLRQLVWHRQKLVWMRNAVGNQLHALAMGEGVCRKKKLFTKKGRQELESLVLGRWASHRRQELLEMLDRLDESLHELDQAVEQQAEQNADAVRLMTHPGVGPVTSLAFVLTIGPVGRFERSKQVVSYLGLNPREHSSGGRQRLGAISKQGNPMMRSLLVEAGHTAARLDAELRQDYQRLKLRRGSGVAKVAMARKLAVRMYWMLRSQAGYAQLVRMQGSPWATLVKE

SEQ ID NO: 138201 - protein, 417 aa, unidentified
MEPNRYRHYIGIDWATAAHRICLLDQEGQVLGKISVPHSGTGLAQLLEWLAHHGVVPAQAAVAIETPCGAVVETLVERGYAVFAINPKQLERFRERYSTAGAKDDDRDAWVGASALRTDPVAFHRVNLDAAEVIQVRELYRTHDELQGDAQRFANRLSEQLRRYYPQMLALCPAGDQPLLWDLLELAPLPEVAHQVSAGQIATVLRRRRIRRLTAEQVLTQFCTTPLHVAPGAAAAASAHALVLIAQLRTVHELRKQTLKQLILALRQMRTRRTDPLRPSDAEIVDSLPGAGTLTVAAMISEASQAVAERNGTALRTHSGVAPVTRQTGKHRGVGMRYACSQRLRNAFYHFAMTSLQADPLARHHYDELRQQGHTHARALRGVADRWIAVLMAMLRAGELYDPTRRKAWRAAPEQTP

SEQ ID NO: 138202 - protein, 479 aa, unidentified
MENNRSVEGKTKRLTRKERKELGRRIWNANPGLDVVHRDAAGIDIGSREHYVAVGPDRDTEPVRIFGCFTADLQRLAEYLKRCGIRTVVMQSTGVYWIPVYDVLEQAGLEVWLVNARDTKNLPGRKSDVQESQWLLKLHTYGLLRKSFRPTPEIRALRTCWRERAEYVQQAGTCIQRMHKALTEMNVQLGTVLSDLSGTTGMSILRSIVAGEREGEQLAKFRDPRVKASPETIARSLEGTWRPEQLAILKRQLADWDHVQQQIAACDQDLQAMMRSLPKADVVPPSPPVTSRPRRRGKKKDGRSSRNQPRFDLESELKRVTGVDLTRIDGVKVNTIQTVITEAGLDMSPWPTEQHFVSWIGLSPRNDLSGGKVLNRKTRKVVSRLATALRIAATTLRESDSYLGAQFRRFRTRLGAPKAITAMAAKLARLIYRMLRYGQEYVDRGTDHYEERQRQQQLQFLAKKAAPHGFTLVAAIKPA

SEQ ID NO: 138203 - protein, 355 aa, unidentified
MDSKKYIGMDVHKESISIAVRNGAGKIVMECVIETKASMILDFIAGLRGDLQVTFEEGTSAAWLYDLLKPHVTKLVVCDPRKNASMREGNQSDKIDARGLAELLRIDHLHPVYHGEHGLRSLKELVRSYLTITKDLGRVMSRVKAIYRSWAIPCTGKQVYAPRHRAEWLGKIREPGVRRRAEFYYQQLDALRTVRQQVRRELLAEGKKHTAWKRLRQIPSIGPIRSAVLLGILQTPHRFRTKRQLWSYSGFGIETHSSADHRRVHGQWQRTKKQSSIRGLNRNCNHDLKNLFKGAAIVASSKPGPFQEFYTALLTKGMRPEMARLTLARKIATIVLMVWKRGACFDAQHLKLQTA

SEQ ID NO: 138204 - protein, 408 aa, unidentified
MCNNSRHPVPVPGNRGIEYSKKPFKFSNTEAGFVTFKEWILDLKERHEKDKVVSGMESTGHYWFNLGKFLQDNEMKPVLVNPHHVKKSKELDDNHPTKNDRKDPKVIAGLVREGRYMIPYLPDGVYADLRTASNIRFQLQAELTRIQNRINRWFNIYFPEYKTVYGKPDAKSGILILKEAPLPEDILTLGIDGVNQIWRDAKLRAVGKARAKTLIEAAEHSVGSKEGAVSARMEIRMLLEDYESRNIRLQEVMGLIEGLVNQIPMAEKLLEIKGVGIKTVSGFLAEVGDIRRFNDPKELQKLAGLALVENSSGKHKGKTTISRRGRKRLRYLLFEVAMSLVAKNPEFRELHNYYTTRRLNPLKKMQSLMAIAAKLLRVFYAILTKGVGYDPKKMVNDIRRPAAYAQAA

SEQ ID NO: 138205 - protein, 334 aa, unidentified
MTQITTAGIDLAKKVFALHGTDEVGKVLLRKTVRRDQLLDTVAALPPCLIGMEACSGAHEWARQFQRLGHTVRLMAPKFVAPYRKSGKNDGNDAEAICEAVRRPNMRFVPVKSAEQQALLAMHRVRQGFVVERTATINRLRGLLSEFGVVLPLRSITVRRQAAAAAEGLPDLARRANGDLLDQLRVLDERIGGYDREIEAQARLCEPAQRLMKIRGIGPTTALAIVATVGNAREFKNGRQFAAWIGLTPSQYSTGGKPRLGHISKRGDAYLRNLLVQGARSVLHTAAAHLDPVSRWSLELQPRRGYYRTLVAIANKNARIAWALLAKNETLRTG

SEQ ID NO: 138206 - protein, 376 aa, unidentified
MMGWTAPNGIISAKLVVLIRSSKGGPSMTKVSMIGLDLAKNVFQVHGIDATGKVVVRRQLRRRQLEKFLAALPPGVVVGMEACSGAHHWGRVIEKLGHEARMMPAAYVKPYVKRNKNDGRDAEGICEAMTRPTMRFVAVKSLDSQAVAVLHRTRRLLVRQRTMSGNALRSALAEFGIVAAQGLKGLRSLMALLADKASAIPDKARMPLRVLARQWERLNADICKLEAQIVSAAKSDAVARRLMAIPGLGPIGASAILAAVADARVFKTARDFAAWLGLTPRQFGTGGKQRSGGISKQGDRTLRTLLTIGATSYLRYERARGAEHPWVRDLLARRPFKVAAVAYAAKMARMIWAMLVTGEGYRAPNRSRSVAAQAAA

SEQ ID NO: 138207 - protein, 392 aa, unidentified
MIYVGIDVAKDKHDCFITNSDGEVLFKPFTISNNRNGFETLFQRIQSVSDDSNKIKVGLEATGHYSYNLLGFLLDKGLTTFVINPLHTNLYRKSLSLRKTKTDKVDSRTIATMMMSDMNLKSYSDTSYHNEELKSLTRYRFDKVKERAKLKSSVSRLVCILFPELEKLVPTLHMASIYALLSEFPSAKAVANAHLTRLSNLLSESSKGRYGKDTAVMFRDAARSSIGSHMPAKSLELKHTIKLIQELTAEIDEIEAAIKRIMDEEIQSPILTIPGISYRMGAMILAEIGDFSRFNSADKILAYAGMSPSTYQSGQLDNCYSHMEKRGSRYLRYALYNATKYVCHWDKSFGAYLEKKRSEGKHYNVALSHATKKLVRLIFAMEKSGKAYLPTT

SEQ ID NO: 138208 - protein, 460 aa, unidentified
MQYLGIDWGTRRAAWCALTAAGELTEGVISADEDGLTRLVARLGPDVRGCIEMMSGAVWVRDRLAECGWTIEVADARKVKAIAPLACKTDRVDARVLADLVRRDLVPTVWVPPLDDRAIRERLRRRSHLIRLRTSSINRTFGLLTQWGLRRNLTALRQPGALDELAEHGVPDVWRTSLATLLGVIDDLDRQLAPLERELRPLARSDERARLLMSIPGVAELLGLTIASEIGDISRFPSARKLVGYSGLAPRIKQSGQSSRTGRLSKAGPDTLRWAAVEASQQAWRPNNPWHELYTDIKRRHGKANPAKAAVARKVLIAAWHVLALQQPFKPRRTTRDRSCPGKLLHSSGHLRPTNDLRSRGSCNRQRAPPSAERELSTHCRDRERRTGPRHQRPLTPRRPSKRRMARQPPLPLPRISLGRPGPRRSHTHERERGGAHPQRRLSAQRLQTDDPGVTPQLAT

SEQ ID NO: 138209 - protein, 381 aa, unidentified
MNHLKYGIGIDMSKDKFDVCLSVIDAMQKVHHQFSASFDNNIKGFAAFLKLSVAKQQQSLPAVYLVEATGVYHEQLAWYLFGQQCNVVVVLPNKARKYKESLGLKSKTDSIDAKGLSRMACEQCLIHWRPVSKKIYEMRIITRQVESVAAQITVAQNQLHALSHGMYHVKEIEKMLMKQIKLLGEQKEKMQQTLLNLIANDAILQEKFSKILKIKGLGALSLATIIAETDGFALTENIAQLSSYAGYDVVENQSGSRTGKTKISKKGNGHIRRALHFPALNMVRYKQGNFDQLYERVYKTSSIKMKGYVAIQRKLLALIYTLWKKNEAFDNTYTNQASRDGEPVPSFASALQKPGKKITPGKPRATQDKLPSTNRRKPSFA

SEQ ID NO: 138210 - protein, 430 aa, unidentified
MKSNTQNAKIEAVTENTLVVGIDVGSEFHYARAFDWRGIEFSKKPFKFSNTEPGFTEFKAWILHIQTEHDKDAVLPGMEPTGHYWFNLGKFLQDNGMKPVLVNPHHVKKSKELDDNNPTKNDRKDPKVIAGLIKDGRYSYPYLPDGVYADLRTASNLRFQMQSELTRIQNRISRWFSIYFPEYKDVYGNPDAKSGMMILKVAPLPEDIVTLGVEGVNRIWREAKLKAVGLKRAKTLYEAAEHSIGSREGATAARLEIRMLLEDYESRATRLQEIMTLIETLVKQIPMAEKLMEIKGVGIKTVSGFLAEVGDISRFDNPKQLQKLAGLAIKENSSGKHKGETTITKRGRKRLRYLLFEVAMSLVSKNTEFSQLHQYYTTRRINPLKKMQSLMAVACKLIRIFYVMLTKQVDYDPQKMIGDIRRPEIYLQAA

SEQ ID NO: 138211 - protein, 348 aa, unidentified
MENPTTIAIDLSKNVFEIAVERQGRICQRKRLNRRQMVEFFSQCPSATVLMEACGSSHYWGRVLQRLGHDVRLLPPQHVKPYVLGNKTDRRDVEAILSARHRESIVPVPVKSIEQQSVVFLHRLRATWMKTRTSRLNVLRGILRELGVTIPEGASRVLPAVSAALSDPSAPVPEVLHSVLMSAMAEVRELDERIEGVKRQLEAVAGTVPLVERLETIPGVGLLNATALAAMVGEFSRFPSGRRFASSLGLTPKEHSSGARRQLGAISKRGDTYLRTLLIGGARSVLLWAHRTKKPHRLQEWALNVERRRGRNRAAIAVANKLARIVWAVSTRGVPFHPIPLAPQNVPA

SEQ ID NO: 138212 - protein, 343 aa, unidentified
METVTTIGLDIAKSVFQVHGVDAAGQMVIRRQLKRRQVLAFFQRLPACLVGIEACASSHHWGRELQVLGHTVRLMPPAYVKPYVKRHKNDATDAEAICEAVARANMRFVTIKTPEQQSCLILHRTRHLLIRQQTSVINAIRAHLAEFGIVAAVGRNGVEQLLGVVADANDKRLPEVARACLAALGVQLRVLKAQILEFDRMINAWHRSNETSSRLDKAPGIGPVLATALVATVADPKTFRSGRNFSAWIGLVPQQHSSGGKDRLGHISKQGDRYLRNLFVAGALAVIRYAKIHGTQHRPWLAALLARRPTKIAAIALANKIARMAWAMMVKGEHYKEPVALAR

SEQ ID NO: 138213 - protein, 391 aa, unidentified
MIFVGIDVAKDKHDCFILNSEGTVLADVFTIANNRIGFETLLSRIQSCSQGESKIKVGLEATGHYSYNLLGFLLDSGLATYVINPLHTNLYRKSLSLRRTKTDRIDARTIAMMLMSDVDLKSYSNTAYHNEELKSLTRYRFDKVKERAKLKSSVARLVNILFPELEKLVSSLHIAVVYALLSNYPGASYIANANTEELAETLCTASKGRYTKSKTAEIQVAAGVSIGSKMPAKSMELKHTIALIRELDKEISEVESAIDKITSQMDSPIFTIPGIGRHMGAMILAEVGDFSNFASADKLLAYAGLSPSTYQSGQLQNCYAHMEKRGSRYLRYALFNATKYVCLWCPTFSAYLEKKRSEGKHYNVAISHAAKKLVRLIFAMQRSGKAFLADY

SEQ ID NO: 138214 - protein, 344 aa, unidentified
MDNHTQYSGFAGVDLAKKVMQIHFVTGDGEITDKQVKRAEFLDFFRNRTKCLIGMEACGASQDWARKLEAMGHEVHLMSPKAVKPFVSGQKNDYNDAIGIYKAMFNGVRRVPVKSTEIRDLQTLRRIRSQVTKDKVKEINHVRGLLAEYGIVVGKSITAFNKGISSALESLKERGDVSPLVAEELQTTVESIKTKIERQKRLDREIEQLARGCKNYENFLKTPGVGPFTAAMLCVLLCDPAIFANGRQFAAYIGLAPRSRGSGGKNFIIGIPSKFNCDSESRAVFVECAQALARYKNKSPWVDGILRRKPKKVAVIAIANKLARQVWAMANKGESFKQMTMLTA

SEQ ID NO: 138215 - protein, 380 aa, unidentified
MNNTILAIDLGKYKSVVCILQQDTGEFRFMSFETTRAELRKLIAQQQPAVIVIEACLLAGWVHDLCSELGLRCLVANTASEAWKFKHLKRKTDKDDALRLAQLHLLGQLPTVTLPPSNVRQWRSLIALRQTLVGRRVAVQNRIRALFVAQGLPAPRGAKAWSAIGLAGIALQAKPLADCSPQELWRGLLEVSLTEYRQMGDLITQTETRLDALGKQNAEVKLLQTAPGLGPRTAEVVAAYLNDASRFQTAKQVSAYGGLVPRQHQSGEVDRRGRITKRGPALLRKLLVECAWCMLRYNAWARGIYLRLTGGGQRRKKQAIVALARKILVRCWAMLRDKKPWHDPQAAAKPPLPPSKQRRQEEAQRRRQAKQSAVLEGANA

SEQ ID NO: 138216 - protein, 414 aa, unidentified
MVAVDVVHERCAGIDISKADVKVCVRVPSSARRRRSEIRTFTSMTNDLLAMRDWLVAQSVTVVGMEATGDYWKPVFYLLEDGFEVQLLNARHMRNVPGRKSDVADSEWIAKLIEHGLIRASFVPPEPIRQLRDLTRYRTVVVRERVREAQRLEKLLEDAGIKLSAVVSDILGKSARAMLEALVAGERRPQVLAELALGSMRGKKPLLAEALTGRFGAHHAFLVRAMLDRVDEADAMIARLNRQIEAQVAPFRRVITLLDGIPGISTRVAEVIVAEIGADMSRFPTAAHLASWAGMCPGNDESGGRRKSGTTRPADAWLRAALGEAAMAASHTKGTYLAARFRRVASRRGKKRAIVAVGHSILIATWHMITSDTEYRDLGGDYFIERTGKTRVTQRLVGQLSQLGWRVNLTPATA

SEQ ID NO: 138217 - protein, 344 aa, unidentified
MYFIGVDHHKQVSVMTVLDEDGRELRNERVVNLRSHVLRFLEPYRPFRAVLEAGRASYVMADLLRELGGEVKLANPLQVKAIAHARIKTDKRDSRTLAQLLRADLIPEVYQREEWNRRAQRVMRLRAYWVGKQTEVRNKVRALLAQQREEVRLEVEKRGEGLFRANGLEFLSGLALEGQDQLVLDDLLQGHREIRAHVQVTDGLVRALYGELEEAARIDTIPGFARTLSVLVAVEIADIRRFGRPADLHSYAGVIPSTYASGNRTVHGPITKQGSAWLRWAVVEAVTPAIKKDLALRGLYQRLARRKGANVAKIAVARRLLTIIYRLLSERRNYIPGMMKQSAA

SEQ ID NO: 138218 - protein, 355 aa, unidentified
MTSTKYIGLDVHKESISIAVLNSAGKVVMECVIETKASTILQFIHGLGGDVHLTFEEGTWAGWLYDLLKPHVTELVVCNPRKNALLKEGSKSDRIDAHKLAELLYMSKLSSVYHGEHGLRMLKELSRSYLTITKDLGRVMNRLKALYRGWAIPCAGTQVYAPHHRSEWLAKIHEAGVRRRAELYYLQLDALRLVRQQARKELLAEARKHRATKVLRQIPGIGPLRAAHLVALMQTPHRFRTKRQLWTYSGLGLETHDSAQYRVVEGQLQRSKKPVTLRGLNDNHNHDLKDIFKGAAMRASTATGPLRDFYEALLAKGRKPTMARLTLARKIAAITLIVWKKEVRFDANYLKQQAA

SEQ ID NO: 138219 - protein, 347 aa, unidentified
MALTIVETRAITGGVDTHADVHVAAALDPIGGLLGVREFPVTPAGYAGLLSWLGGFGTVCLVGIEGTGSYGAGLSRHVTAAGVRVVEVDRADRQDRRCQGKSDPLDAVSAARAAQSGRARGAPKGRDGIVEAIRALMVAKRSAVGERTRTINQARALVLTGPDGLRARFAKHTAAALVAGTASLRPRPGDVVGYATRVALRELGRRAEFLDGQLERLDELIVPLVTAHAPGLLALYGIGPNTAALLLIAAGDHPERLRSEAAWAHLCAAAPIPASSGKTVRHRLNPGGDRQANHALWRIVFTRMGSDPATRAYVERRTAEGKSKAEIIRCLKRYVAREVYPHLRAVG

SEQ ID NO: 138220 - protein, 413 aa, unidentified
MEVLYGVCCGLDVHKKTVAACLRVPDPNGTRAEEIRTFGTTTRELLRLADWLAAAGCTHVAMESTGIYWRPVYHILEGSSEVLLVNAQHIKAVPGRKTDVKDCQWIARLLAHGLLRASFVPPAPIRELRELTRYRRQLVQERAREANRVQKVLETANIKLGDVATDVLGASGRAILTALIAGERDAEKLATLARGLLRKKEAQLREALVGRVTHHHTFMLQGLLSHIEFLDKQIVLFDARIEEQTRPLIPALERLDTIPGVGRRSAEQILAELGDDMSRFPTAAHAASWTGICPGNNESAGKRKSGKTRKGNRWLRATLVECARGAVRARGRYLSAQYHQIARRRGDKKAIVAVAHSILVAAWNILRYGVPYRDLGHDHFDRLDRDRLIRYHTRRLADLGVGVPAAVPAPATV

SEQ ID NO: 138221 - protein, 447 aa, unidentified
MPAGKDITMHYQKVLKMPESIPYLSAGFDVGADFTWMSIMLPNGILTGKPFKIIHSDPQSRELAISKIKEAQEMYSLESRCFLESTGIYHIPLLCFLRDKGFDCAVINPIITKNSTNMNVRKLHNDKFDSKKAAKVGLDASLKASIVPDDAIIDLRNLVRDYYYFKDLQSAIVLKLHAELKVSFPAYLNVFSKVTTQTSLKLLEAYPLAADMLAAPKDELVETIRSTARFGETYALARYDAICTAAKDAAVFGRALPSNALRIRLYIKMYREYQAHLDSILEELHQAVGKLEGTPDYDRISFIQTLRGVGFLSAVVLIAEMGSFDLFSSPKKLYAYFGLDPGVNDSGKFHGGRVHMSKRGSSLARRILHMVAINNLKVDKATKTPVNPVIYNYYTRKCASKKRALLSGPSCTKSATSFSLCSGIISLLSSLRRKNTVNVMQQSTRNL

SEQ ID NO: 138222 - protein, 421 aa, unidentified
MGKIIERCAGIDVGKRFLLCCVLTGAANEEPHGETLRFDTTVPALERLRAWLQEEQVTHVAMESTGTYWIPIFNILEEQFAIILANPEEVKNRKGHKTDRNDAKHIADLLRHNHIRSSYIPPKPVRQLRDLTRRRVQLTQDATRERNRVQKLLEQSNVKIGNVLTDVFGVSGQEMILALLDGQSTPEQIAALARGQAQHKLPKLIEALQGHRMSDHCRLVIRSSLRHLGCLQEEVELLDEEILSRMRMPPFEQPFALLQTVPGIGRLSAAAILAEIGTDLEPFPSAEQLASWAGLCPGSRESAGIQKGRQTTHGNPYLRTTLVQCAWAATRKQGSVFAARFRQLAPRRGEKRAIVAVAHLMLTILYCMVKRGLEFQGAGCVHQQRRRERRAHHHMRALRRLGLDIRVMPEAAIVAAGQEVP

SEQ ID NO: 138223 - protein, 392 aa, unidentified
MRVSVGIDVAKEVHWVSAIDETGETILDRRLDNTPAAIAALIDDLRTLPGTVTVGLDVVGGIAGLAEAMLAEAGFRLVHVPGLAVNRARQGTGGGETKSDPKDARVIADQVRIRRDLRPIEPEAEIDLDIRLLVGRRHDLVEEQTRRIGRLRNLLVAIFPGLERALDFTTKGALWLVAKYVTPAEIRRAGKRALIHHLKRAGGLPNVEALADKALAAAKEQTIAVPGERTSASLVRELAREALATRRRIAELDRELEALLQRHPDAALIRSPPGMGATLTAEFIAEAGTIQRFRSPDALAAAAGLAPVLRQSGKVRFLRRPMGGNKALKRVFYQSAFCSLHTPDSRAFYERKRKEGKRHHQALIALARRRINVLWAILQNRQAFKANFKHAA

SEQ ID NO: 138224 - protein, 522 aa, unidentified
MAFKRSRHSSKSRAAEFLQQPNGVVHARVQKVGPEHFGIISVDCAKARSKWMLADFYGNILIPPTEVAHNRVELAAAVKQVRTGLAKHDLRDCLVAVERTGRYHHPVKNAFRKADFETRLVHPFTTKQFRQPADPDNKTDDTDLKAIHRAAVNGFALLEAAPVESWRQLQLFIRHRRDLVRKSSALACQIREHLDAALPGYAACFDKLWESNVAFRLVQQFGSAQGILEAGETALGEFLYQQKVRFQQRTLVTVLTWAKSAAAPDVAADLHRQIALAYHDDHARKSLEIIRLEREIAHRLAQTPYILLLSCPGINVVSAADFAGEMGPIENYANSRSITGRAGLFPARHQSDRVDHTGHLARRSNRALRAAILGIADNLILCNAHFHNLANLWKLAAKDPRMTHVKVAARFCRIAFQMVAGRQVFRHPCLRERGYILDKLLAFHVEHQTSMQETMRDLHYAITHIPKSEHAAEAKPLHERMQTTRERGKTGPQPIRELIAIVLARLGVGVINSNPSGEEDLT

SEQ ID NO: 138225 - protein, 406 aa, unidentified
MFYGGIDVAKYRHEVCIMEQDGNVILQIFVDNTKDGLDKLIHNLKRLEIEVSQIEFCLEATGHYWLSLYYHLTELGYKVHVINPIQSDALRNFYVRKTKTDRKDAQLLADIVRFGHVSETKLASETVLKLQSLSRLRFEFVRQVGSLKNRVLGILDRIFPEYPQCFSNVFINTSRELLKSFTAPEELAEADLTELTDFLNKHSRGRLGTDRAKQIQALAKGTFGIDIALDAFTLELRLLVEQIEFIEEQISVIEEAIDQVMEEMRPSHDTAYRHVLETIPGIGSVLAASIIGEIGDINRFPNAKALVAYAGLDATVRASGQFEGTRNRISKRGSPVLRQSIWLAAVSARRFNPEMKQFFEKKRSEGKHTLVATGAVARRLLHLIYSLWKDNRPFDPNYQWSPANSN

SEQ ID NO: 138226 - protein, 332 aa, unidentified
MKTYASVSLSAVPVLGLDLAKDSFVAALRMDEQRQLMASFPNHKGGFRKLHTWLHQHFAGKVRAGMEATGIYGQALAAWLYQKGHTVHVLNPARVAAYARSAGQRNKTDPADARIIAAFVATHSLPVWQPPAPAQLALQQLCRTRHQLAAQRQQISNQLHGAAPAVRPYFEHLLAAFDAELKRLEDALAAHLAAHPAHAEQVRRLATVPGIGIRTASVVLAELPPITPTSDPRTLCAWCGLTPTRHQSGPREGRTRLSRAGNTYLREALFMPALVAKRHNPLLRAFAERLARNGKDHGAILGAVAHKLLRILIGLLRHHHDFDPNWHSLHHA

SEQ ID NO: 138227 - protein, 313 aa, unidentified
MDKSFVGIDVSRDRLEVYVRPLGDRWWVPNTTQGRAVLVERLAALAPELVVLESTGGLERAVARTLQEAGIPTAVVNPRQIRDFAKATGRLAKTDALDAEVLARFAEVIRPEARPLADEGTAQLRELVVRRQQLIKMATAERNRLKRASPKMKLRIRRHLEWLEEEIARLDGEIEGMKLKREEWANRDRLLRSVPGVGPVLSATLIGCLPELGELRGKEIAALVGVAPFNRDSGQWRGKRGIWGGRATVRAVLYMAAVAATRWNPVIREFYLRLIEAGKPVKVALVACMRKLIVILNAIVRDGRPWRYNPALT

SEQ ID NO: 138228 - protein, 368 aa, unidentified
MSTVPFDQVILRGCGIDVHKDVVVATISGEGLKTETRSYKTFSSSLTELKEWLLSNGITHVAMESTGVYWKPVYKVLECPVMKVWIVNARHIKYVPGHKTDKKDCAWICKLLLAGLLKPSYIPEREQRELRDLTRYRNKLIQHVSSKKKRIVRILEDCNIKLSSVMSHLDGVVATKLIEILIEKGHVTKDDIACVYHKRLGASPELLYQACEGFIEPHHTYMLQTIRKDIEQTEVIIADLTSRIKVVLSPYENVIELLQKVPGLSRKTVEDLIAEIGVDMEAFPTEKQLASWTGICPGNNESAGKKKWKDHAWQQTVESRHYGSCLGSNPYQEYLLQCTLSPVSSPQRQEKSFDSSRTLDPEIGMAYA

SEQ ID NO: 138229 - protein, 369 aa, unidentified
MNERITYIGLDVHKETIAVALAEGSIRGEVLGYGQISNTPAALTRLSDKLSRRGRDLRFCYEAGPCGYGIQRQLAAAGHDCVVVAPSLIPRKPGDRIKTDRRDAINLAGLHRAGALTAVWIPDPAHEAMRDLVRARLAAVRSLRQARQQLSGFLLRHGCHYSRAAWTLMHRRWLAGLRFEQPAHHIVLEDCIATIEAATARRDRLTAQIEAMLADWALAPVVHALQALRGLALVAAATVVAELGDITRFANPRQLMAYLGLVPSEHSSGASRRQGGVTKAGNATARRMLIEAAWSYRFPARISREQLLRQENLPKPIRDTAWKAQVRLCGRYRKLSRAGKPAPTVTTAIARELAGFVWAIACQLPRPTN

SEQ ID NO: 138230 - protein, 400 aa, unidentified
MLYIGIDIGKRNHEATILDESGKELCESVKFPNSIAGAEKLLSKIPNLKDAMFVLEATGHYWLSVYCYLASKELAVQVINPIQSDSLRNLYIRRSKTDKKDSFIIADIARINRMPKTKLADENTLKLQTLTRLRFELIDQVTALKARIIGVLDRIFPEYESIFSNIFIKSSRELLKNSACPEEILEFDLSELAESLNKASKGRFGTVKAKELQSKAANSFGITLGLDAFRLEIKLLLSQVEFLEAQIKTLDSSVKELLQEFKDCFITTIPGIGDVLAASILAEIGDINRFNHVKKLVAYAGLDATIHQSGQFTGTRAKISKRGSPYLRRGLWSAANSARRFNPVLRDFYQLKIEQGKHPQVALGAVARKLTHLVYYILKEQKPFDPNYQWSNVKIYVDSL

SEQ ID NO: 138231 - protein, 401 aa, unidentified
MYNGLGVPKFVMPMRQVCGLDVHKDSVFVCILNENGVIFQEKFGVLTTEIEQMLGIMQQHDVSEVCMESTSIYWMPVWRVLEPYFELKLVNPFFIKQLPGKKSDVKDAEWIATCLHKGLIKGSYVPEDRIQQLRQYDRRIFDLDKDIVYKLTKLDAALQRCNIRISNYLSNTHSKGYKEVVNKLAKGTTDPEELIKSIHGKTINKVGREVILGALTGVVSKADVDMIRQLRDEVELAEKHKEECQSKMDALCRQWFPDEYALLQTIPGVKARSATSVLAELGNDVSAFPDASHLTSWCGLKPRNDESAGKIKSRKITHGNKYLRKTLIECSWAARRTQGSFYSRFSYHQTVVRKKNSMKVQVAVARKMLSAIWFILHDHVPYKDYTPPTPEETSSDIVPTE

SEQ ID NO: 138232 - protein, 337 aa, unidentified
MRKLYAGCDLHGNSNFWGIRDETGEKVLHKKLPNDLALMLAMLEPFREELVGIVVESTYNWYWMADGLMEKGYQVHLANPSAIQQYEGLKHADDKHDAFWLAEMLRLGILPEGYIYPKQERPVRDLLRKRGHLIRLRTSMVISLENIICRNVGRKVSANDVKRLGEDRVTPYLEGQEDLALAGQVSKNTVDFLSEQIQEIEKAVLKRVRLKKSYRLLLTIPGVGKILALVIMLETGPIRRFATVGDYGSYCRKVPSQWTSNEKKKGSGNRKSGNRYLAWAYAEASEFARRYYPEPRVYYQRKMQKTNAAVAHSALAHKLARAAYDVMRDHVPFRMEK

SEQ ID NO: 138233 - protein, 322 aa, unidentified
MKNLSFLGVDVAKDTLVIFDGQKVYEFQNERGLKKFKRKFFKKKEDRKKRVVIYEPTGPYSAFLEEFCATNMIKVVSLNPRKVPRLREVLGHRAKTDNLDAKLLYEYHKIVSEEEIKEIEYNENLEKLSLLLSEYQLYQNIENKLSNFLEYLDRVPVDSKESKKHIQKNLEETRQRLQKIKKEMEELVNKDDDINRGVREIEKVKGIGKMIATYCYIFFRKRRIRNRREVVALAGLDPEVKESGKRKLVTRISKKGDNRLRSLLFMGALSAIRCKEGGLKEYYESLIKRGKPKKVAIIACARKLLIFAFYNYKKWQMEAQSA

SEQ ID NO: 138234 - protein, 345 aa, unidentified
MLIIGCDFHPGFEQVAIFDKSTAEIGYRRLQHPGEARAFYASLAEPALVGMEACGYTQWLERMLAELGHELWLGDAAQIRASVVRRQKTDQRDAEHILNLLLEERFPRLWVPTAEQRDVRQLLLHRHHLVRSRTQVKNQLQAMALNQGVQKKRKLWTQAGREQLQKLALPAYTAARRDECLQRLDYLNQQIRQLNEKVEAEAEKRADARLLMTHRGVGPQTALAFVLTMGEVERFANAKRVASYVGLIPSEYSSGGKQRLGRITKQGSPLLRFLLVEAAQTAARYDPTLKRVYARLCLRCSRGQAKVAVARRLATRLYWMLRSGKNYAQLTASGAGKPVSSRGAA

SEQ ID NO: 138235 - protein, 379 aa, unidentified
MTATSHDPRCYVALELSQAKWLVGAFLPGRAKIILHTVRGGDAASLVEVLDRVSARASNEAGTQVPLSVCYEIGYDGFWLARYLIDRGIDTHVLDSSSFRVSRRGRRAKTDRIDVEAMAVTLRAFMAGDKGACREVAIPEPEVEDAKRMSRERTQLARERTRHVNRIRGLLTLHGIRRVKGIWGGEWRSALKGLVTADGRRLGPFLCAEVAREFERLHLLLGHMKQLEAERRAATATATAFPSAPKVRLLVTLAGVGEIGATVLVTEVFHRSFKNRRHLASYLGLTPSPYASGESSREQGISKAGNKPARTLLVELAWCWLRYQPGSGLAEWYRRTYGEHSSRVRKVGIVALARKLAIALWRFVEHGVVPAGAVMSPER

SEQ ID NO: 138236 - protein, 431 aa, unidentified
MPENEVHQPLQEPEFAAFVGIDWADQKHVWCLQAAGSTQREQGELAHKVETVEAWVAQLCQRFGERPIAIAVEQTKGALVYMLAKYQSLHLFPVPTTMAAGMRKALYPSGAKDDPRDSDLLLDLLLLHRDKLHRLAPDSEATRRVQNLVEERRKLVDEKTAQSNRLTSALKIYFPQILDWFKNPDTELVGELLERWPTLEELQQATPEELRTFFHQHHCRKGELLERRMEEIGQAKPAIHDRAVIEAQRAVVKVMVQLIRSLLAGIAELDEKIAEASTAHPDFFMFASLPGAGEVMAPRLLAAFGSQRDRYGSANEVQIYSGIAPIIEKSGKTKWVHFRRACPKFLRQSFQEWAGHSMAKSAWAKAYYQQQRKQGQDHHAAVRALAFKWIRILFRCWKDRVTYDERKYLAALVKRGSPLSALLVVPKGATL

SEQ ID NO: 138237 - protein, 367 aa, unidentified
MKKISTVAMERIQIFKESQRTIGMDLGDRSSHYCILNEAGEVIWESKLPTTPKGIEEVFSRIPRSRMALETGTHSPWVSRQLTELCYEVIVAHARNVRLIGESSRKDDRLDARTLARLARIDPGLLSPVRHRSAKAQIHLTVIRARATLVSARTALVNAARGLTKSYGARLPKCGSEQMNREIAQGLSQELREALDPLLAEIESLNERIAEYDRRIEKVAKEVYPEAALLRQVKGVGPLIALTYVLTLDDPHRFRRSRDAGCFLGLRPGRRNSGMSEPQMHISKEGDRYLRTLLVQGAHYILGPFGQDSDLRRWGLKLAKRGGKNAKKRAVVAVARKLAVLLHKLWVSGEVYEPLRNNNHKVVAAVA

SEQ ID NO: 138238 - protein, 436 aa, unidentified
MTLINFVAANQKYYAFNLLSVFIMVFWSVQYLLQHLLVQTQVSHQLLQPLILILQLPQTPQFRHARPGKFFLPVNGMDYFLPLRLTVRNVLTRRITMNIVFLGIDLAKNVFQLCGLNQAGKPVYTKRTGRKELLQTLANIPACLIGIEASTGAFYWQREFEKLGHKVKVISPQYVRPFVRGQKNDGNDAQAIAVALMQPTMQFVPPKSPEQQDIQALHRARQRIVNHRTATVCQIRGLLLDRGIPIGSAVSRARRAIPLILEDAENGLSSRMRRTIAELYDLFNDLGRRIHFFDKEIETVFRQSEACPRIAKVKGIGPKTATAVVAAIGKGTEFKNGRHFAAWLGLVPRQHSSGDRQVLMNMTKKGDKHLRTLFIHGARAVVRVATNNNDGHMNQWVNQLKERRGFNKTTVAVANKNARIIWSMLRNDTGYQVVCN

SEQ ID NO: 138239 - protein, 318 aa, unidentified
MTPPACFIGIDVAKLTLDVAVRPSGERYRVANGDAEIGALVARLTALRPVLIVLEATGGFEAAVVAAVATAGLPVVVANPRQVRDFAKATGQLAKTDVLDAQVLALFAERVRPAPRPLPDAATQAFDALLTRRRQLVEMLTAERNRLGFARAPIRRSISQHIRWLERQLADVDRDLDGAVQASPLWRAKEDLLRSVPGIGPVVSRTLLGELPELGTLNRKQIAALVGVAPRARDSGTWRGKRAIWGGRASVRAALYMSALVAARCNPVIRAFHQRLRSAGKPAKVALTACMRKLLTILNAMLRNGTPWRAPLGAGACT

SEQ ID NO: 138240 - protein, 419 aa, unidentified
MSNRLGQRLATIPSGTLFAGVDLSLDSLVVVVLDANGQRLDRFRTTNDVTGYAYLRERLQRLVTKHYAAGVLVGMEPTNYYWKQVGYDLEQHQVPFRLVNALTVKRHREGDELDRAKDDWRDAFTIADLLRTGKFTETHLPHGAYAELQTGYTAYLRLRRDRGRQVTLLRNTVRQLFPEFEQVFQDVGGLTATAVIAAGLNPQPISRQSEAEFVTTVRCAFAGERLALRQLRELYALAPHSQGFTEATMALQLMAQHQAETIRLLDTQAEQLQTPLLSLFHTLPEAPYLLSIQGLQAADGLALVATAGDLAQYPSGAALVKLAGTTPTPNTSGRKTYSLTPFSHQGRSDLRTGLYFITLRLLTRNDALYYHYQRLTTRTPRPLPKMQAVGACMNKLLWYAWHVVKHREMYDPDRWRLLA

SEQ ID NO: 138241 - protein, 274 aa, unidentified
MSIVMGLDQHRAQITADWLDTETGEVKRGRVAPADRAGVRRFLERFDGQELEVALEATTGWRFVVEELRRVGAIVHLAEPAETAGLRGPKKRARGDRADARHLRELLMLERVPESWIPPDHILDLRARVRLRHMLGEQRSEWQQRIQATLYHHGCPERRQLMVGYGRDWLAAQPLSAVARERVTVALAMIDALDLQMRPIEKELRAYARRQAGCRALMAHYGIGELSAVTILAELGDCTRFSSSRQAVRYAGMDTVASNCTSCSGDFGLCGDVG

SEQ ID NO: 138242 - protein, 345 aa, unidentified
MFVAGIDAHATYSVTCVVSKQGQLVAGPTRIKNADADQLSELLGPYRPLEVVVETSPAWPWLFDRLDGNGVHFVLAHAKRLRVIAGSNYKSDDIDAQLLARMRLAGLIPEVHPKSVEQRGHAVLLRHRARLVRQRTQMVNRIHAQLHNAGLYLERGRMLTEGGREWVRSEAWPKLGEEQRLFIQMQWALIDHLTPMIHTLDRRVEHVGREIPAVALLETIPGIGSYRALLIATEILPIERFRTPGHLVSYAGLAPRYSQSGLRPIRHGSIPAGANRWLRGTFVRAIVSHITHAPDSWLSHANERIKERLGWQVARVATARRLARAVHAMLRTGEVWNGEPVTQEN

SEQ ID NO: 138243 - protein, 327 aa, unidentified
MKQFLIAGVDVSKATLDVFFKPGSYGVETSNDTKGFKQLLKELKKNAKHATPLVVMEYTGRYSVKFETFLRTHGIGYCKLNALQIKRSLGVVRGKSDKVDAERIAEYGWLRRDQLQCDRVLPDKLVQLQEVVSLRLKLVKDRSGYINRFKELRSTGCCTKTDHVGKVHLQVIAFFTKQILDLEARMKMLVKSDEKLYKDCRLLISIKGIGWIIACYMICKTRDFTSFASARKFNCYAGIAPFAHQSGSSLKGKSRVSHLANKTAKTLINLGASSAIQHDPELKAFYQRKIAEGKTRMCCLNSVRAKLVARMFAVIKRQTPYQIHLAA

SEQ ID NO: 138244 - protein, 345 aa, unidentified
MEQISRIGMDTSKHFFQLHGVNAAEKVVLRKKLRRKEMVAFFEALAPTVIGIEACGASHHWARILRSFGHEVKLIAPQLVKPYVKRGKNDTADAEALCEAMSRPTMRFVPVKTAEQQAALMMVGLRDRLIRNRTQLSNAIRGYAAEFGFTAARGMVHIDPLLDRIQADESVPVLARELFAAQAEEYAQLQAQIAEVDAKLMAWHKADECSRRLANIPGIGPIGATLLLMKTPAPEMFRSGRQFAAWIGLTPKDHSTAGKVRLGVITRAGDEALRSVLVVGATAVIQHVRRGGRGSPWIVGLLKRKPPKLAAVALANKMARIAWKLMVTGNSYAAKSAPAALMGAA

SEQ ID NO: 138245 - protein, 415 aa, unidentified
MKVVFPTCCGVDVHKTFVVATIITTPADSLQPHYQKKRFSTFNSDLNRFADWLLERDCLDVCMESTGKYWVPVFNILEKRGIRVVIANPKWVKAVKGNKDDTKDSKWIGDLFRIGLVKSSFIPDRNIRILREFTRYRYKLVSMKSSEKNRFQNAFTVCNVALDCVVSDMFGKSATAITDYLTSDGSFDPEHCVSLLQCSLKKKAEQVLESIEGFSIADEQKARIKIVREHYDFIEKLIAKIDTCVNEMVAKYEGEINLLCTIPGIDRKSAITVISEIGTDMNQFGSSKRLCCWAGLTPGNNESAGKKKSVRISRAGVYLKPVLVQVAHAAVKDNSNPYYKLKYERIAKRRGKKRAIIAIARMILTAIYSMFCTGEVWNPVDLFKIDMPEHLKEQQLAKAIKQATRFLEKHGLSVA

SEQ ID NO: 138246 - protein, 343 aa, unidentified
MEHFAGLDVSVKETSVCIVDDSGRIVREVKVASEPEALLQVLSKPTYHFKRIGLEAGPLSQWLFSTLAEAGLPVICVETRHMRAVLKAQINKTDRNDARGIAQMMRVGLYRPVHVKTLRSQKLRMLLTHRKLLQSKAIAIENDLRGTLRNFGLKVGVVGKVRFEARIRELVEKLPDLAALVEPLLIVRRTLREQFCILHRRLLAIVRDDEVCRRLMTVPGVGPVVALTYRATVDVPARFRHSKSVGAVLGLTPSKYQSGEVNRTGAISRCGDEMMRMMLYEAAHIMLTRTNKWSWLKAWAMKIARRRGVKKAIVALARRLAVIMHRIWVDGTDFRWTREVAGA

SEQ ID NO: 138247 - protein, 313 aa, unidentified
MYLGIDVHKRYAQVAVMDEAGELVEEVRVENANLDDLAQRYAGAEAALEATSNYYHIHDTLSEHLDVTVAHPKELTQIADTDKKTDRVDAKDLARMVRLNSVPESYVPTDEIREARALVRGRQTLVENRTEYANKIHGLLSDHGITEDVKPLNVEGREFLRELSLPTPWDTLLESYLDLIETLTEEIQNLEEAIEERARSLTETQLLMTIPGVSYYTALTIYAELGEISRFDGDKEVVSYVGLNPVIRESGDSRIEGSISKRGSGRVRWLLVQAANTAVHTCNDEYLSRFYERLASRKNSQKAIVATARKMLV

SEQ ID NO: 138248 - protein, 343 aa, unidentified
MEAYAGKQFVGIDLHRRRSVIVRTTASGEVLEAVRIVNDVQRLAAVMDRAGDCPEVVLEATYGWYWAVDALQAGGANVHLAHPLGVKAFEYRRVKNDFRDAQDLADLLRMGRLPEAWIAPSPTRELRELVRHRAKLVGLRSHCKAEVHAVLAKCGVQVLMSDLFGVWGTELLDGLELPAPYAARIASLRRLLDDVDFEITVFAGIIRGRMAQEPGYTAVQKIPGIGPTLGAVLVAEIGDINRFASASKLTCWAGLTPKHHESDTHVRRGRITKQGSRLVRWAAIESVKTVSKTSEVGVLRERVADRRGRNIGSVAAARRQMELVFYALRDGHVRALDHLPAAA

SEQ ID NO: 138249 - protein, 359 aa, unidentified
MKYIGCDFHPSFQQIAVLDLETGELVERRLEHGNGEAKAFYESLSGRVVVGLEASGNTYWLERLLAGLGHELWMGDAAQIRKQDSRKQKHDRRDARLILKLMEENRFPRIWMPTVAERDLRQLLIHRRHLVRMRARIKNQLQHIALNQGVQKQGKLWSKAGLELLRKLELEPWTRQRRDTLLEMLEQFDIRIQPLDDAVKQAAETQPRAQRLQTHPGVGPVISLATVLTMGEVSRFPDSRSWVSYLGLNPSEDSSGVRRRLGGISKQGNPFLRYLLVEGAASAAKGDQALGRMYARLKARRHHGVAKIAVARKLAVRLYWMERTGKRYPEVVRMQGSQSHLVADGMAVRLNRPPASPQP

SEQ ID NO: 138250 - protein, 292 aa, unidentified
MKHYAGLDVSVKETAICIVEETGKICRERKVPSHPEDLVRVLSDPAWTFERIGLEAGPLSQWLFSGLAEAGLPVICIETRHTKAFLEAQPNKSDRIDARGIAQMMRVNLFRPVHVKTLTSQKRRALLTARKLLQDKAIAIQNDIRGLLRNFGLKVGMVGAVKFEHRIRELTVGMPDLAEIVEPLLEARSKLRENFAALHRKLLAIVRDDAVCRRLTTIPGVGPVVALAYTATIDIPARFRNSKAVGPILGLTPVLHESGESRRIGRISCCGDGMMRTLLYEAAQTLLTRVTK

SEQ ID NO: 138251 - protein, 430 aa, unidentified
MNESVSEQPLNPKVVAFVGIDWADQKHDVVLRSADDPAKPEHQVIKSEINALNDWIAQMQERFGAKGKVLVCLEHSRGALIYQLMAYELFELYPINPSQLANYRKTFFSSGAKDDRPDADLLSELLLCHRDRLRAWKPDDQLTRELASLNEGRRNAVDRRSELANEIKSQLKLYFPVALQILQNDITTALAADLLVQWPTLAELQKVSPGKLRKFFYGHNSRQEKKILERLALIKEAKPLTADLAIIRPMALRVKLLAQQLKSLLPFIAEYERRIAELFGSHPDRFLFDNLPGAGPALAPRLLTAYGTDRDRFEVAGDLSNLSGIAPVRIASGKKTGKNASVHCRRACPKFLRQSFHEFGECSIRYCPWAQACYQAQRNRGKGHHAAVRAVAFKWIRILFACWKQRIPYDPDRYLKALQNRGSQYAQTAA

SEQ ID NO: 138252 - protein, 408 aa, unidentified
MNTLYVGIDVSSRSNVVYLMLPNGNKHSNFSVANSHEGSVQLVKRIHSALTSHSLDTVLIGLEATSVYGDNLVYFLREDAALAPFNRKIHVLNPKQVKKFHDAYNDLPKNDYVDSFVIADCLRFGRINKEVYLGDYRYKALQNLTRARYFAVQNLTKEKQRFINVLFKKYSTLTQEKVFSNTFSTTALAVYDEFESAEALANMDLHELTAFIIEKGKNRFSNPDAVAKAIQKAARSSYRLPKTVNDSVNQVLSISITSMKTLEAQIKEFDKAIKSQMELLSNVLISVPGIGPVYSAGIMAEIGDINRFNNQAALAKYAGLAWKQHQSGGFEAETTRLIPSGNRFLKYYLCEAAFSLVRCDKEYSDFYHLKYKEVNRYQHKRALALTARKFVRLVFRLLKDNRLYCLAK

SEQ ID NO: 138253 - protein, 397 aa, unidentified
MIYVGIDIAKDKHDCFIKKTNGEYIDTFTVSNNIEGFEILYTNILKFNTESEEIKVGLEATGHYGYNLIAYLLKHNIKVYVINPLHTNLYRKSMSLRLTKTDKIDSCTIVSMLMANLNLKAYTDLNFITDELRSLTRYRYEKVKDRAKFRSTVSKLICILFPELEKMVSTVHSPSIYALLLKYPDAEQISRAHLTKITNILLTKSKGHYEKNTAIQIREAARKSIGINMPVMSLELQHTIILLNEIEEQINEIEEKIKIIMDEIDSPITTIPGINYRMGAMILAEIGDFSRFSSPDKILAYAGMSPTIYQSGQIEQTSYAHMEKRGSKYLRYALFNATKYVCLWDPIFREYLAKKREEGKSYTVAVTHATKKLVRLIYSLEKNHEEYMEKIKKHNKL

SEQ ID NO: 138254 - protein, 362 aa, unidentified
MEWFCGLDVGMDESAICVVDDKGEVALQTTVVTDPEAIKAALKPYLGRLRRLGHEAGSLSPWLHPELLKLGLPAVCLETLHVRAALKAQRNKTDKTDALGIAHLMRTGWFRKAHIKSEACYRLRLLLTHRRNLKRKFLDLENAVRHSLKAFGIRLNRVGRGGFAQAVRDAVAQDALVSELIDAMLNARAALWKEYCRLHNLVVKLVAGHALCRRFMQIPGVGPIAALSFMTAIDDPSRFRRSRDVAAYFGLTSRRWQSGCSIDVQGRISKAGDGDVRRALYEAASALLTRYKKKDKVKSWGLALAKRSSHRKATVAVARKLAVIMHAMWVDGTCYCGDPDAAKADVSAGAAVKQRRLLAPLA

SEQ ID NO: 138255 - protein, 344 aa, unidentified
MTVDYYVGIDVSLEASSICVVDGAGKVIKEAKLSSEPEAFIAWFKALPFSLARIGLEAGPLSQWLYAALKEAGFAVELLETRHVRDAFKAMPVKTDRNDARGIAQLMRLGWFRPVHCKSAPAQETRALLTARKLVQGKLYDIEMSLRGILRGFGLKVGRTKKAGFASRVMELTEHHPALKAIAKALLTVHEVLLKELNRFENQVRKLARGDARARLLMTTPGVGPIVGLTYVAAIDDPARFSSSKMVGAHFGMTPKKYQSGEIDVTGRISKMGDKGVRAALYEAAHVILTTPVKGGALKSWAAKLARRAGMRKAKVALARKLAVILHRMLADGSVFDVTKAAAA

SEQ ID NO: 138256 - protein, 379 aa, unidentified
MIAVGIDVSKSKSTVAILNGDGSIRAKPFDVHHVADELQALVDYIKRTSEPPTILMEPTSHYHYPLLKAFTEAELPVCLINPYQMKKYGDTDLRKAKTDKRDSLRIAQYALEKSYSLIPYTPQDQKYEDLRFLSRQYSQRISTLTVAKVQLLSLLDETMPGITTILPLKSRDPDNCVLLRFIKRFKSFDVIRKMGKTRFLDSYQVLVKKTKDRFAGSKGLAIYELVLNSVTTRGENPLSAMTQDQCVDLVSTSQKAADEINLQMRIIAETMPEYKVLRSMAGVGDRLGPIILGEIGDIRRFHSGKALNAYAGNDAPPYQSGQFESRNRHISKRGNPALRKACFEVMQALKLTKPQDDPVYLFLLKKEQEGKPYLSLIHI

SEQ ID NO: 138257 - protein, 342 aa, unidentified
MTAIGVDTHKATLAACAIDELGRALDEATFGNDPAGYLAFIAWACSIEPEATIGIEGSASFGAPLARAVQSAGLCVREVPPHLSRFERRRTRRPGKSDPGDALAIARVTAREPNLPPIRLPDHTTEIRLLLEAREDLIGEATRVRNRLHAHLRILLPGYGGTVANLVAARHRTMVRRLLRGNATVQGELARSLLDRLLRLERECAVLKHRIEALVDGHPLLALPGAGPITVARLVAEAGDMRRFRSPDAFAALAGVAPIPASSGQVQRMRLNRGGNRQLNRALHVIAVTQSRFHPPAKAYVTRRIEADGKTWLEAIRALKRQLVRPVFKLLVEGAEARLEAT

SEQ ID NO: 138258 - protein, 386 aa, unidentified
MKRQTFTPRDYDVFAGLDVDKRSISVTFTNHEGFIRSLRMPYSVEHLLNHVRKHFPDQKVAFAYEAGPTGYGLYDGLVAQAYPCLIATPSMIPKAPGQRVKTNRLDSRGLSENLRGGQLRSIHVPSTIYRQLRHLTQLRDTYVSEMVAMKQRIKSLLLFEGIEFPPAPAGNGQWSFMVKDKLRQLPCSSTVRFKLDQLLESLEFSGKQIVKTTKEISRFCQTDPELSQCINYVMTIPGIGWIVASQLLARIGDWRELENIRQLGGFMGLVPTEGSTGDRIDRGSITHTGDGRLRSKLIQASWSAIRQDGELRDFFRSICQTHPRHLASRVAIVAVARKLSVRISVVLMQQRPYVVREKVHSAPLTQEETVPQGTTRRQAEPGDKNS

SEQ ID NO: 138259 - protein, 359 aa, unidentified
MRIIGCDLHARQQTLAMLETATGEVVKTTLKHEGNSVWEFYSSLPRPVRVGIEATGSMQWFVNLMEELGIDCLVGHPAEIRAAEPRKQKHDRRDADLLLSLLVEERFPKIWLPTKELLDLRALLRHRHQWVGLRVKIQNALQAIALANGLRRGSSLWTQAGQQAIASLPLSPHAAYRRNELQAMYVKFETEIEKLNQRVEQQARERLGARLLMTHPGVGPITALATEVFLGDPSRFAGSKELASYVGIIPGEHSSGKRQRLGGLSKQGNPLLRFLWSEAAIHAVRRDPELKQFYRRKLIQKGLGKARAAVARKLGIRMWIMLRDGIEYNEFCRRGQRQEKSGDACAGMPEARYGAKVAG

SEQ ID NO: 138260 - protein, 324 aa, unidentified
MINGILGIDVSKDTLDASVSSYNKVRARNFANSSDGWRQLLDWLATQKIRQVHSCMESTGRYSLGIACALYEAGHVVSIVNPAQIRDFARTKLGRNKTDGVDASHIREYCELFKPQPWVPPSEAYRRLGELQTIRAGIIAGLTEWKNRKNSGIVDSVAQSLADVTISHFTSQLGAVDEAIAQTIDNDSGLRRKRDLLLSISGVGETLAGIVLAELPGPDVLRSSAEVVAYAGLNPRQHQSGTSIDRVTRISKIGNAVLRAALYMPAMSAMRYNPAIVALVTRLKSRGRLKPKQIVVAAMRKLLVLCFGVLKTGKPFDQAMAMGC

SEQ ID NO: 138261 - protein, 393 aa, unidentified
MHSVGIDIGKRQHVAAICRQGQRTADKAVLRFGADRVGLALLERWLTRNGPVERVVMESSGHYWLALAAALHRASVPVAIVNPVSAKAFGKRRLQRVKSDPADARTLAALGMADQPATREPLAGAELREAARFAMHLVEEQSRIDNKITRLIELGFPELEQAYDDPTCSTALAVLRLAPTAQAVARKRVTMLADANRGPGHRAVGATKAAQIQALAKDTIAPPELAPQIGFEMELLIAQHDLFERQIAQAEERVAGLLDGDLARRLQTIPGVGPAICATFIAEIGDIHRFSDFDQLVAYAGVHPAEESSGQKGGPETSWHMAKTGNAYLRAALYRMSVVGLQHNPTIAVHYARKRGQGKSKMNALGHCMKKSLAIVWGVWRGDHDFQPEPPIS

SEQ ID NO: 138262 - protein, 388 aa, unidentified
MPTAADTPTAIQTNLGAIFVSLELSRSTWLVTSLAPGGGEKMSKYSVQAGDVASLLARFGALKQRALARTGTSFPIVALQEAGLDGFWLHRVLQSEGIESHVVDPASIATSRRRRRAKTDRIDGEALLRALLAHKRGEPRVCAIVKVPTPEEEDRRRLGRERKVLIAERVEHVNRIKGLLYSQGVCGYEPLRRDRRQRLDELTTGDGRPLPTHLKTQISRELDRLELLFDHIKAAEAERDALLAEQQGAATAPAPAAKMLLDFTGIGAEFAATLWLEGLFRHFDNRRQLASYAGLAPTPWQSGSVDREQGVSKAGNHRLRTTLIQLAWLWLRHQPQSALALWFKERVNRDGGRRKKSTIVALARKLLVALWKYVTAGVVIEGAVMKNN

SEQ ID NO: 138263 - protein, 395 aa, unidentified
MFIVGIDVAKRSHEVCMITSDGQTVQRPFSIRNNCTGYNLMLEKIRKHTNIKSQIVFAMESTAHYWLALFTRLRKDGYHVILLNPIQTSAMRDMFIRKIKTDAKDSFIIAELIRFGRYAESNVAQDRLLALKELCRNRFYLVDMAGDLKRKLIALIDRVFPEYEAQFDTIFCKSSVALLKKYPTPQKLSNAHLDKLTELLWNSSNGHFGEWKARELKELARNSFGVEDCDGAYSTLILLMLDQIQSLSGKADALEKEISRLFQSFDTTVTTIPGVGPIIGAVILSEVGDISRFSSADKLAAYIGIDPSVNQSGEFQAAHAHMSKRGSPYLRRCIWMASQVAVQRDPMFHAYYEKKAAEGLKYMTIIGHVTRKMTAVVFAILRDHKVYEPILSTAA

SEQ ID NO: 138264 - protein, 408 aa, unidentified
MNPLFVGIDVSSKNSVAYLMKPDGSKHSSFSVQNNLGGAKLLSERIVSALGSMQLERVVIGLEATSIYGDSLVYALREDGRLGRFQRKIHVLNPKQVRKFKEAYSDLPKNDWVDAFVIADHLRFGRINREVYMDDYRYKALQTLTRARFDVIQNLTREKQRFANYLFLKCSGMAQDKDIQNTSATTIALMEHFETVDDLANADLEELTAFITETGRGKFADPDATAKAVRAAAKGSYRLPKTVNDTVNQAMAVSIASMRALKGQVKVLDKAIEQQFEIIPNTLTSIPGIGKVYSAGIIAEIGDIHRFDSQASVAKYAGLVWNRSQSGDFEAEHSRMIKSGNRYLRYYLLEAANSVRRCDSEFRRYYDLKFKEVNKYQHKRALALTARKLVRLVFRLLKDNRLYIPPEG

SEQ ID NO: 138265 - protein, 338 aa, unidentified
MNIQTIGIDIAKNVFQLHGVNRSGHVALKRRVMRDQLLTVLAQIDPSTVVVEACTGAFYWARKFEALGHEVKIISPQYVKPFVRRQKNDGNDAEAICTAARQPHIPFVPKKTVEQQDIQALHRARQRMVNHRTAVVSQIRGLLLDRGFAIAKSITRARRAIPEIMAGQDNELTAMARDAIAELYDLFRDLDRRIGLFDKKIDRIFHENEACQRIAKIKGVGPKTATAIVAAIGDGSEFKNGRHLAAWVGLVPRQFSSGDRKVLMGISKRGNQHLRSLLVHGARAVVRTAPRKTDPNNQWVNQLRERRGFNRATVAVANKNARIIWAVLRTGETYRAAF

SEQ ID NO: 138266 - protein, 319 aa, unidentified
MINYIGIDISKRDFHVCFDEQGDIVKFINTPEGIREFIKYLKDKKMIPENTIIGMESTGSYHLAVAFLCTQAGYITYVINPLITKKKNQSTIRNVKTDSADARLIRYCLIDGAGYPFCDTPGSLTIKTLVRHRNAFAMLRQRARLRQEEVNYRQEYLKTSISTVNGELYDFLDERIRNLDKILSKHNPETQKLLKSIPGVGPQTATTFLSEIGDISRFPDSKKLTAFIGLDSRVHQSGTSINGKGYITKRGNKLLRTRLFNATAVAVIHPPNIFHDFFEKKRSEGKPYRVALIATMHKMVHVIYAVWIRGTPFVNKKKV

SEQ ID NO: 138267 - protein, 356 aa, unidentified
MERYLGLDVHAASSTLVVLSEKGRRLKRCVLETNGQALVEAIRMIPGRKHLCFEEGTQSAWLYEILSPQVQETVVAMLRYRRGQKNDALDAYMLAEKLRTGQIERQVFKAPGQFTLLRELARIHGMISRDLVRVQGRLKSLYRSRGVRTPGASVYGSGHREAWLAKLPKTSCSGAARLYEEIDFLAELKQRTERDLIRESRRQRITRILETIPGLGPIRVARLVPIVVTPYRFRTRQQFWSYCGLGIVTRTSSDWVRTPDRGWIRAEVQRTRGLTRQHNHVLKDIFKGAAMSVLIHYPHDPLRQHYDRLLEGGTAPNLARVTLARKIASISLALWKKKEPYQPEHEQRAEEIPREA

SEQ ID NO: 138268 - protein, 345 aa, unidentified
MKQLVAGMDLHSNNVVIGLMDMDGQRVGHQKVECRLSEVVKFLAPYKKRLRQIAVESTYNWYWLVDGLQGLRYPVVLANPAGMEQYSGIKHADDTNDAFFLAELLRLNILPTGHIYDAQLRPVRDLLRRRLTLVHHRTALMLSFKSLYTRTTGQEMTLSRLKELEVKEAQGLYEHPANQLIAGMQINQIDTLTESIEKIERAVLGCARELPSYPKLTTLPGVGRILGMTISLEVGDIQRFAGPGNFASYCRTVAAQRTSNSKRKGENNSKCGNKYLAWAFVEAANFARRYDEPCRKWFDRKAAKTSNVIAVKALACKLAKAAWYLIAEATDYDSQRMFGQPAKAT

SEQ ID NO: 138269 - protein, 371 aa, unidentified
MNSILYVGMDVHKENYTLCCYSFDRDKVEYRQTVPSDYRLILKYLEQVRRKYPEEVEFICGYEAGCLGYSLYHQLTDHGVKCIILAPTTMGITNTNRVKTDRKDAANIARCLAFHTYSGVYVPDGEDNAVKEYLRMRDDQKLALKKIKQQITAFALRLGKQYTGGKSLWTENHLKWLRGLDLTLLEKETLQEYLITYDYLTDKLERLDARIEELARNERYGERVRRLGCFIGIKPHTALSLLVEVGDFRRFEKAPNFAGFLGLVPGEDSSGGGRNRLAITKAGNSHLRRLLVESSQSYSRGTIGFKSKELKKRQEGNPPEVVAYADRANERLRRRYYRMTLKNGAKRNVAIVAVARELACFIWGIMTDEIA

SEQ ID NO: 138270 - protein, 406 aa, unidentified
MDVVYTHVCGLDVHKKNVVACVITPETKEIRTFSTMTDDLILLVDWIKSKGCTHVAMESTASFWKPIYNLLELEEIQTLVVNAKHMKNVPGRKTDVKDAEWIAGLLRHGLLQGSFIPSRDQRELRELIRYRRSLIDERAREVNRVQKVLEGANIKLSSVASDVLGKSGRAMIEAMVAGEENPELLSELAQRRLKNKKEDLKRALNGLMGNHQKLMLAAQLRHIDYLDEEIGRLDEEIKRRMLPFEEDLELLDTIPGVARRTAETIVAEIGTNMDQFPSAAHLCSWAGLCPGQNESAGKRKSGKTRKGNKKLRSTLVEAARAAGRTKNTYLSSQYHRIAARRGANRAAVAVAHSILMIAYYILKRRQPYIELGPTYYEERKRDTIIRQSLKRLESLGLKVTVESAAS

SEQ ID NO: 138271 - protein, 375 aa, unidentified
MDGFTTLVEMLAAAGDSAAEPVPVAIETPRGLLVAALRASGRRVYSINPMAVARYRQRHSVSGKKSDHADAVVLANILRTDAHVHRSLPHDSELVQAVAVLARAHQDATWRRTRASNELRSLLREYFPTFLTAFNGRKGHLTSADARAVLAVASTPAAAAKLSTTRIAAALRCGGRRRGVEDLAAELQQALRRPQLRQPAVVEEAMGIQALALLATLNVECASVEQLAEAASEAFRQHPDHAIVTSFPGLADVTGARVLAEIGDDRARFADARALKAYAGAAPVTRASGRSISITHRKVKNDRLAAAGYLWAFVAATHAEPAKQHYQRRRDHGDRHPAALRHLFNRLLGCLHHCLATEQLYDPTKAFAQVTPTSP

SEQ ID NO: 138272 - protein, 424 aa, unidentified
MKFKMQDKQNQLIERISDKHLVVGVDIAQQLHVARAVNFRGIVVGEPLTFENNEEGFLKLLKWIHDLKRLKNLDAAIVGMEPTGHYWINLSKWLYNQNIEVVTVNPHLVKRNKENRDNTQSKSDKKDALVIADMVKNGYYSFIRPSSESFEKLRVLMSNRDVIVKRLVMSINQVNRWVDVVFPELRQVFKDVTCKGAIATLRLFPTPDEISSLETLDVMRGWKSLMKRQPGPKKAQLLINLAKSSIGTGQALDAYKFHLEQLLEEYDLAVKQLERVEQQVKEVLYKIPFAKKLLMIKGISEISLAGILGESGDLSGFSHGNSLLRHAGLHLAEASSGKWKGQIVISKRGRSRLRRFLYLATMSLVMNNPEFKAVHSHNVKVKKIKKMKSIMKLIGKLARIFVGIARRNESYCPNKVQVLIPLAA

SEQ ID NO: 138273 - protein, 433 aa, unidentified
MTADNPVMRATKGKVMKPWIEIMHYAGLDWARDHNDVVVVDRQGQIADQWRFAHSLEGWQQFRERVKTFPALAVAIETSQGAAIDQLLQMEATVYPVNPLSAKSYRERKAPSGNKTDHLDAWSLAEALRQDGQHWKALQPLDPLTQDLQLLCRDEISLIEQRTALVNQLQQALVEYYPAALQAFDDWTQPFCWEFVIQFATPEKLAASGRRRWEKFLHTQKLWRPETATKRLEIFEQAGAFCGSASVTAAKSLLAVSLARLLKALQLQLDQYRQQIEALFKQHPDHDLFGSLPGAAQTLAPRLLGEIGGNARRFEDPQVLQCIAGTAPVSYQSGQIHKVRVRYSCNKTLRHTVHLWAQCCVRVCPWAEVYYKQKRAEGKSHACALRCLGQRLLKILWKMVQTRKPYDADLHARNQKQHGSWVLTLMKPEAKTC

SEQ ID NO: 138274 - protein, 417 aa, unidentified
MNTLPGGEFTAYIGLDWANAKHDVCAANSDRRKSGKFQHTAGHIDQWAHEIHQRFGGVIAVALELSKGPIVYALQKYDFFVLFSINPFMLAKYREAFQPSGAKCDRNDAALALDLLVRHRDKLTPLRPQSAPMRTLHCMVEQRRRLVGDVVRCTNRLGDALKQYYPQALEWFAQRGSIVFCDFLVRWPTLSRVKLARKATRETFFCEHNVRGTKCIEERIGAIKAAVPLTNDVAVIMAYQLLAWAVVDQLRAALLAVERYDEGIAAIVPTLPDYALFSALPGAGAQLAPRLLVAFGEQRERFQSACEFKQYCGVAPVFEGNGQQSWVHWRWQCPKFLRQTMVEWSAQTITRSYWAGAYYRQQRDKGNTRQAAVRALAFKWIRVLFRCWQTRTPHDESIYLNSLRVRGSPLVGATATG

SEQ ID NO: 138275 - protein, 312 aa, unidentified
MDACIVGIDVGKDRLDVAVRPSGESFVTARTGAGIEDLAERLKKLVPRIVAIEATGGFETVVAAGLAAAELPVIVVNPAQVRAFAQALGKRAKTDPIDAAVIAHFAEATKAVPRPLPDEMTRLLADLIARRRQIVEMMAAEGQRARRVTDQRLKKSIARLRKALEKELAELDGEIDDHVRGSPVWVEKEDLLASVPGVGPVVARTLIAELPELGSLDRRKVAALVGLAPWTRQSGKWRGKSFIGGGRKTVRNVLFMAAMVAARHNPILKSFRDKLVAAGKPKRVALIAVARKLLTILNAIVRDKRQWQPKTA

SEQ ID NO: 138276 - protein, 317 aa, unidentified
MQVPLRFIGVDVSKAELVIATHGQDDRLSVPNECTAIQQWLRTLAPGSLVAMESTGRYHQLLANLAAATALPVFVLNARDVYFYAKGLGARGKTDRVDSGVIARYLAEHHERLHPYHAPSASQAELEQLLGQRWTVVTKRTALRESLQACGASIAQAVSQLDAAFAGLLHALDGRITALINADAPLHRTRSLLQSIVGVGPQSSALLTSLLARVPFASSDALVAYSGLDPRANDSGRSRGRRRLSKRGDPALRRQMFMAAMSACYTSTFAATYQALRARGLKTTEALVILARKLLRIAFAVWRSGQPFEAHRVCGNP

SEQ ID NO: 138277 - protein, 478 aa, unidentified
MIKSVGIDLAGAGEHKVRCLDEEGQLCDGFGFESTPEGLAKLEERVFRDGSNPVIVFEPTGLAWFMVAVYLRARHSDCRLVRTQARNVVALRKYLRRSSKSDRIDALTLAKMPFVDIERLNDVYLPPAKINAILRLSRQRQRLGGNIAGRKKRILGIIDGYLPGVRQPFANLWSPQGREFLRTRLNPLAVVRDGEKALHRFLAQARARGKKETNESHWLYRACQKVATVYEMSRSSGAVNDDFFADLQDEIDRELRLMEIEEAESDAIAQRIEILYRELHPSDNLRTIPGVGELTAPVFLAVVGDPTRFRSQSAFANYNGVVPDSRQSANTEAKGLRMTKAGPSIMRWALYQASQIGRRFDPQLASVYHREMVHNGKNHKQAMGAVMSHIGARVLTVLQEDRPYELRDNQGNPITWEEARKLVLANYQVPEEIKQARRRRTTESNSAKLKRKRREMVAHSTHEAAEAPQPVATTASPG

SEQ ID NO: 138278 - protein, 278 aa, unidentified
MAQNGLLVAGIDVAKDKADACIRALSQRRTFESTAEGRRQLISWLRKHKATKVVMEASGGYEREWAKALRNARIEVRIVDPKRVRHFAQSAGRLAKNDAIDADTIAWFAETFGEAPGQAYDAEREKLLQIVNARRGLLETETMLANQGEHSVPDVVRKMQARLLKKIALEVAKLDAAIAAMIKATPHFAKLAEIIESVPGLGEGASAGLIAGMPELGQVSNKVAAALLGVAPYDDDSGKRRGERQIKGGRRRIRNLFYMPCMGRRPGTTRCSRPSMIA

SEQ ID NO: 138279 - protein, 348 aa, unidentified
MRNQPRGAAVYGIDLGKTWFHVVGLDASGRPIHRLKLGRATIFQFFANATPALIGMEACPGSQWLARKLQALGHTVRIIPAQFVRPFVKSNKNDTVDAEAIAEAVGRPTMRFVQVKETEQVDLQALHRARDLAVNTRTRLICQIRAFCLEYGVAIRTGVGLFRIDLPKALADEHNDLTPAMRHLVHDLWDQLQPLEERIRATTREIESIAHRSDVARRLTTVPGIGPISATAIVAAVGDGKQFRRARDLSAWLGLVPAQYSTGGKAHLLGISKRGNAYVRRLLIHGARSCLLHLDRSRDRLGAWLTDLQRRMPVNKVVVALANKLARVAWVILTHPGALYQRRDPQFA

SEQ ID NO: 138280 - protein, 335 aa, unidentified
MQSAKTVVGIDVGKEWLDVCYPNGKKEHVRNIKSCRTKVIKKAAVLGAIVCFEATGPYEEPLADECLARNVRAVRLDAWGTRRFAESQGRIEKTDKIDCEMIRDYALSLKDEKLHFIKLRSDAQKRLKKGVRTRRNLRKARNIIANQFEDDLDAETAKHLRDALKSIDKNIKRIEEECAEAIASDERLKDLDRRFREVKGVGPCLSRTMLAECPDIGEFNDKSIAKMCGNAPIKHESCTIKGKARPKRGRSELTEALYMAAVSASRNNHILREFYQRLLANGKARKQALTAVARKIAVLLNTIAKYPDFKPAQDPKDIAKANRAKRGRGRPRKTA

SEQ ID NO: 138281 - protein, 344 aa, unidentified
MKIAVLGIDLGKNVCSVVGLDPSGAVVLRRRVRRDTLIDLVAKLPSCIVGMEACCGAHHLGRLFAAQGHDVRLMSPEYVRPYVKAQKNDDRDAEGIAEAATRPTMRFVEMKTEDQLDMQTLHRSRERLVGERTALINQLRAILLDRGIVVPQGKRKLEQYLVILMNEHDGEGLSARMRMLVADIRAQWQELDRRIGEFDAEFVRWAKENEDARRLVTIPGVGVTTSTALIAAVGKAETFEHGRDLAAWLGLVPRQSTTGGKPRLMGISKRGNKYLRKLLIHGARAALPYVAEKDTALGRWAKSLLSRVHQNVAVVAFANKLARICWAVLRSGQRFAAQEAPLVV

SEQ ID NO: 138282 - protein, 437 aa, unidentified
MSQNKNHAKKSVCLQSLPLIHPHAAGIDVGAKEHVVAVPADRDPPPVRSFKAFTPDLYELAEWLQQCAVKTVALESTGIYWITLYEILEERGFEVLVVNARHVKNVPGRTKTDVLDCQWIQKLHSFGLLSGSFRPDQQIRTLRSLMRLRDNLVVQSTQSVHHMQKALFEMNVQLSNVISDIVGESGMRILEAILAGEHDPARLATLCTPRIKAARETVAKSLHGNWREELLFSLRVALDSFRFAQGKIAECDARITEHLAQFADRAVLETPPSSLKSELHRVCGVDLTKIPGIKEQAAQIIISEVGLDMTRWNTEKQFSSFLGLCPNNSISGGKVLRRSTRKVYNRAADALRLCSQSLTHSKTALGANYRRLKGRLGAPKAIVARAHHLARLVYRMLRYGRQYVEKGIAEYEIKFRLQRLKWLKHEAKSLDMQLLPA

SEQ ID NO: 138283 - protein, 357 aa, unidentified
MKKRLKQSLGIDVPKLNLSLSLGFLSDKLVKGFISHSDVSNDISGYRKVLKWLIASVDSDVELLVVMEATGVYHQGIAHYLYGQGYAVCVMQSGRVKRYAQSLDQRSKTDALDSRMLSMLGLERSIRLWHPPSAELQELKGLSRERSSLLKDRTMENNRQGAITSSVYSNAKALKRHNMRLKLLNIQIEVIEEEMRVLVSKNEVLEKKLNFLMSIPGISFISAATVVGETLGFESIVSTKQLTSYAGYDVVLRESGNFKGKTRISKKGNSHIRAALHMPSMTCVRCNPTLKKFYNRLKPKKAKPLVALVAVQRKLLILMYTLWKNEQVYDAGFETKKQQKHEASAAQDNKLIAQLVS

SEQ ID NO: 138284 - protein, 338 aa, unidentified
MNIVFLGIDLAKNVFQLCGLNQAGKPVYTKRTGRKELLQTLANIPACLIGIDASTGAFYWQREFEKLGHKVKVISPLYVKPFVRGQKNDGNDAQAIAVALMQPTMQFVPPKSPEQQDIQALHRARQRIVNHRTATVCQIRGLLLDRGIPIGSAVSRARRAIPLILEDAENGLSSRMRRTIAELYDLFNDLGRRIHFFDKEIETVFRQSEVCQRIAKVKGIGPETATVVVAAIGKGTEFKNGRHFAAWLGLVPRQHSSGDRQVLMNMTKKGDRHLRTLFIHGARAVVRVATNNNDGHMNQWVNQLKERRGFNKTTVAVANKNARIIWSMLRNDTGYQVV

SEQ ID NO: 138285 - protein, 411 aa, unidentified
MLYLGIDLHAKQFTVNLRDENGEILLRRQVSTAGDEPRRFLDETASRAGDDGYVAILEVCGFHDWLTALLPKCGCREVVLVQAEQRSRRKTDRRDGSKLSEILWVNRQRLLAGLKVQGVRRITPATPGERHDRRLTQLRHDAGAERTRTLNALQHILRRLNLAQHCPTKGIQTQKARAWLRGLRLPSLDRFEMNHLLARWASLNEHLQELEQQIAERSLKNPQAQLLGTVPGVGPFMALAIASRIGEIDRFPTPRSLANYFGLTPSCRNSGESDQRLGSITKEGSTLVRSLLGQLVLHVLRRDAVMRAWYQRIKKRRGSNIARVAVMRRLTVIFWHMLKYNQAYVVAAAPKPKPSPRRPKVSSTVEEACVCAAAELGAPPPDPRDLTLVAPCEGGKETLAARRRKKASGRS

SEQ ID NO: 138286 - protein, 383 aa, unidentified
MKLGSGQGPGTRIVDLAPPFQIHSKKSERYLGPAHGMSPHLQERTECVDQNRTNKGVIIMENVVGIDIAKNTFDVATKLPNGKYRTKGKLSNKLDGFEQLHAWIVEHVGRQANIVMEATGIYHEAVAEYLYNQGFVVYVVNPRRIYHFKVQEGVNYKTDKIDSKLIAGFGAAEHQQPLRPWKPEPPARRKLRALLNRLHDLQEMMQMESNREATAGSDIIEKIRSHISYLKVEIKELEKAIKQHIDDDPEFRHIRDLLVTIDGIGEKTVATILAELGNPLEFDSPKSLVKFVGLMPRLNESGLFKGRSTITKEGSEEMRTALFMPALTALKYNKAIIAFATRLKTNGKAGKQIVCAVMSKLLHFAYGVLKSGLPFDAKIALAR

SEQ ID NO: 138287 - protein, 402 aa, unidentified
MNCVGIDVSKGKSMIAVMRPFGEVVVSPFEVRHTASELSELARLLKNLDGETRVVMESTGNYHAPVAWLLHGAGLYVSVVNAMLVHDYGNNSLRRGKTDKKDAVKLANYGLDHWLTLPRYVPEEDTRLMLKSCYRQYQQYSKVQTMLKNNLISLLDTAFPDANRLFTSPPRADGSEKWVDFVATFWHCECVCGLSKKAFTAKYQKWCRKHGYNFSQDKALDIYASACGRFGVMPKTNTAKLLVEQAISQLQTTSAALAALKQEMQSLAASLPEYPVVMEMFGVGPTLGPQLIAEIGDVRRFHSKKALVAFAGIDAPPYQSGQIDVRSRSISKRGSASLRRTLFLVMGVLLQCAPMDEPVYQFMNKKRSEGKPYRVYMMASANKFLRIYYASVKAYLDSLEHD

SEQ ID NO: 138288 - protein, 415 aa, unidentified
MSLKIVYKICCGIDVHKTFVVACIASTNDKGVTSYESHRFSTYTSGLKTLLQWLLKHNCKDVCMESTGKYWIPVYNILENDCSIVLAHPKYVKAIRGKKTDKKDAKWIADLFKHDLVAGSFMPPADIRQLRDLMRYRFKLTCFQSSEKNRLQNCLTVSNIQLGNVVSDTFGKSAQAIPDKLLENPADTSFDLEPLVYKSLKKKLPELRDAIDGYITPEQVGKLKVIKAHYESLESRKAELEELILALAAPYQQELAILQTAPGIRSEFTAIGIISEIGTNMEAFPSAKHLCSWAGLTPTNNESAGKKKSVRVSKAGCYIKPLLVQCANAVVTSKKHPEIRNRYLRLKKRRGHKKAIIAIARMLLTALYHMLKNGENYNAELYRKSDLPPANWEITVEQAIIIARNQGYKIKSATA

SEQ ID NO: 138289 - protein, 425 aa, unidentified
MIPDNPSPHPSFVALIGLDWGDRQHAVALWTPDSQAPETFDLEHSPENVRRWLKQIEERFGGRPLALAVETSKGPLINMLFEVPWLSVYPIHPATSARMRKAFTPSGAKDDPQDALLLLGLLRDHLDRLRPLPPEDLLTRKLGAMCELRRKSVDRRTQLTNQLRAALKGYYPQALELVGDILHSPLALAFLKRWPDLIELKASRPATIKTFYFRRNLLRPEAIQMRLDRIAQAVALTVDDAVVSAGRRDVARLIEELNVLQKHIRQDEKLIAELFAQHPDARLFRELPGAGAALAPRLLVAFGTDRDRYPSAAALQRYSGVAPVKEKSGNRIWVHWRWNAPRFLRQTLVEWAGQTVLYSQWARAYYQQKKEHGKHHWSILRSLAFIWLRILWKCWQTNTPYNEERYIEALRRQGSPLLQSISKSC

SEQ ID NO: 138290 - protein, 340 aa, unidentified
MRELYAGCDLHGNNNLIGIIDAEGKRVFKKKLSNDLTLVRDTLKPFQEELVGIAVESTYNWYWIVDGLMETGYQVHLANPSAIQQYSGLKHSDDQHDAFWLAEMLRLGILPEGYIYPKEERPVRDLLRKRGHLVRLRTSLVNSLQNILSRNLGRKVNVNDVKALKEDRITLLLEMSEDLALAGRVSKEAIDHLTRQIYKIEWAVQKKIALKEEYRYLLTLHGVGKVLSLTIMLETGPISRFATVGDYVSYCRKVPSQWVSNGKWKGSGNRKNGNKYLSWAYAEASEFARRLYPEPRAYYQRKMQKTNAAVAHSALANKLSRAGYYVMRDQVPFQPEKLFG

SEQ ID NO: 138291 - protein, 365 aa, unidentified
MITDNYTTIGMDVSDRKIQVCVMTKSGVNPKIVMETIIPTTKDGLQKFLSTQDKNAPVAFETGTHCRWMHETAEGMGFKVYVANPCRLRMITESKTKNDVNDARILARIALSDPGLLHPVKLRNAEHQKMLNLHEMRNLLVKQRTAAIVQMRSIAKSMGFRIPKTSTRCFHKIDTSLWPKEFRDIAWPMLKNLEQLDITVKTYEKQIRELAETPTFKAQVDRLREIHYVGLFAATGFVAVTGGDTDRFEKSRDIGPWLGLSPKQDQSGDMDRQCHITKAGSPFLRRLLVECAQMILRNGAIETDLKVKGMRICARGAKIAKRKAITAIARSLAVLMAAMLKKMDTPYVPLSEANEKELSAIGFSV

SEQ ID NO: 138292 - protein, 334 aa, unidentified
MELKRIAIDTSKYLFTLHGVDHDDRVVLRRELRRDKLKAFFAALPPTEVVMEACGSSHHWGRLLIALGHVVKLIPPQYVKPFVKRGKNDRIDAEAINEAASRPSMRFVAVKGAEQQAATLILKTRDMLVRQRTQLINAVRGHAAEFGVIAAKGTARVEPLLARIAEDDTLPAAARAMLAVLGGQIATLDRQIAELETQMRAAHKANPLSRLLEQIPGVGPISALSLALTIDPAQFRSGRHLAAALGLTPREHSTGGKQRMGGISRAGDERLRRLLVVGATAVIRQAAAGRGKASAWLLNLLQRRPRKVVAVALANKMARVAWAMMTSGEAYRAA

SEQ ID NO: 138293 - protein, 342 aa, unidentified
MAHFAGLDVSVAETSICIVDEHGKIARERKVPTEPEEIIAALNGSGQACERIGLEAGPLSQWLYGELAEAGLPVICIETRHIRAVLAAQVNKTDRNDARGIAQMMRVGLFRPVHVKTPQSQQRRMLLTTRKLLQSKMLDLENDLRGTLKNFGFKVGKIGAASFEARVRELVDGYPTLRAMVIPVLVARAALREQFKVLHALLLRLVRHDQACRLLMTAPGVGPVAAMTFRATVDVPARFRKSKAVGAHFGLTPRKHQSGETDRTGRISKRGDRMVRTALFEAAQAVMIRLTRWCALKAWGMKIARKRGLRRAIVAVARRLGVILHRMWASGTAYRWGQPTAA

SEQ ID NO: 138294 - protein, 338 aa, unidentified
MKLYGGIDLHSNNSVVAILDEQDEVVYRRRLLNDAAVILEALAPFGEKIVGLVVESTYNWYWLVDALMDAGYRMHLANTAAIVQYSGLKYSDDDSDAVWLAKLLRLGLLQEGYIYPKERRAVRDLLRRRSRLVQQHTANILAVQNLLSRNRGHSLSANKIRQLTPDAVQELLPDANLALAVQSTLLAMRGQEAAIDLLERQACAQMKGTPAYHHLLTTSGIGKVLGLTIVLETGPVERFARVGNYASYSRLVGSERLSNAKRKGRGNTKSGNKYLAWAYLEAANFAVRYNPTIKRYYQRKRTKTNGVVAIKTVAHKLARACYFMLREGTDFDVARAFA

SEQ ID NO: 138295 - protein, 463 aa, unidentified
MNEDSKPESGQDRKKEEGISALGRKVGGIDVGSKAHWVCAPARGGEGREVEVFGAITRELERMARWLLERGVESVALESTGVYWIPVHEVLEGQGLEVLLVDTRAVARVPGRTKSDRRDCEWIQRLHSCGLLRGAFRPPEQICMLRTLVRDKAILVAEQGDWVRRMQKSLEQMNVRVHRAVTDLTGATGMALVRAIVNGERDPRRLAKLRDPRCHQSEEEIAEQLRGHWREDHLFSLGQGLKIYDALQERMEAYERAILEKLREMERADCRGEEPPTLKNKTKAQAIRNRGQEPLRQALYRVSGEDLTAIDALGVETVQAVISEYGTDLSLFPDEKQFVSHLQLAPHKATSGGKPVKNPKRRGSASSRVAAALRMAALSLRHSQTALGAYYRQIARHKGADVAVFATARKLATLIYRMLRWGQSYVDEGAEAYEKRYREARLRRLTSMAAELGYQLAPLAVHA

SEQ ID NO: 138296 - protein, 385 aa, unidentified
MAPTRMPEAVIGLDVGKSSHWACVATRDGEVLLSAPVANREGDLDSLFGRFPDALVVVDQSRNIGALALARARVAGMSAAYLPGLAAHGAARLFAGDAKTDERDAMVIAKTALGIPDALLPVGDPGPTIAAARALAAQRNFLTCENTRNKNRLRSILLESCPAFEALVDLSDGPQLRLMASLGGAWSVADAGPRRAAALTRGAARGKIEALVRSTASSTRPDAAAIAAEDRAVKLLARRISENSAEIEAITAEISALLEGDDTYRCLLTVPGIGPKTASELAISIDIEDFPSHDRLASYCGLAPRNRQSGTSISSVTASRQGNKRLKNLLIFSCNCLTRTEGRWGDYYTRCRERGMSHGKALKALARKRLKVIYAVMRDRVPYAA

SEQ ID NO: 138297 - protein, 343 aa, unidentified
MDQHIGLDVSLKDTSISVRQDGKRVWRGKCPSDPKLLAEVIRKRAPHAKRVVFETGPLSVWFYHALIAEGLPAICIDARHAKAALDMAANKTDANDADGLAQLAEVGFYREVRVKGFDSMLMRTLITARRQLMKMRVQMSNQIRGLMKTFGLVVPKGVGSVFERNVLTLLEGENDLARIILPLLKAWSDIRVRVAELTKQLVTMAGTDQRCRLLTSVPGVGTVTATAFAAAVEDSINFKNSRAVGAWVGLTPKRYQSGEVDYEGHISRRGDAKLRTLLYEAASVILNRSTETNTLRTWALALKERLGFKRAAVALARKLAVIMHAMLKTGELFDPNAGATVSA

SEQ ID NO: 138298 - protein, 411 aa, unidentified
MEAIFSCVAGLDVHSKTVAVCLRRANKLGEIFKEIRTFGTMTRDLLALSDWLAAEGVTHVAMESTGVFWKPIYNILEGQFQILLVNARHIKNVPGRKTDVKDCDWIAHLLQCGLLRGSFIPPKPQRELRDLTRMRTQLTREMSAVANRIHKVLEDTNVKLGLVATDALGVSGRRMIGALINGETDTARMADLARGRLRDKIPLLEQALQGKVTEHHRFMLQALMDHLSYLESQIERFNQRIEEAARPFEKAIAALVPIPGYERISAQNVIAEIGPDMTPFRTNAHLCSWAKICPGNNESAGKRKSGATGYGNRWLQTTLVQVAWAASHKKDSYFRAQYRRLAGRRGKKRAIVAVAHSLLTDTYFILKYGATYQDLGADHFDKLQHDRIRRYHVRRLNNLGYDVVLSERKVA

SEQ ID NO: 138299 - protein, 363 aa, unidentified
MYSERTSVGLDVHARSVAAAAIDSVTGELKQARLTPSHDHIRSWLDGLAGPVAVTYEAGPTGFGLYRSLTEAGVRCVVAAPSKLQRPAGDRVKTDAKDAVHLARLLRLGEVTPVTVPSVNQEAARDLVRAREDCRGDLMRARHRLSKLLLRQGIVYSGGQAWTGAHDAWLRRQRFDNRATQLAFESDYDAVLAVSARRDRLDTAINDSAADSEFTPVVRRLACLRGVSTLTAFALAVEIGDWHRFSGNSIGSFVGLVPSEHSSGASRAQGSITKTGNTHARRLLVEAAWHHRARYAPGKTMHDRWELAPPAARARGDAGNRRLHARWVTFNLRRKRPVIANVAIARELAGWCWSLAVLDSDSS

SEQ ID NO: 138300 - protein, 351 aa, unidentified
MSKETKKKTSPKSENDYLKYSVGTDISKDKFDACISMIDREQRVKVVATRVFKNSLVGFNEFYKWQQSICKLSLPVVFAMEATGVYYEQLAWFLHRKELFLSVILPNKSKRYMQSLGIKSKNDKIDAKGLSRMAAEQRLERWVAPSEAIVELRSITRHRESLQGSRTRFNNQLSALRSGEFVNESVESDLLDMISLLDKQIKRTEKLIVEQLKSDKELKEGSEIITEIKGVSSVSAATVLAETNCFEMFTNQNQLTSYAGYDVIENQSGKHVGKTKISKKGNAHIRRIMHMPALNVVTFGEPVFVNLYERVYARSKIKMKGYVAVQRELLCLMYTLWKKKEKYDREYYLRA

SEQ ID NO: 138301 - protein, 338 aa, unidentified
MGRYIGVDLHRNCFTVCVRWGNGRSHLRTWKLDDLNKFVSTLASTDEVAVEATGNTRLFYDKVRSRVLRVVVVNPHQFKVISESVNKTDKNDARNLALFLSKGLLPEVRMKDKRHAGVASLVQTRDKLVKLRTSLKNKINNLVSARGVNLKKESLSSEKGLQEVLKFKFDVLVDLELRVLVDQIRGLNRSIEELEEAIKEAGQELPGHRNLKSIKGIGSLGATILLSVIGDVEDFADEGKLASYFGIVPRVANSNESFRSGRITKRGNKLARTTLVQCALIAKRYSHNLSNYYERIKARRSSGKAIIALARKFLSVIYYTLKNHWVWDDFPNGVLAQG

SEQ ID NO: 138302 - protein, 398 aa, unidentified
MTESSDYESVQVFIGVDVGKDTHHAVAVNRSGNRLFDKALPNDENKLRSLISDLKQHGQILLVVDQPATIGALPVAVARSEGILVGYLPGLAMRRIADLHAGEAKTDARDAAIIAEAARTLPHALRTLKLADEQIAELSMLCGFDDDLAAQTTQASNRIRGLLTQIHPALERVLGPRLDHPAVLGLLQQYPSPEKLASLGEKKLATQLCKLAPRLGKRLAADITQALTEQTVVVPGTNAAVVVLPRLALQLITLRKQRDEVALEVEQRVLAHPLYPVLTSMPGVGVRTAARLLTEVACRAFASAAHLAAYAGLAPVTRRSGSSIRGEHPSKRGNKTLKRALFLSAFAALRDPISRAYYTRKMSQGKRHNQALIALARRRCDVLFAMMRDGTFYTPTAS

SEQ ID NO: 138303 - protein, 343 aa, unidentified
MDHFAGLDVSVKDTSICIVDDTGRITREVKVASEPGALLAVLMNASHRFKRIGLEAGPLSQWLFSALAEAGLPVICVETRHMRAVLKAQINKTDRNDARGIAQMMRVGLYRPVHVKTLRSQKLRMLLTHRKLLQSKAIAVENDLRATLRNFGLKVGMVGTARFEARIKELVENVADLVVLVEPLLVVRRVVREQIGILHRRLLAIVRDDEVCRRLMTVPGVGPVVALTYRATVDVPARFRKSKSVGAVFGLTCSRDQSGERDRPGAISRCGDEMMRAMLYEAAQAMLLRSAKWSWLKAWAMQIARRRGMKRAIVALARRLAVIMHRIWTDGTEFRWTREAAAA

SEQ ID NO: 138304 - protein, 377 aa, unidentified
MTKIRFVGLDVHAETIAVAVAEKDGEVRSHGIIPNRLESIRKTMAKLGPSKDLKCCYEAGPTGYVLYWQLTQLGVACEVIAPTLVPVKAGDRVKTDRRDAEKLARCYRAGELTPVWVPDAEHEALRDLVRAREAAKKDQLRARHRLGKFLLRHGKRPTDAGKAWTKKYLEWIKAHVRFAQAALEATLQDYLDEVDHVAERIGKLEKAIDEAVSEAGPEIRAVIEALQALRGVAQISAATIVCELGSLSRFESPRQLMGYSGLVSREHSSGGKIQRGAITKTGNAHLRRVLVEAAWAYQHRPNVTGYLLRRQKSLELADETKHMAWKAQHRLHKRYKALAARGKNKNQIVTALGRELLGFVWAIAVHTEAQYRQAQAA

SEQ ID NO: 138305 - protein, 352 aa, unidentified
MPETGRTAIAVVGIDIGKNSFHIIGLDDRGAIVLRQKWSRSQVEARFANMPPCLIGMEACVGAHHLSRKLQKLGHQARLMPARYVRPYSKGQKNDFRDAEAIAEAVQRPTMKFVATKTADQLDLQAMHRVRERLVSQRTGIINQIRAFLLERGVAVRQGLRFLRSELPGILGGPSEALSPRMVRILEDLAGDWRRLDERIEGLSNEIKAIAQQDAGCDRLISVPGIGPIISSAIVAAIGAGDVFSKGRDFAAWLGLVPKQISTGDRTILGKISKRGNRYLRVLFVQAAWVVLIKPTSWERHGLKSWIEAAKKRLHRNVLAIALANKLARIAWSVLAHGRHFEATKLDGAIAQ

SEQ ID NO: 138306 - protein, 422 aa, unidentified
MMDKERRWFVGIDWGSQEHVVSLCDDAGKKIGQRKFPHGGTGLTDMTAWLLKASGGKPGEIHVAIETPHGPIVEALLERDFNVCSINPKQLDRFRDRFTVAGAKDDSRDADVLADSLRTDMRAFRKLSIAEPVIVELREWSRIGEELKVEHGRLTNRLRHQLWRYYPQMLELADDVGANWFLDLFEAVPTPEKAASAREKTIARILKSHRIRRFDAAHVLRELRKPALTVAAGTIEAATARIRGLIERVRIINGQLSDAQRQLDRLCKKLSEPVADEDGETAPGQKTEQRDAAILDSLPGVARTVLATLLAEASDTLQRRDYHALRALCGSAPVTRRSGKSCMVVRRYACNQRLRNATYHWGQNAIKHDPTSRAKYDALRAKGHGHARALRSVIDRLLDVACAMLNSGTLFDPEFASKRAIG

SEQ ID NO: 138307 - protein, 374 aa, unidentified
MKKNASNDGVDGLTQTASSAKAWSPKRHRGKPSMKKFIRTAIDLGKTYFQVHGLESEGGQSISRKMKRSKMREFYEQIEPCRVGMEACGSGHYWARELVAMGHEVMLIPPAYIKPYIKRGKNDAVDAAAICEAMSRPGMRFVPIKSADQQAVLMLHKTREMFVKQRTMSVNALRGHLAEFGIIVAKGIGRVDELLALAQSDAELPQIAKSAVAGLAQHLEGLDQSIEAVGDEIARAHKQNPTSRLLDEIPGIGVLIASVIASSVPDPSVFKTGRDFAAWLGLTPRQNSSGGKEKLGSITKQGNRYIRKMLVVGATSVMRVAGKRKGALADWINALQAKKPKRVAAVALANKLARICWAIMTTGEGFRVDTYVKA

SEQ ID NO: 138308 - protein, 347 aa, unidentified
MRKIAYLAMDVHARNCVLGEMDGNGKFCGNRSFTTCETEIIKALKAIKAKKKFLVIEAGPLSNWVAQVASDYLTEVIICDPRENALIYKSSPKNDKVDTKKLCRLLRLGEFKAVYRPENDQRAIYKAAVQHYMDLRDQLTALKQKIKAMYRQWGVINVFTDSVYSVRGRDKFLTQVNHHPIYLQLKRLYALLDATAAMKQDAEKSMASLGRNYPEIKEFKKMPGMGPIGAHSFDAYIQTPHRFAKRSRLYKYCRLAVTDCTSDGKPLGYKRLDKSGINELKAVSYRAFLSAMKGDNEVKRFYLNSLQRTHDRTHARLNTQRKILSVMLSIWKKGHPYRAELFLDPST

SEQ ID NO: 138309 - protein, 342 aa, unidentified
MNAVHTVVGVDVAKNVFQAYWVVAETGEIRNMQIKRAKFLEHFAGRPRCLIGMEACGGAHHWARELSKHGHDVVLLPAKAVGAFVAGNKSDAIDARAIWTAAQQGGIKRVAVKSEAQQAVLALHRMRQQLVKVRTAQSNALRGLLMEYGEVFRQGRASLARGIAAALERIEQRLPRVVVESLMELWQRVGQIDGQVKQIERRLKSLLTEDRNAQRILQIPGVGMLTATAVSATMGQASAFKSGREFAAWLGLVPAHTGTGGKTRMLGISKRGDSYVRTLLIHGARSVFSSTKHPGPWLQKISQRRPLNVAVVALANKMARTIWALLAHGRTYQPDYVSRAST

SEQ ID NO: 138310 - protein, 391 aa, unidentified
MESVTSATVVAATARANAMTMFASLELSKSKWVVTINSPGSEKFSRHTVEGGNGVGLLDLLSRSRAKAEQRYGVAIKTVVIQEAGLDGFWIHRLLLGLLLANGIESHVVDAGSIAVARRHRRAKTDTIDGETLLRTLMAWARGERRVCSMVQAPSPEDEDRRRLTRERGTLVKERIQHTNRIRGLLSGQGVRDFNPLRRDCLERLEALRTGDGRPLPPLLKAEILRELDRIAVVTTQLTTVERARDALVHTEVEKPDTPAGVLIKLKGIGPEFASLLWLEALFRSFANRRQVGAYGGLAPSPWQSGSIERDQGISKSGNHRLRRTLIELAWSWLRHQPNSALSRWFRARVGAAKGRIRRIAIVALARKLLVALWRYVTQGVVPEGAELKAA

SEQ ID NO: 138311 - protein, 377 aa, unidentified
MEYSTTIGVDVSDRTSKICVMAKTPGGGRRVVAETTCATTKDGFAEAAAKFDRSWPVVFETGTHCRWMERHFKSLGFRVVVANPAKVKLMGDPTSKTDRNDARKLARLALADPALLHPVSLRGEKYQRMLRLHEARQLLMRMRTSAICQVRSFAKSLGFRLPDVSPERFHALDMAGLPDDFERTVWPMMDAVKTVNLKIAAYDALIDELAGEPEFKAMVERAMEIYGVGIIGATAVVAAIDGAPGRFTRARDVGPYLGMTPGKAQSGESDPQLGTTKAGNDLVRRVLVECANVVMKESARDTDLKLKGLRIGARGGRIARKKAKVAVARGLAVLVVALLKDPSRKYVPLSDRGIAGFERYRAERELLAPGKGRMAVV

SEQ ID NO: 138312 - protein, 403 aa, unidentified
MKHFAGLDWGSIGHAVCVIDEQGAVVAQLDVQHTAEGLQRLVTQLARIAPPQELPVAIERPSGLVVDILVEAGHPVVPIHPNALKACRPRYRAAGGKSDPGDAYILADVLRTDGHRFRTLRPASDEVRALRALVRTRDDLVAERVALANQLRSLLDSFWPGANAIFAEVDSPIALAFLERYPTPTSARRLGEKRLAAFLAAHRYSGRRTARELLERLRTPPTGLAGETEEEVKGELVKALVAVLLTLVGRISVLTRRIEHDVTQLPAGQVMISFPRTGKLNAAQIIAEIGDDPERFQTEAQLAAEAGVAPVTHASGKHRSVVFRYACNKRLRRALTTWAANSRFASPWARHIYDQARARGCDHPHAVRILARAWVRVLWRCWRNGIPYDPTLHGAAKPFVEAA

SEQ ID NO: 138313 - protein, 430 aa, unidentified
MISAEIERCAGIDVGKEWLAVTIMVGPLAGEPRVEYREFGTVTAELERLRQWQQDEGITHVVMESTGSYWKPVFNVLEDSVRVYLANPQEVKNRKGHKTDKKDSWWLAHLLRHAMIRPSFVPPRGLRELRDLTRRRRKMIGVGTSERNRVDKVLQDANVKLSSALSDIFGVSGQLMLEALLEGKAQPAEIAQFAQRRAQRKIPQIVAALEGHRMSDHHRQMIRYSLEHLRFLEEHISELDQQIVAKIEALGYKPQWQLLQTVPGMKENSAASILAEIGPDMSQFESEKKLSSWAGVCPGNNRSAGKNKGSKTTKGNRWLRGALTECAWGVSAKKNCFLKEKFWRLATKKQRKPPATMAIAHTLLVLCYQVLKTGQPYQERGLPVMDETQRNRLICHHVRRLGKLGIRVRSLPVPKESSKRKPKKTTAKRN

SEQ ID NO: 138314 - protein, 370 aa, unidentified
MKKSITIVGLDVHKNSISIATAETGNNQEVRYYGAIGGDMASLDKAIRKLKSKKTELRFVYEAGPCGYEIYRHLTKQDIQCVVIAPSMTPRKSGNRIKNDRRDAISLARLERAGELTQVHVPLPDDEAMRDLTRGREDSIKALRTARQRLGAFLLRHGYRYPKKNTWGASHMRWLSDITMPHPAQQFTLQEYIHAVMESTERVNRFTDQIQKLLPEWRMAPVVAALQALRGVAQIVAVTFVAEIGDIGRFAKPRELMAYLGLIPSEKSTGDNIKRGGITKTGNGHVRTVLVEAAHAYSFPARVSRVLLKRQDGLPKEIKDIAWKAQVRLCGRYRRLTAKGKLKNKVTTAIARELAGFMWAIAKEINIQEA

SEQ ID NO: 138315 - protein, 370 aa, unidentified
MITNTNDNVRESELSTGAAAAAAVSTEEIFLGIDTASVRHVVARFVLGEGAKPAEGMTTATLLARVAKWRKAGARVHCVYEAGPTGFALARQLIALGATCLVVRPRRLDRHGRRRKTDPLDAQHLAEDLAAHRFGRKGLLCPVRLPSEEEELRRLAVRERETLARTRHQLLNAAKGRALALGHSLPKEWWRPRVLPKVIRDLPAALARQLQRAAAAAAAMKEQLEAVEAELKSDAPAAPNGVGALTVGVLEREVCDWTRFKSAKKVASFAGLCPSEDSSGQRRRLGAIDKHGSPRLRFWCQETAWRLFKFQREYRGVIWAREKLRSANGSRAKQIAVALARRFLVDWWRIRTGRATAAELGFVFKASPSV

SEQ ID NO: 138316 - protein, 338 aa, unidentified
MKRYLGVDLHRNGFTVHTRQEDGSGTSRTWTLQQLPAFARTVEPTDAVAVEATGNIRLFQAALQGRQATLVVVNPHQFEVISRSVKKTDEQDAKVLAEFLAKGLLPEVRMKDERAARIASLAQTRDKLVKLRTVLKNKVNNLLAARGILLRKESLASEKGLTAVLAAPVPDLDHLELEILVGEIRHLNASIQKLEGLLRDQGPSLPGWTNLTSITGIGTVGASILLSTIGNIADFPSEGKLAAYFGIVPRVHNSNATERSGHITKRGAKLGRTALVQCALIAARYSPYLQAYYRRLAATRGTGKAIIALARKFLGVIYKTLKHNWIFADFPRFVLANG

SEQ ID NO: 138317 - protein, 348 aa, unidentified
MLIIGCDYHPGFQQIAFVDTETGECGERRLTHREEAEQFYGMLKERSVRVGMEASGHARWFERLLSDLQFELWIGDAAEIRTKRVRKQKTDRQDAQLLLRLMIEDRFPRIWVADAENRDLRQLLWHRHRLVQMRTRVMNQLHVVALNEGLRRKKALWRPAGRSELESLVLAPWASRRRQDLLDLLDQLTPKIQELTRALEDEVEKRPVARRLMTHPGVGPLTALAFELVIGTVERFRCGKQIASYAGLVPTEESSGDRRRLGHISKQGNSLLRYLLVEAAQVTTRSQPQWRSKFFHLAMRRGRKIAKVAMARKLAVYLYWMWRQGWDYEQLQKLGSHAGEPGNRHGVQ

SEQ ID NO: 138318 - protein, 317 aa, unidentified
MVTSYQNFIGIDIGKFKNVVAIHKQKNAVEFDNNASGWQQLFQEFSDVLPNSLVTLENTGKYELGLSHFLTDKNIAVHRANTRKVKSFILSHGTLAKSDRSDARSLAQYGCERHRTLSLFAPTSKEQSTLAALCQRRDDITQMRAQEKCRLEAPENDQIKESCQKTIEFFNSQINELNDTMQKIIDESHELQQHQKILKTVPGIGKKLSQDFLCLMPELGYLNRREVASLAGVAPHPKESGKAIGYRRIIGGRSNIRSKLFTAAMAAAKSKSVLGAFYSKLVESGKKKMVAITALMRKIIVIANARLKAAIISHSSN

SEQ ID NO: 138319 - protein, 338 aa, unidentified
MALYCGIDLHARSSYVAIVDEQRKRIFKRNLQNDPKLILSFLAPYKQELAGIVVESTFNWYWLVDALMDDGHTVHLANPCAIKQYAGLKYVDDKHDAFWLADLLSLGILKEGYIYPKEQRPVRDLLRKRGLLVRLRTSLLLSLQNTVVNTFGTKIPAHRIKGKEDHVTTYDFGNESLALMGQVSKTSIDMLSRQIEAIESHVYQHCKLTAAYNPLVSLPGVGKILGTTIVLETGAVGRFPAVGNYVSYCRKAETVWTSSDRVKGKGNRKNGNRYLSWAFSEAAEHARRFDTASRNFYNRKLHERNSPVAHNALANKLARAAYYIMRDQVPYEEKKLFG

SEQ ID NO: 138320 - protein, 409 aa, unidentified
MRVIGLDIHRAFAEAVAWDEGKLQRLGRVSMRRDVLSRFATTLSRSDVVVVEATGNAASVAAVISPHVKKVVIANPKQVRIIAYAKVKTDKIDASVLAQLYASGFLPEVWIPDAPTQALRRQVTRRNQVVRQRSRLKNIIQSILHSHLIPACPHQDLCGPTGRAWLASQVVPEDERLAIERHLREFDRLGEDLKIIECDLARSALADDGVKRLMTIPGVDMVVALAMTAAIGTIERFDNPEKLVSYLGLNPSVRQSGPGPAYHGRITKQGRGHARGMLVEAAWAAVRAPGPLRAFFLRVRARRGQHVAAVATARKLAVLIWHLLTKNESYVWARPALHARKMRDLELKAGHKGMRGRKGSAHAYNDSRQRKAERQWVEQAENAYKRFVAAWRPKAPKQVRTGASPGERR

SEQ ID NO: 138321 - protein, 343 aa, unidentified
MEYYAGIDVSLESSSLCVVDATGRIVREAKVASEPEALIAWLQSLGFDLARIGLEAGPLSQWLYAGLKQAGLAAELLETRHVRNAFKIMPVKTDRKDARGIAQLMRMGGFRSVHCKSLPAQETRSLLGARKLLQSKLHDIELSLRGTLRGFGLKVGKTTPKTFEARIRTLVADHPTLTLIAEALLRARAVLLDEFIKLDKKVHALARQDPRARLLTTAPGVGSMVALTYAAAIDDPARFKSSKTVGALFGLTPKKYQSGETDITGRISKTGDAAVRTALYEAANIILERPVKGGWLKAWALGVAKRAGMRKAKVALARKLAVVMHRMLVDGTPFDLNRVTATA

SEQ ID NO: 138322 - protein, 376 aa, unidentified
MKTVRSFVGMDVHKATISISVAEDGRSGLVRFIGVIPNTPEAVHKVAKQLTRHGELDFCYEASGCGYGIHRQLTALGHKCMVVAPSMIPRKPGERIKTDRRDSEKLAILHRSGDLTPVWVLDTTHEALRDLVRARVDASMHLMRARQQLLAFLLRHGRSYPTGKHWTQRHRSWLAGQVFKEQAHGIVFHDYLETVWTAQQRRDALIEKISAMVASWSLGPLVEALRGLRGIDTISAATFIASTGDLSRFESPRLLMGYLGLVPSEHSSGGTIRRGGITKTGNREARRMLIEAAWSYQYPARIAKEKAEILVKLPKNIRDIAWKAQTRLCTRYRSMVARGKKPTVVVAAIARELAGFIWAIGQEVRCNNRSIAAVLV

SEQ ID NO: 138323 - protein, 339 aa, unidentified
MDHVAIDLGAKKSQICVRGADGQILEEKRWPTKDLDTYLAARPTSRVIVETCAEAFCVADAARKLGHETRVVPATLVKTLGVGARRLKTDLRDARALSEVSSRIDLPSVHIPRTESRDRKTMCGMREALIGARTKIINTVRGWLRSRGRRIERGGKASLRKRVEAAWEGQLPSYVDRQLKLIEVLNTQIAEADAEVKSWATADETCTRLMTVPGVGPLTALRFVAALDDVARFESAHQVESYLGLVPGESSSSERQQRLSITKAGPRALRWVLVQAAWALHLRCRRPEAIPLQLWAHRIEQRRGRRTAIIALARKLAGILFALWRDGSVYEGSRGAKMI

SEQ ID NO: 138324 - protein, 391 aa, unidentified
MIYIGIDVAKDKHDCFITNSDSEVLFKAFTIFNNLDGFNDLYQKIESVMDDVTKVKVGLEATGHYSYNLLGYLIDKGLPTYVINPLHTNLYRKSLSLRQTKTDKIDARTIASMLMSDVNLKSYSDTSYHNEELKSLTRYRFDKVKERAKLKTSVSRLVCILFPELEKLVPTLHMASVYALLSEFPSAKHVATAHLTRLTNLLSESSKGRYGKDTAITFRDSARASIGSNMPAKSLELKHTIKLIQELDSEIDEIENEIKIIMDEINSPILSIPGINYRMGAMIIAEIGDFNRFDSPDKILAYAGFSPSTYQSGQLDGAYAHMEKRGSRYLRYALYNATKYVCHWDPTFAAYLAKKRAEGKHYNVAISHAVKKLVRVIYHLEKTKQQYIKAA

SEQ ID NO: 138325 - protein, 309 aa, unidentified
MKHELTLIAVDVSKESLEIQTDERSFDVPNTEKGIARLIKAARAAQLPFVVCEATGGYERLLPESMHAVDIPICRANPARIRAFAASEGIQAKTDPIDADVILKFAKSKELRPAAPVSSRRRELIALLDRRDHLKEQGAREKNRIRNSPDFIHASIKRMLNVLKKEITAIEKRIRELIKSDESLSACLSCLTAIKGVGEVSAWMIMAFLGEITMLSRNELVALAGVAPYNRDSGRFKGKRKIKGGRAKVRKALYMATRTAAMYNPVIKAYTDGLQSRGKPYKCAMVAGMRKMLIHMQSELRKAEIKVEL

SEQ ID NO: 138326 - protein, 393 aa, unidentified
MTKVTRIGLDIAKNVFEVHGVDAKGKIVVRRTLPRSRVKEFFAKLASCLVGMEACGSAHYWARELRKLGHDVRLMAGQFVAAYRKSGKNDANDAESICEALGRPNMRFVAVKSEEQQAVLMLHRARALAVQARTAQANQLRGLLGEFGIVLPQGIHKLRERLCDILEDAENGLPWLARSGLCELMAEFHHQDERVAGYDRQIGQLAAQSEAASRLMEIEGVGPITATALVASVGDAKLFDSGRQFAAWLGLTPRQHSSGGKARLGGITKRGDTYLRTLLVHGARAVLRTVDRGSDAKSTWAKAIKARSGNNVAAVALAAKHARIIWAMLAKGSNYRCATPRTSVSRKMQRISVVMVGKQYGVACQGCAAPLPALAPLTASNSAASFNRRIEKE

SEQ ID NO: 138327 - protein, 366 aa, unidentified
MKKISTVQVFGNEIFKKQKLTIGVDLGDRWSFYCVLDKSEKVILEQKLSTTAEAMKQTFTRIPRSRMALETGTHSRWASRLLTQLGHEVIVAHAQKVDLITKSTRKDERHDAKTLARLARIDPELLGPVRHRSKQAQIHLTVVRARAELVKARTALVNAARGSVKSYGERLPKCGTQQVSRELGAGLSTELREALEPLFREIESLNERIKEYAWRIEKIAQETYPETELLKHVKGVGNLIALTYVLTIEDPQRFRKSREVGCFLGLRPGRRNSGESEPQMHISKQGDEYLRTLLVQGAHYILGPFGEDSDLRRWGGKLAERGGKNAKKRAVVAVARKLAVLLHRLWVSGEVYEPLRNSQKVMRTAA

SEQ ID NO: 138328 - protein, 344 aa, unidentified
MITIGIDPHKSSLTAVAVQPDGPTHPPIRLVVDKHTPAALLAWASQWPERQWAVEGATGLGRSIAQQLVTAGELVLDVPAKLAARARLLGSSSARKTDVADAVSVATVALHNRRLNRVHAEDHTTIMRLLTERRDDLVAEHTRWINRLHVLLRDLHPGGAEVRLDTTDASALLTKIRPVTAADHQRKQIAREIVRDLKRHEASIKELEKQLRAVVTTSGTTLTEIQGIGFLTAAKILALTGDIRRFPNQEHYASYAGTAPIDVSSGDQKTHRLSRRGNRQLNAAIHVAAVTQARDPGPGRDHYRRKIAEHKTVKEARRSLKRRITNAIYRRILADQQRLQLEAA

SEQ ID NO: 138329 - protein, 393 aa, unidentified
MNTIVHYLGLDVHKETIAVAIAPAENTEVRVYGIIGGTLDALDKLIRKLSAPNLQLRFVYEAGPCGYVIYRHLKSKGLHCDVVSPSLIPKKASDRVKTDRRDAQQLARLYRAGELTPIHVPDQEDEAMRDLVRARDCAKDDQRRARLRLKGFLLRLGFRYTGKSSWNDAHKRYLSGLLMPQPPQQIVFQEYIHAIDAATERLQRLTQSMEDCLIGWKWEPVVRALMCLRGVQVLTAMTLVAEAGDMTRFTNPRQLMNYFGLTSSEHSSGGKRVQGSITKCGNRHCRHVLAEAAWHYRLRPLVSQAMQKRQEMQSKEVRLIAWKAQQRLHKRFRRLSVRKKSVVAATAVARELTGFVWAIACAVKPAAQPPQPEIIRTCKGRVYQLNPHMKYRK

SEQ ID NO: 138330 - protein, 371 aa, unidentified
MNDRTEIEGVASRIFAAIELSQSAWIVALHVPCQDKISLHRVASGDVDRLLVLFERARQTARAASGAEASAPDPQICCCYEAGFDGFWLHRWLVARGISNQVLDSASIQVSRRKRHVKTDRIDAEGLVRVLMAWHRGESKACSVVHVPTPEEEDAKRLHRARENLLRERVRHVNRIKGLLTLHGVRHIEPMRQGWITALGELETRDGRSFPPRLLAEIRREAKLLELVKKLLVEVTTEIEALVRSSTPAKGRRKAPPHPVASRLIQLRGIGPIFASVLATEVFYRRFTNRRAVASYVGLTPTPYSSGVTHREQGISKAGNSRGAIMRSSLHGCGCATSPPVGLQPGSSKECRPGRAGCGASRSSLLPASSS

SEQ ID NO: 138331 - protein, 418 aa, unidentified
MAMKIVRFNCCGMDVHKNLVVATIGITDRKTNVTEYFQRSFSTLNSDLYRLKDWLRSHHCSDVCMESTGKYWIPIFNVLEDEINVHLTHPKYVKAIKGKKTDKKDSKWICDLFKHDLIKFSFIPPKEIRELREIARYRYKLVCMRSSERNRYQNCMTVSNVGLASVVSDPFGKTASNIMKEVMKSNVIDDDKILKLVHRNCKNKDKILDSLHGYRIESDQRFKMEKSLDHMEYLDQLIDSCEVELIKRAYPFRRSFQHITQIKGISALSAILIISEIGIDMSQFESDKQLVSWAGLSPANNESAGKKKSVRISKAGQYLKPLLVQCALSAIKDKASYFGRKYSNIKKRRGHKKAIIAIARMMLVSIYHMILTGEEFQPTDYESLMNPKSNTDQSLTVEKALNFLKQSGIDISSIPINL

SEQ ID NO: 138332 - protein, 386 aa, unidentified
MQYPSDTSRCLAALDQETTLIAVIEMSLSTWLVAGVVPGIERQPLKKLAADEHALLKLLHRWRCEAAKAGHKITRIAVAFEAGRDGFWLARWLRAHGIEAHVIHSSSVAVPREHRRAKTDRLDTEMLKRAFLGWLRGERDHCKTVAIPTLAEEDAKRPNREREGLVGEAGRLVNRMKAVFVRLGIRGFNPKLKKAAERLDALHTPEGEPIPPNTVAALRRDMERLRLVREQIRQIEAARQERLQSAPGEGAHAMVRLLASVRGIGIETADMLVQEVLSRELRDRRAAARYSGLTGSPDESGRRRREKGLAKAGNPRVRRGMIQLAWRFLMFQKNSALAQWFHLRTQNAPRTRKTMIVALARKLLIALWRFVREGVVPEGLLLRPVG

SEQ ID NO: 138333 - protein, 381 aa, unidentified
MEISPTLAAAATGIQPATLFVALELSKAKWLVGLHSPAADKISRHTIAGGDAPALLSLIEVARRRAEASLDGEVQVVACYEAGYDGFWLHRLLLAHGIANQVVDPASLLVNRRARRRKTDRIDLAGLLRTLMAWHRGEPQVCSMVRVPSLEEEDQRRRGRERERLVKERVQHLGRIKGLLMTQGIRDFQPARRGWQERLEALRTGNGQPLPVCLKAEIARECRRLALVDEMLEELEREREAASDGKAPQQAALLGKLRGIGPISAHLLAEEVFHRDFANRRQVAAYLGLEPSPWQSGQRDHEQGISKAGNRRARRVAIELAWFWLQHQPDSGLSRWFKERVGTAKGRVRRIMLVALARKLIVALWRYLASGTVPEGALMRA

SEQ ID NO: 138334 - protein, 331 aa, unidentified
MFPVGIDVSKNTLDLCMLYDDIKGRIKTRNIQNNRHSVENILRWLRLQHCSPEDVHVVMEATGVYHERLATELHDAGFRVSLANPHRSREFARGMGIMTKTDKVDAYMLACYAFLKKPHRWEPPAPKIRYLGALLRRRDVLLGDALREENRLEKYLSTDTPADIISSCRRMAQLLREEVSNIERQIKAHIKASPALRRDYTLLTSIKSVGPQLGMHMLVVLRSHNFVSAEQAAAFLGVVPIEKRSGTSVRRRPRMSKIGPPQLRAKLYMSALCGKIYNKRMRNIYDEMCLRGKPKMVAIGALMRKLVHWCYGVLKTGTVFNDEDLKPVLST

SEQ ID NO: 138335 - protein, 337 aa, unidentified
MEREYVGIDLHRRRSVIVRMSPDGEQLSTVKIDNDPIALAEAIAPAGPNPHVVVEATYGWYWAADVLEECGAQLHLAHPLGMKGITSNRRVKNDVRDAVLLADLLRLGSLPEAWVAPPATRELRELVRYRTKLVNMRSSLKCQAHAVMAKEGILPTHSDMFGPAGQAALDEMPLGRAYTIRMESLRDLMESYDAQVSMLEREIHGQLKDHAGYRAIQAIDGVGRVFGAIFVAEIGDVSRFSGPEKLCSWAGLTPKHRESDTTIHRGSITKQGSKLVRWAAIEAVAKRRGGPKLRADFHRIAERRGKPKARVAVARRLLSLVYYGLRDGEIRCLAETS

SEQ ID NO: 138336 - protein, 355 aa, unidentified
MTSTKYIGMDVHKESISIAVRNAVGKVVMECVIETKASMILQFIDGLRGEVQVTFEEGTSAAWLYDLLKPHVSKLVVCDPRKNKSMREGNQSDKIDARQLAELLRLDHLTPVYHGEHGLRTLKELVRSYLTVTKDLGRVMTRVKAIYRSWAIPCSGKQVYASRHRAEWLGKINERGVRRRAEFYYQQLDALRVLRQQVRRDLLAESKKHKAWKLLCQIPAIGPIRAAVLLGILQTPHRFRTKRQLWNYGGLAIEMHSSADHRSVDGHLQRSRKNVLVRGLNRNCNHDLKNLFKGAAVVASSKPGPFAEFYAALVGKGMRPEMARLTLARKIATIVLIVWKKGVRFDAQHLKPQTA

SEQ ID NO: 138337 - protein, 312 aa, unidentified
MTISSYHSFIGIDISKADFVVATHGLKITTIYPNTRLGWCNFLTEHQGLSEALVILETTGGYELGLALFLLEQGVKVHRADTRKVKNFIRSWGQLGKSDRIDALGLAGYGFERHAHLPLFQPRQENHQQLYELIQRRLDLKQMLVQEKNRLHLPASPAILKSYQALILCLETQLIEIEGLLEKLLQTDPVLSQRYHTLQEIAGVGPIVATTLLGLLPELGTLNRRQIANLAGLAPHPCESGKTVGYRRTKGGRVDVKRILFMAAMTARRTDSPLKAFYENLINRGKKKMVALTALMRKIVIIANAKLKSLQT

SEQ ID NO: 138338 - protein, 416 aa, unidentified
MSNSTDSPAAFVGLDWADSKHDIYLRPADGSAASHEIIGAKAEDLQDWILRLRARFAGDGGKVFVCLEQSKGALIYQLREYDFFVLYPINPKTLSSFREAFRPSGAKGDESDADLLCELVQAHRARLRAWQPEAAETRALAAFCQKRRQAVQGSVRLGQQLRSELKTYYPYALELLELHSILACDFLRRWPTQTALPRAKTQTIRQFFYAHRCRRVDALEEILARRPQAVAVTTDAAIIEPAALQVQLLAAQWRAILTALPELDRQIAQRFAAHPEAELFRSFPGAGPQLAPRLLAAFGTDRERLESAEQMSVISGVAPVRRASGKSCVIQKRWACAKFLRQTFHELAGCSLPQCAWAKAFYDEQRRRNKRHHTAVRALAFKWIRILFACWKQRTPYDDALYHQALQKHGSAFACA

SEQ ID NO: 138339 - protein, 356 aa, unidentified
METAYDGRQVVGMDLHRRRSVLVRMTEDGRRLGTAKITNSPAELRAQIARAGKAPRVVLEATYGWYWAADTLAAAGAEVHLAHPLGVKAFTYRRVKNDERDAADLADLLRMGRLPEAWIAPAEVRELRELTRYRQKLVHLRTSCKDQVHGVLAKLGIPVTCTDIFGIAGSAWLDALGLPQPYAGKVTSLRHLTGELTTEISMLGDVIADLLAADRGCQVIQQLPGIGPVLAAVITAEIGDVTRFRTAAQLCSWAGLTPRHRESDTKVARGHVTKQGSRLLRWALIEAIQRIPRDCVIGGVKDAIIARRGKEARNIAKVAAARRLLTLVYYGMRDGQIRCLSKSPGELPVTPAERAA

SEQ ID NO: 138340 - protein, 405 aa, unidentified
MNAVGIDVSKGKSMVTILRPFEEIVSSPHEVRHTSDQIDDLIREIRSLEGESRIVMEYTGRYHEPMARWLSDAGLFVSLVNPKLIKDFDNDSLRKVKTDKADSVKIARYTLDKWYKLKQYGAMDELRNQLKTMNRQFGYYTKLKTAMKNNLISLLDQTFPGANTFFDSPARSDGSQKWVDFVDTYWHVDRIRSMSLSAFTDHYQKWCSRKGYNFQPNKPAEIYEAIRNIIPVLPKDAMTKFIVRQAVNQANTASSAVEELRTRMNDIASQLPEYPVVLAMKGVGTSLGPQLIAEIGDVTRFTHKGALTAFAGVDPGKNESGSYAQKSVRTSKRGSAPLRKTLFQVMDCLIKTMPQGDPVYEFMNKKRSQGKPYYVYMTAGANKFLRVYYGRVKEYLSEHPETAEN

SEQ ID NO: 138341 - protein, 437 aa, unidentified
MTQQKNSRHTSIPPASQLSLDTIAACVGLDWGDTLHFGALLPAGSKQIESFTVPQTPEAIDDWANALRERFGGRPVAVCLEQSRGPLIYALLRFDFLILCPINPKQLARYRDAVRPSGSKDDPGDAAIILDFLVKHPDRIRVWNPDRADVRLLGQLTEMRRTLVDQRVALSNSLKSHLKHFFPQAIALFDDDITAAIACAFLKRWPTLDKLQRARPQTLRKFFYGHRCRSEQKLQARLELIAAAKPLTTDPAVIEAHCLMAQALIAQLDSLRRPQATIEMRIGELMEQNEDAKLFQELPGAGVALAPRLLAAFGSDRERYQSADELACYCGEAPVTKQSGKMRIVHFRWSCPKFLRQTFHEFAWCSTRYCDWARAYYDMKKSQGKSHHQAVRALAVRWIRILFRCWKTNRPYDETRYIESLKKRNSPCLNCLNTNAA

SEQ ID NO: 138342 - protein, 427 aa, unidentified
MNYTQNRKIEQVTDQTLVIGMDIAKQKHFAAMVDVRGRELKKRFPVLQSRAGFEQFYALIQEAMREFGKTEVIVGIEPTGHYWLNLAYFLEEKGIPLVMVNPMHVKRSKELDDNLPTKHDAKDALVIARLVKDGRFSYPRILHEVEAELRAGSTFRESLVKERNAVHNQMIRWLDRYFPEFVQVFPSFGKIALAVLENTPFPMDIADQTVEGLMERYRQSEGLQCPQKPKIQKLVEVSRHSIGITQGQQMARIEIAMLVRRYRQLEQEIAALTEELTALAQTTVEYEWLQTIPGLGDATIVELLSEIGSFSQYQDPRQLIKLAGLTLKENSSGQHKGQKRISKRGRRRLRALLFRAMMPLIRHNKAFRALHEYYTTRPVNPLRKKQSIVVLCGKLLKILYAVCVKQQAFDEERMMQDIFTSTQAQAA

SEQ ID NO: 138343 - protein, 401 aa, unidentified
MKRTQNEKILQIKNETLVVGIDIGKETHYARAFDFRGIELSKLLRFSNTNQGYEALENWMQEIMKEKGKTEATVGFEPTGHYWFTLGDHLQRKGHRLAIVNPFHVKCTRELDDNSQTKNDKKDPKTIAMLVKDGRFREVYIPEEVYQELREAVSERERLVEQMISLSNQVIRWLDIRFPEFSGVFKKWSGLAALLTLKNFPTPAKVVETGVSGIVSTWRKGMKKPSRKKAEKLFKLASESIGRTAGSEAAEAALQNLLKQYEMVMQQIQEIEKLMQELLLKVPNASKLVDIKGIGMVTVAVIVSEIGNISRFKDPRQIQKMAGLSLRENSSGKHKGKTTISKRGRKRLREGLFKAIITMLATNQEFRMLHKRNLSREKNPLNKMESIIAYVASLFELFLQY

SEQ ID NO: 138344 - protein, 340 aa, unidentified
MNGRFIIGIDLAKNVFQLHGMASDGSVAFRKKLSRAKLLPFIAEHPTCLVAMEACAGAHHWGREIGKLGHDVRLIAPQYVKPFVKRQKNDAADAEAIAEAASRPTMRFVGVKTHRQQSQAMAFKTRDLLMAQRTQTINALRGHFAEYGIVVPTGPQNIRQLAAVLHEPEPDLPEAVVELGRELLKHLQMLNERIQTLDEVVRKAAQSDETARRLMKVPGIGPITAAAMVALSPDTSTFSKGRDFAAWLGLTPKQNSTGGKTRLGKTSKMGQRDLRRLLIIGAMAVVRHTAKQVSEKESWLGRMLARKPKMLVAVALANKIARVAWALMARGGVYESPATV

SEQ ID NO: 138345 - protein, 349 aa, unidentified
MRFYTNTHNYYCGIDLHAKTMYLCILDREGQVLLHKNMRSRPEDFLTAVEPYRDDLVVCVECIFTWYWLADLCGREKIEFVLGHALYMKAIHGGKAKNDKIDAFKIATLLRGGNLPKAYVYPPKMRATRDLLRRRLHLVRRRANLLAHIQNTHHQYNLAPPTAKIAYKANRAGVAEAFEEADARKSVEIDFALIGHYDDLLRDIQLHLERRAKQHDPLAYHRLRSVPGIGKVLALTILYEIQDIHRFPRVQDFLSYSRLVKCEHSSAGKRLGTGGAKIGNTHLKWAFSEAASLFLRNNPEGQKHLRRLAGKHGKSKALSILAAKLGRAVYLILSKERVFDMERFMSRAA

SEQ ID NO: 138346 - protein, 411 aa, unidentified
MDTLSPRCAGIDVHKGNVVVCVRCGDRPGKVFEEVRTFATMTADLLALADWLAEHRVTPVAMESTGVYWKPVFNILEGSVAVILVNAEHIKQVPGRKTDVKDCQWIAQLLQHGLLKASFVPPQPIRELRDLTRQRTQLIQERSAAANRIQKVLEDANIKLASVATDVLGASGRDMLEALIAGETDPAKLADLARKRLREKIPALRLALQGRVTDHHRFLLRMHLDHVTHLEELIGRLGVRIEEALAPLAQAQERLQTIPGISQRVAETVLAEIGTKMEQFPSADHLASWAGMCSGNNESAGKRRSGRITKGNRWLKRILVQAAWAASHTKGTYLAAQYHRLAKRRGCKRALVAVGHTLLGIIYHVLKRGTTYAELGADFLGRLEPARLTRQLVKRLEALGHKVTLEPCPAA

SEQ ID NO: 138347 - protein, 369 aa, unidentified
MGKYSEVFVAFDVAKKKHAVAIAEGGRTGEVRFMGDVENNPAPIERTIKRLANRYDRLHVCFEAGPTGYGLYRQVQALGHDCMVVAPALIPKRAGERIKTNRRDAVTLARLHRAGELTGVWAPDPAHEAVRDLARAREAAGDDLRRKRQQLLSFLLRHSRIYSGGGHWTMAHRRWLAGQKFDHPAQQIVFQEAIDAIEDALQRLRRVEKQLAVIVPEWSMAPVVEAYQAMRGASFVVAVTFAAEIGDVRRFDTPRQLTSFLGLVPAESSTGDTIRRKGLTLAGNRRARRALVEAAWTYRYPARVRETLRARLEGLPKPVRDIAWKAQFRLCARYRRLSATGKKPPVVVAAIAREMAAFLWAIGREVAPA

SEQ ID NO: 138348 - protein, 316 aa, unidentified
MTIEQFVGIDVAKHQLDVAIRPEGEVWQVTNDPAGMTALITRLHICQPALIVLEASGGYERPVTAALAAAGFPVAVINPRQVRDFARAVGVLAKTDRLDAQVLARFADVVRPTPGRTPAPPSQSLATYLTRRQQLVAMITAEENRRQQVEGALGERIGAHLTWLREEVAQLDQELAAAIRTDPVWQERDALLRSVPGVGPVLATTLIAGVPELGALTRQQLAALVGVAPLNRDSGTMRGKRMIWGGRKHVRTVLYMAALVATRHNPPIREYYLRLCGAGKPKKVALVACMRKLLSILNAMVRRQQPWAPTHAAPAV

SEQ ID NO: 138349 - protein, 343 aa, unidentified
MERVYYIGLDIHKRIIFYCIKTIDGGLWAQGKVEADRRSLGEWVKGLPGPWVGAMEATIFTGWVYDFPKPHAMDLKVAHPEMLKAITASKKKNERADAERIVDLLRVNLLPECYMLPEEIRELRRILRYRNHIVRTAVKMQNKMTGLLMEVGVPYSKKRIHGKKYFRELLERVEEIPLSVKELLKLSRSNYEIFRSYQKRLVEGLCTNDLIRDRVQGLMAIPGVGELTALTWVLEIGDPGRFDSIRQAVSYCGLCSAQRESAGKEQRGPISKKRNKQLQTMLIEAAKLAPHWNRQLAVLHERELQKGNRNRATLAVARKLVAYMLAVDKQQTSIRPIGEKQAA

SEQ ID NO: 138350 - protein, 340 aa, unidentified
MNFTTYGLDIAKRVFQLYWVTHESGEIHNCKFGKQELLEFFAQREAGLIAIEACGSAHWWRRKLMALGHEVKLIHAKFVRPFVQGNKTDAADAKAIWTAVRQPGMRMVAGKTEDQQALLALHRMRLSLIKFRTMQVNQLRGLLYEFGVTLKGGRQAGLSEIQQRMAELEGIVPGVLFEAIKEQLNRLDEIEADVKNIERRIKDWQKQQAACRKIAEIPGIGMLTATALVATMGEADSFKSGREFAAFVGLVPRQSGTGGKIKLLGISKRGDTYLRTLLIHGARAVMFNAKDKGAWSEALLQRRPANVAIVAMANKMARTAWAILAHDREYQKGYVSQVPT

SEQ ID NO: 138351 - protein, 468 aa, unidentified
MKKPPQRRHGKPPAARPALLERINPHAAGIDCGAATHYVAVPPDGDPTPVRTFQTFTAELHRLADWLTACGVTSVAMESTGVYWIPLFEILEARGLDVALVNARHVKHVPGRKSDVMDCQWLQELHSVGLLRGSFRPTAAIVALRAYLRHRETLVQSAATHIHRMQKALVQMNLQLSVVLSDITGVTGLKIVRDIIAGQTDPHALAQHRDVRCQATEADIIAALTGHYRPEHVFVLQQNLELFDMYHRQLAACDAAIEAHLAPLAAQAPPPAGPLPAPRTPGKPKARDNAPRFDIRTPLHQLTGVDLTQIDALGPYSALRLLAEIGHDMTRWPTEKHFTSWLTLAPHNKISGGRLLSSHTVPSGNRAAGILRLAALSLGRTDTALGAFYRRLAYRVGKAKAITATARKLAILVYRSLKEGLLYQDCGAAAYDAKTRERVLRRLRQRAAHLGYVLLNRETGELLEGAVS

SEQ ID NO: 138352 - protein, 394 aa, unidentified
MKLIGIDIGKNKHFFCVMDQQTGEIISQPVSFSNDKEGFDFLVQKIKSYPKDSILIGMEDTGHYHFALLKYLLDLQYTVALINPKTTDFNRKMQGGITKNDKLDTINICDVLDTPERKKQYRITKVNSFDLYEQKQLTRHHHNLKEEENVYKNRLQKCIDIVFPEFNKLFNSKYGIVYMNILKMFGSAENIANTDIRTIRKCFEIEGRGNRISLTPERLKECARSSIGISSSAEVIQIKHLSTQIELIEEQLSEIDKKIEEFSIQNNSPILSIPGISHFSGTSILAELGDISNYSKPSQIIKFAGVAPLHYESSQFNAQHTAITKKGSKYLRKTLYQIILPVIRHNPVFNKYYQLKISQGKGHRCAQGHCVRKLLRIIYHLLKTNQQFDPQLLR

SEQ ID NO: 138353 - protein, 321 aa, unidentified
MNKDRKIYGIDISKSVFDVYCEATGHIQLSNDEKGFKKFLKTLPKTALVVMEATGYYHYRFAQFLHKNGVLVSVVNPLSVKRFIQMKLAKVKTDKSDSKAICEYGTMNETPLYSALTDVQAECLQLFRLLDNYLKKRTQTKNKLHGEEVLGIPSKYVYKSLQRDLKHLDKEVKGIELRLLELVKQDQQHQLSLLKSIPGMGIKTALFLIVVTDGFKKFENASQLCSYVGITPTIRESGSSVRGRSRISKVGNKKLRNLLFLCAFSACKHNKACRDIYERIVAKGKSKKLALIAVANKLLKQAFAIAKSGLPYDENFVSKLA

SEQ ID NO: 138354 - protein, 370 aa, unidentified
MNDSIFVGLDVHKATISVAVAEAMRGGEVRNLGIIHNRADQIAKLAKKLGKGDRQVSFCYEAGPCGYGQHRQLTELGHNCIVVAPSLIPMKAGDRVKTDRRDAAMLAKLHRSDELTAVWVPDAAHEAMPDLVRARTTAMRVLGKARQHLQGFLLRHGRIYAGKRGWTLAYHRWLTTVRFDHPASQIVLQDYIHAVTNAEARVDCLTKRIEELAPQWSMTPFVEAVQAMRGVAFIVAATVVAEVGDFSRFDNPRQLMAFLGLVPSEYSSGATIRRGGITKAGNALARRALIEGAWTYRMQARVSRKLHDRNERLPEAIRDIAWKAQVRLCARYRRLLAAGKRKVIVTTAIAREMVGFLWAITRQVELGPAA

SEQ ID NO: 138355 - protein, 412 aa, unidentified
MDLVYARCAGLDVHKATVVGCVRVPGVGRGERHTETRTLATTLRGLEELTTWLTGHGITHVAMESPGVYWRPVYAGLEGVVQVLLVNARHVQMVPGRKTDVRDCEWLAQLLECGLLRGSYVPPAAVRDLRDLTRLRKALIRERGHHVNRIEKTLELANIKLGIVVTDLMGKTGRAILEALSAGHDAPEQLTALAQGSIRTKKQAALREAVAGRLTPHYAFLLRQHRSLIEALDTHIGTLDARIETAMAPFAEAAALVQTMPGVATRAAQAILAETGVDMGPFPTAGHFASWARLCPGTHESAGKRRPTTTGQGAVWLRATLQEAAWAAARTKRSYYRALYHRLKGRRGAKKAIVAVQHAMLVALWHMLKRRVPHHDLGADYFDRRNTARLRHHHVRRLPQLGYQVVLVQEAA

SEQ ID NO: 138356 - protein, 433 aa, unidentified
MLPPDLFGDGLYIDETTFRGHIQGIYFSPNKILGVQMKAIIGVGIDCNKNQHTVCISDNSGKQYGSLFDINNKVEDIEYLVEKILEIERTLGKSDVVVNIESTGVYHLPLYSILSKIFQTNIYQPKQVKDRSSKNIRKSKTDKRDARTLSRIHLEIMPPQTDYSDKEMYDVREIIRLRFKYKDIRTNLKKKFRRNLCVVFPNFDSLFKDPYAAIPWTLLKTCPTPEDVLRRGIKGLSEIMARASNGQKCQVSPEDVIKLAEESIRCDVADRGALFGLKLIMEDIEYMDRRIAYIDGEIKVYWDKIKNHLYFPTFPGIDMVKAVALHTEFGGLNRFSHPDKAVAFSGTENFVYISGDSKKFNGSMTKAGSSIIRRVCWEILSPPKKYIPKLTEHMNKLKDMGKHRSVAIHSATKKLIRTLWAMEHHKQDYISPP

SEQ ID NO: 138357 - protein, 421 aa, unidentified
MPNIEIGVDSMVKENFIYVGIDLHKETHTAVMIDCYNQKLGEITFPNRPAAFPKLVTKVKKCNTDGKEVVYGLENAYGYGRALAVWLIDKGYLVKDVNTAISHRQAKHRGAMYRKSDSDDAEAIALATLNMLDKLPDAYPNDAYWSLGQLVHRRDNIMKQRTRLVNQLHEQLCIAYPSYKQFFNDISRPTALYFWEHYPSRKYLKGKSVEDLRAELVPVSHNKCSTKTCEKILDAVASDKVKNNAYQDARDMVTLSIVSDLQHYDSQLAEVDKMLEQMYKMLGCTLTTIPGVNVITAVKILAEIGDIKRFSNANKLAQFAGIAPLHLSSSGKGKDVATKQGNRRLQATIYFLAIQMVQVSSKGTPRNSVVRAYYEKRKAEGKTSQQALICISRRLISIIYGMLKHGTEYRMPVVENAGEKL

SEQ ID NO: 138358 - protein, 335 aa, unidentified
MTITTIGLDTSKTWFQVHCVDADGRTVLRRKLARSKVLSFFANIPSCLVGLEACGGSHFWARELAKLGHDARLMPARYVRAYVKTNKHDAADAEACCEAVQRPGMRFVPFKTEEQQSTLMIHRARDLLVRQRTAAVNALRGHLAEFGIVAAKGTAKAHELMRLAGDDERLPQMAREALGYIVAQIHDIESRLKIFEQRIRSLAKEDEVCRRLMTVQSVGPHIATAIAATVGDPRNFASGRHFAAWLGLTPKQHSTGGKEKLGGISKRGDSYIRRLLIHGARAIVARVRSGQMKSAWLSGILSRRHFNVATVALANKTARVAWAVMSTEQAYRSAA

SEQ ID NO: 138359 - protein, 384 aa, unidentified
MEEQIFKYSVGCDISMDTFNVCILEVSQERSRVKASHKFKNETKGFKEFNAWVKKHKKHDVQTGFYMEATGVYYENLAWYLFEQEYSVYVLLPYKTKHYLKSIGIKSKNDKIDAQGLAQMGAEQKHSPWRPHSKSIYILRALTRQHESVTKLKTSLQNQLHSNEHSAVRNATVKKQLNATLRLLEKQLTELSGEISNIIDADEKLNEKYGHIDQLRGISKLSWATIIAETSGFETFENQRQLVSYAGYDVVENQSGNHVGKTKISKKGNSRIRRILYMPSLVSVRLKEPALFNLYQRVHERTGIKMKGYVAVQKKLLVLIYHIWKNDKAFRSDYSKIFGEEESKDLFPFGFGETIKESSPDKRATQDEHSYELSSKVLFPLAQI

SEQ ID NO: 138360 - protein, 378 aa, unidentified
MGRCWGGRPHGISCHSWVVINQPRTVPLQYKRIAIDTSKHVFTVHGVDEHERPVLRRNLKRTEMEAFFGKLAPTEVVMEACGGAHHWARLLSRLGHQVRLIPAHYVKPFVKRAKNDRTDAAAINDAASRPDMPTVPVKSAEQQANSMILKHRELLVGQRTAAINALRGHAAEFGIIAAKGTAQIEPLQRLADDEAVPAVAKAMFVQMGEHIAALDQRIEALEAELLALHKAAPMSQLLAAVPGIGPITAITLSLSVEPAHFASGRHFAAWLGLTPREHSTGGKPRLGKISKAGNEKLRTLLVVAAMAVVRHARPGRKAASAWLRQLLGRKPRKLAAVALANKMARIVWAMMARGEAYRQMSSAARAARRCRGCKGSRR

SEQ ID NO: 138361 - protein, 405 aa, unidentified
MTDNEQHDSVQVFVGVDVGKGAHHAVALDRKGKRLLDSALPNDEAKLRALLGKLKAHGPVLLVVDQPATVGALPVAVARAEGVLVAYLPGLAMRRIADLHAGESKTDARDAYIIAEAARSLPHTLRSLKLADSQVAELTMLCGFDEDLAGQITQVSNRIRGLLTQIHPALERVIGPHLDHPAILDLLERYPSPDQLAALTQKQMANRLVKLAPRMGKTWAAEIIQALSEQTVVVLGTQAASIVLPRLAQQLAALRIQRDEVAKEVERLVLAHPLHPVLTSMPGVGVRTAARLLIDVVSRAFASAGHLAAYAGLAPVTRRSGSSIRGELPSRRGNKQLKRAMFLSAFAALRDPVSRAYYARKISQGKRHNQALIALARRRCDVLFAMLRDGTFYTPPRPEMLLTRT

SEQ ID NO: 138362 - protein, 341 aa, unidentified
MNQDISVVGIDIAKRIFHLVGMDARGKMVMRKRLTRGEVLPFMINLPRVTVGLEACGGAHYWARRLREQGHDVKLMAPQYVKPYVKTNKNDLRDAEAIAEAVTRPSMRFVPIKEVHQQEIQALHRVRERLVNARKNLINEMRGLLAEYGIVLPRGAKIFRKTVVTKLDADQDKLSPQSQEIFHRLFDELVRLEAEVAYYEGKLRSLAASHPECQRLLTIPGIGPITATALIAAVGEVGVFANGRQFSAWLGLVPQQYSTGGQTRLLGISKRGDGYLRKLLIHGARATLRWVRTKTDHRSQWIRGLLERRGWNRTAVAVANKNARIVWALLSRGEVYRENAS

SEQ ID NO: 138363 - protein, 415 aa, unidentified
MASLVRWVGRGIGLDVHRGFCVVAICEDGKVRSAGRVPSTPEGLRLLAESLLPTDRVALEVTASCWEVARILEPFVDRVIVVSPDDTGISSARAKTDKLDARTLALLLWKGEIDPVWMPDERCRILRRRLARREQLVHARSRAKNEISAVLQRRLIERPPFADLFGVTGRRWLAEVELPVEERESVDAGLRQIAFLDTEIKAVEQLIAQQALAWPEIRRLMTVPGVNLICAATFLGAIGRADRFFTSRKLVAYLGLDPKVRQSGETPARSGRISKRGSASARWALVEAAWSVVKQPGPLRAFYERIRARRGHGKAIVATARKLAVLFWCMLSRDEDYAHQRPALTKKKLRELELTAGAKPRTKAAAGIWSTNRAIRDAERALTLQAEVSYKRMVTDQQAGAPARKVGASATPERA

SEQ ID NO: 138364 - protein, 339 aa, unidentified
MELYAGLDLHSRNTYIGIMDKEFKRVFAKRVSNNLPLILKTLDPFQNQLEGIVVESTFNWYWLIDGLMDAGYHCVHLANPSAMKQYEGIKHTDDQHDSFFLAQMLILGILPQGYIYPKEERPVRDLARKRLFLVRHKTSHILSLQSLIARCCGQRVSANDIRTFTVEDLQQLLEEEYIVLSAQANLDTIVFLKQQILQLEKAIKNKVKLSKAFQQLMTVPGIGLILAMTIMLEVGDIGRFPQVGNFASYSRCVSSQRLSDGKSKGHGNRKNGNRYLSWAFTEAAHLSRRYNEHFRSYYNRKLAQANTSLATKALSNKLARICYYIMRDQVAFRDNLLSQ

SEQ ID NO: 138365 - protein, 320 aa, unidentified
MACLIVFVGIDVSQDWLDVHLHPLREELRVANTAAGWRELADRLAVHPNAKVAAEASGGYEKGVLRHLCAAGFAVHCLNAGRVRQFAHAGGRRAKNDRIDARVIAHYLATFVLTPERFDAALERLAENVTYRRQLVDQRGAVANQARLLGDPSLVRLSRRRLAQLDALIERQNQRLAALIAADRALSAKAAVLRSVKGVGPILAATLLALLPELGTVCRRAIAALVGVCPYDFDSGKFRGQRHIAGGRMHVRNALYMPTLTAIQHNPRLKAFYETCCEGRNDKKPAVIAAMRKLLTILNARMRDHIAERHDSLKTVKHAA

SEQ ID NO: 138366 - protein, 463 aa, unidentified
MNRKKQADKSTKGSAQKKVDWKALEVVHPDAAGIDIGGSEHWVAISPDRDPEPVRRFGCFTADLHEMARWLIEKGVRSVAMQSTGVYWMPVFEVLEQHGLQPFVNAQHTKNVPGRKTDVQECQWLLKLHAFGLLNNSFQPTDEIRVARTLWRHRGDLVAEAGSAVQRMQKVLTEMNVQLSNVLSDLSGVSGMKIINAILGGERDPQVLAAMVMPGVKATPEDITKSLEGNWRDELLFVLRQHLELYRFHQKKITHCDRQLRKHLESLGSKVDPQRQPLGPRPKGKKIARNAPGFDLRSELYRISGIDWAQINGIDVLTAQTVIAEVGADLSAFPSEKQFTSWLGLCPTNEQSGGKILNRRTRKVVNRATVAFRNAARTLLRSQSYLGAQYRRLRTRLGAPKAITAMARKLACLFYRLIRHGHQYVDKGTEYYEARYREQQIRSLTKRAQKLGLQLVIPQTVST

SEQ ID NO: 138367 - protein, 338 aa, unidentified
MKVYVGMDLHATNTYVGMVDEENTVLHKQRYRNELPLILAGLDPFKKDIQGVVVESTFNWYWLVDGLMDQGYRVHLANVSAIKQYEGLKQIDDKRSAFWLANLLRLGILPTGYIYPKEERPTRDLLRKRLQLVRHRTSHVLSVKNILARNLGLRMKSEDVKRITDPEVRRLFPDREMQTMVLSSVGLIRHLEDQISTIEAMITKKLRVRKEFTKLMTVPGIGKILTLTIMLEVGDIHRFPTVGDYSSYCRCVKSIRTSAGKIIGYGNRKNGNKYLSWAYIEAAQFARRFHETVRTYYEKKMAKTNRIVAIKALSHKLTRASYYVMRDQVDYDPARLFA

SEQ ID NO: 138368 - protein, 424 aa, unidentified
MKSTQNEKILQIKNETLVVGIDIGKETHYARAFDFRGIELSKLLRFSNTNQGYEALEDWMQEIMKDKGKTEAIVGFEPTGHYWFTLGDHLQRKGHRLAIVNPFHVKCTRELDDNSQTKNDKKDPKTIAMLVKDGRFRDVYIPEDVYQELREAVSERERLVEQMISLSNQVIRWLDIRFPEFNQVFKNWRGEAAWLTLRYFPTPAKVAAAGALSIVSTWRKKMKKPSLKKAEKLVNLAISSIGRTAGNEAAEAALQNLLTQYEMVMQQKQDIEQLMQELLIKVPNASKLVGIKGMGMVAAAVIASEIGDISRFNDPRQIQKMAGLSLRENSSGKHKGKTTISKRGRRRLREGLFRAMITMLATNSEFRQIHQRNLSREQNPLNKMESIVALCGKLIRVIFAILTKGNDYDADRMLNDMKRSMKAA

SEQ ID NO: 138369 - protein, 412 aa, unidentified
MSLALREAKFFTGIDWAAEIHAVCVMDATGKIVAQFTIAHTADGIATLIRRLARFGDPAEMQVAIERPNGRLVDLLLEAGHPVVPVKPNAIKAWREGEVLSGAKSDAGDAAVIAEYLRLRQHKLTVAVPYSGRTRALRTVVRTRGDLVQTRVATANQLTALLEDSWPGAAVIFADIDSPIALGFLARYPTPASAAHLGEKRMAAFCSSHGYTGRRTAAELLERLRSAPAGTTDEAVTIGLADAVLALVTVLTALGAAIKNLDRSAAARLGEHPDGEIFTSLPRPGQISAAQMLPEWGDCRQACEHPDSVAALAGVTPVTRESGKHRSVQFRWACNKRFRQAVTAFADNSRHASPWAAQIYHDAIAGGKDHSHATRILARAWIRVIYRCWLDGVPYDPAKHGAAATLANQIAA

SEQ ID NO: 138370 - protein, 361 aa, unidentified
MKKPTHHLIAEVPRSSSKVEMTIGIDLGDVWSHYCTLNQDGEVVDRGRFRTTPTGVDKWFTDLPRVRIAMEAGTHSIWISEQLQELGHEVLVANVRELRAISHSDRKSDQVDAEKLARYARLDPTILRPISHRTVAQQEALTLIRARNLLVRLRTAAVNATRGLAKPCGYRLPASSTLCFAKRCMEVLPPGLVQALGPVLEQIASLTVKIKHYDRLVKQLTQTEYAETQALIKVYGVGELTALTYVLTLGNKQRFKRSRDVGCYLGLRPRRSQSGDRDPQLGITKAGNVYLRSLLVECGNHVLGPRGKDSTLRRWGLHLAERGGKQSRNRAIVAVARKLAVLLHRIWVTQQPYVPFHAEAA

SEQ ID NO: 138371 - protein, 315 aa, unidentified
MYLGIDVSKLTIDCCLISDGLFFERKFKNSKVGFQELKDWLKENGATERLHCCCEATGKYYEAAAEYLSKYYRMSVENPRKIKGFGTAVLQRTKTDRQDAKTIAQYCKALEPRLWQKPTEAQTKLQELTRYQHRLKRQKAAEQTKLQTAPAYLLPLIQSTITHLQQQIKAIQNQLNQFHKDNPDYKIQKERLKTITGIGEAAANSLLSVLIQKDRFKSAAQFVAYIGLDPKENQSGTSLKGRPRISKLGNTHLRTTLFIPAMHAYRSRTFAKYVSRLQKNGKRPKVIIVALMRKLAVIAFTLLKNGQDFQVERYK

SEQ ID NO: 138372 - protein, 356 aa, unidentified
MSSNIKYIGLDVHKEAIAIAVLNGAGKLVMESIIETKAATLVQFLQGLRGELHVTLEEGAWAAWLYDVLKPQAHELVVCNPRRNALLKEGSKSDKVDARKLAELLRSGMLRPVYHGENGLRTLRELARSYQTISRDLRRVMNRLKALYRSWGIPCAGTQVYAPRDREDWLKRISQAGVRRRAELFYQHLDGLQVLRRQVRSEFLAESRKHKAVKVLRQIPCIGPIRAALLLALMQTPYRFRSKRQLWTYSGLGVETHDSAQHRYVDGQLQRSKKTQQVRGLNQNHNHEMKEIFKSTATSASRCAGPFGDFYTGLLAKGMKPEMARLTLARKIAAITLTLWKKGGRFDAEHLKAQAA

SEQ ID NO: 138373 - protein, 400 aa, unidentified
MLLFFEVITMIFVGIDVAKDTHYAAVSDDSGAVLVKPFAFQNNAEGFCLLLKKLSEFDRSKLLIGLESTGIYSENLICFLYESGFRLAVINPIQTATLRKTAIRKTKTDKVDTMLIIKSLMVNSYRLYSLRDADSLKLRTLCRFRQNLKKSKARLKIQLAGYVNLVFPEFGKFFKSGIHIAASYALLKKYSSPKEIAALRTSTLCTLLSKASHGRFGKDTAEALKSLALSSVGVKNPYISIQIAQTIAQIELLEQQIKDLNSAIEEAMESINSVLMTVPGIGAVNAACILGEIGDIKRFSKPCKLLAYAGLDPTVRQSGQFTAKSTRMSKRGSALLRFALINSAWQLTLNDTTFKAYYDLKRSQGLNHYGALGHVAHKLTRVIFKLLTSDTPFNPAKLVA

SEQ ID NO: 138374 - protein, 374 aa, unidentified
MSNISEAYVSFDTSKLRNAVAIADAGRAGEVRFLGEIENTAAAVAKLVRKLAGKYGRLTFCYEAGPTGYGLYRQIKSLGHACMVVAPSLIPKKPGERVKTNRRDALSLVKQLRAGDLTAVWVPDSRHEAMRDLTRARETAVEDLRRKRQQVSGFLLRQGLHYPGERTWTKTHRGWLASQKLEYAEQRIAFEEMLLAMRQAQERIERLEQAIRVAVPDWSLAEVVTALMAMRGIDFISATAFLAEIGDLSRFPTPRELMAYLGLVPSEDSTGDTVRRGPITKAGNRRARRILVECSWSYQHPPRVGKQKQEKVAAAPRAVREIAWKAQCRLSARYRALTRKGKLKTVAVTAVARELSAFIWAINREIANPRAAAR

SEQ ID NO: 138375 - protein, 387 aa, unidentified
MPQPNDLSRSLVALDQNSTIIAVVELSHSSWLVGGVVPGIERQPRKKLEPHPERLLALLHRWRDEAVKAGRTITRIALAFEAGRDGFWLARWLETRGVEAHVIHASSLAVSREHRRAKTDRLDTELLKRGFLGWLRGERGHCSMARVPTIAEEDAKRPNRERDCLVGERTRIVNRIKSTLARLGIRNFKPTLRKAAERLATVYTPEGMPLPPNTLAELQRDMARLGVVISQIRQIEEARQKRLEQQHETGPHAMVRLLARIVGVGVETADMLVHEVLSRPMRDRRAVARYAGLTGSPDESGAQRREQGLARAGNARVRRGMIQLAWRFLMFQKESALALWYRARTADSRRGTRKTMIVALARKLIIALWRFVTTGEPLEGVILRPAS

SEQ ID NO: 138376 - protein, 355 aa, unidentified
MNDAKYIGMDVHQATISVAVRDSRGNLVMEAIVETKAETILQFIRGLRGSLSVTFEEGTWAAWLHDLLQPHVTRVVVCDPRKNALLKVGNKNDRIDARKLSELLYLNKLSSVYHGEPGIRTLKELARSYIAMTRDLTRVMCRLKAIYRSWGIPCAGQQVYAPRYRAEWLAKISEAGVGRRAGLYYQQFDALAALRQQARRELLAEARKHPAMKLLRQIPTIGLIRAALLIALMQTPNRFRTKRQLWAYCGLALRTYTSGEYRFVGGQLKRSKKVLAVRGLNINHNHDLKNIFKGAATRAASTVGPFQDFYQATVARGMKPHLARLTLARKIASITLLVWKKGARFDAEHLKQQAA

SEQ ID NO: 138377 - protein, 391 aa, unidentified
MSLYFVGIDISKYKHDCCILSAADQKVVSKFTFKNDLQGFEQFLSALSSLSSPEDIRIGFESTAHYALNLELFLENAHHSFMEINPVLIKEYKKSTSLRRTKTDSVDCESIAHWLMTVEYKPHSKGFYHAYSLKSLTRLRDKLVRQRSFYLVKITNVLDHTFPEFKPFFHERLSKTALYLLETYGSAERMSRMDSASYDKLRSLSRGKFSPRQFLRLKELAANTVGVNNSIFDTVLNSLLTLYKSLVKEICILEEEINRLIREVHPHYMSVPGIGTISAAVIYSEYGDISNFSSPAQMLAFAGIEPGINDSGTESHKGRMVKHGSSQLRYVLINCCLPLIRFDMTFAAYYAKKRAEGKPHRVAITHVAKKLVRVIYALEKQGIDFNAQKLR

SEQ ID NO: 138378 - protein, 329 aa, unidentified
MTTNPPQIVFNHILAFEVSKEQLLVHTLPADEQCAIDNKPQAVRRLIKAEIKRNRNKQLGQMLVVCEATGGYERHVLDAAVEMGLSVHRAHGTRVRHFGGYCGLLAKTDPIDARLLAQYGLKTENIRLYSPPPPDTAALRALHARRTEIQQMLIAETSRLDHAQHKSVLKSLKAHIASLKAALAAIEADIAQLVEGSEMLRKKVALMQTVIGIGPISAMVVLAYLPDIGQLTKGQAARLAGLAPINNDSGKKRGARHVEAGRTAIRRALYMAAGVAMRANPILKEFSDRLRGKGYPFKYVVTAVMRKLIVILNAVLRDGQSWKGAQMGA

SEQ ID NO: 138379 - protein, 438 aa, unidentified
MQVVYRRCGGLDVHKDTITATVLVFGEEGQRDVRKQEFGTHWKELQRLGKWLRACRVERVAMESTGVYWKPVWNVLEKSLALVLANPYQVKNIPSQKTDRRDSEWIADLLAHGLIRPSFVPAPEIRQVRELTRYRVQLTGERNRVHNRIHKVLEDANLKLDTVLSDLLGVSGRAMLRAIVNGHCDPGWLADYARGSLRGKREQLELALRGDIRDHHRYLLGELLADLEFIESKILRLDQELLARMQPHQDAVNRLCSIPGVDILTAWTLLAELGPDVTAFPDAAHAASWAGLCPGSRESAGKRLSSRTRKGNRWLRRALCQSAWAVTRKKNCYLTAHFYRRAAQHGVKKAIVATAHQLLIIAYYLLRDRTFYRELGGDFFDRLHPLRTQNRLVRRLQRLGLQVVVRPQPPTPEPPPSTCRRGRPCKCSERGIDCKHKH

SEQ ID NO: 138380 - protein, 355 aa, unidentified
MTSTKYIGMDVHKESISIAVLNFAGKVVMECVIKTKASTILQFIHGMRGDLHVTFEEGTWAGWLYDLLKPHVTELVVCNPRKIALLKDGSKSDRIDAHKLAELLYMNKIKPVYHGEHGLRMLKELSRSYLTISKDLGRVMNRLKALYRGWAIPCAGTQVYAPHYRSEWLSKIREAGVRRRAELYYQQLDALRLVRQQARKELLAEARKHRATKLLRQIPGIGPLRAAHLVALMQTPHRFRTKRQLWTYSGLGLETHDSAQYRVVERQLQRSKKPVTLRGLNDNHNHDLKDIFKGAAMRASTAVGPLHDFYEALLAKGRKPTMVRLTLARKIAAITLIVWKKEVRFDANYLKQQAA

SEQ ID NO: 138381 - protein, 317 aa, unidentified
MAQKQIVVGIDVAKEKIDAAIWLGAEGCFANNPQGRGELLAWLEKHGVDKAVMEASGGYERSWVRLLRGAGVAVAVVDPKRVRHFAKSAGQQAKTDAIDARMIAWFGDSFSARLGKPDDAEREELDQLVTARQAIIRLKEQIDHWAEHEQPKAVQEVQQALLKDVARQQAKLEAVIADKIDNTERFAERAEIIKSVPGLAETAAAGLIAFLPELGLVDRQAASALLGVAPFAEDSGKRRGPRHIRGGRHKLRCLLFMPILSAATRHNPVLKAYYQRLIAKGKLAKVALIACMRKLISILNIMLARGEKWDPTRHTLA

SEQ ID NO: 138382 - protein, 343 aa, unidentified
MQMITTIGLDIAKSVFQLHGIDAAGSVVLRRQLKRRYVLAFFERLPSCLIGIEACATSHHWSRELQALGHTVRLIPPAYVRPYVKRQKNDCADAEAICEAVARPNMRFVPTKTIEQQSGLVLHRTRSLLIRQQTSVINAIRGHLAEFGMVAPVGRNGLEKLLSMAVSEDGMRVPEIVRSSIEALALQLRALKAQILEFDRKIMQWHRSNELSKRLDEIPGVGPALATALVASIGDPKSFRSGRDFSAWIGLVPKQHSSGGKPKLGGITKQGDRYLRSLFTVGALAVIRYAKIHGTQRRPWLAALLARRPTKVAAIALANKIARMAWALMVKGEHYREPAALAA

SEQ ID NO: 138383 - protein, 401 aa, unidentified
MKRVCGLDIHKDTIFCATIKGSKQSPVMEYSTLTPSIMEMGQVLRNDKITTIAMESTGIFWIPIWNILEEMGFSLILVNPYLIKQMPGRKSDVKDAQWIATLLHKGLLRSSLVPCHHIRQLRTYSRKYVKLQQRQTSVLQEMERVLEMCSIRLTSLVSNISGKSVYRVIQQIVNGETSAEVLVNSVHVRILNTHKKEKVKESLTGYITEHHRFMLEMLLEEYDLYVEQSNLCLERMEKLCREHYADQLKLLLTIPGISLISAMIVIAESGADMKAFENSGKFSGWTGLRPRNDESAGKFKSTATTKGNGFLRSVLVQIAWAATNTKGTYFKEKFNRLAMRKSRKKALIAIARKLGVLIWNVLYYGQPYDPSRLIIYDPGKLHAKITYHQKEVLRLQGLSRQ

SEQ ID NO: 138384 - protein, 425 aa, unidentified
MSVRDYSKQVARRQRIGSTTLVVGVDIGCASNAVGFMSKEGKVLGSYSSMPNSREGFEEFVKITEGLKAKHGLTDVIIGLEPTGHYWRKFAYFAKAKGYEVRFVRTTALKHHRELDESSSAKSDKRDALTLTNITREGKYIDTVIEDGRMRHLRILVKVREKIQKRNVSAKNSLHAALDDYFPELHGIFWSMHSRGLWALLETCPFPEDVVTLKVSALKEMIGRASRRRAEASQKATVLYQAAKESIGLRQIGSADRYRLKMCLEEVKRTGFIIKDIEREIKRTLKEIPEAEYLLSIPGIGPISAAVFLGELGNPSYFKGARQVVKYAGYDPQESDSGYKVSRKFISKKGRWLLRKHLFLMSMRVVVLSRYFQEYYQRKLQTKNRFGQLPRKKEILCAVAIKLIKVIFALLRDKRNFEDTVTAVE

SEQ ID NO: 138385 - protein, 350 aa, unidentified
MIIIGVDFHPEFQQIASVDTDTGEFQEKRLTHREEAEKIYRALACAGQKVRVGMEASGHARWFERLLAELQIELLIGDAAEIRTKRVRKQKTDRQDAQLILSLLLEDRFPRIWVPSWENRDLRQLLWHRHRMVQARTRIMNQLQAVALNEGLRCKKKLWRERGREQLESFRLAPWASRRRRDLLELLDRLNPTIAELSQAIQQEVEKCPEARRLMTHPGVGPLTALAFVLIIGEADRFQCGKQVASYLGLVPLDDSSGNRRRLGHITKQGSSMLRFLLVEAAQVTARSLPQWRSKYLHLMMRRGRKTAKVAMARRLAVHLYWMMRQGWDYQQWIKFGSHAGQLGNRHGVQ

SEQ ID NO: 138386 - protein, 411 aa, unidentified
MEILHPRCCGIDVHKATVCACVSIKDAGVVEKHKVRFDTTSAQLRELAAWLHQYQVTKVAMEATGVYWKPVWNLLEDEFELLLVNPQHLKSIPGKKTDFKDGERIADLLQHGLLRGSFVPPRPIRELRDLTRMRASLAQERSSTINRIEKTLEDPNLKLGVVASDVVGASGRAMLEAIVKGETDPCILAELAKGTLRNKIPQLKLALEGKITDHHRFMLRQWLDMLDFVDRKIALLEQQILEKSRPFEATVHTWMQVPGLRRINAYSLLAEIGADMSQFPTAGHLASWAAVCPGNRESAGKQSSGKIRPGNPWLRRTLCEAAWAASRTKDSYFRALYQRLARVRGKNRALIAVAHSLLVTVYSFTVAGQPYQDLGLDYFNRLNKDHLVKTLVKRLEKLGNRVILEPRDQAA

SEQ ID NO: 138387 - protein, 366 aa, unidentified
MFHKLNSAATLIQRTTTEAPRDHMYYIGLDVHKRTISYCVKDAAGHVHQEGKIGSTRCELDAWIKTVPQPRMMAMEATIFTGWIYDHLLPHAEKIKVAHPLMLRAIAAAKKKNDKIDAAKIADCLRCDFLPECHMASTAIRDRRRTLRYRSLLVKQMVQMKNRVSGLLLETGVSYNKCRLHNVGYFADLMSTNEEVNESIRPLLKISREHIVRVQRLDYALVSWLERDPLLQERLRRLRTVPGVGPITALTWALEIGDFTRFRSIKQAISYCGLCGEERSSADKVMRMPLSKQRNKHIQRVLIEAAKLAPRECHELAMVRERELQKGNPNRATLAVARKMVSYMLAVERRKQDFVPAENFKCTAAA

SEQ ID NO: 138388 - protein, 343 aa, unidentified
MDYFAGLDVSVKDTSVCIVDDTGRIRREVKVASEPDALLTVLRNPAYRFKRIGLEAGPLSQWLFSALAEADLPVICVETRHMRAVLKAQINKTDRNDARGIAQMMRVGLYRPVHVKTLRSQTLRMLLTHRKLLQAKAIAVENDLRATLRNFGLKVGAVGTVKFEARIKELIDNFPDLVALVEPLLVVRRVLREQISILHRRVLAAVRNDEVCRRLMTVPGVGPVVALTYRATVDVPARFRKSKSVGAVFGLTPARDQSGESDRPGAISRCGDEMMRTTLYEAAQVMLLRSAKWSWLKAWAMKIARHRGMKKAIVALARRLAVIMHRIWIDGTEFRWTREAAAA

SEQ ID NO: 138389 - protein, 316 aa, unidentified
MKPQIFVGLDVSKQKLDVAVRPQGRHFVTNNNDQGIKQLVKRLVALKPQLIVLEASGGYEFLVTAALAEAQLPVAMVNPQAVRKFAGATGKLAKTDKIDAQVLAHFAEALKPEPRSLPGQDQQLLKAALQRRLQVVKMIGQEKNRLEKTFIPALKQDIQAHLTWLQQRLEQLDRDLNDQIRSSPLWRDHDRLLQSIPGVGPIVARAVMAQLPEAGTLPGKQAAALVGVAPYNRDSGRFRGKRMIRGGRSHLRHMLYMAAVVASRFNPVIRPFYQRLLAAGKSKKLALTACMRKLVLIINAMLKNNQPWNQFLTQVP

SEQ ID NO: 138390 - protein, 343 aa, unidentified
MHIASIGIDLGKTTFHLVAVGEQSKVVVRKKFSRKQLLAYTANLQSSLIGIEACSGAHFIGAALRSQGHDVRLIPAQFVKPYLKSNKNDFLDAEAIAEAVARQNMRFVPIKTEDQLDLQALHRVRDRLVHRRTSIINQIRGFLMERGITFAKGPANLRNQMPAMLEDAELKISPRMRTLLARVWQEWKQLEIDIADASDEIERISSEDAGCKRLRQIPGIGPLVSTATVAAIGNGAAFRKGRDFAAWLGLVPRQHSTGGKAKLYGISKRGNIYLRRMFIHGARAVLLRVKYDTGGFGQWVHQLEARAPRNKVVVAIANKLARIAWAVLFREEDYRHMAVCAQA

SEQ ID NO: 138391 - protein, 403 aa, unidentified
MFYLGIDVSKKSCRYFLLNPEGQKVKSFSLDNTHEAFQNLLKRLEEISIPKEDLLIGLEASGGFWENLYSHLKDHGFHVVLLNPYHTKNFREALAKKAKTDDIDALVIAQLLRTGEYVQSQVAEELIQSLRELTKLRYELMTERKNFQRQVFSLLSIIFPELEKTALKNPFSIASMALLQKFPTAIDLAQAKPKQIEKIVRSIQGNNFNIEEIGKLIQTAQTSIYSGRAKEARATSLRILLRHVQTLSSSIEELEAQIKQILSPQEPQDSFPGENLLTIPGVGEKTLAAVLSYLGTDGSSFSSSTKAVGYVGYFPKIYQSGQTQRDNTISKRGPKLLRWALYMAAVASLKHNPEMRTLYHRKLSQGKTEKQALICVGKKLLQIMLAMLKSGEPYSPAKVFVSC

SEQ ID NO: 138392 - protein, 392 aa, unidentified
MYIVGIDIGKNHHEASIVSPEGKQIGRSLRFATTHKGADSLMSFIFKNIGNSPCVFGMEATGHYWYPIYSFLKAKGYTIYVINPIQSDSLRKMYIRQTKNDSIDSFLIAEVIRFGQFGTTSMADENILAMRQLCRYRDSVISSRTDIKLRIGTIMEQIFPEYEKQFSSLWVSTSMGILEKYLTPENIENAPIDELFEIIKDKSHNRLTKAKAISIKEAAADTFGIKIAQDAFSFQLKQLIDRMNFLDKQIEALDIEIMKYYEQFDCYLHTIPGIGIIGAATILAEIGDISRFKNSSALVAFAGIDPTVRQSGEFNSTHNHMSKRGSPYLRHAIFLAATTCSFHNSPLNAYYKKKRDQGKHHLTATGAVARKLTTVIYAVLRDSKPYEPKKFC

SEQ ID NO: 138393 - protein, 350 aa, unidentified
MNYVGVDIHKRYSFVSATDEQGHRVRETRIEGNAPSAFAQFFAGLDGSSKVVLEACWNWGLLHDVLDELEPVEEIVLAHPFKTRLIADAQIKTDRLDARALATLLRGNLVARVHIPSPQTRQRKNLLRQRLYWARLRTMLRNRIHALLDRQRGLALPQCSDIFGVKGLNFLRSLQLPEPDGALLAEQLALHDLIAQQMRAQEKRIVAETRTDPIVQRLQSIPGVGKVLAVVLAAEIDTITRFPSAERLCAYAGVVPTTHASGGKIHHGRLLPWCNKWLQWALVEAAWIAVGCSGYFGGVYRQHRQRGKPANKAITIVARRMCRIVWTLLREERDYEERANLISPAAPAKD

SEQ ID NO: 138394 - protein, 352 aa, unidentified
MIVLGADMHKSSHTLAAVVAMSGEMRGDKTINVGAAGFAAALDWGRSLGEQRTWALEDCRHVSGAFERFLLERGERVVRVTTKLMAQERRGARERGKSDLIDAIAVARAALREGLDRLPVAELAGVELDIRLLVDHRERLVHVRTKLYNDVLWHLHDLWPELVLPGSALLSQKWTTRIARRLARAEQTARVRIARDELRHMRELSHTINALEAEIADLVAQVAPQLLSEPGFGPLTAGKLIGEIAGASRFSTDAKLARAAGVAPIPASSGKTQRHRLDRGGNRQINTAIHRIAVTRARCHPETRDYIARKRAEGKTYREAIRCLKRHLARRIWHLLRASEPTRDPSPSTSLS

SEQ ID NO: 138395 - protein, 312 aa, unidentified
MTHSICGVDVSKDWLDAHVEPAGGCARFGNDAAGIADLAGFCRDRAVELVAMEASGGHERLTFLLLWEHGLPCGVVNARNVRHFAEAMGFLEKTDQIDACVIARFAAARKIAPTPPPSRSQQRLAALVARLRQVSGDLAVQKQRLSSARDGEIAESLDEVIALLKRQERRLTGEIASLIDDDPLWAKLDAAFRSIKGVAGRSVAMLVAQLPEIGLVSNKAVAKLAGLAPIADRSGKREGRRHIAGGRAGPRSILFLVARIAARYDPHLAAFHARLQAAGKEKMVVRIALARKLLVILNAKARDARSQFANAT

SEQ ID NO: 138396 - protein, 461 aa, unidentified
MMAKRKQKQTPRTQVNALEQIHLNAAGIDIGAEEVYVAVPPDRDEQSVRSFPTFTADLHRLADWLEQCGIDTVAMEATGVYWIPLYEILEARGFQVYLVNARHLKNVHGRKSDVLDCQWIQQLHTYGLLSASFRPPEQIVAIRSLVRHREMLVQYRSAHIQHMQKALTVMNLRLTNVLSDITGVTGMKILRAILAGERDPQVLAQCRDERCARSEAEIAKSLEGHYKPEQLFVLQQAVELYDFYDQQLQHCDAELEARYRQFDPPEDPGTPPPAPRTTKRRKNQAHFDLAPALYRLTGGVDLTQIDGVDALTIQKVLSEIGTDMSKWPTEKHFASWLRLCPNNKVTGGKVKQRGVQPTTNRASTALRVAAASLKHSDSALGAYYRRIRARSGAPAAVTATAHKLARIIYAMLKQREPYHDFGALYYEQQYRARVLRNLNRQAARLGFRLEPLTPALAGQVS

SEQ ID NO: 138397 - protein, 337 aa, unidentified
MKFSGIDLHSNNSVVVVSDETDKVMVEKRLANDLPTILATLAPYRDELVGVVVESTYNWYWLVDGLQAAGYRVHLANTTAIKHYEGLKHSGDETDAGYLAHLLRLGILRTGYIYPKEQRATRDLARKRMQLVRSRTQHILAVENIVARETALPIKSNQVKRLTVEGVLALGLRTDVDLAVQSNVAVIRTLTEQIDKLENRLQEQVRPSPEYALLTSVPGIGQTLATTILLETGAIERFREVGHFASYARCVDSVRMSNGKKKGEGNTKNGNVYLAWAFVEAAHFARRYCAEAKRFFDKKRAKTNNAVATKALAHKLARACYHMLKDKQPFDVKRCFA

SEQ ID NO: 138398 - protein, 344 aa, unidentified
MITIGIDPHKRSVTAVALDAHSQPLGTLRVAMTDQTVAQLLAWVGPWSARRWAVEGATGLGHTLAQQLVGAGEVVVDVPAKLAARARLLGTGSARKTDRTDAASVAAVALAHRRLRQVAVEDHTMALRLLTDRRDDLVAERTRTLSRLHVLLRDLHPGGAERNLTADRAAALLGRLRPVAGVDRERKRIARELLADVRRLDQRITAATKAIGEAVTSSGTTLTEVFGLGPVLAAKILGHAGDLTRFPDRDHFASYTGTAPIEASSGDVRRHRLNRGGNRQRNTALHLIAVCQIRDPGPGQVYYQRKLRQAKTPEEARRALKRKLSNVVYRHLVADHRHRHAPPS

SEQ ID NO: 138399 - protein, 420 aa, unidentified
MLKIVHPICCGMDVHKSFVVAAIAITDKQNVTTYIKRRFATFNSDLKSLEKWLLGHNCTEVCMESTGKYWIPIFNVLEKSCHVVVANPKYVRAIRGKKTDDKDATWIADLFKFGLVPQSFIPPKEIRMLRELFRYRFKLTGHKTSEKNRLQNSLTVSNIALASVVSDSFGKSASAIVDYILTCDTFDPEHCKSLLQKKLKEKTDEVVQSIIGYELRKDQSVKMKLCRKHHDYLEQCISDLDETITSMAQPYIQLIDIAVTLPGITDKSATYIIAEIGTEMSVFHSSKHLCSWAGLAPQNNESAGKKKSVHVSRAGVYLKPLLVQCANAAIKDKKNPYFKFKYERIKKRRGHKRAIIAIARMMLTCIYHMFLSKEAFNPKDSYCSEIPEALFQSHKAEYIKNAIKLLEKEGCVITPPTVPA

SEQ ID NO: 138400 - protein, 350 aa, unidentified
MFIIGCDFHSRFQQIAMLDPTTGEVIERRLEHENGEAKTFYSTLPSPARVGMEATCDAPWFERVLQEHHHELWIGDAAAIRAAMVRKQKTDSRDALHILDLLLTNRFPRIWVPSPAERDLRQMLRHRHKLIRFRTSVMNQLHALAMGQGLCLRKKLWAKVGRMELGGLVLDPWASLRRQELLQLLDQLDPWIDKLDKAVNQAAESRPLAVCLMQQAGVGPVTALAFVLIMGPVTRFANSKKVVSYLGLNPSEDSSAGRQRLGAISKQGNPMMRYLLVEAAQTAARLDPELRRDYQRLKFRRGSGVAKVAIARKLAVRLYWKLREAAQPVPSARMQGSPASPVVGESLSAN

SEQ ID NO: 138401 - protein, 341 aa, unidentified
MEHCGIDLHQKSSQVTVVDEEGEVLERATIPTREAAIRRWFGRRARMRILLEASGSSPWVARLLTELGQEVNVIDPRRVRWIAQSTLKTDRIDADTLAELARLRIKLRTLVWQRSELSQRQRGHLRVRRALVEARAGFIVTIRGLLRSFGVGVASCRSDRFVARCQATAIPPELVEVITPLLAAIRDLNARIAEMDAVVEQVGQLYPAVASFQAIPGVGPVVALAFLLSIEDPSRFRRSRDVPGYLGLRPRLRASSEVVHRGRITKEGDIDVRRLLVQAAHAHLRARSDTALKRWAESLIPRIGKRKAVVALARKLAVLMHRLWITGEVYQPFPNPTAKAA

SEQ ID NO: 138402 - protein, 348 aa, unidentified
MTVHVGMDVHRKRSQIAIVDEAGDQQRNRNLPNDPTKLVPILGALEPGTPVAFEAAYGWGWLVELLEELDLEPRLVHPSRCKAIASARLKNDKVDAATLAQLLRADLLPEAWIAPQQVRDLRALLRHRASLVRSSTACKSRVHAVLADRGISERSSLWTGPGRTWLAGLALPPTQRAIVDDLCGLLDALATPIARLEREIGALAKPDPRVQALMVLPGVGRLTAMTLVAEIGDITRFPTARKLCAWAGLTPAVRNSDRKVRHGHITKQGSPWVRWILQEAAQTAKKSPIFADTYAQLARRRGRSIATVAIARRLLARCFHILTQLEAATGEGQTGCARNKRMSLQHGR

SEQ ID NO: 138403 - protein, 312 aa, unidentified
MIFVQIILPCCCGLDVHKDIIQACILKGDPQEEPVSEMRKFSTLRDDLFNLARWLSDNRCTHIAMESTGVYWQPIYEVLEEYDLTIYLVNARHMKNMPGRKTDIKDSQWIADLLRHGLLKSSFVPAKFFRTLREYTRTYKNLSEDRAALLNRIERFLQSRGFKLSTVLSDILGVTGRGILEHLAKHGQITVLQISALMKGKTKHSASEIALAINGFLNPDQCRLLSHHLRHLDYLNELSDDLMQDTIKLVEPYKSYIKQLTSIPGISDISALGLLAEIGVDMSTFETAEHLSSWAGLSPRNCESAGKKKPLE

SEQ ID NO: 138404 - protein, 392 aa, unidentified
MFYVGIDIAKQNHEASIIDSNGKLLDKSISFSNSQVGCNKLIALLERFEADTSNTVIGMEATGHYWVSLYSYLIDLGFTVNVINPIQSDAFRKMYIRQTKNDSKDSFIIAQIMRFDEFSTTSLADEDVMALRQLSRYRLALVDECSDWKRKCIALLDQVFPEYSKLFSDTFGVTSRELLSKYPTPEDMLSIDTGTLSKLLSEASRGRFGISKASEIQESATNTFGINFAKDAFAFQIKQIIAQINFIEEQLKELETEISTLLHQTNSVITTITGIGDVLGAIIIGEIGDISRFEAAPQLVAYAGLDVAVKQSGDFVGTQTKISKRGSPYLRRAIWLAATVAAFKDPALSVYYQSLRARGKHHLTAIGAVARKMCNIIFAVLRDNKPYVPDIK

SEQ ID NO: 138405 - protein, 340 aa, unidentified
MDATTYGLDIAKRVFQLHWVDGQSGEVVKRRFGREELIGFLAKRPAGRVALEACGSAHWWARKIAALGHEVVLLHAKFIRPFVQNNKTDAADARAIWTAVHQPEMRTVAAKTEDQQAMLGVHRMRSLLVKFRTMQINQLRRLLYEFGVTFRTGRRAGLVEMHARMMQLEEALPGALLSGLQDQLQRIDALQSDIEKLEERIGAWNKQEAACRAIAQVPGIGRLTATALVATMGQAQAFKSGREFAAFLGLVPRQSGTGGKVRLGSISKRGDPYLRTLLIHGARAVMTHAKAPSAWQTQVAARRPANVAAVAMANKMARTAWAILAHGRAYQRDYVSVRPT

SEQ ID NO: 138406 - protein, 337 aa, unidentified
MKLYAAADLHSNNHFLTVIDENDTRILERRLPNDLAVTLKTLDPYRADIRGIAVESTFNWYWLVDGLMEAGYPVMLVNTAKARQYEGLKHTDDRHDAFWLAHQMRLGILPTGYIYPKAQRALRDLLRERRRLVRQRTTHVLSTQSTVWRHTAVRLPSKAILGVIKKPWPELPDANLELGVHAHRASIKVLSSHIERIERKVLQSLKPRPEYQMLLTVPGIGPVIAWTIVLETGDLSRFASVGHFASYCRCVDSKRTSNEKKKGENNVKNGNAYLAWAFFEAAHFAIQYLPAAKRFYQRKSAQRNPILAIKALAHKIARACYYLMRDRVPFDAARLFA

SEQ ID NO: 138407 - protein, 341 aa, unidentified
MDHYAGIDVSLECSSVCVVDASGKIVREGRVASEPEALIAWFGSLGFSLTRIGLEAGPLSQWLFAAMREAGLAVELLETRHVRDAFKAMPVKTDRKDAQGLAELIRVGWFRPVHCKSMAAQETRAILTARKLIQSKLHDVEMSLRGILRGFGLKVGKTTPKRFEGRIKELVVGHPSLQVVADALLAVRAVLLREFNGFEKRVRTMARDDARARLLMSAPGVGAIVSLTYASAIDDPARFKSSKRVGAHFGLTPKRHQSGDTDITGRISKIGDKSVRTALYEAAHIILTKRVKGSGLKSWAAKLAKRAGMKKAKVALARKLAVIMHRMLVDGTKFNFAATAA

SEQ ID NO: 138408 - protein, 344 aa, unidentified
MEHVAIDLGGRESQVCVRREEGSIVEEVLVANQSLGSYLARRPPSRVILETCAEAFAVADQALGCGHEVRVVPSVLVKALGVGARGVKNDRADARALSLASTRQDLPSVHVPSTVARYLRSLCTSRETLIGARTQLINSVRGWMRTELVRVRSGGTETFTRRVREQCDRGERGLPTFIDPMLLAIDALTTQLARLDEQLESYAKDDALCRRLMSAPVGPVSAVRYVAALDTVERFDSAHAVEAYLGMTSGEHKSSGRGYRTGITKAGPPGVRRALVQACWVAMRTRPKDPLVLWATKIKERRNGRIAVVAMARKLIGILFAMWRDGSVYDPFFEEKRRRQTQAE

SEQ ID NO: 138409 - protein, 348 aa, unidentified
MNNLHYIGFDVHKKTISFCVKTAAGEIVEEGSMLARRAEVRQWAGARSQPWQGAMEATLFSGWIYDTLKPYGEQLEMAHPAKMKAISAGKKKSDTLDARTIADLVRCNLLPACYVAPPRIRELRRLLRYRSLVVSEAVRMKNKMAGLLMETGALYVKEKLHRKKYFATLLEELEEVPPSVIDLLRLSRGALEMFESTQKRLVRELLADPELTQRVERLMTIPAVGEITALTWALEVGDPQRFRCNSDAMSYCGLTAALKSSAGKQQRGPISKQRNRWLQTTLIEAAKLAPRWNPQLAALHARELERGHRNRATLAVARKLVAYLLAVDKSAQAFQVRAPLEVPTQKAA

SEQ ID NO: 138410 - protein, 297 aa, unidentified
MPKYSTAFGMDVHLRSTTVCALDADTGEAVTRRFPGNPWGEIAGWMDRFPGPSLAAYESGYLGFAPQRELAGLGVECVVAAVSKIPRSAADSASKNDRNDAARMAKAILAHDISPVWVPSPEVEGIRDLAGAYDGATARLATAKQRLLAFLARRGFVYGGTTPAGNPRKYWTYDFLRWLDKVRPEDDGGVRALAALRNEVEAAAEARADLLSEYRAAVDASPIAAEAAALQSIKGCAFALAAAFSAEVGDFTRFRSGRQVTAYFGLAPSQRSSGDSVRLGGISGAGNALVRKLAVGC

SEQ ID NO: 138411 - protein, 249 aa, unidentified
MPKKRQNREVRLPVLRPDAAGADIGAEEIFVAVPADRDSKPVRRFSTFTQDLNALADWLTACEIRTVAMESTGVYWIPLYQILEGRGFEVYLVNAQYVRNVPGRKSDVSDCQWIQYLHSTLRQSLAGYRYYQNLIAELDEEINRYLRDLPKAEEAKASPPPRTKTRVYQKQHNDPAFDLRGELYRIVGVDLTDIPGINAVTAHTIVSEIGTDVSRFRNASAFASWLGLCPEKQVSGGKVLYTKTRPSQK

SEQ ID NO: 138412 - protein, 350 aa, unidentified
MEIRKQAIGIDISKDTFTASLGSLSQDGAIHLSPAQAFDNTKGGFNRLLRWAKPMVDSNSPLVFLMESTGVYYENLAHHLHGIGKTVHVVLPNKSAHYAKSLNVKTKTDAVDARVLARFGLERSHKIWQPPSPVLAELRNLTRYYVQLQEQKTVVNNMVQSKQAAHHVQSFIISSNKQLVRQIDRQIERCKQQIEQLIASDPVLAERVEQLASIKGVGRLTVAVILAETRMFEGIENVRQVASYAGYDVVERESGTSVKGKTRISKKGNRYIRNALYFPAMVACRFNPDLKEFYQRVIRSKPSKMVGQVAVQRKLLVLMYSLYKNGTRYQEGYNKVAPTEMAEATQDSIA

SEQ ID NO: 138413 - protein, 417 aa, unidentified
MEDRSEARGKRYVALDIHKHYCIIAGVDREGRVLFQAVRVEHADLEGWLKKNLCFTDQVVVESTTNAWHVYDLLAPLVERVVVANPIQVKQIAKARVKTDVRDTFILARLLAANLVPEVWVPPVHVREMRQLLSQRRQWVETHTQIVNRMHSVAHRHHLRHPAGKRFNEKNTLWQKDKRLSKVEQFQLELEMENLAYIEKQISRIGKEVAKMSHRNPWAEGMTYLMQLPGFGVITAMTVLAAIGEIQRFDSARHLASYSGLTPGLEQSGTKYREKGITKEGRKELRWAMVEAAQRAVKSDPRWTGKFQALHKRMHRNQAIVAVARQLLELVWYVLTRRQPYRYFSHERIAYKYLTWAWQMDEAARDGLTRQQFARYYLMRLGIGHDLTRIALNPKYPRKLASEAELLALRPELNHIE

SEQ ID NO: 138414 - protein, 355 aa, unidentified
MTSTKYIGLDVHKESISIVVLNSAGKVVMECVIETKASTLLQFIHGLGGDVHLTFEEGTWAGWLYDLLKPHVTELVVCNPRKNALLKEGSKSDRIDARKLAELLYMSKLSSVYHGEHDLRMLKELSRSYLTITKDLGRVMNRLKALYRSWAIPCAGTQVYAPCYRSEWLAKIREAGVRRRAELYYQQLDALRLVRQQARKELLAEARKHRATKLLRQIPGIGPLRAAHLVAVMQTPHRFRTKRQLWTYSGLGLETHDSAQYRVVEGQLQRSKKPVTLRGLNDNHNHDLKDIFKGAAMRASTAAGPLHDFYEALLAKGRKPTMARLTLARKIAAITLIVWKKEVRFDANYLKQQAA

SEQ ID NO: 138415 - protein, 332 aa, unidentified
MTYCIGIDVSKQSLELWDGTQEGEVPNEKGLKTLKKLLKKRYGGEWNQKVRFIYEPTGPYSNYLRAFAAEHEVRVVEVNPKKSANFAKVLGNRSKTDVVDAKMLYTFHALLTEEDFCIPEMDEIAEQLGAYLGSYEIIQKTRTMLSNHVQSLEEKSGVTKKLKESLEKELGRLGTIEEQLEKEMEAYAEDHEETREDLGNLLSVKGIGVISAMGLLYLFRKYPGANRNEITALAGLDPVRRQSGSSLNGGRKISRAGDPMLRKVLYLACMNCIQHNEYIRTFYKHLVSDNHKKPKVALVACMRKLLLIAHHLYVTKSKYRTLEHDANPCLSS

SEQ ID NO: 138416 - protein, 466 aa, unidentified
MQELTLGIDVACRAAHQASLADQAGRLAWSGRRFRTTTADLDRLWAAIPSPAAVTVVLEPTRNAWVPLAAWFRRHGARVILVPPEQSADLREYYSKHTKSDHLDSRMLARLPLLHPDGLRPAEGLGPADAMRRATRLRASLVKRRNVILARLDSYLELLGPGWHAAFGGDLATNTALRFMAAGYADPHTARRLGRARLTRFIWRYSHGHWGEELAAQLLAAAAETLALWDGELDYTELAADIAAEARLALALSAEIRDLEQKIAALLHQADPAAIMTSVPGVGVINAAQILARLGDPARFRSLAGARSFTGLVPSLTSSGVSGHHGPPTKSGDAPLREALFMAADHARRTDPTLAARYHRLMVTCGKHHNSALCHISTALLTRIIACWRAGTPYQIRDTDGTPLTAAQGRAIAATRYRVRDDIRAQRRTSHHSAKAGRRHQESPSAPTPARPRTTLRPPAKALDTA

SEQ ID NO: 138417 - protein, 359 aa, unidentified
MTVIEGRERRIVGGVDTHKDLHVAAVVDEQDRVLGTQSFATTRQGYRQMLAFMRSFGDLQRIGVESTGSYGAGLLRFMQQAGIAVLEVTTPDKQDRRRRGKNDDLDAQNAAHAAFAGQRTVTPRSRDGMIESLRVLMACRKTAVSARRVALQLIQNTIVCAPDGLRDQLRSMTRMQLIRTLAAWRPDLTAYRDVEAAYRIAFKSLARRYLELHDEIADLDAMIAAIVDELTPNLVARNSIGHTGAAQLLLTAGDNPERLRSEASFASLCGVSPVPASSGKTVRHRLNRGGDRAANSALHIIAIGRLRTDQRTKDYVARRIAEGHSKLDAIRALKRYLAREVFTLITQRRREINATRIAA

SEQ ID NO: 138418 - protein, 379 aa, unidentified
MLICGIDIGKFRHEACLIDETGKQLSKPLKFTNTTDGGERLLDYFSKHNQDNKVIVIGMEATGHHHLSLYCFLFDKGYQVNVINPIQSDDIRNLFLRKTKNDAKDSFLIAETIRIGRFSSTLLADEDVLSMRQLCRHRMGLVDYIADQKRKIIGVMDRLFPEYQHIFSDMFGKTSTELLNKAVTPEELLAIPTAELCELLKKYSRGRFGEAKAEQLRDAAKNSFGITIATTAFAMQLRQLLEMIELLESQLVELEAEIGEYLRKMDTYITTCPGIGEVLGATIVSEVGDVSRFSEPKKLVAFVGVDPSVKQSGKFVGTQNKMSKRGSPHLRRAFFLAANVAAFRDPVLSAYYQKKANRGQASLCCSWCGFKKTGATLKK

SEQ ID NO: 138419 - protein, 343 aa, unidentified
MQTVTTIGLDIAKSVFQVHGIDAEGKVVIRRQLKRRYVLAFFQKLAPCLVGIEACASSHHWSRELKGLGHTVRLMPPAYVKPYVKRQKNDAADAEAICEAVTRANMRFVATKTPEQQSCLMLHRTRHLFVRQQTAVINAIRAHLAEYGIVAPVGRNGVEELLGVVADPSDERVPEVARACLAALGAQLRMLKTQILEFDRMINAWHRSNETSKRLDEIPGVGPALATALVASVADPKAFRSGRDFSAWIGLVPKQHSSGGREKLGSISKQGDRYLRCLFTAGALAVIRYAKIHGTKHRPWLTALLARRPTKVAAIALANKIARMAWAMMAKNERYKEPVALAA

SEQ ID NO: 138420 - protein, 383 aa, unidentified
MEVFYPNCAGLDVHKDTVVACSRQVVGRKASREVRTFKTTTSDLLALSEWLSSLGCTHIAMEATGVYWKPVWHILGDGDFALTLANAAHVKNVPGRKTDVNDATWLGDLLAHGLIRGSFVPDEQTLEQRGLLRTRKQLIRERTSHVQRLQKTLEEANIKLDSVISDIVGTSGRAMIEALVAGETDPAQLARLANRRIRASATTLQEALRGRVRNHHRFLLRLHLEQIDALDRAIAEIDREVEANLDPFRALIPVLTSIPGIGDLAARVMLAEIGTDMSRFPTAGHLVSWAGMCPKNDESAGKRHSTRMRKGAPWLKTTLFQCAWAGARAKGSYLQAQFHRQRARNGAKKAIGAVAASMLTAAYHMIKNGTFYEDRIHTPEAAL

SEQ ID NO: 138421 - protein, 379 aa, unidentified
MERIIYIGMDVHSTSYSLCALEPVFGQENKFFFETKVAAEPSNIIKYIDDIESCFANDECTFVTGYEAGCLGFSLYNYLKGRGIDCKILAPTKMSEEKGGKKVKTDKRDARTIAQNLAYGTYSAVFVPTEEDLAVRDYIRMRNDHKAAVKRIKQQINALCMRHGYIYQRTKWTAEHLKYIKGMTLSPLYREILQEYLATMEQLNNKIKAFDVRIEELSKTKRYKDNVGKLACFTGITRSRALAIIAEIGDFRRFLKPLNFAAYVGLVPGEKSSGKKQKRIAITKAGNSHIRKELIEAAQSICRGLPGYKSRALLARQQGNDTTVINYADKASARLRRRYYKLGRCGKKHNVAVTAVARELSCFICGMMNGLTEVQIKKA

SEQ ID NO: 138422 - protein, 345 aa, unidentified
MTLNLETLGIDVSDRHSSYCVVDPAGDVVEEGRLRTTESALLSRFKDFTGRVVVEAGTHSPWISRVFSHLGNEVIVANPRRVQLISQSTRKNDQADAQTLARLGRIDPKLLTPIIHRSAQAQADLGAIRSRNAMLSARTVLINHVRGSVKSVGGRIPVCDAHSFHSKAPDHIPSSLTIALSPLLEAIENLTEGIKRIERLVLEMIDMRYPEARVLQQVAGVGPLISLTFILTIGDPGRFKKSREIGPYLGLVPLQRESGASSPQLRISKTGDSYLRQMLVNGAHYILGYRGPDCDLRRWGLERASGGKNAKKRAVVAVARKLAILLHRLWVTGEVYEPLRREVAA

SEQ ID NO: 138423 - protein, 466 aa, unidentified
MKKNEVIFAGIDVSKGYADFHLMNECKTMVEKGFQLDDNQHGHQILKEIIGRYTSNGITLIFGIENTGGYEQNWVELLKKMKKSASVEVYKLNPKAVKHQIASHLKRTINDGVSAEGIAEYVANNYQQYRHKWSNSTYHDPTETSLQQLFRYINSLIKQQTAKSNQLEKLLYQNFPEMLSFCKNGKPIWLLQMLCKYPTALNVRKASVERLDAIKGITQKKAREMKELADKSVAKQSLAIDQMIIKELVETILYYQRKINTLKQLLIDSYMSPSVALLKTIKGIGDWSAAALVLLLGDISKFKDTNQLVAFYGVHPRFKQSGDGKWGVKMSKQGDKHMRALLFVAANNVIIHNPYFSKLYKKHLAAGKKPKAAKGIIMHKLLRIIYGMLKTQTAFDPKVDEINQEKSLASVNQQLPLSTAVRRYQSVALNAPISRTNHKRRRAVLEHQTSSKDVNTVSSQTALEQK

SEQ ID NO: 138424 - protein, 353 aa, unidentified
MKYVGLDWAYRSAQWCALGPGGALAGGGRIAADRDGLARLVLELGDEVTACLEMMRGALWVRDQLVDCGWQVQVADARKVKTVAPLAAKTDKVDARLLAELSRRDLVPALWLPSLDERALRERLRRRMHLVRLRTSAKARIAGLQTQWGVRVSLHRLRRPDGIALLEQAGMPAVWRRSVSECLAVIDFLDARIEPLDRELKPFAHADPRAALLDTIPGVAELLALTIAVEIGEINRFATPQKLVSYGRLAPRVHQSGQGRTRSGPLSKSGSRLLAWAAVEAAQHAWRQSNPWHQLYRDVSRRSGNPNSAKAAVARKILIAAWHMLSHNQPFNPAPRSTGGTTVPASSREALAA

SEQ ID NO: 138425 - protein, 338 aa, unidentified
MNIVFLGIDLAKNVFQICGLNQAGKPVYTKRTGRKEFLQTQANIPACLIRIEASTGAFYWQREFEKLGHNVKVIRPQYVKPFVRGQKNDCNDAQAIAVALMQPTMQFVPPKSPEQQDIQALHRARQRIVNHRTATVCQIWGLLLDREITIGAAVSRVRRAVPLILEDAENGLSVRMRRTIAELYDLFNDLEHRIHFFDKEIETVFRQSEACQCITKVKGIGPKTATAVVAAIGKGTKFKNGRHFAAWLGLVPRQHSSSDRQVLMNMTKKGDKHLRTLFIHGSRAVVRVATNKNDSHMNQWVNQLKERRGFNKTTVAVANKNARIIWSMLRNETEYQVV

SEQ ID NO: 138426 - protein, 368 aa, unidentified
MKNVTTHVGIDAHKKDLFVAMLVGTAATPVTWQLANEPNAVRRLVKKLEREAPGPVRVCYEAGPCGYALQRQLTRPRVQCQVIAPALIPRKPGERIKTNRRDARKLAELHRAGLLTEVRPPTPEDEAVRDLCRARDDAREDLQRARHRLGKLLLRRGLHFSGRNWTKAHRGWIASLAWTHAPERVVVDDYLLAIDHLEARLIELDARLAEIAETAPYREHVSWLRCFRGIDTLTAMLILAELHDFRRFQSPRALMAYLGLVPGEDSSGEKHRRGRITRTGNTLVRRVLVEAAWHYQHRPTVGVALAKRRKGQPTRVIAIADKAQQRLCRRFRRLAEQHKPAPKIAVAIARELAGFVWAALQPPATAAK

SEQ ID NO: 138427 - protein, 323 aa, unidentified
MTGTICGVDVASKSLEARIGQHGAAGSFPNNAEGIAELGAFCRSHQAELVAMEATGGYEQQAFALLSEQGLGVAILNPRAVRQFAESMGSLEKTDRIDAGMIAWYAEVKKSRPVCLAPQSQQHLRALVTRLRQLTEIRTAQLNQQRLVIDRSVQASFTKLLTFVGRQIRDLEQRITKLIEQDPLWRELNQTFRTIKGVADRTVARLMAEMPEIGTLSNKTISKLAGVAPIARDSGKHQGKRIVRGGRPAVREILFIVASVVGRYEPDFIAFQQRLRAAGKPPKVVRIALAHKLLVRLNAKAREVRQHSAALQPPSSALLLEKI

SEQ ID NO: 138428 - protein, 324 aa, unidentified
MERMVMGIDVSKEELDYCIYDGRTYRQGAMLNQVESIRQTFKSYAAVRDRLQIVMEATGTYHLKLCSLLLGRGFRLSVVNPLIIKRYSEAKMLRAKTDPVDARLISIYGYEQQPALWKPRSIQQRKMIAMLRAVEDLIQTRTDYERRLEALAQIPEAPGIIKRSYCQLIRTLNRKAEQLDQMTLAIAQSQFQEDYQRLVSIDSVGAKTAVIMLAYFGHFEEFESSKQLVSYIGTNPSPRQSGNSVQGRGCISKKGNPYIRKQLFMTSLSAVQHNPACRDFYRHLRENGKEHKVARIAVVNKLVRQIYAVVKYNRNYDPNYAFKS

SEQ ID NO: 138429 - protein, 425 aa, unidentified
MNHNRNNKINQITEDSLVIGIDIAKKKHYACALDDRGRELQRPLGFNQSLEGFESFRENVDEWLQRHKKSSVLVGFEPTGHYWMNFASFLMESDIPFVVVNPMHVKRTKEFDDNLQTKNDQKDARVIGKLMGNGHFSYPRIPDGVEAELRNGSCMRWKLKEEHARLKNQMTGWLDQYFPEFKAVIKGFGQLACAILKHTPLPQELIHQEVEELALIYKEKAGVNSPAKKTIRDMKHVAEKSIGLTKGAEMAHFEIATLVDQFLLIERRLEEIDTRLNELASQLEEYEHLISIPGIGKNTVSDLLAETGSLKQYKHPRQLIKLAGLTLRENSSGKHEGAKGISKRGRKRLRSLLYRAILPLIQNNGAFQELYQYYITRSNNPLKKKEAMVVLCGKLLKIFFGLSNHQVYFNEDRMKQDLHCLKQAA

SEQ ID NO: 138430 - protein, 416 aa, unidentified
MASTDRHVIGGVDTHADVHVAAVLDSATGRHLDTASFPTTLAGYVGLLAWLRGFGVLDRVGVESTGSWGAGLARLLAGEGVEVIEVDRPDRKARRFEGKSDPTDAQAAARAVLSGRARAIPKSHDGLVEAIRSLEVVHHGAVKDRTRATNQFKALLVTCPEALRHKLRGLSFTEQLRRARRFADGHADPVEREVRLALKELARRIGFLNDQTERLGARIGELAAQASPALIGLSGVGPQVAAQLLAAAGDNPQRMSSEAAFAKLCGACPIPASSGKTAGRHRLNRGGDRRANNALFTVVLVRMRHDPATRAYVARRTAEGKTRKEVMRCLKRFVAREVYQAIAHPPGDLPTGPELRELRQRQGFPLATVCNAVGTTPIRLSTLERGLVHDTRLARRAHSWLLEHAPDARCCPDATT

SEQ ID NO: 138431 - protein, 355 aa, unidentified
MTSAKYIGMDVHKESISIAVMNGAGKIVMECVIETKASMILQFIDGLRGDVHVTFEEGTSAAWLYDLLKPQVTKLVVCDPRKNASMREGSQSDKIDARRLAELLRLNHLNPVYHGEHGLRSLKELVRSYITITKDLGRVMSRVKAIYRSWAIACTGKQVYAPRHRAEWLGKIGEPGVRRRAEFYYQQLDALRCLRQEVRRELLAESKKHQAWKRLCQIPSMGPIRAAVLLGILQTPHRFRSKRQLWTYSGFGIETQSSADHRRVDGQLQRAKKPSSIRGLNRNCNHDRKNLFKGAAIVASSKPGPFQEFYAALLTKGMRPEMARLTLARKIATIVLMVWKRGACFDAQHLKPQTV

SEQ ID NO: 138432 - protein, 332 aa, unidentified
MYLGIDVHKRYAQVAVMDEAGKIVEEVRVENANLDDLAQRYAGAQAVLEATSNYYHIHDTLSEHLDVTVAHPKKINQIADTDKKTDRVDAKELARMLRLNSVPESYVPSEEVREARALVRGRQTLVENRTKYANKVHGLLSDHGITEDVKPLSVEGREFLRELSIPTPWDELLDSYLDLIESLTEEIQKLEETIEQRAGSLKETQLLMSIPGVSYFTALTIYAEVGDIRRFDRDKEVVSYVGLNPVIRESGDSRIEGSISKRGSGRVRWLLVQAANTAVHTCNDEYLSRFYDRLASRKNSQKAIVATARKMLVSIYHMLDRGEVYDPPGVSA

SEQ ID NO: 138433 - protein, 377 aa, unidentified
MHSENIAAYVGLDVHKETLAVAIAAPERLGEVRYYGTINNEAQAVRRLFQKLQGLYGNILSCYEAGPCGFGLYHQLTAMNIKCQVIAPSRIPKSPTDRIKNDHRDAISLARLLRAGELTPVWIPDLTHEAMRDLIRARAAAKRDSRVARQRILSMLLRTDKHYAGKHWTGKHRTWLANQSFSQPSQQIAFQHYCQSLEQIEDRILQLDQEISRLLPEWSLCNLVCQLQALKGVGQLIAITLVAELGDFSRFSNPKQLMAFLGLVPGEYSSGNSIRPRGITKVGNSELRRLLYEAAWSYRTPAKVGAWLIYYRPDSVTQYSKDIAWKAQQRLCSRYRTLTAKGKKSQVAITAVARELTGFMWDIALAAQSSFSQQKQN

SEQ ID NO: 138434 - protein, 366 aa, unidentified
MFMRPRWGKENLYPPPTLQYQPRFISQEARLGVDLAGDSFEAALAPDGAEARDWRGFERRGFALAPASPQGAKELAARARQRIGAGRCVRVVVESTGKISARFASALRGLGLPEVLVANPARIKMFAASQGVRDKTDPIDAAMIALWAAMNRPEPPEPPSETQGALREKTRLREAYVRDLNAWQNRLGEMDNEDDQNVVTLTIKHLKKQIEKLESEIQRTIKHDHGMLRQARSIKRVKGLKDVAASTITAELGDLKTYTRTEVVSAVGLYPRQFTSGKQVLRPPRLAKGPGAEVRRVLYMSATSLYRSKGAFRAWIDQREAAGWKKMKIITALMRKLLLVARAVVVNDGHYDESLIGRAPAQESSA

SEQ ID NO: 138435 - protein, 407 aa, unidentified
MQIMYGVCCGLDVHKKEITAALMTGAEEVVVKTFITATKALREMVEWLKDADCEYVAMESTGVYWKPVYNILELEGIPAMVVNASHMKAIPGRKTDVSDAEWIADLLRHGLLRASFIPEKDQREYRELMRYRSSRTEERAREINRLQKMLEGMNIKLGDFVSDVTGKSASKLLDLALTTDELSDEQIAEASHGNLKSSLDELKESLSGIITPLQRELVTIVLDVITEQTRQIAKIELLIRKYTKDAYEEAAKKLEVMPGIGTKSAQAIIAEIGIDMSRFPTASHLCAWAGGVPGNNESAGKRKNAKSRKGNKHLKKTLTQCATSAVKNKNSFFHAQHQRLVVRKGSNKATIAVAHTMLIAIYHILSGKEFKDLGADYYTQFNTEKKIQSHLKQLQKLGWTPPDPKAA

SEQ ID NO: 138436 - protein, 314 aa, unidentified
MAESIFAGIDVSKERLDVALSDGQQWSCANQEGDFQELITRLAATTTKLVVLEASGGYEGSVVASLSAAGLPVVVVNPRQVRDFAKACGRLAKTDRIDAQVLAQFAQKIQPELRPLKDEQTQELEALLQRRRQILAMLTAERQRLAIAAVNVRTDIREHINFLVRRLKDADRGLDELIRQTPLWREREELFKPVRGIGPQTLRTLCASLPELGRLNRRKIAALVGVAPYNCDSGMFAGARRCWGGRADVRTALYMAAVTAARCNPVIRAFYQRLVAAGKAKKLALTACMRKLLTILNAMVRDQTQWDETQHLTA

SEQ ID NO: 138437 - protein, 341 aa, unidentified
MEKTLSVLGIDLAKQVFHLVGMDAHGTIVVRKRLYRAQVMAFIAQLPPTLIGMEACGGAHYWARCFREHGHEVRLMALQFVTPYRKANKNDRRDAEAIAEAMTRPTMRFVPVTSVAQQDLQALHRVRERLMKARTALINETRGLRHAYGIIVPQGAAPFRQHVLEQLTTEDAKLTPHSLGLFRQLLEELDALEARVATYEAQLAQVAQTHPVCQRLMTIPGLGALTAPALVAAVSETAQCKNGRQCAAWLGLVPRQHSTGGTARLLGISQHGESSLRTLLVHGARSCLRGVGQKRDRRSQWGQSLMDRRGWNKAAVALANKQARGAWVLMGTEQVSRVAEA

SEQ ID NO: 138438 - protein, 348 aa, unidentified
MSQSKQYVGLDVSLKETSICVIDDVGKIVWRGRTESTPEAIASAVKQHAPYAVRIGLESGQLSSWLFHGLKVAGLPVICIDARHAKAALSLKVNKTDANDAFGLAQIMRVGWYREVTVKGLDCQAVRALLVARAQIVSQITTTKNCVRGILKTFGRVLPKGLRSQFPGRVRAAIDGDPILGAIIEPTLRVLEAMRAQLLVYNKAVIQRARGDDTARQLMSAPGVGTVVALAYMTGVEDPARFKRSSSVAAYFGMTPRRYQSGEVDHAGRISKCGDGMVRGLLFESAKVLLSRSARPSALKTWGEALGKRIGPKKATMAVARKLAVILHRMWTTGTTFQWNAEAASPAA

SEQ ID NO: 138439 - protein, 322 aa, unidentified
MQGKISPERSAAPVYVGIDVCKAWLDVYLHSVGRPFRVANSREGLKRLKRELAPHAVALIVLEATGKYHREAHRSLHASGFVVAVVNPLRSRLFAQAAGQLAKTDRLDARMLALMAESLAPKATPPAPETLEELAELVRARTAAVADLTGLTNQMGESRTAILKRELGRRIKATRASIARLEAEIIRRIAADAALARRFAILGSIKGIGPAAAAALLVGLSELGLCSGRQAALLAGLAPLACDTGNTRGERHIKGGRGHVRTALYMAALAAVRCNPDLSAFYRRLREKGKRFKVAITAVMRKLVVLANALIRQDRLWQPIHA

SEQ ID NO: 138440 - protein, 344 aa, unidentified
MKHYAGLDVSVKETSVCVIDETGKTIREVKVASEPEAILSVLVDEALTIGRIGLEAGPLSQWLYSGLAETGLPVICVETRHMKAALSAQLNKSDRNDARGIAHMMRVGLYRPVHVKTLASQKRRMLLTSRQLLLAKALDIENDLRGTLRNFGLKVGVVGTAKFEARIHELVADHSDLAAITEPLLIARRALREQLGVLHRRLLAVVRQDEVCRRLMTVPGVGPVVALTFRATVDVPARFKNSKAVGAVFGLTPRRHQSGEIDRMGSISKCGDAIVRTMLFEAAQVMLTRTIKWSWLKAWGMKIARHRGMRRAIVAVARRMAVIMHRMWADGTEFRWSNTNAATA

SEQ ID NO: 138441 - protein, 388 aa, unidentified
MEYFAGLDVSMEETHVCVMSREGVIAHEEKTVTTPEAIAASLAKAPACRLVVFETGRMAPMLYHGLIARNVPVVCIESRHAYLALKSLATHKTDRNDARGLAHLSRTGFFKPVHVKSLSAHAIRALIIARKKLVGQRVMLENQIRGLAVVFGIRLPRALTAGFVKQALEASEGVIGLAAAMRGLVEARSTVLSAITAIDREMKRLARASEACRRLMTIPGVGPITALAFCAAVDVPERFKRSREIGAYFGLVPRRHQSGEIDYSGSISKCGDRRVRTLLYEAANVMLTRYKGPLKLKEWALAIGKRSTMRKARIALARRLAIVMHAGPRSDRRQSPAPTHLTKAARELSDSQNADVPHTQKSTRSLARSSANGARNSGPRNSLSLSNY

SEQ ID NO: 138442 - protein, 351 aa, unidentified
MWIIGVDYHPSVQQIAFVNTGTGECGERRLSHSDGEAEKFYRELKAAGWKVGVGMEATGHARWFERLLAELGFELWIGDPSQIKAKRVRKQKTDRLDAALLLQLLLEDRFPRVWVPSAENRDLRQLLWHRHRLVQMRTRIMNQLQAVAMNEGVRRKQALWSKSGRARLESLPLAPWAARRRHDLLELLDRLNPTIEELSAAVEQEAKQRPEVLRLMTHPGVGPITALAFVLIIDSAERFACGKQIASYVGLIPCEDSSADRRQLGHITKQGNTLLRFLLVEAAQAVVRRDPDWRRRYTHLAMRRERPIAKVAMARKLSVRLYWMMRKEWNYERLKKFGSYAGESEHVHGVQ

SEQ ID NO: 138443 - protein, 420 aa, unidentified
MFMDIRSPFPYQAAVGIDWADQKHDVFVRFANGDSYRRKIDSRPEALQEWLLELRSACAEGKIAIALEQRRGALFYHLCTHLNWIDLYPINPRSLASFRLTFFSSRAKDDPIDSQLLEELVRTHSDRLRPYQPESTTERKLDQYCRHRRSLLDLATKTELKLISTLKQYFPLAVNLFAAVGMKSDIALSFLSRWPTLNELQRAKAHTVRSFFYAHNSRSRSRIEKRLQQIGQAHNVTDDLALIEPLVLTTKCLADQLRQFNQVIKEFDHKIKELFKSHPDHFLFENFPGAGEQLAPRLLSVFGSDRARWADATDIQKYSGIAPVIERSGKSVWIHRRLSRPKFICQTFHEFAQQSVQHSSWAKQFYQRQRNSGKSHHSAIRALAFKWIRIIYACWKANKPYDESLYLLALAGKNTPHSST

SEQ ID NO: 138444 - protein, 322 aa, unidentified
MHPFHLGIDVAKAKLDCALRLTNGKFRHKVVENTPAGFRALDNWLAKEGAQALHVCMEATGIYWEGIAEHLAGQPALTVSVINPLQVKAFGESQLIRTKTDKVDAKLIAHFCAERTPEAWQAPSPAEQALRALVRRLEALQTMRTQESNRLELARPTVAEGIAKHLKWLDEEIARLKKAIRDHIDNDPTLREKYRLLESVPGLGERTAATLLAFMADPARFDNARQAVAFAGLDPRQHESGSSVRGKPRLSKIGHTLLRKALYMPAMVTLYRTEWGKGFQERLAARGKPPKLIIGAMMRKLIHVAFGVLKSGMPFQPALHGT

SEQ ID NO: 138445 - protein, 363 aa, unidentified
MRFYKNQHQFYIGIDLHARTMYVCVINNSGETVFHKNMECSRDNLELVTNTFGKDMVVGVECIFTWYWVADFCAERGIDFALGHAYYMKSIHGGKTKSDKLDSAKIANMLRGGMFPIAYAYPKEKRAVRDLLRRRLFFVRQRAELSVHLQNTNHQYNINEPLASSRMRSEVYRNTIPDKFNDPATLKMVNADLAMFRSYNDIITKHEFQIEDSMEIQDPVSYSIINSVPGLGFILSLTILYEIDDIHRFSDVGKFISYCRLVKCSHESAGKREKGGHNKIGNVHLKWAFSEGAVLFLRNNERGQRWHDRLVQRYGKAKAMSIIAQKLGRTVYYMLRRKEAFKPDLFYGDKKIENKDSGGEHFA

SEQ ID NO: 138446 - protein, 415 aa, unidentified
MQALYRCIAGMDVHRMLYVITVLVELADGAEEKHQHSFGGFKRDRRALVAWLVELGVERVVMESTGIYWKSIYSTLEKAGIPAHVVNARHVKNVPGRKTDMSDSEWLARLGRYGLVKPSFIPPEDLRELRVVSRYRDKVAQTLAGEKNRLHKVLDDAGIKLGAVVSDLNGVSAQAMIDGLIDGTPIEQLPDLAKGTLRAKHELLDLSLEGELTPRHLFILKNIREHIRYLESELASLDAYLIDAMAPYADYWRFLQTLPGLDQISAAMILVEIGTDLKAFDNVRHFASWAALCPGNHESAGKRKTGRIRKGNHMIRHLLCEAANAARRTNSVFRSFYQSLVPRKGHKKAIVAVAHKLLRTIYILFTRRQAYRDSGIDYQAIVVNRNAPRWIQALKKYGFWPKIGTLNAPIAAPAH

SEQ ID NO: 138447 - protein, 364 aa, unidentified
MKRKVYVGMDVHKETIQIAILPSNTKALVKEQQIKHEEGQIKKFIQKLKSEGTEIHCCYEAGVTGYPLYRYLKILGVNCTIVAPGKIPRQNSDKIKTDKRDAIKLARLLRSGELESIHVPSEEDEAVRDYLRSRDSLRLDLGRNRQRLMKFLLRKGITYSTTKYWTASHYKWLNNLHFENEILQATFNDYYSRVRVQEENLKAMDQKIREIAESEPYREKVGILRCFRGVDYLTAMFLLSEVNDFKRFKTAGSFMSFLGLVPGEYSSGSKRKQTGITKTGSPRLRRILVEAAWQHRFPGTGSKVVVARRVGQSALVVSLAEKASLRLHKKFKSMQLRGKTPQVMITAVSRELSGFLWAAMNLVA

SEQ ID NO: 138448 - protein, 405 aa, unidentified
MTVYIGIDWSEQKHDICYVKEDGQVLRTLQIKHSMEGFHDLDKRRQELGIEARDCVVGLETAHNQLADYLWDCGYPDIYILPPKAVKSAQGRFRQSGAKDDPWDARLIADMLRTDQKRYSLWRPDSLLTRQIRSSVRMVLHLTRELVRTKNRLRAVLLRYYPAATNLFSRLDSPISLAFLRQYPTPQQAASLNFEEFSQFLRSHHHTQRAGWVRSFNQLKEPYPLSDPQIGAIYMPQAMTLVELLSVLVRHKELWLKDPTRLYENHPDRHIYASLPAAGTLLEPALLAKLGDDRQRFPSPKVLQAVAGTSPVTNRSGKRKTVYFRRSCDHEFRYIVQQWAKLSLDASPWAEAYFRSVLPNCKTTNDAIRRLANRWLEILWRLWQDRKPYDQLLHLSMHTARSSSR

SEQ ID NO: 138449 - protein, 465 aa, unidentified
MRTLSRRPRVRSSQGDMRPCEGMRTVNPHAAGVARGAHESMAGVPDGDDQQLVRAVGTSTADLASLADWLIDRGIQTVAMASTGVYWIPLFETLEARGIQGCLISAQAVKHVPGRKSDVLDCQWIQTLHSSGLLKASFRPDAELVALRTLLRHRAQLIEHRAPHVLHMQQALLQMNIQLSQALSDVTGVTGQQIIRAIVAGERDPQHLAALRNERCKKEAHEIAMALTGTWREEHLFGLPQTLALFDCSTAQISACDAQIERAFSVITPRFAPVPRSPFPAAPIPPPRRTPHSHRKNAPAVNTRVHILRITGVDLVAVHGISDSLAQTMLAEIGTDMSTWPDDKHCCSWLGLAPKNDLSGGTVLRSRTMNNRHRAAQAFRMAAQAVLRADCACGAFSRRLKGRLGPAQALVATAHTIARTVYHMLKDRVPYHDIGAAEYNKRFRERELQYLQKKAAKLGSTLSLA

SEQ ID NO: 138450 - protein, 350 aa, unidentified
MTIVGGFDVHRKQITFDYLDTDTGLVRCGQIRPATRRTLRGWLDEHCPGGDAEIAVEGCTGWRYVVEELAAAGATAHLADPAETAGLRGPKKRAKTDRADARLLRTLLLQGRLPESWIPPAHVLEVRTLGRLYCALTEERRAWRQRIHAQLFHQGCPPITALLTEAGRHALSVAELSATGRQYVDTALRRIDELTAEIDPLRTQLVNFARRQTGCRALQARHYGVGWLCAAIIWAEIGDARRFRSSDQLVRFAGIDVTVHSTDGKRSPGHLSRQGSPELRWAAFEAATCAARRGSPDYGYYRRLAAVPHNGKNPTLAVERKILRRCYHTLRELGDAALAMPAAQSQEVAA

SEQ ID NO: 138451 - protein, 363 aa, unidentified
MKIMTGIDLHSNNALCGLMDESGQRLVHKKLPCELSAVLQLLDPYKERIATVAIESTYNWYWLADGLRDHGYHVVLANPARMKPYDGLKHTDDVSDAFFLTELLRLNILPTGHLYDRKTRPVRDLLRRRLLLVHQRTSLILSFKSLNERTLGQRVALSRVKAMNAAEARACFTDPADQLLSGTEIELMSHLTQAINQIEAHVLSVAGKWSTYQRLQTLPGIGKILGLTIALETGDAKRFAGAGNFASYCRCVKSLRQSNGKKKGENNRKCGNTYLAWAFVEAAHFACRYDDQCRRFYDRKKQQTHPVIATKALACKLAKAAWHVMAQDAPYDAERVFGPGKKTDLGETGREPAKGSGPTSQPD

SEQ ID NO: 138452 - protein, 335 aa, unidentified
MKQPPKVLAGLDVGATELVVAILRDGQRESPCTLPNTPAGHRRLLKLLTRRKATARVCLEATGVYSLRLALTLQRAERLEAMVVNPRAIKDFQRARLTRAKTDRLDALGILEFLQRMEFVAWRPPTDAVLALQQLGRRLVQLRGELTREEARLHAIAYTPDRDGLIAADLAANIRHLKKRIKALQQAAAELAAREPELASQVERLCSVPGIGKVSALRLLGELLVLPRELKAKQWVAHAGLDPRPRQSGTKDAPRHISRTGNRHLRLALFMPALVAIQRSPQIQATYEALLARGKKKKVAIIAIMRRMLHAIWGMLHHQQDFNPQLFHAAPLPNS

SEQ ID NO: 138453 - protein, 346 aa, unidentified
MEQYAGIDVSLEYSSICIVDARGKVLKEAKAASEPEALIAWFAAQEVAMARIGLEAGPLSQWLFAEMKAAGLAVELIETRHVRDAFKAMPVKTDRKDARGIAQLMRLGWFRPVHCKSLPAQEVRALLTTRKLLQAKRHDVEMSLRGVLRGFGLKVGPTTPKTFEGRVRDLVEHHATLRMIAEALLNARTALDQEFKAIQKRLYVIARGNPPTRRLMTTPGVGAIVALTFSSAIDDPARFRSSRMVGAHFGLTPRKYQSGETDVTGRISKIGDHGVRVALYEAANVILTRAVKGSDLKSWALRVAKRAGMKKAKVALARKLAVVLHRMLASGANFIAKAPPGAATAA

SEQ ID NO: 138454 - protein, 442 aa, unidentified
MVRTKVAGIDLGSGSHWVCAPTADGSGREIADFGGTTPELIRMAEWLKVRQVESVAMESTGVYWIAPHEILEAQGLAVLLVDTRQLARVPGRDKKTDPTDCEWIQRLHSCGLLQGSFRPQEAICMLRTLVRDKATLVAESSDWVRRMQKSLDQMNVRVHRAVSSIEGTTGMAILRAIAGGERDARKLARLRDPHCRKSEEEITEQLSGHWREDHLFSLQQALKMYDAIQARIAAYEKEILRKLGEMERPEQHGKSAPALRNANKARMIRNRGQEAKRQALFRMSGVDATQIDAIGTETVEVVLSEYGPDLSRFPDEKHFVSHATLAPHVSKSGGKPVKKKKRNSASTRVAGALRMAALALRHSDTALGAYYRHTAQRIGAEVAVFASARKIATLIYRLLRWGQPYLDEGSKACEDRYYKQRIKSLLSKAKQLGYQMTPITAS

SEQ ID NO: 138455 - protein, 382 aa, unidentified
MQASTVDTPTAGHCGTIFVAIELSQKTWLVTLHSPDRDRISRRTLEGGDDAGLLALLEGVRTRVVGKLGTVPRVVTCYEAGYDGFWLHRLLTAAGITNLVFDPASIAVEQRSRRAKTDRIDGELLLRTLMAHLRGEPRVVRIVRVPSVEQEDVRRASRERDRLVKEQTGHTNRIKALLRLMGMAVSNPRRSDWLSWLAQQRDRQSRPVPPHLMSEVTREHARLMLVREQLATLEQAPTAAVAAAAAPMAERRNLLLRLKGLGPVFATTLTNEAFYKDFRNRREVASYFGLTPSPWRSGGIDREQGISKAGNPRARLKAVELAWLWLRHQPDSALSRWFAARTANAGKRARRIAIIALARKLIVALWRYLTTGLVPEQAVMKA

SEQ ID NO: 138456 - protein, 411 aa, unidentified
MSETRFAARIGLDWADEKHDYCLQEAMAQTVEYGTFKHNPAAIDEWVSALQLRFDSQPVAICLELKSGPIVSCLSKHNFISLYFIPPQALANYRKVFTHSGAKDDPTDAFLQLDYLTKHSASLRKVSFDTNNTRILETLTTHRKSFIKEKVKLTNRITGALKAYYPLVLELFNDLDTFIFCDFIERWPNLSKLKIVRHDTLDNFFKTHRCGREHLIKQRIELIKVANHLTKDEAIINPYQRYTLALISSLRPMLNTIKQYDTEIFTLFEQHEDKELFNSFPGAGKTLAPSLLVAFGTDRSAFSSADEVNRYVGIAPVVVRSGKSTWTHWRYKCSKLLRQTFIDWANQTIRYSFWAREFYDKKRKSGMSHQATIRALAFKWIRVMFRCWINRTAYNEAKYLFTLSKRNKKMA

SEQ ID NO: 138457 - protein, 335 aa, unidentified
MRGRILASVGSSRLYGEKVLMTTPNEAYVGIDVGKTWLDVALWSEDAVWRVTNDEVGIAEIMERILEQEPQLIAVEATGGYEQPVVQAMLLKGMPVAVANPTRVRALAKATGKLAKTDVIDARLIAEYAFKIQPGTMSPKEINEIRLKALVTRREQLVEMRTAEQNRLGSTHDSMKAAICEHIDWMGARIKELEAEISKLVDSLPEWKAQVNRLESIPGVGMITAVTVLAEMPELGQLDRQKVAALAGLAPFNKDSGQKRGQRRIFGGRKGIRRVLYMACLSAIKCNPIIRSMYHRLMKKGKLFKVAITACMRKMLTIMNAMLRDHANWRTPEPI

SEQ ID NO: 138458 - protein, 415 aa, unidentified
MEIIYPRVAGIDVGKREVAVAVRTPGEGPGQRRQQIRKYRTYYQVLREMVAWLVEQGVTHVTMEATGVYWKPVFHALCEAEQIEVLLVNARHVKNVPGRKTDVKDSAWLAQLLECGLLRGSFIPPKEIAAIRELTRYRKKLIEERTRELQRLSSVLEDGGIKIDSVASSITTLSARDMIEALIAGERDPRVLAELARGRMRNKIPDLTMACAGRFGDHHALLARMHTDQIDHLATMIGVLDHRIEEVTDPFAEQLKLLQSIPGIGERAAQVIISEIGADMARFPTAAHLASWAGLCPGNNESAGKHKTGRTRKGNAEVRTILTECAWSAGRTGTYVGAQFRRLHRRFGKMGGGKAAIAVAHTLIVIIWHVLHDRASYLDMGSDYFTRHDNPEARKRRLVHDLQSMGYEVTITPAA

SEQ ID NO: 138459 - protein, 349 aa, unidentified
MLYAGLDLSRKRLDFHLLDAEGAKVEVGAAPPDADGLHGLSERLARHSEPIRAAIESMNGARFVHDRLELYGWQVEIADAQKVKGLAPLACKTDRIDAWVLAELARRDLVPAIWLPDPRVRAERERARWRLHLVRHRSSLKQRVHAVLLTHGKPCPVSDLFGVRGRQLLARLGLPEPWQGTIDASLRLIDELDREISECERELRRLGADHRYVPLLCTVPGISWVLAYTIAAELGDIGRFPSPRKLAGYSGLCPRVYQSGERDLRGPLNKQGPRYLRWALVEAPPTPAPTPSTASAISKRRRASADSVAPRSLRSTSLAASQKRSGTCSPATNPSLPKAPPTPWPPDGP

SEQ ID NO: 138460 - protein, 396 aa, unidentified
MLKLFVGVDVSKDSFSATGIDVNGDVRFSISAAMDKGGFSELMRAITSNCKDFSSVMAGMESTGCYHINLFSFLSDKDVNVVVINPLLISNFAKLSLRKTKTDKKDSLTIAKFILIHKDSIEQFSISQDTKDFRDIARERESISHLIASTKNEIKRILQTTFPELESICNVFTTTMLLFLKDFPSARFIRATKAEVVAEALERCGRGRKVSISADDIIKAAKTSIASNSLAKELILPQKIFTLLHLMEQLDNISGILSDLCKSIAIEEMEIITSIDGIGDATGAAFLAEIGDINNFPSHKSLIAYAGIDPTVFQSGKFEGTSRISKRGNRHLRRIVYLMTVGVIRCNAFFKAYFLKRKQDGLPFRKAVLATAHKLTRTIFAMLSHKTCFRVKENSL

SEQ ID NO: 138461 - protein, 412 aa, unidentified
MVKAKSKGKRSASGIVDYAPRGAQSHMQKAPRGVIAATVQGRQTMEDFITSFVGLDVHKDSIAMAVAEAGRDEPRFLGTVSPLGTALHKALAKLGKPATLMIVYEAGPSGYGLWRDLQARGYRSEVIAPSKIARPPGDRVKTDRRDALMLARLARSGALVSVTVPDERDEALRDLSRARSDAVRARLKARQQLKALLLRHGHRYSGKSSWTLAHERYLAEVKFLHPAQHIAFTEYRSAVRDAHERVERFSDALRAQLETWRMRPVVEALMSLRGIDVVAAITLVAELGDIRRFTHPRELMSFLGLVPSEHSSGNSRRLGAITKCGNAHARRVLVEAAWNYRFPARISRSLQARQEQQPKPVRDIAWRAQLRLSKRYHRLLARQLPKNKVCVAIARELTGFVWDIARQVEPIA

SEQ ID NO: 138462 - protein, 404 aa, unidentified
MKFCGIDWANDHHDALSIDEHGRQLGRIRVAHSPEGLSQLDGYLEQIAGPGGKDQVACIVETTHGWLIAHLLEQGWAVYPVNPRTVERRRAPSGAKTDLIDAYLLAKTGRADFADLRRLNPDSEQIQELKTLTRDQDGLVQMQTRLVNQLTACLKAYYPVVLELFGKIQQPSTLAFLRAYPTLQAARSASVEELAATLKQSRYAGARQKAQQIATHLQLPCLQASEVTTRTKSRLMLALLDQLEPLLKQIAEYDKEIERLFLRHEDLELFQALPGAGLRLAPRLLAELGDDRSRYDSAASVQALAGTSPVLFQSGTYQKAHRRLGCIKPWRNALQQFAWQSTHQEAWAKEYYQRKRAEGKSHTVALRALANVWARILYAVWKTKERYQTTTFEQAQQAHAQRGA

SEQ ID NO: 138463 - protein, 351 aa, unidentified
MQYYVGVDNHKKFSYMSVMDEKGIVVKEGRVVNTKEAVNKFLGKEYTKDTSAVLEAGRNWTVMYDWLEEELDEVKLAHPLKVKAIAEAKIKTDKIDAKTLAHLLRCDLVPEAYVCDKDTRTVKNILRQRMFLVKLATMVKNRIHLIVDRHPEVKNQIDLQDLFGKQGMEWLSVVVLPKDDRRILDEELDLLKYLNEKIDSSNHWITNIGKDDPDVKLLMTIPGIGKFFSLLIANEIDDITRFRDKNKLASYAGLIPSVHASADKVFHGRIVRHGNKYLRWALIEAVWPAIRKDLSLREYYESLKARKGANQAKVATARRLSILVYRVLSQHRSYIVNYSGCPHITLAEAAV

SEQ ID NO: 138464 - protein, 341 aa, unidentified
MGEVSTIGLDLAKTVFQAHGADASGGVVFRKKLRRDKLLEFFAGQPRCVVAMEACASAHYWAREIGALGHETRLIPPAYVKPFVKRQKNDMADAEAICEAAQRPTMRFVKPKSAEAQGAAVVFRTRDLLVRQRTQLINALRGHLMEFGFIAQQGAGHVSKLIELVADPSSELPAEARPVLAVIADSLQAIQARIRALDREIAARAKADPVVKRLMTVPGIGPVVATAMVALAPDASTFRRGRDFAAWLGLTPRQHSSGGKERLGRTTKMGERSLRRLLILGASSAAKAAARDGSRASPWLVGMLARKPRMLVTVALANKMARIIWALMAHGGSYRAPVAAV

SEQ ID NO: 138465 - protein, 342 aa, unidentified
MGFYCGIDLHARVSQVAVMNPQGEVVLNRQVPNVLADVLALLAPYGPGIHIAVESTFNWYWLVDGLQAAGHDVHLGHPLKLALITKAKVKTDRKDAVCLADRLRKDDFPEAYIYPKATRPLRDLVRQRGRLVVARAREYAGVRLRLYREGILDHSRNSAKTVTTEELDALLHHPHVRPLVHQEQARIQLLSAQILQLEGAMLAALAGEADYQRLRTLPGVGQALGAVILLETGAVTRFASARHYASYCRLIPGCAESAGKVRGGRGRKQGNAYLKAAYTQAATHAVRTDAKVRSWYDRLKARHPGRGSVPIATNVIGHKLALAAYSILKEGTEYHEHLLFGN

SEQ ID NO: 138466 - protein, 430 aa, unidentified
MKSNTQNAKIEAITEKTLVLGIDVGSETHYARAFDYRGIEYSKKPFKFSNTEAGFVTFKEWILDLKERHEKDKVVPGMEPTGHYWFNLGKFLQDNEMKPVLVNPHHVKKSKELDDNNPTKNDRKDPKVIAGLVREGRYMIPYLPDGVYADLRTASNIRFQLQAELTRIQNRISRWFNIYFPEYKTVYGKPDAKSGMLILKAAPLPEDILTLGIDGVNQIWRDAKLRAVGKARAKTLIEAAGHSVGSKEGAVSARMEIRMLLEDYESRNTRLQEVMVLIEELVKQIPMAEKLLEIKGVGIRTVSGFLAEVGDISRFNNPKELQKLAGLALVENSSGKHKGETTISRRGRKRLRYLLFEVAMSLVAKNPEFRELHNYYTTRRLNPLKKMQSLMAIAAKLIRVFYAMLTKGVDYDPKKMVSDIKRPAVYLQAA

SEQ ID NO: 138467 - protein, 388 aa, unidentified
MGEVALLPQEFLHTEVGLEQMAYAILALGEDTRVVMEATGRYHEPVAAALHEYGIYVCVLNPLYIKQSGGGSIRKVKSDKADAMKIAKYGLDNWVDLREYTPMDTVRQQLKLCSRQYNLYMKTVVSLQNNLISLTDKTFPGVNELFSSPERADGHQKWVDFVMTFWHCDCICRVSEKVFTERYQKWCKRKGYHCSVEKALDIYASSCGHFTTLPKNDNTKLLIVTAAQQLLAGKTTLAALRAEMTRLASQLPEYETVRAMYGVGETTAAQLMAEIGDVRRFPHRSSIVGFAGIDPAVNQSGKHETQSTSTTKRGSPHLRKTLYQIVCTYLRKAPADEPVYQFLDKKRAEGKPYFVYMTAAQNKFLRIYYARVKECLETFDAHQKNTQG

SEQ ID NO: 138468 - protein, 327 aa, unidentified
MEKANIIGLDLAKRSFQAHGARADGGVAFGKKLSREKVLAFLAEQSRCIVAMEACGSAHYRGRAIGGLGHEVRLIPPAYVKAFVKRQKNDAVDAEAIAEAAGRPAMRFVTVKTEEQQARAMLFRTRDLLVRQRTQLINALRGHLAEHGVVAQQGPANVKVLSEAIEETTTSLPLLVVELSRVFLDQIDGLSTKIAELEKATVHEAARGATTRRLQTMPGVGPITAMAIETFAPPMGVFKRGRDFAAWLGLAPRQHSTGGKQVLGRISKMGQRDIRRLLIMGAMTIVRWACRKGAPDGTWLHACWRASRACWWRSRSPTRWPVQYGPC

SEQ ID NO: 138469 - protein, 319 aa, unidentified
MFVGIDVAKAELVVGVRPSGEQWTVANDERGVRTLAERLRRESPELIVLEATGGYELLCVAALASVALPVVVANPRQVRDFAKATGQLAKTDRIDADILALFAERVRPAVRALPDSEAQELDALLARRRQLLEMLGAERNRLGQVFGRGKQLVRKSLRTHIAYLERELRVTDTDLGDMVRRSAAWRERDDLLQSVPGVGPVLSLTLLAELPELGRLSRREIAKLVGVAPLSRDSGTMRGRRFVQGGRASVRAVLYMGALVATKCNAVIRTFYLRLLAAGKPKKLALVACMRKLLTILNTMIRTGQPWSADYSTSILVTA

SEQ ID NO: 138470 - protein, 359 aa, unidentified
MKTILNHALKTSTPPTVETQVRIQQLKLGVDWHADHFRVARMCDGQSPQPAQRFTPASFLPFVQKQLTLADQVFVVYEAGPGGFHLHRQLTALGVTAFVVHPQKLDPQHKGVVTDKTDARELTLNLDRYLRGNLRALSVVRVPTPQEEQRRVLSRQREQLRRERQRLAAQGRSLCLTQGIGLRGEWWKAPLTLPDWLEARLAVWRQLITAVETLLETLTQQVEALAPKERPKGLGPLTLGLLIAELCDWSRFKNRKQIGSYTGLCGGVSSSGQSHCDLSITKAGNARVRWALIELAWRMVLYQPQCKAVQRWRHLLLNPKAATRQKKRALVALARQLAVDIWRWQTGKATPEQLGWVMV

SEQ ID NO: 138471 - protein, 351 aa, unidentified
MIYVGLDLHKCYVTACALDALGQGLAEERRLPPDLAVVLLWLGRLTGPVTVVLEATLYWAWLERHLTAHGYTVRVAHPYQVKLIWQARTKTDPIDARKLAELARVHLLPAIWIPDASTRAQRQLLRGRAFLVRQRTVLKNRIHAYLTAENLRSPAADLYGRAGRAWLATVTLPPVVRRSVDLLLANLDVLTTQIGALDKYLQRHVRQDAVAQRLQTIPGVGAFGALLLQAEIGPIARFRSAQELAAYAGLVPSTHSSGGKTHHGSVGHGSPWLKWILVEILQSLKLAPSPVGAHYQKLLRAKGKPKATIAAARKFCTYLYWMLKEEWTYSEWLRQHDRPEVRPVQPLGSVA

SEQ ID NO: 138472 - protein, 424 aa, unidentified
MKVTYKTCCGVDVHKSFLVATIITTTGGIEPSYQKKRYSTFNNSILEFKQWLLDNDCHDLCMESTGKYWIPVFNLLEDEINVTIANPKWVKAVKGNKDDTKDSKWIGDLFRLGLVKGSYIPCKKIRILREFTRYRYKIVSCRSSEKNRYQNALTVCNVALDSVVSDIFGKSSTSIIDYLLEQSGNSINHKEIASKLLKSLKSKEDAVIESIEGYQMTDSQKYRMHLVRAHMDYITAEINDVDREIEKLISSDPDFENAIQFLMTIPGVKRDSAITVISEIGIDMTQFSSSKRLCCWAGLTPGSNESGGKKKSVRVTRAGVYLKPALVQCAHAAVKSEKFPYYKKKYESLMKRRGKKRAIVAIARMILTAIYQMLSTGESWNPSDLYKIDIPEALLEKQKAKAIKQAMKLLQREGLYPPPEPIAS

SEQ ID NO: 138473 - protein, 353 aa, unidentified
MITIGVDAHKGVHVALALNEAGQELGQWQGLNSAAGWQAISEWAASLGSPRQWGIEGAWGYGRNLAQHLVAVGETVYEVNPRWTAMGRRRARKPGKTDRLDARAVALLVRQEASTLPRVHAEDDTALLDLLTSEREAAIAESIRLRNQIHALLLQTDPEYRVYLPTLKSQAALDALENYAAIGSNPLHTQRAAAIRRLTQRLRLALSQAEELAEQIRDLAARRFSPLTNICGINLVTAGTLAGILGPGDRFATDAQLAAYAGVAPLEASSAGLVRHRLNRGGNRRLNAVLYRIVLTQAHHLPAARAYIDRRLTEGKTRREAHRALRRFVVRAIWRLWQECQPAQTTTLVEKAA

SEQ ID NO: 138474 - protein, 314 aa, unidentified
MYQNFIGIDIGKFEFHVAIDDRNKVDVYSNTPEGFEKLYSTEKSILETGLIILETTGGYEMALVRFLQGKGCALHRANTRKVKNFIRSYGQLGKSDNIDAQALSQYGKERHSNLPLFIEHSDKLLLQLIRRRIELKGMLVQEKNRLKAPEQSALISSYEKIRDVIKEEIACIEEKIEEIFKQDDSLNEKREVLKTIPGVGDITATQLLMLMPELGKINRKQIASLGGVAPHPNESGKKVGYRYTRGGRHEVKPVLFMAAMSAARSKSQLGSKYNSFVDNGKKKMVAITAIMRKILVIANAKMRDYYINNHAEVA

SEQ ID NO: 138475 - protein, 445 aa, unidentified
MSNAVAAAPSEPEWAAFAAIDWADQKNFWRLLPAGGRKSEAGELDSTPEAVEVWAANLQQRFGGRPIAVILEQTRGPLVYMLTKYPHLVLFPVHPTTAARYRETFAPSGAKSDPSDTDSLLDLLLRHRERLRPLRPDTVETRLLHFLVEERRQTVDEKTRANLRLTDCLKLYFPQVLRWFDDVTSPLVGDLLERWPTLEQLQRVHPGTLRRFFHDHNCRSEEKNAERMAAIQQATSSTQDQAVREACVLIAHSLVAMLATLRAQINVFDKRIAELVADHPDGALFRSLPGAGDALVPRMIVAFGTQRDRYQSAYEMQCYSGIAPVTEASGNSQWVHFRFICPKFLRQTFHEFAGCSIPQSEWAHAYYDHLRHDKNKSHQVAVRSLAFKWLRIIYRCWKDGKPYDEAIYMQSLRRRGSLLAGVLGTPTRVGWKSVAGFQKLSENNA

SEQ ID NO: 138476 - protein, 338 aa, unidentified
MIVIGVDVHKHSLTAVAVDEAGRQLDELTLDHADARLFAWAAGLSELRLWAVEDCRHVTRALERQLVVAGEELVRVPPKLTGAARAGGRARGKSDPIDALAVARVALREPGLDRPRPGEERYRDLKLLVIHRDDLVDERRRCQQRLRWHLHQLDPGYRVPAGALDRAVWLDRVGRWLARRPTEVQIRVARDLVARCRSLSRSIAELDKDLAAMSAQTAPTLLELPGCGGLTAAKLLAEIGPIERFASDAQLARHGGVAPLEASSGRTQRHRLDRGGNRQLNCALHRIAITQARVHPPARAYLERKKAEGKSNREAIRCLKRQLARTVYTTLKNEPLLT

SEQ ID NO: 138477 - protein, 348 aa, unidentified
MEEDNRCALLEGKVDAVIGVDTHRDAHAAAILDRNGGLVAQLEVPSSQDGYEMLLSLVAERAPGRRCWALEGTGCYGAGLASFLADQGEWVVEIDRPKRPRGRNGAKSDALDAIRAGREALSREQLASPRQRGHREALRVLQLTRSGAVKVAADARRQLKALLVTAPEPLRAALRGGTWLTQARACAALQAEPAGSVEDRATVQALRLTAQRALSAYAEAEALEKELRGLVKAMAPVLLAQPGVGPVTAAQVLISWSHPGRLRSEAAFAMLAGVAPIEASSGQVVRHRLNRGGDRQLNRALHTIVMIRQRYHQATKTYTTRRTAEGKSEREVRRCLTRTVARQLLRLL

SEQ ID NO: 138478 - protein, 310 aa, unidentified
MEHVFVGIDVSKDRLDVHVRPNGAAFAVTRDGRGLEELIERLRALTPTLIAVEATGGYETIVAAAIAGASLPLAVINPAQVRHFAQALGKRAKTDPIDAAVIARFAEAARPEPRSIPDEAARLLGELVARRRQITEMLVAERQRETRSGNVRVRKSLARHIKVLEKELQAISDDIGSLVRGSPVWRAHEDLMVSVPGVADKTSSSLLAEVPELGRLTRRHIASLVGVAPFTRQSGRWKGKSMIAGGRAAARTAIYMAALSASQHNPVLKAFYQRLLAAGKPKMVALIAVARKLLTILNAMIRDQTPWQHA

SEQ ID NO: 138479 - protein, 358 aa, unidentified
MTDGSKEQSNMTAGLDIGDKYSYLCLIDTQSGEVMEEGRLRTTPEAFRRRFASERPLRIAIEAGTHSPWASRVLEECGHEVLVANARKIRLIYANKRKTDEIDAENLARLARLDPKLLYPLKHRGEGSQAHMALIRSREALVSTRTQLVNHVRGAVKSFGACLPKCPARSFHKRASEHIPEALLPALGPILEQIGSLTERIRDYDRKLETISKESYPETDLLRQVEGIGPLTALTFVLTLEDPYRFEKSRSVGAYLGLVPAADQSGDRDPQKRISKEGDEMLRKLLVGSAHYILGPFGSDSDLRRHGEKIAPRGGKNAKKRAAVAVARKLSVLLHSLWVSGEIYEPLRNAHRSRVGAA

SEQ ID NO: 138480 - protein, 405 aa, unidentified
MYLGIDWSQAKHDACFLTDTGSIAAQLTFAHHPDGFAKLDALRRQLGIPLDVCCVGLETAHSLLIDWLWTRGYTHLFVIPPNAVKSARQRYRQTGARTDQYDAFVIADMLRTDQARLQPWYPDSPITQSIRAKVSLLLHLSQETTRTSNRLRAVLARYYPAALAVFRDLASPVALQFIQAFPTPQLAAHLSRADFAAFVRAHHYRQSEQVLTKAYLRLQQAYPPATAGTIDAYCDEAVLLAEVLLALVQRRRTQLQALQVLFQQHPDAPIFASLPGAGDLLAPALLSKFGDDRRRFPTPSSVQCIAGTCPVTEASGKQRVIKFRKACDREFRLIAQQWARASLVKSTWANDYWSRLRPNCTSDSHAYRCLANRWLAIVWKLWQTHQPYDETYHLRQRLLRSQGAV

SEQ ID NO: 138481 - protein, 392 aa, unidentified
MIVSIGIDVAKDKHDCFILSSEGVVLADVFTIPNNMDGFACLLQRIRDCTSPQDKIKVGLEATGHYSYNILGFLLDNGLATYVLNPLRTNLYRKSLSLRKTKTDRVDARTIAAMLLSDVSLKPYTDTAYHNEELKSLTRYRFDKVKERAKLKSSVSRLVCILFPELEKLVPTLHGKSVYALLEEFPGAAQIAGAHLTRLKALLADASRGRYGRDMAMEIRDAARNSIGSKMPAKSLELQHTIRLIRELDAEIQEIEAEIQTIMEELRSPVTTIPGIGFRMGAMLLAEIGDFSRFDSPDKLLAYAGMSPSTYQSGQLKNCYPHMEKRGSRYLRYALYNATKYVCLWDPTFAAYLAKKRAEGKHYNVAISHAAKKLVRLIFALEKSGQPYCLDA

SEQ ID NO: 138482 - protein, 391 aa, unidentified
MLNDAPRPAQAAIRTDLGAIFVSMELSRRTWLITSLSPGAGEKMSKHSVPASDVAGLLHRFAELKRKATARSGRDFPIIVIQEAGLDGFWIHRLLQSEGIESHVVDPASILTSRRARRAKTDRIDGETLVRTLMAFKRGEPRVCSMARAPTPQQEDRRRVCRERRILVGERVRHVNRIRGLLFAQGVFGYEPLRKHRRERLEELRTGDGRPLPVHLKAQIIRELDRLELVLAQLKTVAAERDTLLKTASDEMPSPPAMLVQLKGIGPETAAVLWSEGLFRRFDNRRQVAAYAGLAPTPWQSGSIDHEQGVSKAGNTRLRTTMVELAWLWLHNQPTSALSLWFHERVQRLGGRMRKTIIVALARKLLVALWRYMTAGVIIEGAVMKPASATI

SEQ ID NO: 138483 - protein, 361 aa, unidentified
MKKTTDHLIAEVPCRRSRIGITIGIDLGDVWSHYCTLNEDGEVVDRGRFRTTPKAIDKWFTDVPHARVAMEAGTHSIWISEQLQELGHEVIVANVRELRAISHSDRKSDQVDAEKLARYARLDPEILRPISHRTVEQQEALTLIRARDLLVRLRTAAVNAVRGLTKSCGYRMPASSTRCFAKRSLAVMAPRLQQALGPVLQQIAEMTLKIKQYDRQIQQLTQTEYPETQALLKVQGVGYITALTFLLTLGNKERFERSRDVGCYLGLRPRRSQSGERDPQLSITKAGNVYLRSLLIECANHILRPHGRDSALRQWGLHLAARGGKQANGKAVVAVARKLAVLLHRIWVTQEPYVPFYSAAA

SEQ ID NO: 138484 - protein, 449 aa, unidentified
MSKSGKLIGLPIVNARAAGIDIGSRIQVASVPPELSDDPVRTFQSFTADIEQMANWLVSIGITTVAMESTGVYWIPVYEILEAHGLTVVLANARDCKAVPGRKSDVNDAQWLQRLHACGLLRASFQPAREIAALRAYMRIRDRHLEYASAHMQHMQKALTLMNLQLHYVISDISGVTGLKIIRAIVAGEQDPDILASMRDVRCRESLRTIRSALVGNYQPEHVFALSQALALFDAYQARIADCDKQIENSLQVLNADRPQLETPLPAPRTKTKQANAPKFDVRSMLYQLTGTDLTLIHGIGPSIALSLVAECGTDMSKWPTEKHFASWLCLSPGCKISGGKVLSARTRKSSSRLASQLRLAASNVGRTETALGAFYRRLAARIGKAKAVTATARKLAILFYRTMRFGMRYEDPGVDQYEQRYRERVVKQLQRRAAHFGFSLQPTEAGVS

SEQ ID NO: 138485 - protein, 330 aa, unidentified
MEIKEVVGIDVSKLTLECCVHGSGTQKEFTNNSKGIQKMMDWGLKKSGADRENLLFVLEHTGLYSDQLVQLLDREGCLMHVVSGLEVKRSLGITRGKDDKADAKRIALYGYRKREEVVPHQVPRSVLLRLKRLMSMRRKLVSQRAGHMATLKEQKRVLEDEALLFWIQEDIINLLNWRIKDLEREMDKLVHEDAKLKEMFRLLVGIKGIGCVTARFLIVHTAGFTAFKTWRKFASYCGIAPFPHRSGTSVMGRTKVSRLANLEGKTLLHQCALSSVKSSPEMKAYFERRLEMGKSKMSTLNIIRNKLVARAFAVVARGTPYVNTMGYYAS

SEQ ID NO: 138486 - protein, 316 aa, unidentified
MDDKHTMHGVDVAKAELVIGHGETEVLLRIANTPQAIAAWLAQLPTGSWVAMEASGHYHQPLAHMAHAAGMVVYVLNPQLIKHYGRAVGMRGKTDRLDAQLIARYVLREHSKLRIWEPPSPGADALSRLLVRRQALVNARQMLAQSLSGLTELKAPRQALMASFKRMLAQVELLIRTEIARVPAMAALHRRLISIVGIGPIVAAQLVASLSALRFTRADSFIAYTGLDPRPDDSGQRRGKRRLSKHGHALLRCLLYNAGMAAARSKLFKPTYLQLRARGLQSTEAIVILARKLARIAFALYQSGTTFDAQRHVKPA

SEQ ID NO: 138487 - protein, 394 aa, unidentified
MLYLGIDQHRKQLTVSVRNEAGDVVLRRQVSTEWGRVRAFFEEFRRLAEPEDGFAAVVEVCGFNDWLLKMLAEYGCRETVLIQVEKRSKKKTDRRDAHQLSGLLWVNRHRLLAGQRVEGVRRIQPPTPQEAEDRQLTALQKRVGQFRTRTINKIKHILRKHNLEQEQPAKGLDTKRTRAWLAALPLGAMDRVEMDLLLAQWKLWGDHTAKLELEIEKRQAKNATAGVLATIPGCAAYGSLALASRIGAIERFPRPASLANYWGLTPGCRNSGEATDRLGSITKQGSAMARFILGQTILHVLRRDGAMKAWYGRIKRRRGSKIARVAVMRRLATVIWHMVKNNEPYMAGGPPRQKLLRRLRRELSGGGSGWSSVRVRRRGLAKDPWKMKTRRAET

SEQ ID NO: 138488 - protein, 383 aa, unidentified
MKKNSIAKLQANKSQIRKMAAKQKLTVGLDLGDRTSRYCILDGAGNKVGEDHLPTTKVGLDSLFAKMAPSRIALEVGMHSPWVSRQLAALGHEAIVANPRKVRLITQSVKKNDRMDAEHLARLARVDPQLLAPIRHRGVEAQADLAVIRARAELVEARTKLINAARGLAKPMGERLKSCDADYVKESLADGLGEATQNVIRPLLKSVEDISQQIGVYDKKIREVEKRYAETELLKQVHGVGTLIALTYMLTLEDAERFEHSREVGPYLGLTRKQRDSGDRQPELGISKAGDELLRRLLVQAAHCILRDGAPDSDLKVWGMTKVQTGAKTGNGKKGSKRRKKKAAVAVARKLAVLLHKLWVTGEVYDPQYNRKAVEAGKGKAAA

SEQ ID NO: 138489 - protein, 342 aa, unidentified
MYYMGIDLHKKYFVSTIMDKEGKVLKRSRVSTDRESIKHYFSLLKDKGLIKAVMEATFNWVYFYDEISPFVDEAILAHPLKTRAIAEARIKTDSIDSNTLAHLLRSDLIPKAYTPGFETRDLRNLLRFRIALVKVRTSLKNRVHAVLDRNYVEDPIFKELSDKFGKKGMKIMRALKLKGNDTSILNGYLDLIEEITKKINDLEKRIKSFVKEDKITLLLKTIPGIGDIVAFLIRYEIDDIGRFSSTKKLCSYAGIVPSTYSSGGKTYHGRITKQGNKWLRWALAEASHKAIVKSPSLRRYYNKIKYKKGSNTATIALSRKLLEIVYKVWKEQRPYYEKEICF

SEQ ID NO: 138490 - protein, 330 aa, unidentified
MIFVGDDWSEDHHDVYLMDEAGKRLGSRRLPEGLVGIRQLHELIATHAEEPEQVVVGIETDRGLWVGALTGAGYQVYALNPLAVARYRDRHHVSGAKSDASDAKLLADLVRTDRHNHRLIAGDSADAEAIKVLARAHQNLIWSRTRHTNALRNALREYYPAALVAFEDLSHGDALAVLDRAPTPVQGTHLPLSAIQAALKRGGRQRNIAARAREIRAALRSEQLAAPAPVAAAFGATTRAAVGIITELDRQIGELETTLAEHFETHPDADIYLSLPGLGVILGARVLGEFGDDPNRYTDAKSRKNYAGTSPLTIASGKKRAVLARRDGQG

SEQ ID NO: 138491 - protein, 423 aa, unidentified
MKVTFQTCCGVDVHKSFLVATIIKTAGGIEPTYQKKRFSTFNNSILEFKQWLLHNDCHDVCMESTGKYWVPVFNLLEDEINVTIANPKWVKAVKDNKDDTKDSKWIGDLFRLGLVKGSYIPCKAIRVLREYTRYRYKLVSCRSSEKNRYQNALTVCNVALDSVVSDIFGKSSTSIIDYLLEQSGMSINHEEIASKLLRSLKSKEDAVIESIEGYQMTDAQKYRMRLVRAHMDYITAEINDVDSMIEKLISSAPDYENAVRLLCTIPGVKHDSAVTIISEIGIDLSQFCSAKRLCCWAGLTPGSNESAGKKKSVKITRAGVYLKPALVQCAPAAVKSDKSPYYRKKYESLVKRRGKKRAIIAIARMILTAIYQMLSTGEQWNPSDLYKIDMPAALVEKQKAKAIRQAKKLLLREGILSKSQLVS

SEQ ID NO: 138492 - protein, 331 aa, unidentified
MTEYIGIDVSKQTLAVWDGTQEDEVPNEKGLKTLKKLLKKRYGTNWNKGGLIYEPTGPYSNYLRAFAAEHEVQVYEVNPKKSANFAKVVGNRSKTDAVDAKMLSTFHALLTEEDFRIPEIDESAEQLGAELGSYEMIQKTRTMLSNHLQSLEYKSGVTRKLKESLEKELKHLGAMEDELEKEMKAYAEDHEETREAFHNLLSMNGIGVISAINLLYLFRKYPGANRNEITALAGLDPVRRQSGSSLNGGRKISRAGDPMLRKVLYLACMNSIQHNECIRTFYKHLVADNHKKPKVALVACMRKLLLIAHHLYTTKSQYRTLEHDANPCLSS

SEQ ID NO: 138493 - protein, 357 aa, unidentified
MVESKTEAKSSEVGVTNPYRRTEHCGKIHACRCDKEVGVIGIDISKDHLITSRGRVRKYKNNKEGYEEILEMKPCTIVLEPTGVYAIRPSQYFKERGIKVLQVSPNVLSREKEFRGKKTDFYDAEKLENMVDKAKEYEYNPLRELVTLYLFLKDIEVKYKNRLKRALFLVSDNDRISKDRLERLAKGDFTQEELYNLEYTPIVLEEIKVLAKTLLETQEKLKEVRRMIEEQVPDNHVLLTIPGIGRLAAGVIIGIVGDIKRFPKPESFVAYCGLDPLVERSGKAVVSKGISKRGNKYLRSLFYFLAGRNYSRNPTLLKFYEAHKDRLQGKKLFTALARKLARVVWSVWYNNRPYEPK

SEQ ID NO: 138494 - protein, 342 aa, unidentified
MAKLIRIGMDTSKSVFQLHGVDGQGHPVLRRQLRRREVLKYFGALEPVTVAIEACGGAHYWARVLSALGHEVKLIAPQHAKRYVKRGKNDAADAAALCEAVSRPDMQFVAAKSAEQQAGLMLAGLRSRLVRSRTQLTNAIRSYAAEFGLITAKGLDKVEPLLARAVSDAELPELARDLFAMHGREYARVQAQLREVEVKLMAWHRGNECSRRLAEMPGVGPIGGTLLALKQVDARACRSGRHFAAWLGLTPRDHSTAGKTRLGRITRAGDPTLRSVLVVGAMAVIRQALHHPERASPWLLGLLRRKPKKLAAVALANKTARIAWKLMTSGERYQPGRTILAA

SEQ ID NO: 138495 - protein, 339 aa, unidentified
MRLYGAVDLHSNNSYAAISDEKDQVIRHKRLPNDMESIDSFFKQYKDELSDIVVESTFNGYWLVDGLKDKGYGVKLAHMMACEPYAGLRYGDDKSDSLWLNRMNRVGVLPTGYIYPKQERPIRDLLRRRTSLVQMRTSLWNNLKHLSYTCNIAPLERRLLTNLKEPGIEGLFPDPFTRTSANSLLGTIQTLNKKLSEIESLIHKHTQTDSVVERLLKVKGIGFILAWTIRFEAGPVERFASDKNFLSYCGLTPTTRISNQKKKGSPSQRSYNHYLRWAFAEMVVTSFKNPAMRRYHDRLVRKKGKIKAKAIISSKFARIVYRIMKEPDFIYDPAKLFGV

SEQ ID NO: 138496 - protein, 325 aa, unidentified
MKIIGCDFRPGYQQIAMLDLATGEMVEKALSHERKEEVRAFYAGLGGSVRVGIEAIGQSQWFERTLAELGHEVWIGDAAKIRASCERKQKTDRRDAELLLRLLAEDRFPRIWVPTAAERDGRQLLLHRHKLVRIRTQVKNQLQALALNQGVQRKWKLWSKTGRKQLELLPLLPWASRRRAELLQLLDQLEASIAELDRAVAEQAKARPAAQRLMTHPGVGPVTALAFTLTMGPAERFSRGKQVASYLGLIPSEHSSGGRQQRLGHISKQGNPFLRGLLVEAAQSAVRHEPEMRRAYQRLAQRKCRGLAKVAMARKLAVRLYWMLR

SEQ ID NO: 138497 - protein, 342 aa, unidentified
MNLPIRIGMDTSKSVFQLHGVDENEAVVVRRQFRRAEMIRYFERLPPVLVAIESCGSSHHWARLLQSFGHEVKLIPPQYVKAYVKRGKNDAADAEALCEAVTRPSMRFVPVKSKERQAACMLMTVRERLVSVKSQLSNAFRSYAAEFGIVGPAGRQNVTALIKRVLEDDNLPEMARDLFRLQAEEYAAVEARLAKIEAKLMKWHREDDVSRRIATIPGVGPIGSSMLSMKAPPPETFRSGRDFAAWLGLTPKDHSTGGRQRYGGITKAGDSMLRSTLIVGATALLRHIRKGRHKPTPWLTSLLERKPPKLVAVALANKFARIAWRLMISGGVYNRPVATMPI

SEQ ID NO: 138498 - protein, 412 aa, unidentified
MIYCGIDWAEKTHDVALVDDSGRLLAKRHITDDMAGYKILLDLLAEYGDTEETPIPVAIETSRGLLVAVLRTGKRPVFAINPMAAARYRDRHAVSRKKSDPGDALVLANILRTDIHAHRPLPADSELARAVAVLARAQQDATWNRQQMSNQLRSLLREYYPAALAAAAIWQNGLCRPEIREFLKAAPTPVMARRLTRSQITAALKRAGRKRAIEADTERLREALRTDWAHQPPLVEDALGKQMLAVLLQLEAACTAADNLAKAVEEAFVQHEDAEVILSFPGLGAQLGARVLAEIGDDRERFADARGLKAYAGSSPITRASGKKSAITRRWVKNDRLNHAGYLWAFAALTSSPGAKAHYRRRRDGHGDWHASALRNLFNRMIGQLHHCLQQHELFDEQAAFPAPPALEVSAA

SEQ ID NO: 138499 - protein, 395 aa, unidentified
MVAGIDWASEVHVACVMDGDGTVASRFSFTHDGAAIRAMAGRLRAVGVAGVAIERGDGPVVEELLSAGLAVFVVPSRQIKGLRTRYGSAGNKDDRFDAYVLADTLRTDGHRWKPLRPDTGPTRALRAACRSRKDLVETRVQVLGQLRANLELAFPGAIGLFTKLYSTISLAFLQRFPTAAKAAWLSPRRLASWLRSVGYTGGVSAETLHARLAAAAPGLAGAEGEARGQITVALVTVIGTLNTQIAALDGEIGRLLAAHPDRHIFTSLPRSGTIRAASLLAEIGDCRQRFPTDDALAALAGACPSTRQSGKRSQAVFRWSCSKKLRAAVMDFANGSRMSDPWAAGIYAAATARGCRHPHAIRILARAWLRIIWRCWQDGAAFDPALHRGRQTGAA

SEQ ID NO: 138500 - protein, 350 aa, unidentified
MTIVGGLDVHRQQITFDYVDDDGLVHWGQIRPATRSTLRCWLAEQCPHGDSDFALEGCTGWRYVVEELAAAGVGVHLGDPAETAAARGPKKRAKTDRADARLLRTLLVEGRFPESWIPPAHVVEIRTLGRLYCTLMDERRAWQQRIHAQLFHQGCAPIRALLTQAGREALAQAELSPAGRQYVDTALRRIDELSAEIGPLGTQLVNFARRQAGCRALQAHYGIGWLCAAVIWAEIGDARRFASSDQLVRFAGLDVTVYSSDAKRSPGHLSRQGSPELRWAAFEAAKSAARHSSPDYAYYHKLAAKHDGHNGKNPTLAVERKILRRCYHTLRALGDAALALPVPEREEAAA

SEQ ID NO: 138501 - protein, 358 aa, unidentified
MRIIGVDLHARQQTIAMLDPETGELVEKTLKHEGETVREFYSALPHPVLVGIEATGSMYWFLELLEELGIERQVGHPTEIRAAEPRKQKHDRRDAALLLKLQVENRFPSIWMPSAELRDLRALLRHRHQWVRMRTRVQNTLQAIALSHGLRRGQSLWSQAGQQAIASLPLAPHAAHRRTELQALNCKLGKQIDELGERVMDQALQRPGAKLLMTHPGGGPITALATDVFLGDPARFDDGKAVASYVGMIPSEYSSGGRQRLGGLSKQGNPLLRFLWCEAGIHAVRRDPELKRFYRRKLQQKGLGKTRVAVGRKLGIRLWIMLRDQIDYQEFCRRGQMRQKSGGARAGMPEGVHSPARS

SEQ ID NO: 138502 - protein, 412 aa, unidentified
MVLANCDREGQRMTVMIGVDPHKRSHTAVAIDGDDVELAAIEVRASARQVDELVGWAAGFADRTWAVEGAGSVGYLLAQQLVAAGERVLDVPATLAARVRVLGSGRSNKNDPNDGYSIAVAARHAPRLEQVARADHAAVLRLLSKRNRELGSARTRTVCRLHGLLVELVPGGISKEITANRAAALLATVTPANPVEATRHALASEHLEDLRRIDEQMRASKRRLAEVIRASNTTVTEVFGFGPVGAAIAIGQTRDVTRFADRDHFAAYNGTSPIEVSSGGRIVHRLSRRGNRQLNHAIHIAAITQIRHLHSPGRAYYDRKLAEGKTKKEAIRALKRRISDALYDRLVADAAAKAGPGGQPETTEQASVTGIAPRKPALRKSHSRTHTERRTRRAVTASTRRRRASTRERNRT

SEQ ID NO: 138503 - protein, 325 aa, unidentified
MEQLYGAMDIHKETLRGIVRHGDGTIEREKTIPYTRKAIEKFFEGIPSPSLTIAIEACGLWRGVYRILKDMGYEVALANPLKVRRIADARSTDKVDARLLSELLSKNFLPRVYIPDEEILMLRDLTRHRARMVRQQTSLKSRIKAFLAMDGNIFRITWNKKDLEHLKSLDPKIANLVHILEAIEGEIKPVKKEIDIIARTNYRAGLLQTVPGIGSFGSLMILGEIGDIRRFKRPKSLVSYAGLCRGIKQSGNTSHSVRIKACNKWLKWIMYQCSGRAIMKDDRYTGHFSRVNRRNDYKTARRSIARKMLTDVWHMLTKEEPFRPS

SEQ ID NO: 138504 - protein, 344 aa, unidentified
MEYFAGIDVSLRSCALCIVDGKGKVLLERELPCEVSDIAEYLGTFPHPIERVGFEAGTMSQHLFHGLKAEGFDVVCMEARQVDAALSAMRNKTDKNDARGIAQVLRTGWFSPVHMKSREAHGVRALLSTRKALLKKTMDLANEVRGLLKIFGIRLPMTVKHGSFDGVVRPLIEMDEVLTHALVPLLDARVVLYQHFLELDRRVKRAASNDEVCMRMMTVPGVGPIASLTFKAAVDDPTRFKRSRTVGAHFGLTPRRYQSGEHDNPGRISKAGDRDVRATLYAAANALLMRTMAGSQIKSWGMRLMRTKGRRRAVVAVARKLAVLLHRMWIDGTEFRQDQVGGKA

SEQ ID NO: 138505 - protein, 394 aa, unidentified
MAFKIFRKNCCGLDVHKTWIYACMGITDTNGRTEYKQARFSSFTKGLQELADWLAKYDCNDVCMESTGKFWIPVFNILEKTCWVTLAYPKYTKPQKGNKTDHKDAKWICDLYMCDMVNPSFIPPPDIRQLRDLMRYRSKLTNIMTSEKNRALNCLTVSNLKLDDVFSDVFGKSSRSVIRYILEHPGETFQVAPFIDRRCKHPVEEIQAVIDGTISHQQAVKLRECLQHLDELEVHKTNVEKEILCLVQQYPYQLELLQTVPGFSGNIMTAIALISEIGADMSVFPSAKHLVSWAGCCPRNDQSSKKVKSTRISRAGVYLKPLLVQVAIQPFTANADKLSAAGAAEIRCQICDGRFLSMWAALFIFLGCPLPPCQKGLHVHNGRIVILASVAWIF

SEQ ID NO: 138506 - protein, 399 aa, unidentified
MIATGLDVHKDTIFCGIHNGKKNLDVKEFSTLTHDIRNLGEYVRSLGGHTIAMESTGIYWIPIWNILDEMGFELILVNPYLIKQMPGRKSDVKDAQWIATLLQKGLLRASFVPDKKIQELRTITRKYMKLQQRRVTIEQNMERILEICNIRITSLVSNISGKSIYRIIESIVNGVDAPDELEKLVHGRIKNKHKEKVRQSLEGHIPEYHRFNLSLSFEEFNLNLSQVNRCLEKMEELCNKEFSKELELLQTIPGVSLISAMILIAETGADMRVFENSGKFTGWIGLRPRNDESAGKYKSTATTKGNVYLRATIVQIAWAATKTKGSYFKEKFNRLAMRKAKKKALIAIARKIAVVIWNVLNDMKKYNPNLLPILDPQKLMASLNYHQKELERLNKLVER

SEQ ID NO: 138507 - protein, 375 aa, unidentified
MATVRFVGLDVHAETIVVTVAETAGEVRSLGMIPNRPEAVRRLVRKLGPPEQLRMCYEAGPTGYVLYWHLISLGVHCDVVAPSLVPTKAGDRVKTDRRDAEKLARAYRAGDLTPVWVPDAEHEALRDLVRAREAAKKDQLRARHRLGKFLLRQGRRRPVHLKMAWTAGHIDWIRAVRFESTLHQIVLADYLHEVERVAVRIAHLNQAILEAIRTAPPQMRAVIQALQALRGVAAVSAATIVAEVGQLSRFENPRQLMGYSGLVPSEYTTGSRRRLGAITKTGNAHLRRVVIEAAWAYRFGPAVRGPLKARQDGLDPVITEIAWRAQKRLHDRYRTLVAKGKNNNQVITAVGRELLGFIWDIARTVERQVPIAATA

SEQ ID NO: 138508 - protein, 411 aa, unidentified
MDKIYDKCCGIDVHKKLIVACFRCGKKQEVREFGATTRELLELADWLKEGGCGMVAMESTASYWKPLYNILESSDLNAMVVNAHHMKAVPGRKTDVKDAEWIADLLQHGLLQPSYIPDKDQRELRELVRYRKSLVGERTRELNRLQKMLEGANIKLSGTVSDINGKSARSILEYLLTGESIDGSKYDEMYEQKIIAHNLKATKEQIMDDLNGVMSPLQRRMMKELLVHLDELNVHIKNLNDEIDNFMKPEEKRASQAIQDVTGIGNTSAQAIISVIGSDMGRFPTDRHISSWAGLCPSDNESAKKRKSGKTRKGNALLRTTLITCAHAAVKNKKSYFYAQYVRISAHRGPKRAYVAVAHSMLISIYHILKDGVVFKDLGADYYNQFNKERKINAYLKKLKALGWEAPIVAA

SEQ ID NO: 138509 - protein, 411 aa, unidentified
MSKTLLVGCDVSSQLNTVCLMDPEGDNIGSQTFSNTLSGAEALESWLLKTLRENDFSELKIATEATSFLDLHLVDFLASSKQLAPFNPSIYQFNPKLVRNFKRVYPDKEKTDKVDAFVIADRLRFGRLPEPYESHQPYLPLRRLTRYRFHLVKAINREKAYFLTHLYLKFSAFSMEKPFASLFGATSLAVITDFSPDELVRLPLEELTQFIIDNGKNRFKDPQKVVETLQRAARESYRLRPALASSIDLILATILQTLRALQEALKEVDRAIEKEFKAFPNTLQSIQGIGPVYSAGIFSEIGEIRRFPREDALAKFTGLTWRRYQSGNFEAEETRMSKTGNEYLRYYFIEAANALRVHNAEYRAYYETKFKEVTKHQHKRALALTARKLVRLVYALLKKGQLYRANYQQEA

SEQ ID NO: 138510 - protein, 412 aa, unidentified
MEQVIIGVDPHKLSATIEVVNNQEHLLGSVRFTTDQRGYTAMRSYVKAWPNRVWAVEGANGAGRPLAQRLVEAGEQVVDVPAKLAARVRLFDTGHNRKTDALDAHSIAIVAVRTKGLRVLAADGELEALRMLTDRRDELGHLRVQTVNRLQRLLSELFPGQRKKDLSALQAKAMLTTVRPRDIAGKTRRRMAAEELADLVAVDAKLKKIKAELKAMVIARGSTLLQINGIGPAGAARTLADVGDITRFADRNRFASWTGTAPLDASSGEQIRHRLSRAGNRRMNHVLHIAAIVQLRNDTEGRAYFRRKVAAGKTRMEALRALKRRLSDVLYRCLVADARTRDLDATSRGLIDDGTGPGGHCGATQESSAADLPPHVDTSDQPLPGPARPTLPRPIRTRKTATSPSSLTRPLT

SEQ ID NO: 138511 - protein, 396 aa, unidentified
MFYVGIDVSKDKSDICIKDQNGNDLIQRFKIKNSKADLGHLYETIERIKSKLPGNSDVVFGMEATGIYSLPLYSALKRDGYKVKLYNPIQTNGFRKINIRKTKTDTIDSAVIADMLRHSEPPQVSDIQDMNLYQLRELVRIRHRLIDKQTLCKIQLVRNIDTIWPDYSNVMKRVLGTASIAILKKYSVPSKVRAKSFEEFYELVKKMSRSKISRIQAEEIYAHAGNVLTIPELDSVITFEIKTLIMQLELYDEQIQSIEIRIEQMMKLIDSKIMSIPGIGDTLGPIILGEIGYVDRFSNVKKLIAFAGLDPVVSQSGRFENLSGPISKRGSPLLRQALFLAANVARQNDDNLKRFYDKKRREGKHHFSALNAVAAKLLRITYWVLKNNKEYQTKLN

SEQ ID NO: 138512 - protein, 344 aa, unidentified
MNEVITIGVDLAKNIFQVHCVDVEGGVIVGRQLRRSQVLPFFNKQPPCLVGMEACATSHHWARQLIELGHEVKLMPPHYVKPYVKRSKNDAADAAAICEAVTRPTMRFVSVKSMEQQSVLMLHRTRELLVRQRTMLINAIRAHMAEFGIVAPVGVPQVKKLLGIIADTDDARLPPLARACLESLVRQFLSLHEEIALAEKHIHAWHRSNEVSRRLETIPGIGPIIASALAASITDPEVFRNGRELAAWIGLVPRQNSTGGKERLGHISKQGDQYLRWLLVAGAMSVIRHAKRRGTTNLPWLAKLITSKPTKVAAVALANKMARIAWALLRHGGTYQRPAAAPAD

SEQ ID NO: 138513 - protein, 394 aa, unidentified
MAKPTKLIVGVDIGKRFHQATVINEAGEILGGSIRFPNSVKGAELLLDRIASINPEELPLVFGLEATGHYWLALYSHLVERGLKVHVINPYQSSAWRKVYLSTTKTDKEDAFLIADVLRFGSFSETKLAEERMVSLRNLTRFRVTLSQQLTDTKRRIVTILDQVFPEFEQLFSDLFGKTAKAVLKKYPTPQDINGLDTKKLTKLISKISRGHFKLKKATEIKDAAENSFGVSFALDSFTLQLRLLMEQLEFLEEQLNTIDQEIAQLMKGVDSVLLSLPGIGITLAAAIHAEIGDIQRFKTHSQLASFAGIDPTVRQSGEFTGSKNRMSKKGSPYLRLALWRAAITSVRSNPVLKEYYEQKLGEGKHHLTAIGAVARKLTRIIFALLKNQTEFSV

SEQ ID NO: 138514 - protein, 355 aa, unidentified
MSQTANTAIAVIGIDIGKNSFHVVGHDARGAIVLRQKWSRGQVEARLANIPPCLIGMEACVGAHHLSRKLASLGHDARLMPAKYVRPYSKGQKNDFNDAEAIAEAVQRPTMKFVATKTAEQLDLQALHRVRERLVSQRTGIINQIRAFMLERGIAVRQGIGFLRTELPTILATRTDALSPRMLRVIEDLAGDWRRLDPRIDGLSGEIEALARQDQACSRLMTVPGIGPIISSAMVAAIGTGDVFSKGRDFGAWLGLVPKQISTGDRTILGKISRRGNRYLRVLFVQAAWVVLVRIKNWERYGLKSWIEAAKRRLHHNVLAIALANKLARIAWAVLAKGRAFELTRTDDAGIVRPA

SEQ ID NO: 138515 - protein, 371 aa, unidentified
MEAITFVGLDVHKRMTSVAIAEPGRGGEVRFLGEIPSTAEALCRLVERLKGRHRRLSFCYEAGPCGYGVHRLLSGLGQDCSVVAPSLIPSRPGDRVKTNRRDATSLARLHRANELTPVWVPDAAHEAMRDLVRARATARRVLGKARQHLQGFLLRHGRIYRGVRGWTRAYRRWLATVRFDHPAQQIVLQDYIHAVEDAEARLARLERQITELLPAWSMAPVVEAVQAMRGVALIVAVTVVAEVGDFSRFANPRQLMAYLGLVPSERSSGSSVRRGGITKAGNVHARRVLIEGAWTYRMQARVSRKLHDRIEGLPQAVRDVAWKAQLRLCQRYRRLAASGKPKVVVTTAIAREMVGFIWAIARMVQPKPAIG

SEQ ID NO: 138516 - protein, 346 aa, unidentified
MDHIGIDVHKRESQICLLAEGGELIERRIRTERERFAAVLGDRPRARIVIEASTDSEWVARCLEALGHEVIVADPNFAPMYATRTRKVKTDRRDARALADACVLGAYRRAHRLSDPQRHVRGRLLIRDALVRTRTRYISLIRALLRQQGYRVPSGSAEAFVPRVRALALPGPLLSLIAPLFAVMRHLNRQLVYSDAMIEHVTAHDERVRRLRSVPSIGPVTAAAFVATIDDVQRFAHAHQLEAYLGLVPREYSSGDTQRRGSITKAGSSRTRWLLIQAAVSILRRRPPEAEALRAWALRIAARRGKQIAVVALARRLAGILYAVLRDGTVFTPRRTSPPVATALPA

SEQ ID NO: 138517 - protein, 344 aa, unidentified
MDHFAGLDVSVKETSVCIVDDTGRIVKEVKVASEPQSLLKVLGSPAYRFKRIGLEAGPLSQWLFSALAEAALPVICVETRHMQAVLKAQINKTDRNDARGIAQMVRAGLYRPVHVKTLRSQKLRMLLTHRKLLQSKAIAIENDLRGTLRNFGLKVGMVGKVRFEARIQELVENQPDLAVLVEPLLIVRRVLREQIVILHRRLLATVRDDEVCRRLMTTPGVGPVVALTYRATVDVPARFRKSKSVGAVFGLTCSRYQSGEIDWSGKISRCGDEMMRTMLYEAAQSMMHSKKWSWLKAWAMQIARRRGMKKAIVALARRLAVIMHRIWVDGTEFRWTREQAAAAA

SEQ ID NO: 138518 - protein, 390 aa, unidentified
MDVLYQSCAGIDVHQANIVVCILHGPLTSTRPKREMATFDTTTKGLRACHDFLSQFHVEAVGMESTGVYWRPVWHALCDDFKLILAQPAHMKAIPGQKTDKKDAHWIAKLTRIGLLPRSFVPDETIQELRELTRQRKHYVESRNRETNRIHKILQSGGIKLTTYIEDIMGLSGRNLLQLLVDGTPITPRIVHQSVYTSLKKKVPQLLEALDGYFSDHHRFMLKQSLEIYDFYQKQIELLEERMNVYLSQYEKQVEILDSIPGIDVITASVIISEVGVDMSQFPTAGHLASWAGLCPGNNESAGKKRSTKIRHGNSYLKKCLCQAAFAVKKQKGSPLADRFYQIQSRRGSQKATIALAHQLLKIAYILLKEQIRYPEFLAQKKTTRDELVA

SEQ ID NO: 138519 - protein, 347 aa, unidentified
MQFYKKQHNYYCGIDLHARSMYICILDSKGNVKFHKNLKTLPDTLMRAIKPYLDNLVIGVECMFSWYWVADFCKDNNIEFILGHALYMKAIHGGKAKNDKVDSYKIASLMRGGTFPQAFVYPRDMRATRDLLRRRMHLMRKRAELLCHVHNTNTQYNNDRICKNLRYKSNRKLVDGRFSDPSAQKSVDLDIQLINYYDELLTSVEYYIKKHAKVNDYQSYMLLNSVPGIGKILSLVILYEIYDIKRFSRVQNFASYARLVKCRAESAGKSYGTSGAKIGNAHLKWAFSEAAVIFLRANPKAKAYVQKMTRRHNKGKALSILAHKLGRAVYFMLKRKQPFNMEKFLPA

SEQ ID NO: 138520 - protein, 483 aa, unidentified
MAERKKNTFQRLKKGQLNRKERRDLERRLSTEAPGLEIVNRNVAGIDVGNESHYVAVPPSRDPQPVQEFGSWTADLERMADWLKMCGIETVVMQSTGVYWIALYDVLEKRGFQMCLANARHTKNLPGRKSDVQESQWLLKLHTYGLLRNSFRPPDEIRALRSLWRLRDRHVKEAARTVQHMQKSLITMNVQLSNTISDLSGTTGLAIIRAILTGERNPEKLAKLRDWRIKASEEEVARSLEGNWREDMLFELRQSVDAYDFIQKQVAECDQRLQTLMAELPMREAPAAVPAVRDGVKPPVRKKKSTRNKKNVPRFDLKAELQRVCGLDLTSIDGIDVMTAQTVVAELGTDFSRWKDEAHLTSWLGLAPCRDISGGKVLKQTTLRVKNRVAAALRGAANTLLHSDSYLGARFRSLRTRRGAPKAIKAMARYLACIIYRMFTRGQALVDRGVQEYENRCAQRELAALQSKAAAHGFRLVNVQNPA

SEQ ID NO: 138521 - protein, 351 aa, unidentified
MAAKKRSVIGGVDTHRDTHHAAIIDSTGGLLADAEFPATSDGYADLLAWMRSFGRLVAVGVEGTGSYGAGLARHLGSRKVPVVEVDRPDRRTRRAKGKSDPIDAIAAARATLAGTAMGIPKTRTGPVEAIRALRVARHGAVKARTAAINQMRGLVAAAPEALRAELTKRSAAVLVNRCATLTADLSRLHDPEQATAAALAGLARRVKALTEEIRALDRQLTPLVRRTAPRTSALFGVGTDVAAQLLTTAGDNPDRLHSEAALAHLCGAAPIPANSGRVRRHRLHRGGDRGANHALHTTALCRLRYDERTRAYQRRRITEGLSKQEILRCLKRYIVRDIYTALRADFAALTT

SEQ ID NO: 138522 - protein, 430 aa, unidentified
MKSNTQNAKIEAITEKTLVLGIDVGSETHYARAFDYRGVEYSKKPFKFSNTEAGFVTFKAWVLDIKEKHGKDKVIPGMEPTGHYWFNLGKFLQDNEMKPVLVNPHHVKKSKELDDNHPTKNDRKDPKVIAGLVREGRYMIPYLPEGVYADLRTASNIRFQLQAELTRIQNRINRWFNIYFPEYKTVYGKPDAKSGILILKEAPLPEDILTLGIDGVNQIWRDAKLRAVGKARAKTLIEAAEHSVGSKEGAVSARMEIRMLLEDYESRNIRLQEVMGLIEGLVNQIPMAEKLLEIKGVGIKTVSGFLAEVGDIRRFNDPKELQKLAGLALVENSSGKHKGKTTISRRGRKRLRYLLFEVAMSLVAKNPEFRELHNYYTTRRLNPLKKMQSLMAIAAKLLRVFYAILTKGVGYDPKKMVNDIRRPAAYAQAA

SEQ ID NO: 138523 - protein, 359 aa, unidentified
MRIIGCDLHARQQTLAMLDTRTGKIEETTLKHEENIVREFYCHLPRPVRVGIEATGSMQWFVNLMEELAIECLVGHPAEIRAAEPRKQKHDQRDAHLLLSLLVEERFPTIWLPTKELLDMRALLRHRHQWVGLRVKIQNALQAIALANGLRRGPSLWTQAGQHAIASLPLSPHAAYRRNELQAMYVKFEAEIEKLNQRVEQQAGERSGARLLMTHPGVGPITALATDVFLGDPARFANSKELASYVGMIPGEYSSGKRQRLGGLTKQGNPLLRFLWSEAAIHAVRRDPELRHFYHRKLIQKGLGKARAAVARKLGIRMWIMLRDRIEYHEFCRRGQMQQTSGDACAGMPGPRYGAKVTG

SEQ ID NO: 138524 - protein, 406 aa, unidentified
MKVYIGIDWSKEKHDAIFMNEAGQAILYCQFSHMQSGFLELDDARRKLGVEPSACIIGIETSYNMIIDALWNWGYDQVYVLPPSAVNRSRGRYKQSKARTDRSDAWLIANLLRTELHNFHPWRPNTALTRQMSAQVNLVFSLTKESQRMANQLQAVLLRYYPVALEIFSGLNTLISLEFICAYPTPRQAAALTLEELRHFAKQQHYNHAECLPNYFVQLQKAYPQADVGTVASHQDIAVQLAKLLSNILRSKRSAITLLQHLFQQHPDCVIYQSLPGAGKLLEPALLVKLGDDRSRYPSASVVQALAGTCPVTDASGKRKKVYFRRACDRQFRQIAQQWARASTKESDWAAVYFQQARDRCRSDSHAYRCLANRWLAILWRLWQDRKPYDENYHLQQRLLHSKPIF

SEQ ID NO: 138525 - protein, 414 aa, unidentified
MHPGSSFANFGALDWAKQNHHAVIVNPPGQIVAEFSFAHTLEGWQQWRQQAARFAPLAVAIETSQGTVVDQLLQTPDCTIYPLNPKAARAYRDRKAPSGTKSDHLDAWSFADALRVDFSNWKPLLAQGPLLEQLRLLCRDEMALIEERTALVNQLQAALYEYYPAALAAFDDWVCPGAWAFVEAFPTPQTLVSAGKRRWEKFLHTHKLYRAQTYQKRLEIFSQATDFCASSALTQAKSRLAVTRAKQLRVLQTQLEDYRQQIEKLFAQHPDHDLFGSLPGAGSKIAPRLLCELGEDRHRFEAPEILQCHAGTAPISYQSGPIHKVQVRWHCNKALRHTVYLWADLSRHACPWADTYYRSLRKRGKSHACALRCLGQRWLKILWKMWQTRTCYNAELHQQNQLRHGSWVLQLQTS

SEQ ID NO: 138526 - protein, 349 aa, unidentified
MILVGCDLHTRKQQVALLNTDTGELWEQELSHVGDDVERFYAALPSPVTVGIESTGYSLWFHALLQRLGHTLLVGEAAKIRAMVVRKTKTDRRDARHLRDLLEDDRFPLVWIPDPTTRDLRALIKHRLRLVRIRTMVKNGLHAIALNQRLALGPSLWSRQGLAQLQALVLLPHTRRRRDDSLDLLQWLNRHIDELDLQVATAAAADPDARRLMTHPGVGPVTALATVLVLGPVGRFPGSKHVVSYIGLAPTVNASADKCRLGHISKQGSALLRWVLGQAAPLATRGDAALKRIYFAVLRRRGRPKAKVALARRLLVRLYVMLRDQIDYDEFCRRGRTQRPGLEPARIPV

SEQ ID NO: 138527 - protein, 398 aa, unidentified
MSQDVWAGIDAGKITHHCVVINAEGTKLLSRKVSNDEADLIRLIDEVDELAGGGRVRWAADLNSGGAALLIALLCERDQDLLYIPGRTVHHASAAYRGDGKSDAKDAAVIADQARMRRDLQPFRQRDEITVDLRMLCARRTDLAIDRTRAITRMRTQLLEYFPALERAFNYAHRRAALILLTRFQTPAAIRQMGVAKISAWLRRHGAYAPDAVAQSAFTAAESQRTVVPGEHTAARIVGQLAAQIITLDSQLDAIEAEIAERFREHAYAPAIESMPGFGPLLGAEFVAAINGDLANFENVDRLAGIAGLAPVPHDSGRVTGNLKRPRRYDRRLLRACYMAAHNSLRTNPASRRFYDRKRAEGKRHSQAVLALARRRLNVLWALIRDQTTYEPIELKAA

SEQ ID NO: 138528 - protein, 480 aa, unidentified
MIRSVGIDLSRTGSHQVRCLDEQAKPCDSFSFDSTLEGLEKFEKRVFSNSDTPTIIFEPTGLAWIPMAVYLRARHPECQMVKARLQKVAALRRYLRSYTKSDRVDGVTLAKMPFIDAEQLDEAYLPPAEYHSLQRLTRQRERLMKSITVRKNRIGSIVNGYLPGLRKAFSDEWSDRARLFYRQRLNPFTGVRDGKSALDTFLLSVKAKGAQTESHRVYQACQKLAEFYEKSKAAGMINEDFFDDLQDEIACELRLMETEEAEVERVSVRIEELYGHLHPSDYLRSIPGIGVRTAQVFLAIIGDPHRFRSQSAFANWTGVVPGARQSAGTEGKGLRMTKAGPSMMKRALFQAGDIARRYDPQLAHLYYREMVHHGKTHLQAMGAVMSHLGARIMVVLREDRPYELRDTQGKPLTKKEALELIRSEYTVPEETRQARRRRKPNKGRLNGRRTHEAAKAPQSVPLIPPQKIVYCAEDLQSIAN

SEQ ID NO: 138529 - protein, 370 aa, unidentified
MQTVRSFVGMDVHKETISISVAEDGRNGSVRFIGVIPNQPDDIAKVAKRLAKHGELDFCYEAGGCGYNIYRQLTALGHSCTVAATSLIPRKPGERIKTDRRDSQKLAILHRSGDLTKVWVPDATHEALRDLVRARVDASMHLMRARQQLLAFLLRHGRSYPTGKHWTQRHRSWLAGQTFQQEVHRIVFQDYVETVWTAQERRDALIERIGAMTASWSLGPLVEALRGLRGIDLLSAATFICTTGDLSRFESPRMLMGYLGLVPSEHSSGGSVRRGGITKTGNREARRMLIEAAWSYRYPARVAKEKAEILVRLPKNIRDIAWKAQTRLCARYRTMIARGKKPTVVVTALARELAGFIWAIGQEMRTPMTT

SEQ ID NO: 138530 - protein, 393 aa, unidentified
MIGGIDSHKDTIHVAVITGLGVDVVDREFTTTQAGYHEAIDWLRTQDCLDVVGVEGTSSYGLGVTTALREAGARVIEVNRTRVAERRRKGKSDRLDAYRAARGVLSGEASTIAKSDTIEPLRAVHNARKSAVKAKRVAWQQISATLINAPAPLRDRYRGLAEDKAVQQLIAARPARGTEPAVAGIMVALKVLARRHRALSAEIDELGDHLAETTTAINPGLAALQGVGPVVAAQLLITAGDNSDRLRSEASFAALCGTAPVQVSSGRVTRHRLSRGGDRQANAALHHIVTNRLRHDPRTRDYRDARLAKGGTKAAAMRALKRAVAREVFRALRGRCPVPDYSDLRPARQARHLTLAAVAAELQVWPSALSQLQLGQRVDNDLVARYRNWLTAA

SEQ ID NO: 138531 - protein, 426 aa, unidentified
MNDNNTPEFAALVGLDWGDQSHAIALEPAAGPTETSTLTHSAESLHQWLDQLEQRFAARQVAVAIETDQGAVVYALMERPWATIYPVHPATSTRHRTMFRPSGATDDLSDALVLLSLLQHHRERLRPLRPDDELTRTVAGLVQARRKAVDRRTLLSNQLQSTLKDYFPQALALVGENLAAPQALDFLDKWPRLIDVQAAKTTTVKNFYHRHNVRRAKLIQSRLDLIGSARRLTGDPAVVEVSVRIVRLLVAELRVLVEHIAEFDDAIAQAFAQHPEKSFFRQLPGAGAVLAPRLLTAFGTARDLYPDSPSMQRYFGVAPVTEKSGRQAWVHWRWNAPKFIRQTLVEWAGQTVVYCPWAKAYYQQQRAKRTGHHAILRALAFKWLRILCRCWQKRQAYDQEKYLKQLEKRRSPIAARARQLAREMAA

SEQ ID NO: 138532 - protein, 343 aa, unidentified
MQHASVPIAVGIDVAKATLSVCFRSREGAEIALTFRNIEADINKKLITNLYGFTGRIVLEATSYYHWLVTLLLADAGYHVYVVNPLLAKQYTTGNIRKVKTDPADAASLARMAAIADNLPPVFQETRETLAIKRKLSCIARLTNQIQSLGGMLTQLKESHDILGIPLSKGEKALYKTLQTLRKQKKILEQETIQGSQPIAVTHLDTIPGITPFVAKACFTYFSYRPDQTVKSWIGFAGLDVSSRESGVWKGRCKLTKRGNNFLRHRLFSAAWGAVMTNADFKSYYTTLRLQGRSHVESLLIVARRIVRIMFKIVEQNRSYDPSRMAPSKKETIPATLSTAITC

SEQ ID NO: 138533 - protein, 337 aa, unidentified
MNVSLIAIDLAKSTFQVCGVNRQGKELFNRAISRKKLTALIAQYPGIPVAMEACGGSNYWARTFQQNDHEVLLIPPPHVKPFVKGNKNDRNDAFAISEAARRPKMRVVTPRSLEQTDMILLHRIRERRVRARTALMNQMRGLLSEYGIVLPAGAATLRKALPLLLEDAENGLTMAARRYIQDLLNEWRDLDERIQADKHSVHVMARESPAACRLMKVRGVGDMIATAALAKLGRGDQFKNGWQFSACLGLVPREHSSGGVQKLGGISKRGDDYLRRMLIQGAWSVIHYAEGRQDRLSRWAMEVKERRGKHKAVVAVANKLARIIWALVRHETTYCPA

SEQ ID NO: 138534 - protein, 342 aa, unidentified
MRYYVGLDVSVKTTAVCIVDEAGEVIKERSLATEPETLADWLAKTGFEITCVGHEAGPMSAWLHEGLASAGLPVVCVEARQMAALLATRLNKTDRNDARGIAQVMQSGWYKPVHIKSHGAQELRCLLVARRTLLSSQRNIENTIRGMLKVFGLKVGQVSRLKFGERVRELVCNRPEIADMIASLVAARDSLLAQFSELHRKLKQVARQDSVCRRLMTAPGVGPVVAVTFRAGVDEVERFAKSSSVGAHFGLTSRRYASGEIDRQGPISKCGDGMVRAALYEAANAVLGRSKRTSSLRTWGQAIAKRTCPSKARVAVARKLAVILHRMWADATDYRWPEEVAA

SEQ ID NO: 138535 - protein, 346 aa, unidentified
MKQITTIGLDLAKQVFQVHAAAADGSPIFNRKLRRAEVLRFFEKTPACLVGLEACGGAHYWAREITALGHDVRLIPPVYVKSFVKRGKTDAADAEAISEAVTRKTMRFVPVKSADQQAAAVVLKTRALLVNQRTQVINALRGHLSEFGIIAAAGTTKVAGLISIVRDETDLRLPKAARLALMEVVSQIEALKAQIEKLEKVIVATVKRDDDARRLVTIPGVGAITAASVRALVPDPGGFKSGRHFAAWLGLTPKPHSSGGKERLGRISKMGNPALRSLLVVGATAVLRHARGNPNASKWLTALLARRPYRIVAVALANKTARIIWALLVKGGTYQDNGASNQRATA

SEQ ID NO: 138536 - protein, 415 aa, unidentified
MNENGKRYIGLDVHKHYLIALGVEEDLEVVMPARRVELSNLEGWMKKMLTRQDEVVLEMTTNTWQLYDELVEYAGSVTVVHPPHVALITRSQVMTDKIAASILARLLAKGLLVGIWVPPQEVRELRGLVAQRQKMTRLATQAKNRLHAVIQRHHLKVPEGDPFGKSNNGWWASLSLGRLEKMNLQSDLETLQFAQKQQSRLQEEMTGIAVENEEIGRLLHISGFGVITAVTVYAAIGDISRFEDAEHLVGYAGLGTRVHDSGLTTRTGKITKAGRRDLRVALVEAAHVAANSHPHWKAELARLQPRLGYNKAIVAIARKLLVTVWHVLARKVTDRFAEPEKVSKKMLHIAYEVGKGNRAGKSAAQFVRERMDTVGLGSELASIPWGTKKPILLPPSKLKKRCPEPVEGESAVPNK

SEQ ID NO: 138537 - protein, 320 aa, unidentified
MVAETKLASDVQDIIAYLDELELNLASVGLEAGTLMQYLTYGLQAAGFEVVCMEARQVKGALSAMRNKTDKHDARGIAQILRSGWYSRVHVKSMESHHIRMLLSSRKAVLSKCVDLENEVRGLFKIFGIKLPPKLGHGAFDVAVRDIIETDERLSQALLPLLDARLFLYQTFRVLDNRTRKMAHADMVCVRLMSVPGVGFITALTFKSGVDDPSRFKRSRTVGAYFGLTARRFQSGEMDIDGHISKCGDADVRGTLYTAANALLTRSSRWSPLKAWGMKLAKTRGHRRAVIAVARKLAVILHRVRTDDTQFRWGTEGARS

SEQ ID NO: 138538 - protein, 362 aa, unidentified
MAKVARPQQQTKPHATGAGQSSSVTLGVDTHADQHVAAALDQHGRLLGIHTIPTTPAGYADLLAWASAQGSIACVGIEGTGTYGAGLARWLQHRSLTVVEVDRPSRRLRAQRGKSDPIDAEAAARAVQGGTATGQPKAGDGPVEALRALRIARRSAIKARTQAINQLHALVLTAPDCLRARFRSLSPRALVAAAIRLRPPADARTPEAATKLALRSVARRYQALEAEIALLDQHLARLIEEAAPTLLAIKGVGTDTAGALLVAAGDNPDRLHSEAAFAHLCGVAPVPASSGKTQRYRLNRGGNRDANRALYLLAIGRLGWDERTRTYADKRTREGKSKPEIIRCLKRYIARELYPTLLKLVA

SEQ ID NO: 138539 - protein, 283 aa, unidentified
MKITTAGIDLAKNVFQVHGVDAHGKAVLRKKLDRSKMLEYFVKLAPCLIGMEACGSAHYWARKLGAMGHTVKLMAPQFVKPYVKTNKNDAADAEAICEAVSRPNMRFVPIKRDEQQAVLSLHRVRQGFVKARTAQANQIRGLLSEFGEVMPQGIAYIARRLPEMMEKPDLPGSFRDLLQRLYDHLKELDKQVDELDAKIQQWHKASDASKKLAQIPGIGPITATALVASIGDAKSFENGRALAAWLGLVPRQHSSGGKSVLLGISKRGDTYLRTKTPGLYGRC

SEQ ID NO: 138540 - protein, 461 aa, unidentified
MAKVARKIKTRKGLRLKIVNPDAAGIDIADGEMQVCVPEDRDGENNRRFDSFTCDLREICAWLKACRITTVAMEATGVYWLNIFLMLQEEGFDVVLANPLQVKNMMDEKTDEADAEWLMLLHTYGMVKPCFQPDNIARKIRNLTRHRSSMIMSASREVQHMQKAMEQMNIKLSTVISDILGKSGQAIIRAVIAGNHDPKSLAQLANWRCKASRETIAKSLEGTWDEDLLFILAQSVELYDTYQGKVAACEREMERLMMQYAARVDQGKAGELIRTKKRSNYRNAPAIDTEKYAHAVWGVNLMAITGVASGSLLQLIGELGHDFASKFDTCNKFCKWCNLSPNNKTTGGKLISSHIPRRKNPVGQILRQCANTVKDDKGELGVYFRRMKSRQGHMQAIVATAHKIARIIYTMVKHRREYDPRMVGCDEKELLERKIARTTMQLKRLNEKLGMVDLGTLPANA

SEQ ID NO: 138541 - protein, 368 aa, unidentified
MGQDTLWVGLDTDKKHIDVAVAEPLPGGEVRYWGQIAADPASLDRVIKRLRRDDRQLVVCYEAGPCGYGIYRQLNDKPGVTCYVIAPSMTPRRAGVRVKTNRRDSMTLARLLRAEELTPVWVPDPAHEAMRDLVRARGRAVEALMRCRQHIGGFLLRQDVRYIGEPWTKKHRAWLGQLEFAHPAHRLMFGELLDALDQAQARRDRLTDHIAELTPQWSLAWLVEALQVLRGYRLINAATVAAEIGDPRRFDKPRELMGFLGMVPSERSTGDSVRRGGITKAGNGRARRALIEAAWTYARPAKAPAPTGHSAALREIADKARHRLGARYRKLTARGKLPQVAVTAIARESIGFIWAIAHAAAPKPPRRG

SEQ ID NO: 138542 - protein, 423 aa, unidentified
MKEWKEITHYAGFDWARDHHVVVVVDRQGQIVADFQFDHSVEGWKRFRQKTAALESVAVAIETSQGAVVDQLLQYEYTLYPVNPAAAASYRQRKAPSGTKTDHLDAWSLADALRVDGHGWKALAPMDELSAQLRLLCRDEVALIEQRTALVNQLQQALLEYYPAALEAFEDWTMPSTWDFIIQFSTPEALVKAGKRRWKKFLHTHRLWRAQTLEKRLALFAQADQFKAGAAITRAKSQLALSLCKLLRTLQEQLDQYRKQIEALFETHPDHHLFGSLPGAREKLAPRLLAAIGSDPKRYGSFQVLQSFAGTAPISFQSGQLRRAKVRCACDKFLRHTVHLWADCFRKASAWGQAYYRKKRQDGKSHACALRCLGQRLLKILFRMLTERKPYDAELHARNQQKHGSWVLALMPNPTPHISEQLP

SEQ ID NO: 138543 - protein, 347 aa, unidentified
MLIIGCDFHPGFQQIAIFDNRRGEMEEKRLQHRAEAEQFYRSLAGQEVRVGMEACGHYPWFERLLAELGFELWFGDAAQVRASVVRKQKTDRRDAEHLLHLLIEDRFPRIWVPSLEVRDVRQLLVHRHQQVQARTRTKNQLQAMALSHGVQKKYKLWTQAGRAELEQLPLLPYAAQRRQKLLRELDAGEAEIGELDRRVAEEARQRPEAVRLMTHPGVGPVTALAMVLTLGPAERFESAKQVGSYFGLIPSEESSGGKQRLGKISKQGSSFLRFLLVEAGQTAARYDPQLKRFYRRLATRKNRGVAKVAVARKLATRMYLMLREGWTYAQLNQAVMSVSPSHSVAGQ

SEQ ID NO: 138544 - protein, 378 aa, unidentified
MTKIIRIGVDTSKSVFVLHGVDSNEQPVLREKLRRKQFLEFFATLAPTKVGLEACGAAHYWARELQRLGHEVVLLPPQYVKAYVKRNKNDAADAEAICEAMSRPTMRFVPIKTAEQQAALMLAGARDALIRRRTQLTNMIRGYAAEFGLTATKGLHKIEPLLARIAADAGLPELTKELFAMHAKEYAQLKVELEKIEAKLMAWHKRNEASRRLAEIPGVGPISASLAVMKVADPAAFRCGRDFAAWIGLTPKDHSTAGKTRLGVITRAGDESLRSVLVAGATAVIQQVGKGRGHPSPWLLALLRRKPPKLAAVALANKNARTIWKLLISGERYDPAHAFGRFDNDRPSGRRSAARCGATRSVSRSRSSNSPTAAAATV

SEQ ID NO: 138545 - protein, 406 aa, unidentified
MKQIISVGIDVSKGKSTVCAMIHPNTIIKEPFEVLHTVEEMSMLADYIGSLDGEIRIVMESTGHYHLPVAQFLYQKGFFVCVENAYIVRQFSRIMLHGAKTDPLDARKLAKYGLAYRSELKPYQFHPSCYTELSLLSKQYQTYIKLLIAAKQNVIHLMDEMLPGFKKALDTTSSVQFSKVKYVDFAKEFYHVDMIKSMGKETFRENYKQWCKEKGYRFQSEKADELFHLAEDGIPTLPTEFPSTRLCMEVATEQVSQLGYALEQILSQMQNLAKTLPEYQTIRQMGGMGEKLCVRFIADIGDVRRFHNGKALVAYAGIDAPPYQSGQYTSTKRRISKRGNSALRKTGYEVMKSLKSHPPKTDTRVYDFIIKKENEGKSRKQAKIAGLNKFLQIYYARVMEIYKNIA

SEQ ID NO: 138546 - protein, 408 aa, unidentified
MERYYLGVDWADEFHQVWVSDAQGEKVLEKKVMETVEGLTEFGRWLDENRAKGIELWAAIEKPHGRIVDFLLDHGVIVYPVNPKALDRVRDRFRISQSKSDSFDAYVLAAFVRTDHGHLRALAPNSEQAEELKLLSRDQYRLVRQKTRLLNQLNRTLKEYYVRPLEVFSDLESNLALDFLQQYPTPASVARLSRKQWNRFAQREHHLGEDRCKELWEKLHQPQLEVPEHVVRAKARLVAVLVVQLRALRDAVQSYNERIKSFFASMPAAELVQGLPGAKTGTIVATLWAELGDAKSRWETFRHLQAEAGVVPVTQASGKSRVVQFRFCCNKILRHAAYWLAFVSLNRSEWANHYYREQRSKGHSHPQALRALGAKWLKIIFVMWRDHKPYDENYHLANITRQKMRQVA

SEQ ID NO: 138547 - protein, 438 aa, unidentified
MSNNVIFNFDELFISVGIDVGADFSWMSIVLPNQQFVGKPYKILHNSMNSLALAVSKIKEAEELYSLESRIFLESTGIYHYPLFCYLRDKGFNCSVINPIITKNSTNINIRKVHNDRFDSKKAALVGLKPDLKVSLMPSDLALNCRNLCREYYDLMDSRNAYVNKLIGELRMVFPQYLGIFSKVTIDTSLILLETYTSPSAFINADKQEIIDLIRSTARFGLTYACNKYNAIIQAANDADEFGYILDSNIKRIRLYIGFIRKYDEEINSILESMHELVAANEDTDFVKQIRLIETFKGAGFLSAMSLMGEIGDFSAFSKPKQLFAYFGLDPAVKQSGKFEGTKIQMSKRGSAIARRVIHTLTLQSISASRTGESKNPVLRDYYLKKCESKPKLVAMGAVSHKVCNMIFAILRDSKPFEIITPQEHIKKYNAAKCDVAA

SEQ ID NO: 138548 - protein, 400 aa, unidentified
MAVMIGVDPHKRSHTAVAVDADEVELGRLEVRASRVQVDELVGWVRRFGARVWAVESADGLGYLLGQQLVAVGERVLDVPATLSARVRVLGSGRSNKNDANDGYSVAVAAMRAPGLRVVERADHAAVLRLLAKRNKQLGSARTAAACRLHALLAELVPGGISKEITPNRAERLLATVTPVDPVTATRHMLAVEHLGDLRRIDSQLRDLHRRMTETLEASRTTVTELFGFGPVGATIAIGYTRDVGRFANRDRFAAYNGTAPIEVSSGGRTVHRLSRRGNRQLNHAIHIAAITQIRHKHSPGRAYYERKLGEGKTTKEAIRALKRRISDALYDRLVADARANTGPGGQSGTTEQTSVTGITPRKPALRKSHSRTHAKRTATGQPASTTRRELARKHQQSTT

SEQ ID NO: 138549 - protein, 364 aa, unidentified
MKPTTIWVGLDVHKESIAVAVLGGSGPQDRPVVTVPNEPTQIRKLFGRLKKEGELRACYEAGSCGYELYRQLATMGIACDVVAPGLIPVRVGDRVKTDRRDAEKLARLSRAGELTSIRVPTESEEALRDLVRCREDAREDVLRQRHHVLKFLLRHGRIFRETKHWTLAHWKWLRAQSFDQPLAQVVFNEYLATLERTLARVATLDREISEQAKKEPYRAIVGRLRCLRGIDTLSAMALIAEICDFARFEHPRELMAYLGLVPSERSSGVKQRRGSITKTGNAHARRIFVEASWHYRHAPARSATMKARWEGQPQGVVDHAFKAQERLHRRYYRLTSRGKPSQLAVTAVARELCGFVWAVARNAP

SEQ ID NO: 138550 - protein, 401 aa, unidentified
MQVTRIGIDVAKSIFHLVAMDDRGKVLWRKALSRRRLLESLAQLKPALIGMEACATAHHWAREFQQLGHQVKLIHPAFVAAYRKSGKNDFNDAEAIGEAMSRPTMRFVEVKSLAQQDMQSLHRTRQLVIKQRTQVAHQLRGLLAEYGIVVRQSIAALRREAAELAGEPQRLTGAMRQVVANNLEQLSLLERQLRELDRDIASAGRADERCRRAAEVLGVGPLTATALVAKVGNARQFPNGRALSAYLGLVPRQNSTGGKTVLLGISKKGDRYLRTLLIHGARAALRVASRHTDRRSQWALGLMHKSGPNVAAVALANKNARVLWKLLSTGEQFRPQPPATEAERAHAAHRLASDQPAGQRAAVRPAHDCRISEQDFSASPPEAIERAGGKIHRFLKRQSSD

SEQ ID NO: 138551 - protein, 339 aa, unidentified
MKYTPVGVDIAKHVIQIHFINEHTGEVVDKQLRRQDFLTFFGNREPCLIGMEACGGSQHWARELTKLGHKVRLLQARFVKAFVMGNKNDVMDARAIWMAVQQPGKEIAVKTEEQQSVLVLHRTRMQLVKFRTAQINALHGTLLEFGETIHKGRAAMEREFPEALERMKERLPPYLIMVLENQYNRLNELDSLIEDIEKQLTSVARQNETCKRLLDIPGVGPLIATAAVATMGEASAFKSGREFAAYVGLVPKQTGSGGKVRLQGISKRGDTYLRTLFIHGARAVALVAKEPGPWITELKKRRPASVAIVAMANKLARTVWAITAHDRKYDRNHVSIRPY

SEQ ID NO: 138552 - protein, 339 aa, unidentified
MNATPVGIDIAKSVFQVHYVAPETGEIVNNQIKRSQFLEYFANRAPCMIGMEACGSAHHWARQLMQMGHQVKLMPAKFVKAFNVGNKNDAMDAQAIWLAVQQPRKAVAVKSEMQQAVLMLHRQREQLVKFRTMQINGLRGMLAEFGEVMGKGRTAMIKAVQDALARAEARLPKLLIDTLREQWTRVNKLDEEIATIERRLREWKKDDKAVQAVIEIPGVGLLTATAAVAMMGDPKAFKSGREFAAWAGLVPKQTGTGGKVSLHGISKRGDTYLRTLLIHGARSVLTNAKEPGPWVEGMKKRRPSNVVVVALANKMARTIWTVLAHDRPYRKDHVSVKPA

SEQ ID NO: 138553 - protein, 386 aa, unidentified
MHKLNDLNRSLTPLKPDGTLIAVIEMGLSSWLVAGIVPGIERQPLKKLEVDERTLLKLLICWREEAKKSGHRIERIAVAFEAGRDGFWLARWLRARGIEAHIIHASSVAVSREHRRAKTDRLDTELLKRAFLGWLRGERDHCKMVAIPTIKDEDAKRPNRERESLVGEQSRIVNRLKAALVRLGIRGFNPKLKKAVERLDGLRTPEGDPIPPNTLAELRRDMARRRLVSDQIRQIEDARLERLEQAPSDGPHAMVRLLARVIGVGIETADMLVQEVLSRNMRDRRAIARYAGLTGSPDESGRKRREKGLARSGNARVRRGMIQLAWRFLMFQKDSTLAQWFRARTENARSTRKTMIVALARKLLIGLWRFVREGVVPDGVVLRPVS

SEQ ID NO: 138554 - protein, 365 aa, unidentified
MAEVTRGEAARVGVDLSKRVFQVHAVDRAGRVVMAKPMAPERFFNWCAQLPAGCVVAMEACGGAHHVARRLRSLGLDARLIAGHFVTPYRMAGKSGKNDANDAAAICEAAGRPHMRFVPVKTAEQQGQLSVHRLREGYKAERTALINRIRGVLVEFGMSFPQSPEALRRVLAEVIEDGSNELTGIARLVLQRAHLHWIEVELQMKWCEERIGTHVRSDERASKAAALQGIGPIGASALVASVGDFKQFASAKQFGAWLGLVPSQNSTGGKASLGRITKRGDDYLRTLLIQGAKSAVMTAHKRSDRISQWLVQLKERAGWQKAVVALANKNARILWAVLTRDGEFDANHLPERPAPHCALSQRPAT

SEQ ID NO: 138555 - protein, 446 aa, unidentified
MKKSSRMSIVHPHAAGVDIGAEFHVVAVPPDADTEPVRTFQSFTGDLQRMSDWLKTCHITTVAMESTGVYWLPAFEILEAAGFKVILVNVRDAKNVPGRKTDVNDAQWLQKLHSFGLLRASFRPEHDISVLRSYLRQRERLTEYRAAHIQHMQKALMQMNVQLHHAVSDITGVTGLSIVRAIISGERDPSMLIQYRDVRCKKTPEVLRQALTGNWQPEHLFALEQSVAFFDFYQEKIRECDDQIETSLLQLSTGIEEPEGVLPSARHRTKQPNQLSFDVRPLLWKITGADLTQIHGFGPYLALKFIAECGTDMNRWPDASHFTSWLCLSPGNKISGGKVLSSKTRRSSSRIAAALRLAATTIGRSDTALGAFYRRLSSRIGKAKAVTATARKLAILFYNALKYGQKYVDPGADYYEERYRSRVLDGLKRRAKSLGYSLQQDPELCV

SEQ ID NO: 138556 - protein, 349 aa, unidentified
MITIGVDAHKRMHAAVAIDAQGREIAAWTGANTPAGWDALEAWAAQVGADRTWGIEGSGQYGRGLAQQLVRSGEPVVEVNPRLTADTRRRGRQRGKTDRLDALAVARTVQREEVALPVVVPLDVTAVLAITVAEREAALQEATRLRNQLHQHLFQLSATDDRAWPSLTTRSGVATLLDYLAPGTDPVLTAHAAAVRRLATRLEQTLAHVATLAAEIEALGQPVLAPLCAIRGVSDLTAGVLAAYLGSGHRFSTDAKLAMYAGVAPLPVGSAGTERQRLNRTGHRQLNAVFHRIALTQARCHPPAQEYLARKRAEGKSRPEAVRCLKRYLVRAVFRAWQQCEIPPLPPPP

SEQ ID NO: 138557 - protein, 349 aa, unidentified
MKVTTSGIDVAKSVFQVHGVDQRGNVVLRRQIRRSQVLLFFSKLQPCLIGMEACASSHYWARKLTALGHTVRLMAPQFVKPYRKNDKNDGNDAEAICEAVQRPSMRFVPVKSPQQQAELAVHRIRRRLMGKRTALINQLRGLLAEYGLVLAQGANHVRSKLPALLEGSESLPPLAVELFRDLYEELVQLEQRIGAYDHRIERLYRGNPVCQRLGKEEGIGALTATAFVATVAHAAQFKNGRQCAAWLGLVPKQDSTGGKTRLLGISKRGDVYLRTLLVHGARSAMRHTPKRNDPKSRWVEQLRKRRGENIAAVALAAKHARILWALMVRGESSPQPATHSIDPLEQPAV

SEQ ID NO: 138558 - protein, 370 aa, unidentified
MAKPTPLFVGLDVQKDSIAVAHAQGQSADPPVFLGTIGTRQGDLDKLIRRLQSKTPTLVFAYEAGPCGYHLHRDLTGQGFACHVVAPSLIAKKPGDKVKTDRRDAIALARLLRSGDLTSVYVPTVDDEAIRDLCRARDAARLTMKDAKLRLKAFLLRLGRHYVGRADWTAAHRRYLAKVVCPTPAQQIVFQELVRAVDEQVDHLQRLEAELQALAPAWRLYPVVQALQALRGVQWLVAITVVAELGDLTRFDSPRQLSAFVGLVPSEDSSGPRRRLGSITKTGNGRARRALVEGAWAYRSPAKVSAHIQRRLESLPKPIQDIGWRAQVRLCKRFRRLVARGKHVNVAVTAIARELLAFMWAIAKTVPITG

SEQ ID NO: 138559 - protein, 397 aa, unidentified
MSKEELNKKIEVVEKELGSYTWRELETNGKFAKNDKLSFITDDMLIVGCDIGSENHYIRAIDVRGRELSRGAFEFSNTSEVFENAKAWVLALAAKHDKKQIVLGLEPTGHYWFALAAWMISNGISVVQVNPYTVKQSKEIEDNSQLKDDRKDPKLIANLVKDGNYGMPYLPEKVYADMRRLSMFRDQLTEDRIRNINRLHRELKIYFPEYMDAFGKIDGAFTLEVLKVSAIPSDITALGAEGIKNIWHNEKLRGRGYSRANEIVSYAEKSVGLTDGIDAGREAVKWYAEQILKLVACSSGKHKGQTKISHRGRKRLRYWLFQAAKSAVSHADEFKQLHEYYTTRTNNPLKKMQSLVVIACKILRVIYTILKTGTTYDPQKLLEDIKRPTASHAPMAA

SEQ ID NO: 138560 - protein, 377 aa, unidentified
MNQTTRTSESTRTEAVLHMALELGAREWKLGFGVEAGRKASQRTVAAGDLNGLILEIARAKHRLGVPESTRVVSCYEAGRDGFWLHRFLLSEGVENVVMDSASIEVNRRHRRAKTDKVDLEKLLSLLIRFERGEKKVFGVAHAPTPEQEDERHLARELESLKQERTAHTNRIKGLLASVGARMKVAKGFLQKLDQAKQWNGEGLLASLRERLRREGERLALLESQIADVERSRRKAKVEATEKVQRLQELKGIGENSGWLFVVEFFGWRQFRNRREVASLAGLVPMPYQSGLSVKREQGISKAGNWRVRCMAIEIAWAWLRFQPHSRLSLWFQERYGPGSRRSRRVGIVALARKLLIALWRYLDGGVIPEGAVLKTK

SEQ ID NO: 138561 - protein, 452 aa, unidentified
MPDKPAPAFDETRRNVAGIDIAGHADHYVCGPRRDDGGHDVAHFGTTTAELHKLLAWLKERGVESVALESTSVYWIPVADLLEADGVEVVLVDTREVRMVPGRKSDVKDCQWLQRLHSCGLLRGGFRPPENVAAVRTVLRERESLTGMRVQCLQQMQKSLDQMNVRVHHAVSDIDGKTGLAIIGAIVAGERDPAALARLRDPRCGKSEREIAERLAGSWREEHLFNLGQAYRTLLFIDERLAEYDAKAAAMLRALAETSGKPPPPPPAGEDRTRKGTRDAEGKRDLQRIAGFDMTRLPGIGYDTAAVVLCEIGPDFARFPTERHFAAYIGLAPSLGKSAGKNVRQRKRCRNTSRAGRALRMAASTLYRSQTELGAFFRSVARRADRKTAVKATARRMAHLIYRAVRYGAAYVDNGAQAYEKRMRERALKAVRNLIKSHKINELELSTAFAAS

SEQ ID NO: 138562 - protein, 355 aa, unidentified
MNDAKYIGLDVHQATISVSVLDSAGKLVMEAILETKAETVLQFLGGLRGSLHVTLEEGTWAAWLHDLLQPHVTRVLVCDPRKNALLKAGNKSDRIDARKLAELLYMNKLNPVYHGEQGIRTLKELARSYLTITRDLTRVMSRVKAIYRSWAIPCAGQQVYAPRYRAEWLAKISEAGVRRRAELYYQQFDSLAALRQGARRELLAEGRKHLNTRLLQQIPSIGPIRAVLLLALMQTPNRFRTKRQLWAYCGLALRTYTSGEYRIVGGQLKRSKKVLAIRGLNRNHNHDLKNIFKGAATRAASTAGPFQDFYEACVARGVKPHLARLTLARKIAAITLLVWKKGVRFDAEHLKQQAA

SEQ ID NO: 138563 - protein, 336 aa, unidentified
MNKEHFIGIDISKDVLDLSLIHRASYGTFKDKKIKNSFDGFEQMYNWLIKQGISLEECVFCMEHTGTYGLLLFAWLSQIDLDYCVEPGLKIKRSLGLTRGKNDKVDARRLADYAYTNREKLEIFEFPSTLIIQIKQFLTYREQLVKIKTSLKNSLKSHKTYQKVSGISTISNEIQDQIEDQEKRIKEVEMQITKLIDADPGMKKNFELATSVKGIGLVIATFMLVTTNNFTGFENGRKYACYSGIAPFEYSSGTSIKGRTKVSQLGNRKIKSLLSNGANSACKYDPEIRAYYKRKEAEGKDHKLIINAISCKLVNRVFATVKRQTPYVIFKHQNFV

SEQ ID NO: 138564 - protein, 418 aa, unidentified
MLSIKHFVCCGMDVHKKFVVATIALTDYRGVTSYVKKRFATFNSDLNSLKKWLLSFNCTEICLESTGKYWIPIFNILEDSCHVVVANPKYVRAIKGQKTDDKDSAWIADLFKFDIVPSSYIPCKQIRMLRELFRYRQKLIGHRSSEKNRLQNALTVSNIALASVLSDTFGKSATAIVDYILTCEVFDPEYCKSLLLKKAKDKADDVVTSIIGYELRRDQSVKIKVCRKHFDEINECVSTLEETISDLAKPYHKFIEFATTIPGITEQSATFIIAEIGVDMAVFKSSKRLCSWAGLAPENNESAGKKKSVHVSRAGVYLKPLLVQCANAAIKSKNPYFRYKYDRIKKRRGHKRAIIAIARMVLTCIYHMFQKQEVFNPADTDYSAIPEEMYRKFQEQYDRNAIKRLEKRGYMITPPAMA

SEQ ID NO: 138565 - protein, 420 aa, unidentified
MEEITEEPAELVERVAALDIGKASLVCCVRVPHESRPGARRQEVRTYDTVTPALLEMRDWLICQGVTRVVMEATSAYWKPPFYLLEDDIECWVVNARDVKNVPGRPKTDKLDAVWLCKLAERGMLRPSFIPGRAGRQLRDLTRYRRTLTQERTREKQRAEKLLEDAQVKLSSVISDIFGASGRDMLAALIAGQRNPHALADLARKRMRAKTSVLRQALTGQFTGHHAFLLAMMLGRVDALTAQIDQLTTRIEKAIAPFAAQVAQLDEIPGIGVTTAQEILAETGTDMSRFPTPGHLVSWAKFAPKARQSAGRSKAAATGKGNPWLGGTIGEAAIGAARTRTFLAARYKRVVKRRGKKRALVAVGNSILTIVWHLLSDPDAHFTDLGPDWHDRLAPQRRKRQLITELERLSGQKVTLTDAA

SEQ ID NO: 138566 - protein, 359 aa, unidentified
MVSREEPRVLSLVIGVDTHKDEHVAVALDQLGARRSQRRIPASAQGYLDLERWASSLGVVTAFGIEGTGSYGAGLARFLVGVGHTVIEVNRSDRSARRRLGKSDPTDAELAARAVLSRVAHTAPKSGTAEVEMIRMLKSAKNSATKARTQAMNQMKMLLVTAPAEVRQGLDQLTARSLVSRCLGRRPGPLVTPAAAAKRTLRSLARRYRQLTLEIEELVADLERLTSAVAPALIKTFGVGADSAAALLIAAGDNPERLKSEAAFAALCGVSPIPASSGKTNRHRLNRGGDRQANAALYRVVIVRLRYEERTRAYMRRRTGEGRTKAEVIRCLKRYVAREVFVILKQLSQSTHPTPLDTL

SEQ ID NO: 138567 - protein, 343 aa, unidentified
MKHFVRLDVSVKETSICVVDGDGDVVLQTSVPSEPRAIVDVLAAPSLAIERIGLEAGPLSEWLYAGLVDAGLPAICVETRHMHAALSAQINKTDRNDALGIGQMMRVGLYKAVHVKTPASQRRRVLLTSRKLLQRKVQDLENELRGIVKTFGLKVGVVGKSRFEARVRELVAGDAILEAIVVPVLTARAALRTQYDALHRMVLALARRDPICRRLMTAPGVGPVVALTYRTVIDNPARFAKSRSVGAHIGLTPRMFQSGEVSRMGRVSRSGDANLRSLMCEAALVLMTGSGRWSSLKAWVIAIARRRGKQKAIVAVGRRLAVILHRMWVDGTDFRWSKETASA

SEQ ID NO: 138568 - protein, 342 aa, unidentified
MDYFAGLDVSVKETSVCIVDDTGKITREVRAASEPDALLAVLRDRSYRFKRIGLEAGPLSQWLFSALAEADLPVICVETRHMRAVLKAQINKTDRNDARGIAQMMRVGLYRPVHVKTLRSQKLRMLLTHRKLLQSKAIAIENDLRGTLRNFGLKVGIAGWTRFEARIEELIEDVPDLAVLIEPLLVVRRVLREQIAVLHRRLLTLVRDDEVCRRLMTIPGVGPVVALTYRATVDVPARFRKSKSVGAVFGLTCSREQSGERDRPGAISRCGDEMMRAMLYEAAQSMLVRSTRWSWLKAWAMQIAKRRGMKRAIVALARRLAVIMHRIWVDGTEFRWTREVIA

SEQ ID NO: 138569 - protein, 349 aa, unidentified
MLHAGLDLSRNRIDVCLLADGGELVGEFAVPSDSDGVAGLARRVLELGEPVQGVVESMNGARFVHDMLERFGWDVLIADAQKVKGLAPLACKTDKIDARVLAVLSERDLVPQIWLPDPGVRSLREQARFRMHLVNHKSTLKNRIHSTLITFGHPCPVTDLFGVAGRQLLDRLALPQPWRGTVDASIELIDYLERQVATINQQLRTDGADHPYVPLLLTVPGIGWVLAFTIAAEIGDISRFASAKKLCGYTGLCPRVIQSGERDRRGPLTKQGPKYLRWAMLEAKMHALRHPIYRERYQRTKQRLGRQRGAKVAQIELARKLSEAIWYMLTRNQPFKPFVPAGAISRLTA

SEQ ID NO: 138570 - protein, 361 aa, unidentified
MTKVSTMTDKAAATDFIGLDLSDKTGTYVVLSADGQVVRDGKLKLSQAGLSKAFAARPPAAIAIEVGGHSPWVSRTLTQLGYEVTVANPRQVKLISHGPKKNDRLDAENLARLLRFDPIMLRPVCHRGETAQADLALLRSRDAIVRARTRLINSARSMVKAAGGRLPKCSADSFHHKVQHHLPEMLKPALEPMLVAIASLTQQILASTRQLEKLADERYPETWVLRQVKGVGVLTSLGYVLTLEEPQRFGRSRAVGAFVGLTARQYDSGESQPQLRITKAGDPFLRRLLVQSAQYMLGPFGEDCDLRRWGLKLMRGGNNKILRNKAVVAVARKLAVLLHHLWLTGEVYEPLRQASLAEEAA

SEQ ID NO: 138571 - protein, 449 aa, unidentified
MSERTTACEAPSIRMTTDSAAVRATKGKKIMKPWIEITHYAGFDWARDHHDVVIVDRQGQIVADLRFDHSLAGWQQFRDQVKPYPALAVALETSQGAAVDQLLQQACQVYPVNPLSAKSYRERKVPSGNKTDRVDAWSLAEALRLDGQQWQALQPLDPLTQQLQLLCRDEISLIEQRTALVNQLQQALVEYYPAALQAFDDWTQPFCWDFVLQFPTPDQLAVAGRRRWEKFLHAHKLWRPETAAKRLEIFQTARQFCGSAAVTSAKSLLALSLAKLLKALQLQLDQYRLQIEALFKQHPDHDLFGSLPGVAQTLAPRLLGEIGGDPQRFADPQALQCIAGTAPVSFQSGQIHRVRVRYQCNKILRHTIHLWAQCCLRVCPWAEVYYRQKRAEGKSHACALRCLGQRLLKILWKMIQTRQPYDADLHARHQKQHGSWVLTLMKNNAKPAQ

SEQ ID NO: 138572 - protein, 356 aa, unidentified
MKENNKLDFTGQPIFIGLDIHKKSWDVSIHTRYGEYKNFSQPPGAAALAHYLRHHFPGALYYAAYEAGYCGFWIHDQLVQEAIACKVVNPADVPTKNKERRRKRDRVDCRKLARGLRNDELEGIYVPPRAKLEDRSLIRTRLSMGRKQSRCKNQIKSMLLFYGIQIPEQREMGHWSRRFIRWIEGIRMERATGDRALQIHLEELCHLRQILAKLNRAILALSRTEQYRPWVSLLRTVPGISTLTAMILLLELGEIARFPSLDPLCTYVGLIPDIRGSGEKEYVAGMTQRGHSYLRWLLIEASWVAIRKDPAMMEAFHEYCKRMKKSKAIIRIARKLLNRIRYVLKNQAEYVPCVIE

SEQ ID NO: 138573 - protein, 345 aa, unidentified
MIIGCDFHPSWQQVSWLDTETGDCGERKLVHATGDAKVFYQQLVAPVLIGMEATGNSQWFIELVQDMGHEIWIGDAAQIRASYVRKQKTDKRDAAHILKLVVEGRFPKLWTPDREQRDLRQLVLHRHKLVEIRSRVKNELQHLSMNKGMQKKRTLWSEAGQKMLRELPLKPWASCRREDLLGLLGMLNEQVRKLDEAVQLAAEEHPQARLLMTQPGVGPNTALAYVLTIGDVRRFPRGKQVASYLGLIPREESSGGRQKLGAITKQGNRLVRSLLVEAAQIAVRFDPGMKKQYLHRCHQKPKGVAKVAAARRLAVRLYWMLRTETPYPEIVRIESSPRVPLVGAS

SEQ ID NO: 138574 - protein, 369 aa, unidentified
MKSSVSLSAHPIHLGLDTSKNKIAVGILRWGEQVPDVEMVFNDEASVRRLIDRFGDRGQLRVCYEAGPTGFGLHRLLTSMGVACEVIAPALVPKAPADRVKTDRRDCQRLARLHRAGELVAIRVPTEAEEAVRDLCRARADLVQDRTRTRHRLSKFLLRHDRIWRADAWTGKHAQWLVGQRFDEAALRSTYGHYRAVLAARDAELAAIEADLAHWYTHGPFTDAVARLAAYRGIAQLGALTIASEVGDWRRFPAARTFMGFTGLVPSEYSSGQSVHRGHITKAGNAHLRTQLVESAWAYQHRPSLGAVLRRRQDGVEAATAARSWTAQQRLCARFRRLSARKTSRNIVTVAIARELAGFCWAEMTATGS

SEQ ID NO: 138575 - protein, 420 aa, unidentified
MDQTLFVGIDVSLKSNQVCAINFNQDKLFNLSFANTPSGAELLVSKIVETVDKYKLNKIIIAMECTGVYYIHIASFLSTNAILNNLNSTIYTVNAKSIDKYKDSYTDIEKTDPTDAFIIADFVRVGRTKVLSPFKGSQFLALQRLTRQRKHLADQISKEKCYVSANIFLKFSAIENTDNKPFSDTFGKSSSAILTDFLSTEDIINTPIDELVDFISSKGKNRFKNPEDNANILLKAARDSYKLDKVSYEAVGSAIASSLAVINCLQNEIKNVDKAIQKVIKGLNNDYYQILQSIPGIGPVFAAGIIAEIIDINYFKSHDQLAKYSGFYWPRHQSGEFEHSDKPMAKSGNMYLKYYISEATSMAIHHNSEIKTFYQRKYSEVKTHQHKRALALSSRKFIRLIFGLLCKNQLYVPSKFENMT

SEQ ID NO: 138576 - protein, 362 aa, unidentified
MIKSTTIIAFDQHAATTVAAVLLPGQRTPALHTLTSDSPTILRFIERVRRQGPIRCCYEAGPCGFELQRALCARDISCDVIAPALIPRRAGDRIKTDRRDAGQLAILYRAGALTAIHIPTEQEEAARDLLRCREDIRADLLRARHRLSKFLLRHGRRFTATKKAWSKRHDAWLRAQTWPIVALDQTHRAYLRGVDEVLARLRAVETELRALLDLEPLRPRVERLRCFRGIDDLTALTIAAELGDPRRFATAPSTMAFVGLVPSEHSSGTKRAQGGITKTGNAHLRRVLVESAWHYRHHPFVSATLRARQRGAPADVIARAWTAQQRLHRRYQRLAARGKPKQHIVTAVARELTGFVWAALTQ

SEQ ID NO: 138577 - protein, 355 aa, unidentified
MTASYDYHIGVDYHKSYSHLVVQDSGGKTLRSGRVKNDRQSLGSFLERYRENSHAVVEATRNWMVIYDWLDDICDDVVLAHPLKVKAIADAKIKTDKIDATVLAHLLRADLVPQAWAPSDKVRELRVALRERMFYVRLRTMTKNRIVTVFDRYPEQTAQLKALGDLFGKAGRVQLAQIEVSAIDRIQIDRGLAFIGDIDGRIKQAEATIRTMTKSNANVRLLKTIPGIGEFFARLIAAEIDDISRFRNPKKLAAYAGLVPSTYSSGGKTFHGKIIRQGNKWLRWAFVEAVTPAVASDPELRAQYEHLKIRGVNKARVAMARKLLTIAFQILRDQRAYERRDTSPMESASTISRLS

SEQ ID NO: 138578 - protein, 281 aa, unidentified
MRYVGIDYHKRYSVLCATDERGQELKQRRISGNSATGFAQFFSELGEESKVVMEACWNWGWLYDLLAKIDGIDEVMLAHPYKTRLIAEAQIKTDRLDAQMLAKLLRGDLIAQSHAPSAATRARKHLLRQRLFWVRLRTMLRNGMHAILDRQHGLERPQLKNFFSRRGQTWLEEVQLPCAEDQPLLTQDLEVAELLEEKIKQLDRSIGQSQSEEEKLLESIPGIGPLFSSVIATEIDGVGRFNSATKLAAYAGVVPTTHTPAADAYSMVACSGSAINGCAGH

SEQ ID NO: 138579 - protein, 412 aa, unidentified
MEILYTCCCGIDVHARMLVACLIKGGKKEVRTFSTMTDDLLRLLDWLTQQGCTHVAIESTGVYWKPVFNILEGAMEVILTNARDAKGYKARKTDVIDAEWLADLLRHGLLKASFIPPLAIRELRELTRYRESLIRERTALANRIQKLVESANIKLAQVASDALGVSGKLMLRALASGETDAKKMSELARRSMKRKQPELQRALQGRLTQAQRWVLTELLEQYDRIELAISRVEAKIRQEVEASADPFVAEAVKLLDTIPGVAETVAQIIVSEIGANMQQFPSARHLASWAGMCPGNNESAGKRKTGKTSKGSRYLRAALVQAAWVASHQKGTYLAAQYQRLVRRMGKKKALVAVGHSILVMVYHILTNRASYQELGGDYFERRNVEKQRNRLVRQLEALGLKVTVEEIGIAA

SEQ ID NO: 138580 - protein, 418 aa, unidentified
MISTRAASRLPCWRRRRGELVEKKLDHESGEAKRFSEGLKERALVGIETTGYTRWFAEMLGERGHELVVGEAGKIRAKRPRKQKHDRGDAAHLLGLLVRGDFPKVWLPSAEERDVRVLVEHRHQLVELRTRAKNGLQAMALSYGLRKRRRLWSQAGQEELKKIPLREGMGRRREDLLRLLAQLDGWVKELDQRIEQEVARREDAQRLMTHPGVGPQTALATVLVLGPVERFLDSRHLTSYLGLIPEEDSSAGRQRFGPLTKQGNRLLRFLLVEAAQTASRYAARLARTKFAAQVAEETAPSRKRVLSRPHGDWLDNRGDLAGVPTGDVALEFLDGLFLFSDDPFHQIADGNDAHDLLAFDHGQVANPVLGHNPHALVDRLVRRHGEDRAAHDFAHRGVFRQLTLQNHLARIVALGENP

SEQ ID NO: 138581 - protein, 341 aa, unidentified
MKVSTLGIDLAKNVFQLHGVDHEGHTILRKKLTRAKFVQFVIQLEPCLIGMEACSSSHHFARLFTRYGHEVKLIPPQYVKPYVKTNKTDAADAEAICEAVTRPNMRFVQIKTEEQQAVLALHTERGILIRERIACSNSLRATLAEFGITIAAGQSHLTHELPAILEDDENGLSPFVRTSIYRQSKHIRELEEQVKQVEQALASWYRTQEACQRIAKIPGVGMLTATYVIAAVGNARQFSTAKQFASWLGLTPKEHSSGGKQQLGGISKRGDGYFRYLLVHGARALTAWVNRNGAVEKNAWLQGLLERKHCNVAVVAMAAKTARIMWSMLTHNTEYQPRQLA

SEQ ID NO: 138582 - protein, 410 aa, unidentified
MEVLYQRCCGLDVHKETVVACLRIVSGGEVVREVRTFETTTASLMALSAWLAENGCTHVAMEATGVYWKPVWHILDDGDFQLILANAAHVKNVPGRKTDVNDATWLADLLAHGLIRASFVPDTQTQELRTLLRTRKQLVREKSSHILRVQKTLEDANIKLDSVITDVMGMSGRAMIEALIAGESNPAKLARLANYRLTAPQEKLREALRGRVTKHHRFLLRLHLNQIDALDAAIATVDQQVQAGIAPFRCAVELVTSIPGVSDIGAQVIVSEIGTDMSRFPSESHLISWAGMCPRNDESASTRRSNRVRKGAPWLKTTLVQCAWAAVRKKDSYLKAQFLRIEARRGPKKAIMAVAASILTATYHMLKDGTLYQDLGSNHFQTRSKGQQTKRLVQRLADLGYDVALTPLAS

SEQ ID NO: 138583 - protein, 351 aa, unidentified
MEQITEKSLYVGIDVHKRQWSVSIFTAVLHHKTFSQPPEPSSLHSYIDKFFKDYRVVCTYESCKFGFWIYLELTSFGYECLVVNPADIPTTNKETSEKTDPVDSRKIARALQGGLLRGIYVPDEFTLGHRQLFRYRKKLWVDLVRVKNRIKDKLLFNGLKIPQEHDNPYWSKAFLKWLVKVEFKSTHTRATLDHLLEHYAMIYRHFLKVSIEVRALHKLPRYKEDAKRLRQIPGIGPLTSVLLLIEIEDISRFKNFKHFNGYLGLKPMVHSSGDKDRKGYMTYRSNHALRSSLVECAWTSVQRDPVMLSCYEDLLTRHTKKRAIVKIARKLASRIYRVLKEKEDYEVGVVQ

SEQ ID NO: 138584 - protein, 364 aa, unidentified
MEVTAIGIDLAKSVFAVSGADSSGRVVVRRQLRRAQVLSFMRGLARCVVGMEASGGAQYWARQFTALGHEVRLMSPALVMPYRKGNKTDRNDADAILEAVSRPSMRFVMVKSVAQQDLLALHRVRTQLVKNRTALCNLLRGLLRERGVVVRSGVAGLKRGLPPALADESSELSGEMRELLSEMSQWLQTLEQRIASCEARITQKFKHDERCVRLAEVPGVGPLTATALVAAVGNAQRFKNGRELSAYLGLVPRQHSSGGKTVLLGITKRGDRYLRTLLIHGARSALRQCKGDARRGWAQRISVERGPNVAAVALANKNARVLWALLTRGDHYRSTSVIRSVVLRSDSPPAVKSSRSAQLLVVKD

SEQ ID NO: 138585 - protein, 426 aa, unidentified
MRAIGLDVHLEFCEVAISEGGEVRSAGRIETKPERIELFAQSLGSEDRVALEVTGNAWEIKRLIEPHVAEVVVVSPGDTGIRQARAKTDRLDARTLAKLLASGELEAVWMPDRETQVMRRRLQRRGQLVRARSRAKNEIHAVLMRRLVGRAPFSDLFGKKGRDWLRALELVTEERETVDAALRQIEFLDSEIEAVERLIATEALESPEIRRLMTVPGVNVICAATFMAAIGDIRRFESPRKLVGYLGLDPRVSQSGSTPATHGRISKRGSVSARHALVEASWSTVRQPGPIHAFYERIRARRGHQVGVVAAARKLACLFWCLLTREEDYAYAQPSLTAKKLRLLEIRAGAPTLKGTPTGTFATRQKMREAERELVSQAEAAYRRSVRDWHATQAKRKGAGATPGRASNGPSSGQAARQDEAPTPAL

SEQ ID NO: 138586 - protein, 372 aa, unidentified
MKQNLVHIGLDVDDTQYHGAAFNKDTGEVIDFKCRPTLKGLLQQLDRLARHFAGCTIKLCYEASYIGYCLQRDLISNDIHCDVVSPSSIPSPRGKAIKTDRIDAGYLAQFYANDLLTIVQPPDEVQEQDRDLLRSRQKVMQQQTQLRKHLQAVLRRNGLHYKAQTQYKTHWTKHHYFWLARTIDGLSGSLKVNLELLLRQLKALNEVLVEYGQQIEVLANSPRYQPAVQSLTCYKGIKNTFALTMITEIGDIKRFPHPRKLVSWIGMDIREYSSGGKHHRFGITKHGNRYIRTAFVEANQRGYRTAKIGKDLKSRRKHIAPELINIADRCLRRLNKKGNRLLLAGKHPNKVKVACAREMVGFVWESLNKVAA

SEQ ID NO: 138587 - protein, 406 aa, unidentified
MEVLYPRCAGLDIHKDSVVACVRCVSPPAHQEVRQFATTTTGLLALGDWLESHGCTHVAMEATGVYWKPVWHVLEGRVDLVLANAQHVRNVPGRKTDVHDATWLADLLAHGLIRSSFVPPTPIQELRDLTRTRKQLVREISQHSLRIQKTLEDANIKVASVLSNILGGSGRAMLAALVAGEADPERLADLAQGTARKKRRELIEALRGRVTAHHRALLSLHLGVIAALEAALGEVDAALGKALAPIQARADLLTTMPGVSDLVAQVVLAEIGVDMARFPSAAHLVSWAGLCPRNDESAGKRRSTRVRKSGQWLKTTLVTSAWSAVRVKESYLRAQFLRIKARRGPKKAILAVAASMLTAAYYMLRDGLEYRDLGPHYLDQRDRTKTIQRLLRRLHDLGYEVAPTAA

SEQ ID NO: 138588 - protein, 406 aa, unidentified
MNYLGIDVSKSTSRYVLLDNDGEQTTKSFTLPNDQKSFTQIIERFKELQLTTDNILIGIEATSIWWENLYCFMTEQKFKVIVLNPHQTNKFREALRYKAKTDDIDACVIAGLLRSGKYAASYIPEETIQILREIVKLRHQLVTNRQNFERQVYALLGLLFPEYEKTAIKNPFTVSSLAILKTYPTAKHLAEAKPKNIEKIVRSIVGNNFNIAEIKTLIETAKNSIYSGRAKDARGMNLNILLTHVETLHHSIAQLDKRMDDILSPQNSDDANSFPGANLLSIPGVGPKTLAAILSVVGADGSAYQDGKSFIGYIGFFPKIYESGETRRDNIISKRGPNYIRRALYIAAVACLKHNPELKALYDRKISQGKKPKQALIYVAKKLAHLCLSMLHSGESYNPARVFMPA

SEQ ID NO: 138589 - protein, 357 aa, unidentified
MKINEKKFIGKAFVGIDVHKSNWKICVLGELKFKKEFSCDPYPKALQTSLKNLLPDFEFECAYEAGFCGFWIHDALNEMEGINCIVVNAADIPTSDKERAQKEDKRDARKIAILLKAGVLNGIHVPDKDFVALREIQRLHYTVTKDLTRSKNRVKSFLFRHGIEICKEQFKKPNTHWSNKFIKWINSLELCPKLKFALDELMANVLRLRNQKLRILKIIRNEIQSNEELESIYNKLIKINGIGLISCITIITEVGDIKRFNTYEKFHSFAGLIPSTNSSADIEKIRGITNRANKRLRSILVEVAWISMSKEPTLLHYYNELKQRMSSNKAIIRVAKKIATKIRYELLKDDQELKVAA

SEQ ID NO: 138590 - protein, 336 aa, unidentified
MPLYCGIDLHSNNHVICVIDDKDKRLLELKLDNYSELTIRALSKYKKRLKAIAVESTFNWYWLVDALMEAGFQVELVNTAKVVQYSGLKRTDDRYDAFHLAHLMRLGILPTGYIYPKPDRGLRDLLRKRIQLVQDRSSHIIRLKSQVQMHTGQTLRTARIKTKKFQVPVVGDDNVQLALQSNLSMIRALSVQIAVLEKSILKQIEPIPGFYYLKTASGIGDILAQTILLETGDIRRFKGPGNFASYCRCVDSRRESNGKKKGENNRKNGNRYLAWAFIEAANFAIQYSDKARRFYHKKAKATNPIVARKALAHKIARACYWVMRNQEDFNESLVFA

SEQ ID NO: 138591 - protein, 449 aa, unidentified
MSTFRPVDRDTDFLLPPSVDEWLPERHLARFVVEVIEGLDLRAMIGCYRGSGEAAYHPRLLLGILVYGYATGVFSRWGGRPPMASMCQDAVVTTRAREPPAMSVSMIGLDIAKSVFQLHGVDALGKVQLKRKLRRDELILFFEQQPRCTVVMEACGAAHHWARVLSGLGYDVKLIASEAVRPFVKRGKKTDPADAAAICTAASRPEAKFVAVKSLEQQGVLALHSVRSLLVKQQTMLANAMRGLATEFGLVVPKGMDKLKELMRLVEEDKSIPVQAREVFAELREHCCAATERIEDLERQIVAHARQNDAARRLATIPGIGPITASLLAATVGDTIGTFPSARHFAAWLGLVPRQHSSGGKTHLGRITKAGNRQIRTLLVLGATSMVYRAEQWRSAAGAWVRGLLKRRSVRHVTVALANKMARIAWAVMARKEVYCAKGGVAPAAAAAV

SEQ ID NO: 138592 - protein, 316 aa, unidentified
MPRKELFIGIDVAKDVLDIAVRPTGDAWQVTNDDVGIAALVERLRGLRPALIVLEATARLHVAAVGALAAAGLPVQAVNPRQVRDFGKATGKLAKTDAIDARVLAHFADAVRPAVRPLPDTATQALSMLLARRRQLVEMMTAERNRRYGVSPSIRAEIDEHLVWLKARLAQADRELVRLLRDSPLWRERDDLLEGVPGVGPILTATLVADLPELGTLSHKQIAALVGIAPLNRDSGRMRGKRAIWGGRSAVRAVLYMATAAATRCNPVIQAFYRRLMASGKLRKVALVACMHKLLTILNAMVRRQTPWAPPVALVG

SEQ ID NO: 138593 - protein, 428 aa, unidentified
MSERDYNRQAARRQRVSKTTLIVGVDVGKAFNAVGFMNKDGNVLGSCGKLYNDREGFEQFVKMIEGLKAKHRLRDVLIGMEPTGHYWRKLAYFAKEHGYEVRFVRTTALKHHRELDESCSAKSDRRDALTIANITREGKYIDTVIEDGVLRQLRTLSKARERLLRYSVSAKNSLHAALDDYFPELHEIFRSMGARSLWVILDQCPFPEDVVLMKASTLQESIARSSRKKAGSARKAKALCEAAQKSIGVKQIGTADRYRLRMCLEEVKRTVLTLKDMDRQLKCMVKDIPSASYLMSIPGIGPLSAAVFLGELGDPAHFHNARQIVKYAGYDPQETDSGSWVSRKFISKKGRWLLRKYLFFMSMRVVVLSRYFQEYYHRKLETKNRVGQQPKRKEIICAVAIKLIKVIFALLRDKRSFEDTAPTAVAIA

SEQ ID NO: 138594 - protein, 407 aa, unidentified
MNAVGIDVSKGKSTVAVLRPFGEIVVSPFDVSHSPKELSKLVTLLKTLNGDTKVVMEYTGNYYLPIALFLRNNGFFVSVVNPILVKDYSTKSLTVRKVKTDKKDALKIASFALDRWKELSPFSAQSEARLLLKSYNRQYNQYNKLKIILKNNLIALLDQTFPGANTLFSTPTRKSDGHEKWVDFVLKFSHSECISKKSFSFFLKSYLSWCKKFGYKFSKSKAQAVYDFACNCSPSLSFSDSSALLVSNAIIQLNSINETLASLASEMNKIAATLPEYDSVMSMFGVGSVLGSQLIAEIGDVSRFPNKKALVGFAGLDASPFQSGNFNPQSRSISKRGSAALRKTLFQVMSVVLQRAPTNNVIFQFMDKKRSEGKHFYVYMTAAANKFLRIYYARVTEHLNLFTTTTA

SEQ ID NO: 138595 - protein, 456 aa, unidentified
MNQFFLGIDASKGYSDFVMLNAKKKIVIENFQLDDTFDGHARLYELLHSFNHDYPEATIYAAVESTGGYENNWFQSLLKFQASLPVKTAHLNPLGVSHNSKADLKRNVTDKISAQNVAEYMIAHPEKVSYQHQDSLASLRKQWGFVTMLTKQSTQLLNQLESLVYNANPEILIYCKDDTPQWVLTLLTRYPTALRLSRAKVKVLARIPYLSADRAKQLVATAKKSVASASDKVTAQLIVATVKQILHLKKNIKTQNDILASECQMPEVQLLKTFIGIGDYSAIGLMLQIQSVNRFLTSKKISSFFGIHPAYKKSGDGTYKYRMSKKGRKEGRRILFIVAMSAIQSNPLIRDVYQQAVERGMEKMSAMGLCMHKILRIVYGMLKHNKAFDPQIDLKNRQKTPPRQSKVGQDKDRRYQNFDSNAPISRRQKMKRKERKQSQNAVNVEYGISEASVPVS

SEQ ID NO: 138596 - protein, 380 aa, unidentified
MEKDIRYVGLDVDSERVAVAVADSAVTEVRSLGMIPNAAESVRRLVKKLGPVDGLRFCYEAGPHGYGLYWELTRLGAHCDVVAPTLIPVKSGDRVKTNRRDAEKLARLYRSGELTSVWVPDAAHEALRDLVRAREAAKKDQLRAKHRLGKFLLRRGLKAAAGVKSWTLKHLAWIKTLHFEHPAQEATFLDYLHEVEHASARIARLEGALDQAIETAPSTMRALIDGLQALRGVSSLSAATIVAEVGPLSRFARPKQLMGYSGMVSSENSTGNRVRRGAITKTGNAHLRRVIGEAAWAYQRRPSMYRALEKRQEGLSEEVKQIAWKAQHRLSGKYRRLLAKGKLHQKAVIAVGRELLGFVWAIGIQVEKEQRARASHGRVA

SEQ ID NO: 138597 - protein, 409 aa, unidentified
MRVFCGIDWAETHHDVAVVDAEGRLLARRRIRDDAAGYQQLLQLLAEAGDTATEPIPVAIETSRGLLVAFLRATSRRVYAINPLAVSRYRDRHGVAGAKSDHADAVVLAGILRTDAAAHRPLPADSELVQAIAVLARAQQDAVWSRQQLAMKLRSLLREFFPAALAAFHRKHVGLTAPEARAVLAAAPTPTQAASLTTAQLRRLLRCAGRQRNLDAWTKRLRASFHADQPRQLPLVEQAMGQQVLALLAQLQAACQAADDLAEATVAQFRRHPDYQIITSFPGLGELTGARVLAELGDDRSRFTDARGVKAYAGAAPLTRASGKRLQVLAHKVKNQRLAAVGYVWAFAALTASPGARAHYDRRKHAGDRHAAAQRNLFNRLLGMLHHCLATRQTYSEAKAFPAPEALAA

SEQ ID NO: 138598 - protein, 410 aa, unidentified
MRRISNRVAGLDVHRDSVTACVEIFDGVEVSVIKERFSTTVKGVRGLGEWLADADVELVVMESTGVYWKPVFYGLEGRFDDMWLVNAHHVKNVPGRKTDMSDAEWLADVAAHGMVRASMVPEPEIRALRELTRYRKTQIVARGVEMQRLEKVLQDAGIKLTSVASKVWSKSSRAMIEMLISGQVDPEVLAELAKGRMRPKIPALVEALEGRWGRQHSVVAKAIIAHIDFLDTTIDELSDEIVEATRPFDELVRLWSTIPGVSTRTAEMMVAEIGADMGRFPSAKHLAAWAGLAPASHESAGKRRPAGTRQGSRHLQGALVEAARAAARTKGTFLSERYKRIARRRGPNKAAVAIAHSMLVAAYHMAITGEIYRDLGSGYYDNRKDPKAKVNRHVKELQAAGYTVNLTPAA

SEQ ID NO: 138599 - protein, 347 aa, unidentified
MTIVEAARGVTGGVDTHLDVHVAAALDPLGGLLGTERFETNAAGYKALLGWLGTFGDVTKVGVEGTGSYGSGLARYLRRVGVEVLEVDRPDRQKRRRSGKSDPLDAIEAARAALSGRAKGKPKSRDGAVEAIRVLVVAKRSARQARGKALVQMRHLGYSAPEQLRCRMKGLSVPALVAEGKGLRPGRSPDPVTAATKASLSSLAHRISSLDEELAELNERIEALLVATVPDLLNLFGVGPDTAAALVMAAGDNPERLHSEGAWAHLCGVSPIPKGSGKSSGRVKAHDGGDRQANSALWRIVMVRIAHDPETQLYFERRVKEGKTTHEVIRILKRYVAREVYRYLPRA

SEQ ID NO: 138600 - protein, 464 aa, unidentified
MFRKSKGRRGMSLEDRPVEQPHAAGVDIGAREIFVAVPHDPEGQPVRKFATFTEDLWRLADWLQGCGVTTVAMESTGVFWIPLYELLEQRGLKPCVVNARHMKNVPGRRTDWHECQWIQFLHSVGLLRAAFRPEEQVCAVRAIVRHRQQLVEMAAQHVQHMQKAMTLMNLQLQHVLSDITGTTGLAIVDAIVAGERDPKELSKLRDPRVKASSDVIEKSLCGNWREEHLFTLGQSRQFHRFYQEQIVICETNIERLLQQFDPRVDPQQTPLPPDNKCNRSGAKRRKKAGHVESQFDLRTEAYKLFGVDVTQIPGLETNVLPLFGEVGRDLSRWPTASHFISWLSLCPDNDISGGRVLWRGMRKTNNRAGQIFRLAAQSLHRSPTPIGEYLRRLKAKLGPAGAITATARKIATLFYTLVTRQVEFDHTLWHANDAQRQQRIQARLTRQARRLGYQLVPLEVSSCT

SEQ ID NO: 138601 - protein, 413 aa, unidentified
MQKNHIEFEQVVERGCGMDVHKEVLVVTIQGKGIKTVTKSYSTYTSSLIKLKRWLKKHGITHIAIESTGVYWKPVFNVLGEDFEILLVNARHVKNVPGHKTDKKDSRWLAKLLLSGLLKGSFIPNQAIRELRDLTRYKTKLTNQVSAEKNRVHKILEDANLKISVVLSDIFGVTGRKFLNEIIKGKYKPETLLYMVHGSVKASKEDMKEALTGYVTDHHRFMLQTILKNISRIEETLQELEDQIAKVTEEYGDIIKLLETIPGVGHDGAIGIIAEIGLDMDKFSTHKHIASWAGMCPGNNESAGKNKSGRITYGNQHLRSLLVEQGWAASRTKNTYLSSKYKSLVGRRGKKRAVIAIGHKILIAAYFIIKDKVAFNELGEDHLNNFRKDQLVKYYKKQLEKLEPNLNFDNEAA

SEQ ID NO: 138602 - protein, 409 aa, unidentified
MELMHARCAGLDVHKDTVVACVRVAEEGRKTFRTTRTFGTFTSNLEELRAWLEEQQITHVAMEATGVYWVPVWHMLEQAFELILANPAHIKNVPGRKTDVRDAEWIAELLAHGLVTASFVPPAIIQDLRHLTRDRVQFEREKTRHVQRIQKTLQDANLKIDSVITDIMGLSGRAFLDAIVAGETDPERLADLGHRRLHASRNDLVEALRGIVTDHHRHAIKRHLGMVSSIEAAVTDIDEEVAALLEPFRAQVERLITMPGISEVSARVIIAEIGLDMERFRTAAHLVSWAGLSPRCDESAGKQRSTRIGRGGQWLKTTLVQAAWSAARTKDSHFKALFMRLKARRGAKKAIIAVAAEMLRSAWHMLSRLENYKDPGARPLDEQARQRAAAKLVHKLKKLGYEVTFPQAA

SEQ ID NO: 138603 - protein, 385 aa, unidentified
MMLIGIDPHKSTHTATAIAPDTNHEAASIRIDATLGEYRRMLTWSRQWPQRRWAVENAEGLGRHLTSWLLARGEDVVDVPTTATARVRQLSRGGGRKNDRIDAGAAACVAALQGDARPLEAEGYADAMAVLDERRVNLAQSRVRAVNQLHALLRALIAGGAPRDLSATTAAALLRTVRPNGAVEQARKAVAKDLVTEIRTLDTQLKANAQAIARLVAATGSTLTEVVGVGPIMAGRLISRTGRASRFLTASAFANYAGAAPVEIASAEKSRHRLSRHGDRQLNSALHTIAITQIRIPSSRGHRYYKSKIAEGKTPREAARCLKRRLADHLWRTMIDDERRAVGPRGQLGTTLQSSVAGPTPTTNSSDKSLPGPATHDSTTAKPAA

SEQ ID NO: 138604 - protein, 362 aa, unidentified
MRIVGCDLHARQQTLAMLDTTTGEVVEVTLKHEGDNVRESYSALPRPVRVGIEGTGSMQWFLNLMEELGIECQVGHPAQIRAAEPRKQKNDRRDAELILKMLVEGRFPAIWLPSKELLDLRALLRHRHQWVRMRTRIQNALQSIALANGLRRGTALWSHDGQSRIASLPLAPHTAYRRSELQAMYEKFEAEIEKLNQRVEEQACQRPGARLLMTHPGVGPITALATEVFLGDPARFADSKALASYVGMIPREYSSGGRQRLGGLSKQGNPLLRFLWGEAGAHAARKDPELQRFYRRKLVQKGLGKASVAVARKLGIRLWIMLRDHIEYNEFCRRGQKQQKSSDACAGMPETPYGANSHRPVD

SEQ ID NO: 138605 - protein, 400 aa, unidentified
MDKAQTAWAGIDVGKTHHWVCVLDAEGNKLSSMKVSNDQTEITATIATVGALADRIVWAIDIIGAPSAMLLALLTQAGQSVRYASGRVVAAMSAAYSGEGKTDAKDAYVIAETARIRRDLTVIAPGTDLVRNLELLTGHRADLIADRVRMINRLRDVMTSVFPSLEREFDYSSCKGALILLTGYASPERLRRVGETRLAGWLQRRRVRNYAAVAARAIAAARAQSVTLPGQEIAAAIIAELATSTLALDQRLTELDAQIAATFDEHPQAEIIQSMPGFGPTLGATLLVAAGDLAAFPSAGHLAAAAGLVPVPNDSGRRTGNLHKPRRYSRPLRHVFYLSAQTSMMRDGPNRDYYLKKRHHGRTHTQAVIALARRRIDVLWALLRDERTYTATPPALAQAA

SEQ ID NO: 138606 - protein, 423 aa, unidentified
MKVTYQTCCGVDVHKSFLVATIVKTTGGIEPSYQKKRFSTFNNSILEFKQWLLDNDCHDVCMESTGKYWVPVFNLLEDDINVVIANPKWVKAVKGNKDDTKDSKWIGDLFRLGLVRGSYVPCKKIRILREYTRYRYKLISCRSSEKNRYQNALTVCNVALDSVVSDIFGKSSTSIIDYLLEQSGTSINHEEIASKLLRSLKSKEDAVIESVEGYQMTDAQKYRMRLVRAHMDYITAEINDVDKMMENMISSNPDFENAVQFLCTIPGVKRDSAITIISEIGTDMSQFSSSKRLCCWAGLTPGSNESAGKKKSVRITRAGVYLKPALVQCAHAAVKSDKSPYYKKKYDSLVKRRGKKRAIIAIARMILTAIYQMMSTGEQWNPSDLYKIDMPVALVEKQKAKAIKQAKKLLQREGLLPPNFLTL

SEQ ID NO: 138607 - protein, 511 aa, unidentified
MRRIGIDIALKTAHKAAVFEGGERKGKPFPVPQTRAGIDELMRRATGGIDEPCEFVMEPTGLAWLPLAAELSRQGHRTYLPKPQKTNALRKFLAAHAKTDANDACAAALVRHVDTANTHELHVPSAQETTLKLYVKQRARMVADAAKAKVRIHSWLVLANPHLGKALGDTTSDVATAFLRRQLDPFQVLDRGMDELVRFWRAHSSGRFNSAQVEAVWTACETTCALYAELRASGQLPFEYAAVQRLVCQSLEQVEFFEGQLAEFDAQIAALYAALDPSRLLERQVPGVGAVIAATVEAFAGDATRFSSVKRYAAFYGLVPRTKQTGGAEGKPRQRLTKGGNNLLKQYMFLAAESARRADPVLAAVYASAIARGKHHYSAVIIVAHKLVRRIYAVLRQRAAARAGAAEAPMYRLQQPDGTSLTKSEARTWVATQFPPKRAKVARVKRTAGDLRQTRSVPQEGSSEDATKPSRLPPPNSLVPESAHAEKSADPNDKLGSIDKSEQGPFLLAAP

SEQ ID NO: 138608 - protein, 478 aa, unidentified
MARTRKKPVPAPAGEGVEVIDAPVQVIARAAAIDVAKGSGMVCTRLPSETRAGRRTQRVWEVTATFAAVVTLMDHLVNQGIERLVLESTSDYWRIWYYLAEAAGLEVWLVNARDVKHLPGRSKSDKLDCVWLCKLNERGMLRRSFVPPGQIRDLRALTRLRARLVHDRTRHQNRIEKILEDSLLKISSLISDLMGVSGRRMLAALVNGERSPKALAALGDYRLRATPAQLEAALTGRFRDIHAFEIGMLLELTDDLTAKITRLDQQITGLLEQIPGISGACTSCGVIGGGHAPACASDQAKVLSVIERLDEITGVGPGTAQVIVAELGTDMTQFPTPGHAAAWARLTSRTIQSGTTTKNGRTGKGNPYLRGALGAAVMTAANTDTFLGERYRRIARRRGKQKAIVAVARTICEIAYLIINDPGFRYIELGAGYYARLDPKRQTSNKIRELEKLNPGMVVTLTPREPDPGTPATQTPAA

SEQ ID NO: 138609 - protein, 334 aa, unidentified
MYQLGIDVSKNTLDLCLLREGIKGRIKTRKLKNTADAAKVVAEWLKKQSCELGEVHIIMEATGVYHEPLAYGLHFAGARISLANPHRTREFARGMNILTKNDKVDAWMLACYGSLKEPEAWTPPPESVRYLRALLRRRDALVADSTREKNRLEKSVFTDSPDAVRASIENMLQELSNEIEHLDVLIQEHIKTHPELNQDFRLLTSIKSVGYLLGLNMLAILKSHSFESAEQAAAFLGVVPVERRSGTSVKGKPKLSQIGPPEIRTKLYLAALCGLRFNPVMKQMYTKLCQRGKSKMCAIGALMRKLVHWCYGVLKTQLPFDAEYNQQSYYKTTC

SEQ ID NO: 138610 - protein, 452 aa, unidentified
MQERMDNSKSLSLECIEFNAAGIDVGATEIFVAVPPDRDPQPVRSFPTFTADLRAMAAWLVQCRITTVAMESTGVYWIPPHEILEEAGLRVCLVNSKHVKHVPGRKSDVSDCQWLQYLHSVGLLHASFRPDEKICALRSLSRHRSGLIESAAIHVQHMHKALTQMNLQIHHVLSDITGQSGMAILAAIVAGERDPQQLASLCHQRVRSDRQTVVKSLVGNYRAEHLFTLKQSLLAYGYYQELMADCDREIERQMCLLDGKADPPQRGPMPPLDPRTQKRRKNQFHFEMGPELTRVFGVDLTSIPGISALTAHTLLAEIGPDLSRFPTVAAFASWLALCPANKKSGGKVLSSRTRQTNSRANCALRIAAQTLARSRTHLGHFYRSMRARLGGPQAITATAHKLARIVYHLLTTGQAYDESVFIQEEQKQALRHEKRLRNQAKNLGFLLVPITA

SEQ ID NO: 138611 - protein, 388 aa, unidentified
MATIVALDVSKGKSFYVMYQEMTCLYEGEITHTKSGFQELHALIKNLPEVPEIIFESTGIYSRPVETFCQKNQLIYYVLNPLQAKQQMEKESLRKWKTDKRDAHRLAQTHWNNSRTKSVSAEPLYKELRDLSRFYQEIMDEIGRMRMHLHNAIQLTFPELEQVLSNRLTPYGLTMIAQYPHPSFVLKQSRTIIKNRLMASTAKKISENRARNKADELIAYAKDSYPAVSETAIPVAKTRYYAEQLQALLNQKERLANQMIETAKQLEEFSVIASFPGIGELSAAQFIGELGDLRRFSDPRKANAYIGIDIRRYQSGNYLAQDHINKRGNPKGRKILFYCQEYDKSTTRCSKSHCRLLLQIKKATPPEKRKGCHRSLYEQAAKVSPCHD

SEQ ID NO: 138612 - protein, 364 aa, unidentified
MEEPTHIGLDVHKETIAVAVLRPGTVACDERMIPNTPEALRRLFSRYPDGAALRTCYEAGPTGYDTQRLITSLGIACDVIAPSLIPRRSGVRVKTDRTDARNRARLHRAGELVAVRVPTPAEEALRDLVRAREDLKNDRRIARQRIRSFLLRYGKRYPAPGSRWSFRFEVWLRALRFSEPASQAAFEHLLGAYFMRDSQLGAVDAQITELALLEPLAEPVARLRAFRGIDTLTAVTLLTETCDFRRFGSAGSFMAFTGLVPSEHSSGQSRHQGSITKTGNAHLRRVLVEAAWAYRYAPAVRGKLRGRQIGQPPEVVAYSWAAQCRLHGTYRRLAAKKGPNKAVVAVARELSGFVWGAMSDRMAV

SEQ ID NO: 138613 - protein, 345 aa, unidentified
MNKISVIGLDLAKNVFQVHGVDGEGEVVVRKQLKRSQVRRFFTNVEPCLVGMEACGGAHYWSRELARLGHTVRMMAPVFVKPYLKSNKNDRKDAEAICEAVQRPSMRFVQPKTPEQQCVLHLHRARRLLVRQRVALGNHLRGILSEYGIVLPQGVKALSWRLPGLLEDAENDLPMLTRDLLAECKEEYDQLMERIERVEGRIKAWHATNRVSQRLASIPGIGVLTASALVATVGEGQDFSNGRQLAAYLGLVPRQASSGGKVRLLGISKRGDGYLRGLLIQGARNVIYHIRRRLRAGQPGGNAWVEQLLQRAHPNAVAVALANKMARIAWVLLVRNQTWCPASPV

SEQ ID NO: 138614 - protein, 317 aa, unidentified
MEHVTRLTAGIDTSKDKLDLAVHGSPLRLTVSNDKRGWRQLATECRKAGVNHIGIEPTAGYERGVTEYLRALNYVVLVLQPHRVRMFARALGIRAKNDRIDAAVIAACAHALDAPSVPADPRFNQFADRLTFIEQIEEDIVRAITRAQHARLPSIRQYYARELKRLRAERQRRLKDLACELRAEPDLGSRLALLLSIPGIGDRTAIAIIVRMPELGQISREQAAALAGLAPFDDDSGKHRGARHIAGGRGRLRRSLYAAALPAAFRWNPALKALYARLVARGKGHKSALVACARKLLTYANTVVARGTPWTAQSAAA

SEQ ID NO: 138615 - protein, 343 aa, unidentified
MQVVTTIGLDIAKSVFQVHGVDAEGNVIIRRQLKRRYVLTFFQKLAPCLVGIEACASSHHWSRELQALGHRVRLMPPAYVKPYVKRQKNDATDAEAICEAVGRPNMRFVETKTTEQQGCLMLHRTRHLFIRQQTAVINAIRAHLAEFGIVAPVGRNGVDQLLGVVADANDKRLPTVARACVAALGAQLQMLKAQILQFDRLIRAWHRSSEASKRLDEIPGVGPALATALVASVADPKAFRSGRDFSAWIGLVPKQNSSGGKDRLGSISKRGDRYLRSLFTAGALAVIRYAKIHGTKHRPWLTALLARRPTKVAAIALANKIARMAWAMMARGERYKEPAALAA

SEQ ID NO: 138616 - protein, 380 aa, unidentified
MMTMTRTSEFTAVALTGSTILLLAFELGERVWKLGFTTGLGPRPRVRQVASGAIGHVVEEIARAKRRLQLPPETPVVSCYEAGRTGFWLHRWLLAQGVTNHVVDSSSIEVNRRARRAKTDRLDLAGLLNLLARYQLGDQRVWRVVRVPSVAEEDARQLHRTWESVQQDRSRLIGRLRGLLSTQGLRFRIDGDFLQRLDAARLWDGRPIPDGLAQRIRRVWDQLKLVNTQLKELEAARRTLVPASSTVTCRYVRALPTLRGIGPIGAWMLATEIFGWRQIQNRRQLGALVGLVPAPYQSGVTNHDQGITRAGNKHVRRLMVELAWSWVRYQPDSALTQWYRRRFGSGSRRMRRIGIVALARKLLIALWRYGEHGEIPTARR

SEQ ID NO: 138617 - protein, 440 aa, unidentified
MKKIRKNAAGIDIGARKIFVSVESEPVKSFETFTESFHQAKDYLLSKGIETVAMEATGVYWVILYELLEQTGLDVWLVDGRQTKQVPGRKTDVKDCQWIQQLHSYGLLNRCYLPKDEVKEIRSYQRMREDHIRSASMHVNHMQKALTEMNIRLKEVLSQIHGASGLAIIEAILAGERDAEKLLSLCHISIREKKAEAVRKSLNGYYTRSGLFALKQAYDGYQFYQKQIKACDQRLQESMEELNNFHQDEKSKKMISSIKGRKPIRHNKPDVNYLGGHLLKIFSGTDATQLPGITDYTWLQLYTEVGKDLTNWPSEKHFTSWLGLAPGQHQSGKKSKSRNKKYRPKAGQIFRQMAQSLIESKKIALGVFGRRLKAKRGPGVAVKATARKLAVLYWRLIVYGKDYTEKGITAYQEKIQLQKERWLQKTAEEHGLRLVKINAS

SEQ ID NO: 138618 - protein, 420 aa, unidentified
MRNAGIHANSLLEVRRMYNAVGIDVSKGKSTVAVLQPGSTVIRKPFDVSHTSQNLNELADYFSSLDGTTKIVMECTGRYHEPMVKALSEAGLFVSIVNPHLIKNFSNNSLRKVKSDPADARKIARYTLDNWTELRQYSGMDNTRTQLKTLNSQFSFFMKQKVAAKANLIALLDNTYPGVNKLFDSPTREDGSEKWVDYAYSFWHADCVRKIGLKAFTERYKSFCKKHHYIFQQDKPEKLFNASKELVAVFPKEKTYKLLIQQSIQQLNLASEHVERLRREMNELASTLPEYSTVMGIYGVGKTYGPQLIAEIGDVSRFTHREALTAFAGVDPGVDESGQHKSKSNRASKVGSARLRKTLFQIMTTLLQNAPEADPVYRFLDKKRSQGKPYYVYMTAGANKFLRIYYGKVKECLRNLEQTE

SEQ ID NO: 138619 - protein, 283 aa, unidentified
MNYVGVDIHKRYSVLVAVDERGRELARGRISGNSVHAFAQFFEALQGPGRVVLEACWNWGRIYDVLSEIEQVEEVVLAHPLKTRLIAEAQIKTDSLDALALATLLRGNLIARAHVPSKATRARKELLRQRLYWARLRTRVRNRVHAVLDRQRELEMPQCSDLFGRKGLNALSKLRLAEPDATLLGEELDLLKLIDSQIKAQEGRIVAFNANEQATQYLQSLPGMGKILAAVAAAEIDAIERFDGAAKLCAYAGLVPTTYGSGGKVHQGHLLKSRNKWLQWAFY

SEQ ID NO: 138620 - protein, 417 aa, unidentified
MKSIKTEKIKTINEKTLVVALDIGKKVHYGYFRTPKNQDVKPFPFYNSGRSFNKFWKKLCRFKEKHMLGEVVIGFESTGPYAEPIANYLRRKPVKLVQVNPMHTKRIKELTGNSPNKTDKKDPRVIADVISLGHSLTVVVPEGAAAQLRRLTHARERAMERRTAMNNQLQDLVFVIFPELGDIIKPSTKTGMYLIKHYPDSESIVSIGFETLCNIVRKISRGKFGIDRVEKLYNAAKESVGITEGKESILLETSHLVSNIETENRYIESLEGQMIVYLDQIPYSHSILSIKGIGNITAAGLIGEVGDFRKFKTISEVMKLAGLDLFEVSSGKHKGKHRISKRGRALIRKLLFFAAINTVKSHGIMHAKYQKMLNNGTPKIKALIAISRKLFRIIFALARDNTKYVENYKSHEFKLAA

SEQ ID NO: 138621 - protein, 341 aa, unidentified
MNVDILGIDLAKRVFQLHGADRRGRALHRAKVSRPELMESIRQLQPRIIAMEACSSAHHWARQFQALGIEVKLISPHYVKPFVKTNKNDRNDAEAIVEAACRPSMHFVPVKSVEQQDIQAIHRTRDLLVHQRTALINQVRGLLAERGFAVARSPAAFKKSVPEILEEAQGELTSRCQTLLRMALDGFRAIEAQIAQTEDWLEAVMKQSALCQKIAAIPGVGTMTATAMVAAVGDAKAFKNGRHLAAWIGLVPQQHSSGGKSRLLGISKRGDAYLRTLLIHGARSVLIRVACRKDARSVWLQELIARRGYNRATVALANKNARIIQSVLSGPESYRPSMAEA

SEQ ID NO: 138622 - protein, 417 aa, unidentified
MLKIVFPVCCGIDVHKTFLVATIASTDRSNVTTYQTKRFSTFTKDLENLSKWLLDNQCADVCMESTGKYWIPVYNVLELTCEVILAHPKYVKSLRGKKTDKKDSVWIADLFKHGLVKASFIPEKAIRDLREVMRYRTKLVSMKSSEKNRYQNALTVSNVQLASVVSDTFGKSAQALINQLLQQPKDTSFDVLPFLHGSLKKIAGQISESLNGSIDDIQAQKIRSCTSHMAELDSHIEDLQAAADLLASPFTVALRIIESVPGIGHLSALTILSEIGADMSKFLSAKHLCSWAGLTPCNDQSAGKKKSTRISRAGCYIKPILVQCALAAIKDKSFPYYGQRYRVLKHRRGHKKAIIAIARMMLSVIYTLLSRGELFSKELYEESLKNPMVILSPEEQFQRLAKKFGYVVVKVHEPVPV

SEQ ID NO: 138623 - protein, 373 aa, unidentified
MWDPPRHGRSGTTALAPTIKRRGDVHQELEEDPMGIVGGIDIHRRQLTFDIVDFATGENVRGRVSPADRVELRRFLAGLDGAGGDVAMEGCTGWRYVTEELERAGFRAHVAEPADTAALRGNKRRAKTDRGDARQLRKLLMTGELPESWIPPRHVLEARGVVRLYKDLADQRVAWTQRLHATLYHHGVPELGCPVAGEQARTLLHDAELSPAARRAVEVALAQIEVVNEMLAPIKLDLARLSRHQPGCQALTAHYGIGPVTSVAIWCEMGDTRRFSSSSDAVRHAGLDVTVYQSDSNRAKGHLARQGPGLLRWALYEAAMSSTKKASPDHEYFCSLRERLGTQRAALAVARKLARWCHHALRAAGDDAWAEAA

SEQ ID NO: 138624 - protein, 362 aa, unidentified
MLYLGCDVHKNYTTMSFITEDGKVADTSSFYNDIEELKNLLKKFPKEEFSAVLEAGLNWGVIYDMLDSLPEVKNVSLAHPPKVKAIASAKIKTDKIDSKILGQLLRTDLIPEVWIPCKETRILKDIVRSRAFIVKIKTMIKNRIHDILRKSHINPPEVKDIFGKYGRMWLEEIELSDKRADKLLRYHLKLKDTFEEMEIELKKWINKEMKTSEDLKLVKTIPGIREVFGPIIVLEIDDINRFPDPAHLHSYSGLVPSTHVSGNTSYHGRLIKGNRWLRWAFIEGAHTSVRVSPYFRKHYDSVKRKAGSQAASITSARKLATIIYKVLKEKRPYIEEYRIKQNIGRSPSVRPSGGITSRSFQE

SEQ ID NO: 138625 - protein, 422 aa, unidentified
MNYKQNEKINQVKESTLVVGIDIGSTTQYARAFDWRGIELGKVFPFSNSREGFESFKAWMQHLQDKYKKLDAIVGIEPTGHYWFDLGAYLEDEGILLVMVNPYAVKQTKELDDNSQSKNDRKDPKVIAKLVTEGRYSAPYTPDGVYADLRIMVANRKRLIREMSQIKNRFARWFAIYFPEYTDVFGDYEAQSSMLLLKKVCTPEAIVELGAEKINQIWRDAKLRAVGMKRATTLCETAKRSIGLKKGSSAARYEMKLLLEDYEYKKAQLDAVMEEIEKLCRKIPESEQMLAIKGIGVITVAGFLAEVGDVRRFESPRQIQKLAGLSLRENSSGKHKGQTTISKRGRSKLRAVLFNAAIPLIAKNPEFKSLHEYYTTRANNPLKKKQSVIAISCKLIRVFYAILANGVTYDAQKMLSDIHRQP

SEQ ID NO: 138626 - protein, 323 aa, unidentified
MNKYKETFGVDISKDVFDVYGSECGHSQFKNDEQGFKLFVKTLAADSLVVMEATGYYHYRLAQFLYKNGITVSVVNPLSVKRFIQMKLAKVKTDKSDAKAICNYGLSNEVPLYNALSDVQAECLQLFRLMDSYLKKRTATKNKLHGEEVLGIPSKYVYRSLKRDLKHLNKEVKGIEDRLLELVKQDQQKQLTLLTSIPGIGIKTALFLVVITDGFSKFEKASQLCSYVGITPTIRESGSSVRGRSRISKVGNKKLRNLLFLCAFNACKHNKGCREIYERIVAKGKSKKLALIAVANKLLKQAFAIAKSGLPYDENFVSVLTKG

SEQ ID NO: 138627 - protein, 416 aa, unidentified
MNAVGIDVSSRKSTVAVLRPLGEVVCLPFDVTHDIAGLASLVEKLKALDGETRVVMEHTGRYYEAVEKALHEAGLFVCAVNPLLIKEYGANSLRRVKTDKADAVKIARYALDNWADLRDFTPMDAIRYDLKTLNRQFQLASKQRTASANNLIALLEQSFPGIRKCFDSPVRSDGTQKWVDFAHSFWHVDCVRKQPFPAFCERYRKWCKRHAYLFKQSNAEEVYALAKRAVVLTPKSKVVKVLVQEAANQLSSISRSVEVYRAEMDRLAAMLPEYPVVMAMYGVGKSYGPQLMAEIGDVRRFERKQALVAFAGIDPMPNQSGDKNVRSNKSSKRGSPYLRKTLFNVIRTYLQCAPQDEPVFQFLNRKRAEGKPFYVYMLAAANKFLRRYYAKLRDYFASLDTLQPVAPIPTILKAAL

SEQ ID NO: 138628 - protein, 388 aa, unidentified
MQTVADRPEAPTAIRTDLGAIFVSLELSRSTWLITSLSPGGGEKMSKQVVRGGDVAGLLERFARLREKARARTGKVFPFVVIQEAGLDGFWIDRALQNEGIESHVVDPASIATSRRRRRAKTDGIDGEALVRALLAYKRGEPRVCAMVKAPTPEEEDRRRLCRERKVLIGERVQHVNRVKGLLFSQGISGYEPLRRDRRRRLDTLQTGDGRLLPVHLKAQVCRELDRLELLLEQIKAVEAERDVLLAAQQVAAPAPAAMLLDIKGIGPEFAAILWSEGLFRHFDNRRQVASYAGLAPTPWQSGSVDREQGVSKAGNPRLRTTLIQLAWLWLRHQPQSALALWFEERVRRNGGRLKKTTIVALARKLLVALWKYVTAGVVIEGAVMKRT

SEQ ID NO: 138629 - protein, 379 aa, unidentified
MTSTDAAADTRETVYAAIELSKKTWVLGIAPPDRDRPSIHRIGGGNIAELVSRLRVACRNNRRIVVCYEAGYDGFWLARALVKIGIECRVLDPASIQVNRRARRVKTDRIDVLALLRALIATDRGERHVCAIVRVPSVEEEDARRSHRERQRLVRGRTGHINRIKGLLFAQGIRDIKPKLRRTRIDFAALETAEGHPLPGRLRCELEREYTRLALIETQLREVESERDTADAQDPVVEQKRQILVALHGVGSTSAAILAREVFARSFASRRQLGSYLGLTPSAYDSGSTTRCQGISKAGNSWARRILIEVAWLWRKYQPASPLSNWYTQKTTGQSSRIRRIMLIALARKLAISLWRYVETGLVPEGVVITRSESQCGLA

SEQ ID NO: 138630 - protein, 433 aa, unidentified
MQDVQDEPLFCERVAGLDIAKAGVEVTIRVPSDTTAGRRQQETRTFGTTRRELESLGDWLACWGVTRIGMEATGDYWKPVFFLLESRGFDCHLYNAAQVKALPGRPKTDRADSIWLARITERGSVCSSFVPPEPIRALRTHTRYRRHLTQARTAEKQRVEKLLEDGHLKLSSIISDIHGVSGREMLNAIAAGQRDPRVLAQLARGTMRAKIKRLEEALDCAFFTGEHAAVLAMMLATIDHYTTQIDNLTAKIEVLAEPYLHQIRQLDEIDGVGPVCAQDIIAEIGTDMTVFPTAAHLVSWAKWSPQVKQSAGKRKGSNATGRGNPYLSAALGEVSISAGRTQSFLGAKYRRLARRMPKKKALVATGNSALTIIHALLSDPAARYTDLGPDYYEQRMHTRRQARNHIKSLERLGYQVTIQALNPTAGQPLTATA

SEQ ID NO: 138631 - protein, 407 aa, unidentified
MQGSVITLDVSKGSCHYQGFIKKNQPSTKTRILKFTKKSFAELSAYRERLAIKAGQEDIPFIFEATGVYHKPLQKYLDDHGFTYYIISPLMSARYRKLELHSNKTDPLDCANIAKVFYEYDKLRVYQRMDKEYESLRDMNRNYEDMLVHLRKYKVRFKSMLDVIFPYYQKCFKNDGIYADLPLILLKEYKHPDIIHQTSEDIMVKKLSKLCPKHQTGYIRNKVQKVKELAEDVYSGCESTDIYVELFTELIETLQKQMKECDEQLIKIIETAAKSPYFDLIRSVVGIGDNLAARILAEIGDINQFDTRNKLISYAGLDPMIRQSGKKDGIHLSVSKKGNRYLRCLLYQAASANYRLKKNDVIYRFNQKKRQQSNPLNSKAANTATAHKILVIVYGMCKNGTYYNPCE

SEQ ID NO: 138632 - protein, 460 aa, unidentified
MKRARSIHPKKGSASVSSSSFSMIHPHAAGIDIGSREHWVAVPEERDEHPVRRFGCFTADLYALADWLKRCGVETVAMESTGIYWIPLYQILEDRGFDVKLVNARHVKNVPGRKSDVQDCRWLQRLHSYGLLSGSFRPEAQVCVLRSYLRQRDNLVRYASAHIQHMQKALGEMNLQLHKVLSDITGVTGMRIIRAILAGERNPAALAALRNYRVKSTEDEIAKALEGDYRAEHLFALQQAVELYDTYQQKIADCDGRIEALLGSFEPRLKGQPCVPATPRKRRKNEPYFDLRGHLHRVTGVDFTQIKGLDTSTVQTLLSEVGLDPTRFPSEKHFCSWMGLCPDHRITGGKVKKRSTRKVSNRAADAFRLAAQTLANSASALGGYYRRMRARLGAPKAITATAHKLARLFYRLWKTGDAYQDPGADYYERMYKERILSNMKRKAKELGFTLELKPLERAVS

SEQ ID NO: 138633 - protein, 374 aa, unidentified
MKDTIKYVGLDVSKEKISVAIAEEGREAPRYYGMIPHSLEAIKKLVKKLGDKKQIKVCYEAGPTGYPLYRFFLSLGIECFVIAPSLIPSKPGERIKTDRRDAVRLAQLFRAGELTSIYVPTEDDEALRDLVRAREDAKEDELRAKHRLTKFLLRHNIKPPTDVRKWTLKYREWLNKLEFTRSTSRIVFQEYYYQLQEIEQRIKRLEKEIDIQATEGLHAPVIQALQSLRGVATITATSLVAEIGSFKRFTSAKQFMSYVGLIPSEYSSGESRRQGKITKTGNKHVRRLLIEAAWSYRYQPAVKGELKRRQEGQSAVVQAISWKAQNRLHKKYFRLLSRGKESGKVVTAVARELAGFIWAVTQEIETNSSVLIES

SEQ ID NO: 138634 - protein, 395 aa, unidentified
MNSVGIDISKGRSTIAVMRPFGEVVISPFEVRHTDSELSELARQLKILDGETRVVMEATGNYHAPVAKLLHDAGLYVSVVNAKLVHDYGNNELRRVKTDRKDAVKLANYGLDRWLTLTRYVPEEDTRLLLKNCYRQYRQYSKVQTVLKNNLISLLDTVFPNVNRLFSSPAREDGSEKWVDFVAEFWHCRCVSEKSEKAFANKYQRWCRKYGYNFNEAKAHTIHAEASGHIGVMPMSETTKLLVEQAVAQLRATSTALAALKHEMQYPAVMDMFGVGPTLGPQLIAEIGDVRRFYSKKALVAYAGLDAPPNDSGDVTGRHKSMSKIGASSLRRTLFLVMTVYLQNAPLDEPVYQFMDKKRAEGKPYRVYMMASANKFLRIYYATVKAYLESLEHTA

SEQ ID NO: 138635 - protein, 366 aa, unidentified
MSSLTSPAGAIHLGMDTSKNTIVVAVLMPGEEVPVIDRMWNEEGSVRHLVGRFADRAALRACYEAGPCGFELHRLLASMGVACDVVAPSLIPRRPGDRVKTDKRDAGRLARLHRAGELTAIRVPTEAEEAVRDLVRARAALLADRKRAQQRITAMLLRHGRVWRSGSYWTQAHEQWIAAQRFSEPALGAALAHYRAALDTRQAELDAVEAELAPWAGREPLAAAVARLGCYRGIAGLTGLVLAAEVVDWRRFPSARAFMCFTGLVPAEYSSGERTRRGSITKAGSEPARTALIEAAWSYRFRPAIGVTLRRRQHGAAPQTLARSWRAQRRLHARYKTMTARGKPAAVAVTAMARELAGFVWAEMTS

SEQ ID NO: 138636 - protein, 428 aa, unidentified
MEVIMNTQSTLSFTAFVGFDWSDRKHDYCLQAAGSDQREFGTLDHSPEVIAKWAYSLRDRFGGGPIAICLELAKGPIVSALKQYEFLILFPVHPSTLAKYREAFVPSGAKDDPTDAEIALDILLRHPDKLNPIKLQSVAMRTLATLVEERRFLVNQVTRITNRITSSLKEYYPQVLDWFDHRDTLIFCDFLERWPTLKHAKRARNATLKSFFRLHNANRAYLVEERIQGIRAATPLTEDQAVILPKQMLVQVLVEQLRMLLQAIDRFDAEIDIVTKDLPDYDLFAALPGAGHILAPRLLVAFGEDRDRYAHAAEIQRYTGIAPVVERSGKKCWVHWRLACPTFLRQTFVEWAGATIPRSFWAGAYYQQQRKKGCSHRVAVRALAFKWIRIIYRCWQTRTPYDESVYLNALKRRGSTLLANLSESAIMT

SEQ ID NO: 138637 - protein, 391 aa, unidentified
MIYVGIDVAKDKHDCFITNSNGEVLFKAFTISNNQDGFNVLYQRIESVMEDVTKVKVGLEATGHYNYNLLGYLIDKGLTTYVINPLHTNLYRKSLSLRLTKTDKVDARTIAYMLMSDVNLKSYSDTSYHNEELKSLTRYRFNKVKERAKLKTSVSRLVCILFPELEKLVPTLHMTSVYALLSEFPGAKHVAGAHLTRLTNLLSDASKGRYGKDTAITFREAARASIGSNMPAKSLELKHTIKLILELGSEIEEIENEIKIIIDEINSPILSIPGINYRMGAMIIAEIGDFSRFDSPDKILAYAGFSPSTYQSGQLDSAYSHMEKRGSKYLRYALYNAAKYVCHWDATFAEYLAKKRAEGKHYNVAISHAVKKLVRVIYHLVKSNQQYIKVA

SEQ ID NO: 138638 - protein, 361 aa, unidentified
MQETMTAVGLDVHARSTHAAAIDVVTGELRRSRFGGDSDEVVRWLTELPGPVRAAYEAGPTGFGLARAAAAAGVHVMVVAPSKTPRAPGDRVKSDRKDAELLARLLLAGQLKQVVVPPDWLEAIRHLSRTREQVRRDLSRARHRVSKLLLVEGRVYQGKTTWNAVHRRWLGSQRFQFEPTELAFIDLLAAVDGLLARRQVLDERLSRLAEDERLWPTVSRLRAFRGVDTLTALSLHLELGGDWQRFSSPRKLSSWLGLTPSLDQSGESAVQGSITKTGSSIARRLLVEAAWHYTRNPAIGATLGNRQAGQPEHILRISWRAQHRLRRIHERFKERGKPANVATIAVARELAGFLWAAATAP

SEQ ID NO: 138639 - protein, 418 aa, unidentified
MNTKNDNFSAYVGLDWADKKHDICVQVKDEESRAFSVISHSPESIHDWVEGLHKKVKGNIAVAVELNKGPIVYALQKYSFVTVYPIHGLTLARYRQAMFPSGSKDDPSDAELALDMMLNYPKKITPLKPSSEKTRTLALLVEQRRLLVDDKRRHANRIINALKQYYTQPLEWFSHRDTELFCNFLIKFPNLNELKRVRTNTVAKLLNSRGGPTVKKTPERIASIKEAIPLTNDESLIIPYQTFVIALAKQMLVLINNIREYDSQINSIFTSMDDASIFASLPGTGPCLAPRLLAALGEDKSRFSSAQEIQNYAGLSPVTERSGQKSWVHWRWQCSKFVRQSFIEWASKSVAQSYWAGIYYAQQKAKGNSHQSAIRALAYKWVRILFRCWKTGKAYDESKYLKALKEKGSPLLVVEKAC

SEQ ID NO: 138640 - protein, 341 aa, unidentified
MNLKMIGIDLAKSVFQVHGADDKGHAVMKKQFKRAQVLPFFANLTPCRIAMEACGSAHYWARKLQALGHTVKLIPPQYVKPFVKRNKNDAADAEAIYEAMTRPNMPAVPIKNAEQQAILSVHRARQGFVKARTAQANQIRGLLAEYGITIPQGISNIAKRVPEIIEDGESDLPGSFRLLIQRLVCHLKELDRQVGELEGEIQLWHRENVASQKLAKIRGIGPMTASAMVASVGDARSFKNGRQLAAWLGIVPRQHSTGGKSMLLGISKRGDTYLRTLLIHGARAVIRVAEHKPDADPWIKKLLARRNKNIAAVALANKNARTIWALLAHDREYEASYKMAA

SEQ ID NO: 138641 - protein, 416 aa, unidentified
MENGMEKIYDTCCGIDVHKKLIVACLRKGNRQSEIREFGATTRELLELADWLKDNDCEVVAMESTASYWKPLYNILESSDLNAIVVNAKHMKAVPGRKTDESDAEWIAKLLQHGLLTASYIPDKDQRELRELVRYRKSLVQERNRELNRLQKMLEGANIKLSGTIRDINGKSARNLLELILSGKRIDSAKYDELYEQNVISHNLKASREQIIDDLNGVLSSIQRKMMRVLLDHIDELNKHISELDDDIDNFMKPKEKDAVSMLEEMPGIGTRSAQAIISVIGIDMERFPSDAHISKWAGLCPGNNESAGKRKSGKTSKGNQLLRSTMIVCAHSAVKKKGSYFYAQFQRISSHRGKKRAYVAVAHSMLIAIYHMIKNGDMFKDLGSGYYNQFNKERKINSYLKKLKALGWEAPAVAT

SEQ ID NO: 138642 - protein, 411 aa, unidentified
MFVFGVLVTMIDSEAVELVGKGVRGGKRLAFSTASHPGSPQANCPQIHSRRVFRRISTIIPWDTKPAGEQVAVRRILTFNPNGCLGLGARIDARMGMSESKVEVFVGIDVCKSTLDVRIEPPGEVFQVDNDDAGIRALCTHLSELAPTLIVMEATGGLETRAAGELAARGLCVAVVNARQVREFAKATGQLAKTDRIDAGVVCSFARAIRPAARPMKEALTAELDDLVTRRRQLVEMRVQETLRLQGASKVQAKSLKAHIVWLNKRIKSIETDLGTRLRSSDAWRVKDDVLLSIPGVGEITSRSMLSRCPEIGQLNRREIAKLVGIAPLNNDSGKYRGQRHIWGGRADVRSVLYMAAVSAKRCNPVIKALAERLKRAGKAPKVVIVACMRKLLTIMNAMIRSNTPWNPKIA

SEQ ID NO: 138643 - protein, 350 aa, unidentified
MIIIGCDYHPGFQQIAFVDTETGDYEEQRLEHSEGAEKFYRDLAGQEKKVRVGMEASGHARWFERLLGELNFELWIGDATEIARKRERKQKTDRQDAQHILQLLMENRFPKIWVPSGENRDLRQLLWHRHRMVQMRTRIMNQLQAVALNEGLRCKKRLWRQPGREQLESFQLAPWASQRRADLLELLDRLNPTIAKLTEAIDLEVEKCPAARRLKTHPGVGPLTALAFVLIIGKADRFQCGKQIASYLGLVPLEKSSGNQRRLGHITKQGNSLLRFLLVEAAQVTARSIPEWRSKYVHLALRRGRKIAKVAMARKLAVRLYWMMRKEWDYEQLRKFGSHAGKPGTGDGVK

SEQ ID NO: 138644 - protein, 358 aa, unidentified
MESTITESTQPQVTVGVDTHKQFHVAHAVDQLGRPLGTHRLAATPAGYRGFVSWAHTLGQLVAVGIEGPGHFGAGLARHLRAEGIAVSEVGRPKRQRRARFGKSDDADAAGAAAMVLAGDALGEPKSADGAAEMVRVLRVARTSVVRARAKAYNALQDLVVTAPAALREQLAGLYKDRLIYACEQLPEPETLTTPTDAVTVAIKSLAARCRELDTEAARLGRHVDTITATAAPELRAIYGVGPDTAATLLTALGDNPNRIGSDAAFAKLCGVSPLEASSGKTIRHRLNRGGNRDANRALHVILVVRMRRHGPTRDYFARRLADGKTKNEIMRCIKRYIAREVYHAVREPSRRTNELIA

SEQ ID NO: 138645 - protein, 393 aa, unidentified
MACVRTPGKGGKRLSDTRTFGTMTADLFALRDWLVANGVTLVGMESTGVYWKPVYYVLEEALECSLLNAAHLRNVPGRKTDIADAEWIASLVEHGLVRASFVPPKPIRELRELTRYRKAQIEERTREAQRLDKVLQDAGVKLSSVVSDIMGKSARDMLEALVHGTRDPEVLAELARGRLRSKIPVLERALVGRFSSRHALVVSAILAKLDFLEELIGRLNTEIEVMLDPFEAEMALLTTIPGIDRRSAQCVIAEIGVDMSIFGSSARLASWAGRCPGNHESAGKRKSGTARKGSKWLATTLAQAAESAGRSKGTYLGAQFQRLAGRIGHNKARKAVEHSILVAIYHVLDRKVPYQDLGAEWFQKRRPEAHARRLARQIEALGYRVSIEAAEAA

SEQ ID NO: 138646 - protein, 360 aa, unidentified
MEVGVFIGLDVHKSSITVAIVDAGRNGEVRRYGAIPNSPEAISKLVRKVTNRHVAPKFIYEAGPCGYVLFRQLDRLGVVCRIVAPSHTPTRPGDRIKNDTRDAERLARLARAGELTYVWVPDPIHEAMRDLVRARYVAAKDVRHARSHIQMFLLKNGVRYEGKSWSYRHRVWLSDRQFEHPGQQIAFQSFLNRVEQAEARKSELETQIAELCESWALGPVVIALQALKGIGPVIAATLVAEVGDFSRFPSPRHLMAWLGLVPGEYSSGSSLRPRGITKAGNTAARSLLFEAAWSYRTTPKVGQWQRTYRPEVHQQFKDIAWKAQLRLHGRYRKLVARGKKSNVAITAVSRELVGFIWGVS

SEQ ID NO: 138647 - protein, 386 aa, unidentified
MQTPNDLNQSRIILKQDSTLIAVIEMSLSSWLVAGIVPGVERQPLKKLAVDESALLKLLNRWREEAEKAGRKIERIAVAFEAGRDGFWLARWLRARGIEAHVIHASSVAVSREHRRPKTDRLDTELLKRAFLGWLRGERDHCKMVAIPTIEEEDAKRPNRERESLVAEQTRIVNRMKAALSRLGIRGFNPKLKKAAERLEDLRAPNGEPIPPNTLAELRRDMERRRLVSDQIRQIEDARLERIEHAPSDGPHAMVRLLARVIGVGIETADMLVQEVLSRNMRDRRAVARYAGLTGSPDESGTKRREKGLARSGNARVRRGMIQLAWRFLMFQKGSALAQWFRARTENARGTRKTMIVALARKLLIALWRLVREGVVPDGIVLRPAQ

SEQ ID NO: 138648 - protein, 340 aa, unidentified
MQITTIGLDIAKNVFQVHGIDAAEKVVVRKQLRRGQVLKFFASLQPCLVGMEACATAHYWARELTKLGHEVRLMPAKDVKAYVKRNKNDAADAQAICEAVRRPTMRFVGVKSAEQQGRLMQHRARDLLLRQQTQVINALRAHLAELGIVAAQGREGLKQLLMIIAGEKDERLPIDARASLIVLAAQIQALHTMIGSIERRLLVQHRANEASKRLECIHGVGVIGASAIAATVTDPKSFRSGRDFAAWIGLVPRQDSTGGKQKLGPISKQGDRYLRRILVVGAHSVLRRAKLNPEKYPWLTQLLVRRPFKVVAVALANKMARIAWALLANGSHYRPQLATT

SEQ ID NO: 138649 - protein, 429 aa, unidentified
MNYTQNEKIEQVTDSTMVVGVDIGSQIHYARAFDNRGRELTKRIFSFHNDLEGFNSFNLWAETLKTENKKTAVLIGCEPTGHYWFAFAKYVNDHQKRLVMVNPFSVKKIKELDDNSPKKTDSKDPKTIAKLVVDGRYSIPYMPEGIYAEIRDLVYSRDRIMKQHNISANRIQRWLAIHFPEYLGLYTRFDTISGLAVLEKAPLPKDVIALGVNGIRKIWHDKKMRGRGVTEDRAKTLVEAAHNSVGLDGGIGTKSELYMLLEEHRLWTSQLEAVNKVLEEMILKVPHVEKLLAIKGVGSITIAGFIAEVGDIRRFDSPKQIQKYAGLELVENSSGKHKGRTRISKRGRRKLRKILYQVMVPLLARNKEFRGIYDYYVTRVKNPLKRRQAMVAVSCKLIRVFYAVLTKGVEYDRFKMMSDIHRKSDIIAA

SEQ ID NO: 138650 - protein, 402 aa, unidentified
MPEQQPILTRWIGLDIHKAYFVAVGVNAEKRTVFGPHKVPNEQLEDWIAKHLLPTDAVVMEMTTNTYLFYDTLVPYVGSVIAVHPPNVLLVTGVKVKTDKKAALTLAQLHAAGMLTGIWIPPVEVREMRAVIAQRGKMVRLQTQAKNRLTSLLHRTHRERPAQPFKPEQKAWWESLPISTIEKYIVASDLETLAFAEKQIKTIEEVLRQEAARDERVPLLIQLPGIAMLTALTILAAIGPIERFEDASHLVGYAGLGASVHDSGQMHATGHITKAGRRDLRGAMVDAANAAVRHHPYWKKEFERLEYRLGRSKAIVAIARRLLVAVWHILTNEAADRHADATSVAASMYKLAYEIKVSNLPKGVSAKSFARQQLDRLGIGQDLEVLPWGDHKVKLPPSQLNT

SEQ ID NO: 138651 - protein, 350 aa, unidentified
MKHRTILSVDYHDENCVIRRYDGSTGQETLQTIPTRRELLLEVVAASRKGMPVGGELIWIQESTTGWLRMQSLLRGQVEEFLLANTLKLPKWPKDGRRKTDRGDTQRILHEYLLNRLGLADQPDQALREARRLVSYRENLVSRQTALKNWINRHLAHESWEDRSNLWSGRGRKRLQTFVAQQSATDQLILQGKLDELDRLARELKKVIEAMQVLYDQWPEAKRLDAIKGISVISSVSIMARIGSIDRFPSAEHLIGYAGLNPGMRQSDATRRDGHLGGGGTDTHLRHYLIEASVWARHLPRYRKTYERVAQRRGQRIGRLQVCRMMLRSIDKMLRDDVDFTPSSEKPLQA

SEQ ID NO: 138652 - protein, 443 aa, unidentified
MAMRKRELTVMYPNAAGIDVGSASHYVAVPPERCEQSVREFESFTEDLTAMAEWLESCGVDTVVMESTGVYWIALYELLEARGFTVYLVNARHVKNVSGKKSDVLDCQWLQQLMSFGLLAGAFRPAGEVCALRAVVRQRDTLIEAQSQHTQRMQKVLTQMNVQLANVISDIAGHTGQAIMRAIVGGERDPYKLAQLRNYRIRASEEHIAKSLMGNWREEHLFCLAQLLKLFDSHQLLIDEADAKIEALLARMHCHNGELTPNKNKGRTKNTPRFDARSALYGWAGVDLTRIGGIDVSTALKILAELGTDLSKFKTAKHFASWLGLCPGTHITGGKRISGVTKRIPNRVAQALKLAAHGLHRSQCALGAYYRRMAARMGAAKAITATAHKLARLVYAILTTGEEFVQRSQNHYEDQVRTRTIRYLQKKAAALGFNLQPNTAVCA

SEQ ID NO: 138653 - protein, 353 aa, unidentified
MRPKTESDTALPMVIGVDIGKEVFHLIGFGGDGKIVFRRKIKRLGFAAVFEKVPPCIVGMEACLSAHFVSRTLRTLGHEPRIIPAIYVKPFVKGQKNDYNDAEAIAEAALRPNLRFVQEKSQDQLDLQACHRVRARLVSRRTATINQIRAFLIEQGIAVRSGPRALRTSLFAILENRKDEISPRMARLILDLYKDWCHLDERIDTVTGEIEELSRVEAKCQRLMTVPGIGPVISTGLVAAIGSGEAFERGRDFGAWLGLVPRQYSTGGRSVLGRISKRGSKYLRTLLIQAAKVLLMRPHNWPRYSFGAWLKTASERLHRNKLAVALANKLARIAWSVLRHDKAFDTHLETAAI

SEQ ID NO: 138654 - protein, 389 aa, unidentified
MKIYVGIDIAKLNHFAAAISSDGEIIIEPFKFTNDADGFQLLVSKLESFDKNSLIIGLESTAHYGDNLVRYLVTELYQVCVLNPIKTCQMRKNNVRKTKTDKVDTYVIAKTLMIQDNLRFISFFDLDMMDLKALGRFRQKTIKQRTRLKIQLTTYVDQVFPEIQYFFKSGLHQHAVYALLKEAPSPKEIASMHMTHLANLLKVNSHGHFTKEQAKELRVLAQKSVGANDSAISIQITQTIQQIELLDSQLEKIEAEMTDIMKFNDSVIMTIPGIGYINGGMILGEIGDIHRFSNPNKLLAFAGLDPSVYQSGNFQAKTTRMSKRGSRVLRYALVNAAWNVVRNNATFKAYYDAKRAEGRSHYNALGHCAGKLVRVIWKMLTDEVEFNLE

SEQ ID NO: 138655 - protein, 414 aa, unidentified
MPTWNEITHYAGFDWAKDHHDVIIVDRGGQIVADFQIAHTAPGWQQWREQLAAFGAGVAATVETSQGVVVEQLLQSGVTVYPVSPASAKRYRERKIPSGNKTDRGDAWSLADALRVDGHGWKALAPEDPLVAELRLLCRDEVALIEERTALLNQLQSALHEYYPAALEAFSDWTLPSAWAFVKRFPTPQRLQAAGKRQWEKFLHTHRLARPQTYQTRLEIFARAGEFVSGEALTRTKSRLALARARMLRTLQSQLDAYRAEIEKLFAEHPDHDLFGSLPGAGPKIAPRLLGEIGSDRSRFADPAGLQCLAGTAPVSYQSGQIHKVHLRRHCNKPLRHAVHLWANLSRPSCAWASVYYDQLRERGKSHACALRCLGQRWLKILWKMWQTGTAYDAELHARNQLKHGSWVLKIQST

SEQ ID NO: 138656 - protein, 347 aa, unidentified
MEYFAGLDVSLETVNVCIVNPAGDILLEKKIAAEPAAIIHLLKSFGSPFKRIGLEVGPTSSWLYGELRAAGYGAVCLECRHVKAGLSAMRNKTDRNDARGIAQLVRLGWFRQVHVKSEEAQRTRMLLVNRQQLLTKALDIENSVRGSLKVFGLRIGVVARRGFEARVLELVADDPILLVVTEPMLRVRQALLEEFERLDRLCQQLARRDPVCRRLMTVPGVGVVVALTYRTGVDAPERFSKSRDVGAHFGLTPKRYSSGQTDYDGRISRCGDEMVRTALYQAANVLLHHGRWSSLRSWAMRIAKRGSVKGAKVALARRLAVVMHRMWTDGTDFRWSDTSRMTAPTAA

SEQ ID NO: 138657 - protein, 338 aa, unidentified
MRVYVGIDLHSNNNVIAMLDENDKVIFQKRLRNDLKFILRQLGPYKKKIEGIVVESTYNWYWLVDGLMEAGYGVHLANTSAIKQYEGLKYTDDKSDARFLAHLLRLGILPEGYIYPKEERAVRDLLRKRSQLVRQRTSNIISVMNLAIRNTGYKMTGDLAKWLTPERIDPELYGELQAMAIKSNVVLINCLTKQISIIEKEVLQRARLRPEYTKLLTVDGIGQTLGLTIMLETGDIRRFPKVGNFSSYCRCVGSQKLSNGKVKGRGNRKNGNKYLAWAFGEAAVFCIRHNALAQRFYQRKLSKTNKFVAMKAVAHKLARACYYIMRDQVPFDATKAFA

SEQ ID NO: 138658 - protein, 322 aa, unidentified
MTQFTTFVGIDVSKATLDVYIHPEGMQSCFANTPAGHKSLTQTLRRHAKTGPVAVAFEASGGYERMLGAALSVPVLVKAGITAFQLDASQARSFARAERQRAKTDRIDAAMIARAVMALHESMTPYRHDKDAEKLVEHLRLRDIHVDQIVQFKTSLENIQDAALRRIISSQIRTLQKSIVLVETLIRSLIAADPARAARDRQMQSVPGIGPIVSATLIGRLPELGSLSSREVAAMVGVAPYDNRSGKRTGAKRCSGGRPAVRRVLYLAALCVVRMKAGALRAVYDRLMANGKPFKVALNAVMRKMVVALNAMIAHDTTWHAA

SEQ ID NO: 138659 - protein, 462 aa, unidentified
MGWSGLKSQTIEEDVVSQGSGLSRGDRRRNQRLARLRELVPADHAILAVDLAEDKQALVVTDHDSRVLARRRVRVKAWQLGPLLDWGRQVARGRGFADVTVGCEPTGHRWRVVDQLAGERGMPLVCVQPLLVGRSREGEDYTRDKSDDKDAVLIARLVGQLHCYAPERADAVWARLRHLGARRARLLVEAGAAVAQLRELLGCAWPAVLDAAAQPFDSVTWQAALAVVLARCNGRPERLTRIGERAFLAAVGRELGRWGGQRVWRRIAKAVYAALSDPAGVRAQRPGALERAGWVLDDWRETRRRLAAVETQMLGVLDALELTELVTSIPGLSALGAAAILAETGDPTRFDSPRALVKHAGLAPRDNSSGQKTGRSRITGRGRPGLRLAAWRALWAALGHNPVLAARYQQLTGREHNRLSNGQARAALAAALLRWLHVITTRRIRWDALVAAGRTRPCQEAA

SEQ ID NO: 138660 - protein, 386 aa, unidentified
MQKLNDLSRCLTPLEPDSTLIAVIEMSLSSWLVAGIVPGVERQPLKKLAVDESVLLKLLHRWREEAEKAGYMIKRITVAFEAGRDGFWLARWLRARDVEVHVIHASSVAVSREHRRAKTDRLDSELLKRAFLGWLRGERDHCKMVAIPTIKDEDGKRPNRERESLVGEQSRIINRIKATLVRLGIRGFNPKLKKAAERLEGLRTPEGELIPPNTLSELYRDMERRRLVRDQIRQIESARLDRLEHAPGEGAHAMVRLLARVMGIGIETADMLVQEVLSRNLRDRRAVARYAGLTGSPDESGKKRREKGLARSGNARVRRGMIQLAWRFLLFQKDSALAQWFRARTENARGTRKTMIVALARKLLIALWRLVREDVMPDGVILRPAQ

SEQ ID NO: 138661 - protein, 370 aa, unidentified
MKKYSEAFVGVDTAKKKHAVAIADAGRDGEIRYLGEIDSSPETVARVIGKLADRYETLHVCYEAGPTGYGLFRDIRALGHDCIVVAPSLIPKKPGERVKTNRRDAVTLVRLLRAGELTSVWVPDAVHEAVRDLVRAREAAAEDFRKKRQQLLSFLLRHGRIFMGHKHWTQAHRRWLAGQKFERPAQQIVFQDAIDAIEDATTRAQRLEEQLALIVPSWSMAPVVAAYQAMRGVSFVVAVTFAAEIGDVRRFDNARQVTAFVGLVPSERSTGESVRRGGLTLAGNRRARRALIEAAWTYRYPARVSKVLQTRIEGLPKAVREIAWKAQIRLCARYRKLIAHGKKKPVAVAAIAREIAAFLWAIARHVAPAA

SEQ ID NO: 138662 - protein, 355 aa, unidentified
MSILAKQLDYVIGVDTHLNSHTAAVLTATGAVVASLRIDAEQAGYCRLVRMVGRTAPGRRVWAVEGTRSYGAGLTGHLLSLGETVGEIDRPKRPARKRGKSDEIDAVRAGREALSMGQLASPRSSGRREALRIAASTRQEVMDERTRAMNQLRGLVVSAPEHIAARLRDRSGHSHSLERLTKQCLTLRAAGIADVEDRIRLDTMKRIARRIVELEREAAHYETEMAALVRELAPGMLELPGVGPSTAAMVLTTYSHSGRFRSEAAFASMAGVAPIPASSGKQQKHRLNRGGDRRLNHALDLIVKNRIRYDPKTIAYMERNKGGRRTDRDLRRILKRYLARSLFRFLERRPALDKG

SEQ ID NO: 138663 - protein, 349 aa, unidentified
MAEVSTIGVDIAKSVFHVHGVDTDGTVVICKRLGRTKILKFFADLPPCLVGMEACATSHQWARELKRLGHDVRLMPPTYVKAYVKRGKNDAADAAAICEAVTRPSMRFVPIKSAEQQSALMLHRARDLLIRQRTQLINALRAHLAELGLVAAKGREGLHQLVTIVMESCDEKLLSGARFACQAIVMQLHAAQTQINGLDKCIVQAHRVNADSKRLDAIPGFGVILSTAVVATMTDPKAFKTGREFAAWIGLVPRQNSTGGKERLGSISKQGDRYLRRLFVVGAIAIVRTARMRPEKYPWVIKLLARRPAKVVAVALANKMARVAWAVLAKGESYRAPTRSSNAALAAAA

SEQ ID NO: 138664 - protein, 344 aa, unidentified
MGEVSTIGLDIAKSVFQAHGVDVDGIVVIRKRVSRAKVLKYFGELAPCLVGIEACPSAHHWGRELQRLGHTVRLIPPSYVKAYLRRSKNDANDAAAICEAVTRPSMRFVPIKTTGQQTVLMLHRTRQLLVRQRTMLSNALRGHLAELGIISAKGRNGTAELLKIIADGEDSRVSPLVRSILEVLARQYGAIGAEIASIDKSIKALHRVCEASRRLAEIPGIGPLSATALVAEIGDWSTFSSGRSLAAWIGLVPKQHSTGGREKLGHITKQGNRYLRWLLVVGAMAVVRYARKYGAGRRPWLARLMERRPTKVAAVALANKIARMAWAIMVRNERYKEPKLLLAA

SEQ ID NO: 138665 - protein, 433 aa, unidentified
MLKLNYMSTLFVGIDVSSKTNAVYAMDFEENKYISSSFGNNQPGADQLVNMIAECMQKHKNLDTVLIVLESTSVYSVHISNFLSASEVLMPYRPYVFCVNPKAASNYRKSYIGMEKTDPTDAYLIADFGRVGRTKKLEPWRGGQFIALKRLTRHRMHLSECITREKTYMVSNLYLKFSELQLLEGDDKPFGSLYGATSSAVLTEFLSPQEIIDMPEEELLTFLAGKSRNRISDLSKTSELLRKAARDSYRLDKCMYEPLSISLASSFNCIHAYQKEIKLIEQAIEKCINGMNPNALLILQSIPGIGPIWASGILSEIGDITVFHSSDALAKYAGLYWPKGDSGDFTSEDNKMSKAGNPYLRCYLGEAANSVRKHIPEYADFYARKYAEVTKHQHKRALALTSRKFVRLVFGLLVKNQLYTGEKLDAEYNIESN

SEQ ID NO: 138666 - protein, 391 aa, unidentified
MIYVGIDVAKDKHDCFVTSSDGKVLFPVFTIQNNREGFDDLFSKIQSVSSEVSNIKVGLEATGHYSYNLLGYLIDKGLPTYVINPLHTNLYRKSLSLRKTKTDKVDARTIAMMLMSDVNLKSYSDTSYHNEALKSLTRYRFDKVQERARLKQSVSRLVTILFPELEKLVPALHSASVYALLSELPSAEKIASCHLTHLTKLLENASKSRYRREKAIEIRDAARISIGSNMPAKSLELRHTLRLIGELDSEITEIESEIKQIMDQISSPILTIPGISYRMGAMILAEIGDFSRFDSPDKILAYAGASPSTYQSGQLESSYSHMEKRGSRYLRFALINAAKYVCHWDEAFGAYLQKKISEGKHYNVAITHATKKLVRLIYTMEKSGMPYRKAA

SEQ ID NO: 138667 - protein, 353 aa, unidentified
MHTHQNSSHPVATIGVDIGKNTFHLVGLDKRGAIALRTKVSRSQLERRLANVPCCLVGMEAGCGSHHIARQIRALGHDVRLIPAQYVKAFLKGHKNDYRDAEAIAEAVQRPTMNFVAIKTPEQSDLLSLHRVRSRLVGQRTAVMNQIRGFLIERGLTVRQGPAPLRKALPEILSSPPEVLSPRLVRLISDLSQDWRRLDERIETVSAEIETLAENDGSCQRLMTVPGIGPIISSAVVAAIGNGSGFRQGRDFGAWLGLVPKQESTGDRTKLGKISKRGNKYLRTLFVQAAHVVLVRRPAAALRGLWPWIERAAKRLAHRNLLAIALANKLARIAWAVLARGRDYEPRITTNAA

SEQ ID NO: 138668 - protein, 384 aa, unidentified
MNKHNILFIGLDTHKVFVEVAYIEDQRGAKPEHLGRQPCSKIAIKKLARQFESKYPDATLHFVYEAGPCGYWIYRLLTSLGHCCYVVAPSLIPKKPGDKVKTDKRDAMNLAKLLKSEDLTPIYVPEPEDEAVRDISRAREVAMKDLKDAKYQLKALLLRNNINSKTKDNWSAVHLRWLTELVLPHPAQQIVLTEAIQTIVERTRRTERLVNELEHQVKNWRYYPVVKAVQAMRGVRLLVATGVVAELGDLNRFDHPRKLMSYVGLVSSEHSSGGKRRLGAITKCGNGRARRLLIEGAHSYRYHANISTEIQKRQEGLPKAITDIAWQAQLRLCRRYQRLSHKGKHYNVIITAIAREMIAYIWAISREVVLTPVNPKLRLSRVPA

SEQ ID NO: 138669 - protein, 424 aa, unidentified
MKNCNKQNEKIELVDEKTLVIGVDIGSYDEYARAFTCRKQELSKKPLRFHNTAEGFKTFKDWAVNIMKANGLEKIIVGMEPTSIYWEALATYCKDNGMILVHVNPAAVHKSKELDDNDPSKNDRKDPKVIAGLVADGRYQFPYMPEEEYAELRELSNLRIRTQESLTQCKNRLARWYSRYFPEFKGAYKNVVSKTAMMILDLYPLPEDIVTLGVEGILQIWRSKKVRGAGERKARKLYEAARNSIGRKEAASIARIEFKSIKEDLDRYQERLDEIEKKADEILPKIKNADKLFEIKGVGKATVLTFLSEIGEISRFENPKEIQKLAGYAIVTNESCKHQGEKRISYRGRKRLRWVLYQTALSVIAKNAEFRQIHAYYTTRTNNPLKGIQSVVAVACKMIRIFYKILTDGVSYDGTKMTQDIIRV

SEQ ID NO: 138670 - protein, 340 aa, unidentified
MEITTIGLDIAKNVFQIHGVDKEGRAVLRRKVKRDQLLALLGELEPCLIGIEACATAHHWARELKALGHEVRLMPPAYVKAYVKRNKNDAADAEAICEAVTRPTMRFVPIKSADAQSVLMLHRARHLLVRQRTAQVSAMRAHLAEYGVIAPKGRAHVRQLIEALATDTAPIPNLARQTLLLIAEMIDGLSRQIRAIEIELMRWHRATIASRRLETIPGIGFITATALAATVGDARVFRSGRQFAAWLGLVPKQHSSGGKERMGGISKMGDRYLRHLLVVGATAVLRYTRRKTTTVSIWADRLLERKPARLVSVAVANKMARIAWAVMTREEDYRAAPAIA

SEQ ID NO: 138671 - protein, 394 aa, unidentified
MKLIGIDIGKNKHFFCVMDQQTGEIISQPVSFSNDKEGFDFLVKKIKSYPKDSILIGMEDTGHYHFALLKYLLDLQYTVALINPKTTDFNRKMQGGITKNDKLDTINICDVLDTPERKKQYRITKVNSFDLYEQKQLTRHHHNLKEEENVYKNRLQKCIDIVFPEFNKLFNSKYGIVYMNILKMFGSAENIANTDIRTIRKCFEIDGRDNRISLTPERLKECARSSIGISSSAEVIQIKHLTAQIELIEEQLTEIDKKIEEFSIQNNSPILSIPGISHFSGTSILAELGDISNYSKPSQIIKFAGVAPLHYESSQFNAQHTAITKKGSKYLRKTLYQIILPVIRHNPVFNKYYQLKISQGKGHRCAQGHCVRKLLRIIYHLLKTNQQFDPQLLR

SEQ ID NO: 138672 - protein, 419 aa, unidentified
MSSKKTKKVKNINHKTLIVTFDIGKNIHYGYFRAPNNKEIKPFQVYNSGHSFNKLWSKICHFQKQQGLKEVVVGFESTGPYAEPLVHFLRKKPVKLVQVNPMHTKRLKELTGNSPNKTDKKDPRVIADVISLGHALTLVIPEGAAAELRRLTHARERSIQKRTAIKNQLQHLIYILFPEFLEIMKNISTKSAIYLITNYPTPESIINLGLDSLTLALKKVSRSKLGQERAKKLFEAAQSSVGINEGKRSIVLEIKQLVTDIKKHNQFIDEFEKHMAEYLDQIPYSQSILSIKGMGQITVAGLIGEVADFREFNTISEIMKLAGLDLYEVSSGKHKGSHHISKRGRPLMRKLLYFAAINMVKSEGIMHKRYQNMLNQGMPKIKALTAISRKILRIIFALTRDNTMYDENYNEIINFKKAA

SEQ ID NO: 138673 - protein, 386 aa, unidentified
MGVIIGMDPHKRSATIEIVDEAAAVLAAGRFATDKPGYDGMLAVGRRFQDRVWAVEGCNGIGKHIAHRLVHDGETVVDVPPKLSAQVRVFATGNGRKTDPVDAHSVAMAALRSPGLVRVQVDDDLVVMGMLADRRDELGRARTQVANRLHRLLLELFPGGAKRFLSAQQARAMIATIRPRDLPGKTRRRLAVELTGELEAIDKKIKAIKKELTELVTARGSTLLELHGIGPSSAARLLADTGDIHRFADRDKFASWNGTAPLDASSGSQVRHRLSRAGNRRINRALHIMAVVQLRNQTQGRAYYNMRKAGGMPSMMAMRALKRRLSNVVFARMLADQKRREAAGPGGHSGTTPDSSVTDLTPDIGSSDKPRPGPATQSRTPVSTAS

SEQ ID NO: 138674 - protein, 474 aa, unidentified
MAPCPANRRLVVRGRIEECSSTGHGLCHLSINKSNDITMAKKAKKVKTAKGAELRIVNPDAAGIDIADGIMQVCVPADRSKDNNRAFGAYTSDLHAISAWLRECGIKTVAMESTGVYWIPLFCRLQEDGLDVVLTNARDVKNITERKTDESDAEWLMLLHQYGLLKASFQPHNDAKRMRTLTRHRDTLSREASSIVLRMQKAMQQMNIKLTLVLSDITGKSGIRIIEAILAGERDPKRLADLADIQCKTPKEEIAKALEGNWEEDLMFVLRQNYDTFKHYCTQLGECDAELEKLMENYRAEVAKVEDTSYSPAKKRRDYKKTRHTVGFDVERKAYEMWGVNVFEIPGISHLTALELMSELGHDFTRKFPSSKQFCCWCNISPNTKISGGKRISSHVPHRRNNVGLIFRSIASSLANAKNQLGNFYRRIRSRAGGKAAVIATAHKVAEIFFAMVANQTTYNPERVGIDEKVLLGK

SEQ ID NO: 138675 - protein, 385 aa, unidentified
MQVAADRPQAPTAIRTDLGAIFVSLELSRSTWLITSLSPGGGEKMSKHSMRGGDVAALLARFSQLREKAQARTRQCFPIIVIQEAGLDGFWIDRVLQREEIESHVVDPASIATSRRRRRAKTDKIDGEALVRALLAYKRGEPRVCAMVRVPKPEEEDRRRICRERKTLTAERVGHVNRVKGLLFSQGITGYEPLRRERLNELQTGDGRALPEHLKAQIRRELDRLELLLEQIKAVEAERDVLLAEEHAVKPAPAAMLLGIKGIGPEFAAILWSEGLFRHFDNRRQVAAYAGLAPTPWQSGSVDREQGVSKSGNPRLRTTLIQLAWLWVRHQPHSALTLWFEERVKRNGGRLRKTTIVALARKLLVALWKYVTAGVVIEGAAMKAA

SEQ ID NO: 138676 - protein, 323 aa, unidentified
MSQPNLQCMGIDVAKLSLDIATTDTIEPFTVGNDEDGFAVITDKLKHTKINLILMEATGGLEAAIACKLQSEGYDVVVINPRQARDFARSMEYLAKTDKLDAAMLAQLALVIDRHPDRSRYIRHLPDEARAVLAAMVVRRRQLNHMLVAERNRLYPSHPQSRKSIDNIIDALQNELDRINEQMKQHMTAFFQEQARLIGSVKGVGDITVASLIAELPEQGKLNRREISALTGVAPLNRDSGKMRGKRTTFGGRAGVRATLNMAALVATQFNPAIKLFYQRLLAAGKPKKLALVACMRKLITILNTMLRKGEEWNASFQSQVIS

SEQ ID NO: 138677 - protein, 348 aa, unidentified
MLADQLDYVVGVDPHRDLHALAVVHVLSGAVVFEKTVAANSDGYALALKLVDAHASGRRAFAVEGSGSFGAGLTRFLSGRGERVLEVSRLRRERRSGGKTDALDAVRAARSVLAQERPATPRAGGERQALQALVAAREGAVNAKCAGLGQLRDLLVTTPEPLRSELRPLTQARLLRRLAATRPDTRRDPELRGSMLALRSIARRVLELTAEERALGREIEALTRKLAPQLLEQPGVGPHAAAQLVLSWSHQGRIRSEAAFARLAGAAPIPASSGQTVRYRLDRSGDRKLNRALHMILVTRKRLHPPTIAYIERRLQEGKTRREANRCLKRYLARSLYRLLEHGAPLAT

SEQ ID NO: 138678 - protein, 402 aa, unidentified
MNAVGIDVSKGKSVVVVMRPFGEVVAAPFEVVHTEAELKNLTDFLKSLPGETRAVMEYTGKYYQPVAQAIHNAGLFVSVVNPLLIYKYGNNSLRKGKTDKLDSVKIANYALDHWIDLKRYAPEPEIRKMLKTYHRQYGQYLKLKVSLKTNLITLLDEVFPGANTLFTSAPRKSDGHEKWVDFVVKFWHRECVCGSSEAAFAKRYQKWCQKRGYRFSEQKALQIYETASSHPNTLPKTEDTKHLITYAVNQLNSITETLSSIQNEMLSLASVLPEFPVVMGMFGVGETLGPQLMAEIGDIERFERKQSLVAFSGVDAPPYQSGSFESQKRHISKRGSPRLRKTLFQVMNTILQHAPADNPVYQFLDRKRTEGKHYYVYMTAGANKFLRIYYGTVKAYLQQMDR

SEQ ID NO: 138679 - protein, 352 aa, unidentified
MNRRKSQMLSGKNLFVGIDLHKHRWHVTIRTMDVEVFSGSIPGAWEALQRVLARYAGHRLQVVYEAGYFGFRLHDQLAKKGIECLVTPPSLVPQEYGNRVKTDRRDSRKLAHLLAKGMLKRVWVPSEEELYHRQVIRRRRQLVRDRVRTQSRIKAELSFYGIHLEEPRGRWTQMYFANLRRIRFGNRWMQESFNRLLELYEFLSAQIDKQTQLLRELSETGRYRERVEILQSIPGIGVISAMEVLLELQDVSRFRRAEQLAAYVGLTPSQYSSADKVRMGRITGIGKNTLRAILVEASWKLITKDQVMREKYDRIKIRSGGKRAIVAIARTLLLRMRRMLLDGQRYKLQRAA

SEQ ID NO: 138680 - protein, 379 aa, unidentified
MVSASTPASLAETASATLFVALELSRSTWRVALHAPLTNKVSQHRLDGGDADGLLALITRKRSQAEEKLGRPVRVVCCFEAGYDGFWLHRWLYARGIENRVLDAASLLVNRRARRAKTDRLDAAGLLRTLMALERGEAQVCRVVRVPTPAQEDARRRSRERARLVVERGQHTSRIKGLLMTQGIRDFEPTRRDWPARFEALRTPDGLPLAPCLRAELLRECRRLWLVMEMIAEVEAEQKAVAEAEDGPAARLAQLRGIGLTFATVLGNEVFFRVFRNRREVGGYLGLAPSPWQSGAVRRDQGIAKAGNSRARRTAIELAWLWLRHQPESALTRWFHERVGSSKGRMRRILLVAMARKLIVSLWRYVTVGIVPEGAVLKV

SEQ ID NO: 138681 - protein, 377 aa, unidentified
MKRIKFVGLDVHAETISVAVAEQCGEVRSLGVIPNREESIRKLVKKLGPVEELRFCYEAGPTGYALYWQLTRMGAQCEVVAPTLVPVKAGDRVKTDRRDALKLARNYRAGELTAVWVPDAAHEALRDLVRAREAAKKDELRARHRLNKFLLRHGRRPSMGVKAWTMKYLEWVKREVHFEQMAQETTLLDYLHEVEHGAARIARLDGAIEEAVKLASPQMRAVIEALQALRGIAQVSAVTVVAELGEFSRFARAKQLMGYGGIVPSEDSSGERRRRGNITKAGNAHLRRVVVEAAWAYRHRPAVGTTLRKRQEKVSEEIKEIAWKAQQRLHERYRKLLAKGKNKGVVVTAVGRELLGFIWAIGIQVETAQKESLQRAA

SEQ ID NO: 138682 - protein, 362 aa, unidentified
MNDTYYIGFDVHKKSVSYCVKTASGEILQEGRLEARREVLRTWAAAQPQPWRGALEATLFSAWIYDTLKPYAQQLDMAHPARMKAITAGKKKSDRIDARTIADLLRCHLLPACYVLSPEMRDLRRLLRYRQLVVAQSVRMQNKMAGLLMETGTPFVKARLHGKKYFTQLLESLQEVPESVKDLLRLSRGAMEMFEACQKRLIQRLLQEPALQERVERLCTIPAVGPITALTWALEIADPFRFPSLGQTVSYCRLTTAFRSSAGKEQRGPISKQGNAWLQTTLIEAAKLAPRWSRQLASVHERELQRGHRNRATLQVARKLVAYLLAVDKSGQPFQIRSSPAGGGVFSTKKELKAASVAPQAA

SEQ ID NO: 138683 - protein, 391 aa, unidentified
MINIGIDVGKFKHCATVLDDSTGEVLIKPFFLTNNRKGFDLLYSKTKQFIHRKHSVGMEDTGHYMINLTNYLLDKKFTVKYINPRATCLRRKGLGISAKNDRKDALLIAEMLSEKRFWRSISVRSIENSKFRDITRLYHQLQEQQNQDMNRLQRALDIVFPEVNSLSWTRYSKAYMKFLSTYPSASSIALEDIRNLRKALKTEGKGRQSKVTAEEIRELAKCSVGEDNISIDLEVTSIIAIINTREEQIRMLEKKIEEFSHKLNSPIISIPGISHISGMTILAEIGDINQFQNTGNLISFAGMDPLVYQSGKYDAAHMPISKHGSRYMRKALYQAVFTVCKYSPTFHDYYTKKRNQGKSHRCAQGHCARKLLRVIYKLLSTNSLYDQNHIQ

SEQ ID NO: 138684 - protein, 434 aa, unidentified
MTLINFVAANQKNYAFNLLSVFIMVFWSVQYLLQHLLVQTQLSDQLLQPLILILQLPQTPQFRHARPGKFFLPVNGMDYLLPLRLTVRNVLTRRITMNIVFLGIDLAKNVFQLCGLNQAGKPVYTKRTGRKELLQTLANIPACLIGIEASTGAFYWQREFEKLGHKVKVISPQYVKPFVRGQKNDGNDAQAIAVALMQPTMQFVPPKSPEQQDIQALHRARQRIVNHRTATVCQIRGLLLDRGIPIGSAASRARRAIPLILEDAENGLSSRMRRTIVELYDLFNDLKRRIHFFDKEIETVFRQSEACQRIAKVKGIGPETATAVVAAIGKGTEFKNGRHFAAWLGLVPRQHSSGDRQVLMNMTKKGDKHLRTLFIHGARAVVRVATNNNDGHMNQWVNQLKERRGFNKTTVAVANKNARIIWSMLRNDTGYQVV

SEQ ID NO: 138685 - protein, 422 aa, unidentified
MNKPEDLELAACVGLDWADQRHAIHLQATDSAKAESRVLEQTPDALHDWVAQLRVRFQGCRVGIAIEQSRGAVIHALMMYDFVVLYPINPKALARYREAFRASGAKDDPTDAALLLDLLRLHRSRLRAWLPDTVDTRRLQMLAEYRRKLVNNRVRHTNRTTSLLKTYFPQALDWAGELGTLQSCDFLEKWPVLSSIQHARPSQLRKFYLQHHGRNLDLIEERLHQIATSRSLTDDPAIVHALSLAVQAEAAQLRPIIESIARFDQILAQQFASHPEHSLYESFPGAGPVYAPRLLIALGTDRSRWESAADLQCYSGIAPVTRKSGKSCSVHRRLACSNFVRQTFHEFAALSIRYSTWARAYYDQMRSRGLRHPAAVRTLAFKWIRIIFRCWRDQTPYDEQTHLNSLRAKHSPLLKDVKHNSD

SEQ ID NO: 138686 - protein, 351 aa, unidentified
MKTMTKQLQGEELFVGIDLHKRRWHVTIRVADVEIFSSSIAGRWQELEKVLNRYNGCRINAVYEAGYFGFWLFDHLTNFGVECIVTPPSLIPQEHGNRVKTDRLDSRKLARLLAKGLLKSIWVPSAKERFHRQVIRRRRQLVGDRVRTQNRIKSELCFYGIDLPAPHGQWSQVYFANLQRIKFNNRWMQQSFNQLLEQYEFLCAQIDKQTQLLKQLSQLPLYRDRVKILRSIPGIGILTAMEILLELQDVSRFRRAEQLAAYVGLTPSQYSSADKIRMGRITGAGKNTVRTALVESCWHLIRKDKAMRKKYEQIKARAGGKRAIVAVSRKLILCIRRLLLDNRPYVYEPIG

SEQ ID NO: 138687 - protein, 405 aa, unidentified
MEGLSPLYRRVAGIDVHKMLHVVTLIIEAPDGTIKQQSREFGGFKRDCCALTTWLLESNVELVVMESTGIYWKSLYAHLERAGIQAWVVNAHFVKHVPGRKTDMNDSQWLAVLARFGLVRGSFIPPQDLRELRLVSRYRRKLTAMRASEINRLHKILDDGGIKLGGVVSDINGLSARAMVTGLIEGRSITALLDMARGRLKLRRDDLQAALDGELSARHRLVLEHIHEHIEILEHSLAELDAYILAAMAPYQWAHRLLQTIPGIDQIASALILIEIGDDMTRFGSPERLAAWAALCPGNNESAGKRKSARIGKGSSVIRYIMCECANSAWKTKSSLAAKYRSLMVRKTHKTAIIALAHKMIRLIFLLLTRKVAYHDPQIDYEAISAKKNAPRWIKQLKVIGPMAQ

SEQ ID NO: 138688 - protein, 348 aa, unidentified
MLADQLDYVVGVDPHRDSHALAVVQVVSGVVVFEATVVASSDGYAQALKLADQHAPGRRAFAVEGTGSFGAGLTRFLTVRGERVLEVGRLRRERRSGGKTDALDAVRAARNVLMSERPATPRAGGERQALQALVAAREGAVNAKRAGLCQLRDLLITTPEPLRSELRPLTRARLLQRLAATRPDGRRDPELRGSMLALRSIARRVLQLTAEERELAREIETITRRLAPQLLDQPGVGPHAAAQLVLSWSHRGRIGSEAAFARLAGAAPIPASSGQTVRYRLDRSGDRKLNRALHMILVTRKRSHPATITYIERRLQEGKTRREANRCLKRYLARSLYRLLEHGAPLAT

SEQ ID NO: 138689 - protein, 454 aa, unidentified
MRKPQVVPDEDHEVIYERVAAVDVAKASGVVCLRTPDPARPGRFVNRIWDNVPAMRAQIAELGAELLRCRVQMVTLESTSDYWRIWYYVLESLGLAVQLVSASQAKNLKGRPKTDKLDAMWLARLTQQGMLRPSFVPPAAIRRVRDFTRARQDLVAERTRCLQRVEKLLEDAMIKITSVARDGMKAKSVVAMVAALAAGQRDPRALADLARGPLRAKRDQLAQALDGMFDSHHGMIARSLLDQVAFLDRQITLMEDQAIAALAGVPESWGVDADGQTGPQAGTSLGSPVLAAAHRLAEIPGISLWLAIVIIAEIGLNMTCFPTPAHLVSWMGLCRSAASSGTRHGKGKPKKGNSYARAAAGQAAIGAARTATFLGERYSRIARRRGKAIAQAAVARSIMIIAWHLLNDPQARYRDLGPDFYASRINRDKKIRNHIRGLQALGLTIAITGDEQAA

SEQ ID NO: 138690 - protein, 311 aa, unidentified
MSFIGVDVASTHLDVAEHGQSGVRRIANDDSSIRRWLAGLPRMAVLAMEATGRYHLRLAELAHERGLRVYVLNPRDVRHYARAVGQRGKTDRLDALMLARYIDHEHGQLHAWQPSTAQLQRLQELLRRRATLVRHTTALRQGLQDQPALLQAVLQPLKTAVAGLDKQIAQAAAAVPDGAQALQHITSVPGLGLLSAAALLALFTRLRSAGADTVVAFTGLDPRPMDSGNRRGRRCLSKRGPAELRRLLFNAAMSAARTSSWRALYERERAKGLPSTAALIVLARKLVRVAFSLFKNRSDFDPARLGANGRA

SEQ ID NO: 138691 - protein, 430 aa, unidentified
MGLIVPSAIDAEQEEQPLPYEWFVGIDWGSRQHQVCVLDRDRRRVGERVVDHDGASLARLADWLWTVSAGQPQRVAVAIEVPRGAIVEGLLDRGFHLFAINPKQLDRFRDRHSAAGAKDDRRDAFVLADSVRTDQPSFRRVHLGEPQLLLLRELSRAEETLLEDFRRHANRLRDQLHRFYPQMLQLCAAADEPWLWDLIDLAPTPAHTALLTEEQVQRVLKAHRIRRVTAQDVLTCLQALALPVAPGAAEAAQAHCQFLLPCLRVLAEQLQACSQQVSALLSTLAEAPGKDEGPSDVAIVLSLPGVGRKITAWLFAEAAQPLAERDYQMLRTQGGVAPVTKQSGKRRVVVMRRGCNPRLRHALYHMARVALQRDAHCNRVYTALRAKGQRHGQALRNVGDRLLRMLMAMLRHRTCYDASRIRREPGVQMG

SEQ ID NO: 138692 - protein, 427 aa, unidentified
MSVTQNEKIRQVTDTTMVIGVDIASELHWARAFDWRGLELGKTVKFENSAEGFNFFLRWVSELTVEQKKDSVMVGLEPTGHYWFTLAAHLQGGDFKLVLVNPYHVKRSKELDDGHPSKSDKKDPKTIAKLVLEGRYVYPYIPQGLYAELRVAMNCRWRIRKELASIQNQIQRWLKIYFPEHSKVFGRFTGAGSMALLHSAPFPSDLISLGVEGISGIWKQMKLRGIGRKRAQRIYEAAQTSVGCTTGMEAARMELQILLEDYDAKLQQYERVMQVVENLCSQIPAVAELLKIQGLGLVTVAGLFAEIGDIRRFESPRQIQKLAGLAITENSSGKHKGPTEISRRGRSRLRAILFRAAIPLLAKNREFQLLHRYYTTRQNNPLQKIQSVIAICCKLLRVFYALATKDCAYSPEKMLADIQRNQPLKAA

SEQ ID NO: 138693 - protein, 347 aa, unidentified
MNITAIGIDLAKTVFHIHAVDQRGNKVFSKKLKREQLAEFINQQPPCLIGMEACSGAHYWATKFKSFGHDVRLIAPQFVKPYVQGNKNDWNDARAIAEAVTRPHMRFVPIKDVEQLAMQSMHRVRSQLVKQRTALANEIRGLLSEYGIVIQEGIAKLRAELPFIIEDASNALMSTIRTLCDDMREHLKELDRKISHYDQQIKVTAKSSKTCQKLMAIEGIGPQTATIIAATVTDTKLFKNGRELAAWMGLVPSQHSSGGKNVLLGISKRGDRYIRCLLIHGARSALRSWKNKPRNTPRVIWALRKIEELGFNKACVALANKMARTIWAVLDKDVPYQSDYQPQLTRG

SEQ ID NO: 138694 - protein, 356 aa, unidentified
MSSNVKYIGLDVHKEAISIAVLNGAGKLVMESILETKAVTLVQFLQGLRGELHVTLEEGTWAAWLYDVLKPRVHEVIVCNPRRNALLKEGSKSDRVDARKLAELLRAGMLRAVYHGEHGLRTLRELARTYQTISKDLKRVMNRLKALYRSWGIPCTGTQVYAPRYREQWLNKIAQAGVRRRAELFYQHLDALQVLRRRVRAELLVESRKHKAVKLLRQIPCIGPIRAARLLALMQTPHRFRSKRQLWTYSGLGVETHDSAQHRYVDGRLQRCKRPQQVRGLNQNHNHEMKEIFKSTATSASRCAGPFGDAYAGLLAKGMKPEMARLTLARKIAAITLTLWKKGASFDAEYVKPQAA

SEQ ID NO: 138695 - protein, 411 aa, unidentified
MNAGVITVVGIDVSKYKSTVAARRPGGEVALLPFDVSHDVTGIKNLIEKLHSLDDEGGEIRVVMEHTGMYWRPVALALQQAGFFVSVVNAILIHNFSDNSLRKVKTDKADALKIANYGLTFWMDLREYSSEDETRQMLKIQNRLYERTTTTGTMLRNGLISLLDQTFPGANKLFLNEGRNSKGHVKWVDFVIRFWHKECVAALSLHTFADTFQKWCKRTGYRFSTSDAERIHTAARNAVATLPKNDSTKLLITQAAISLNTVYDSLHALRTEMNRLASLLPEYELVMAMEGVGKITGPQLMAEIGDVRRFSHKGALVAYAGVDAPPYQSGTFDAKNRHVSKRGSPHLRKVLFEIASMILVHGNPDNSVFCFMDKKRAEGKHFYVYTVAGAAKFLRIYYARVKEYLNTQEIA

SEQ ID NO: 138696 - protein, 345 aa, unidentified
MKLSRVGIDLAKNVFQVHGVNEQGELVWKRSLKRATWLGVFFKTVEPGCEVAMEACTGAHHWARELQARGYQVKLIPPQFVKPFVKSQKNDANDAEAISEAMIRPAMHYVAIKTVEQQDIQAVHRVRSELMSHRTAKANQIRGLVAEYGLVAPQQLGPLRAAIPCWLEDAENGLTDRFRGLLQGLWEDLINLDQRVKALDAEVATIASTHPDAKRLQQLRGVGPLVATALVAKFGDASHFKQGRQAAASVGLTPRHHGTGGKNRIFGITKHGDPYLRSILIHGARAVVSQAKRRDDRLSRWTTELAQRSHMNVAAVALANKTVRMAWAMLRNGTDYDPELAVAEA

SEQ ID NO: 138697 - protein, 421 aa, unidentified
MKQQTPEAFAAFVGLDWADAKHDVCLQAAGTEHREFLSLAHSPEEMNAWVQTLRTRFNGQPVAVCLELKKGPIVSALRHYDCLVLFPVHPLTVARYREAFTPSRAKDDPTDAELQVALLLKHRDKLKPLQPQSPAMRALTQLVEHRRRLVGDKVRCTHRFTRARKNYVPQVLQWFPEKDTAIFCDFLSRWPPLKAAQLARRSTLEGFFRAHHVRSADVIDTRLQAIKSAMALTTDDGVITPNVLLVQALVAQLRVTLQAIADFDTAIAQRAQEHPDFPLFDALPGAGAVFAPRLLVAFGEQRERCTSADERQKYAGIAPVTERRGKKSWGHWRLQCPTFLRQTFVEWAAESTRHAFWAQVSYQQQRDKGKAHQAAVRALAYKWLRILFRGWQEHTPYDESVSLQALKRRRAPLLHNLAKGA

SEQ ID NO: 138698 - protein, 435 aa, unidentified
MKITQIREHTAGIDIGSESIFIGLDDDSVHQFGTFTCEFHAAIKLLTGHGVQSIAMESTGVYGVILHEMLQEAGFEVWLVNPAHLRYVPGRKSDVADCQWLQQLHSYGLLANSFLPDPAIKALRAYLRLRERYISESSKAVLHMQKALTLMNIRLHQVISQIHGASGMRVLRAILDGERDPHQLVGLCDKRIQDNKYDQVVASLEGHYRQEYLYELADAIDCYEFFQGKLNECDRQIDGELSQLAGQQPIPNDYGKAKPIRHNKPAIDQLHQKVVRAAGGVNANELPGLTDYSALRLMGEVGVDLTPFPNEGHFTSWLKLAPGKKQSGKRIRTHKYKSAPRAAEIFKQAAQSLLESKNHALGAFGRRVRARRGPGIAIKAVARKLAILYYRAMTKGMDYVEQGVEAYEKQYQERRLHMLHKQASRLGYALIELNE

SEQ ID NO: 138699 - protein, 382 aa, unidentified
MTKNISTTVTTTATDLDVATERQREPADGDAASLTPPYHAVVGLDVGDRQSHYCVLDLQGDVVAEGAVKTTEASLRVLFEGKGRMRIALEAGTHSPWMSRSLIALGHEVLVANPRKLRLIAESDAKHDRADARLLARLAHVGPALLSPIRPRSAQTQIDLALIRAREVAVQTRTKIVNAVRGMVKSTGHRLPASPTLTFARKATDACPEALQSALLPLIRLVQTLTDDIAAYDRLVVEKARAYPETQAIQTIHGVGALTAVAFVLVLNNDRSRFTRSRDVGCYLGLRPKQRDSGRRSPELGITKAGDPLLRRLATQSAQYILGPFGRDSALRRWGLSLASRGAKNAKKRAVVAVARKLVVLMHRLWITQEVYDPLRGIHVAA

SEQ ID NO: 138700 - protein, 359 aa, unidentified
MKKLTKGARLTVGLDLGDRQSRFVVLDENGQEVEEGRVATREPALRQRFSGCERMRIALETGTHSPWVSRLLVECGHEVIVANSRKLRLIYENRRKDDRVDALYLARLARLDPQLLWPVEHRGPEVQKDLALLRSRDALIHARTQLINHARGLVKSLGHRLPRASSRAFPKRVLEAIPESVQPALLPVLEVVTCLNDQIKALDRKVETLGRESYPETKLLRQVTGVGPITSLGYVLILERPARFAKSRAVGPYLGLVPGKKQSGDSDPQMRITKEGDSLLRRLMVNSAHYILGPFGPDSDLRRFGLKIAQRGGKKAKKRAVIAVARKLAVLLHHLWHCAEVYDPLYQETRKASRRGKAA

SEQ ID NO: 138701 - protein, 347 aa, unidentified
MLYAGLDLSRHRLDVHLMDEVGEQVLVTTAPPDADGLGGLARQSTGLGQPVVAAIESMNGARFIHDQLELAGWEVQIADAQKVKGLAPLACKTDRIDAWVLAELCRRDLVPAIWLPTPEVRAERERARWRLHLVRHRVALKNRVHATLLAFGRPCATADLFGPGGRQLLQRLRLPEPWAGTMAAAVALIDDLDAQVQACEQELRQLGADHAYVPLLMTAPGIAWVLGYTIAAELGDIGRFPSPKQLAGYTGLCPRVYQSGRRDHRGPLAKNGPKYLRWALIEAATHAARHPCYRDHYQRTKARLGRQRGPAVARVEIARKLAEAIWHMLTKQEQFAPARPPAKALAA

SEQ ID NO: 138702 - protein, 355 aa, unidentified
MDSKKYIGMDVHKESISIAVMNGAGKIVMECVIETKANMILQFIDGLRGDLQVTFEEGTSAAWLHDLLKPHVTKLVVCDPRKNASMREGNQNDKIDARRLAELLRRNHLNPVYHGEHGLRSLKELVRSYLTITKDLVRVMTRVKAIYRSWAIPCTGKQVYAPRHRAEWLGKIGEPGVRRRAEFYYQQLDALRTVRQQVRRELLAEGKKHRAWKRLCQIPSIGPIRSAVLLGILQTPHRFRTKRQLWTYSGFGIETQSSADHRRVNGQLQRVKKQSSIRGLNRNCNHDLKNLFKGAAIVASSKPGPFQEFYTALLSKGSRPEMARLTIARKIATIVLIVWKRGVSFDAQHLKPQTA

SEQ ID NO: 138703 - protein, 410 aa, unidentified
MDEQQTTSAAGIDWAKDYHALCVVEQTGRVLLERRFSHEEGAIAKLCRVLVEMGVSSVAIERPEGVLVERLLDCGLVVLAIHPNQLKAARPRFRASGARAKSDSFDAFCLAELARTDWHRFRALVPDSDETKALRALSRSREELVGTRVALANRLRAELEAFWPGAAIVFAQIDSAISLAFLARYPSPKEASSLGEKRLSGFLSRHGYPGRKGASELLGRLREAPKGLAGEAETLARPQTVLALVETLETLVGQIRLFEERIAKAVRAHPDGDLFLSLFRSPNSTLTAACLLAEIGDCRESYPTNEALAADAGMSPVAIESGKRKVAGFRRACDKRLRKAVATVAESTRHHNPWAKDIYRRARARGCDHAHAIRILGRAWVRVIFRMWRDGVPYDRARHGGLRRLQSAGG

SEQ ID NO: 138704 - protein, 343 aa, unidentified
MDHFAGLDVSVKETNLCIVDDTGRIVREVRVASEPEALLAVLANPACHFKRIGLEAGPLSQWLFNALAEAGLPVICVETRHMRAVLKAQINKTDRNDARGIAQMMRAGLYRPVHVKTLRSQKLRMLLTHRKLLQSKAIAIENDLRATLRNFGLKVGVVGTGKFEARIKELVENLPDLALLVEPLLLVRRVVREQIGVLHRRLLAIVRDDDVCRRLMTIPGVGPVVALTYRATVDVPSRFRNARAVGAAFGLTPYKHQSGESDRTGGISRCGDEMMRTMLYEAAQILLVRSTKWSWLKAWAMKIARRRGMKKAIVALARRLAVIMHRIWMDGTEFRWSREAMAA

SEQ ID NO: 138705 - protein, 444 aa, unidentified
MSTPNDANAETHNYAAWIGLDWADQKHFWSMETAGGKRTRGQLDNTPEAVEVWASELAHQFGGRPVAVALEQARGAVIGMLSKYAHITLFPVHSTALANYRKSFSPSGAKSDSKDGDLILDLLVKHPERLRRLQPDTVETRALQFLTEERRKLVDLHTAETQRLTSWLKQVFPQILRWFDDAATPLVGDLLARWPDLRHLQKASSKTLLKFFQLHNCRSEERNEQRIAEIHKAVPATIDPAQLQTAALCIQNCVRALALMRTGIAAFDRQIAETYSRHPDRAIVESFPGAGTALEPRLIAAVGTRRDRFDSANSLACFVGIAPVTESSGNSLWIHWRRACPKFTRQTFHEWAYCSIHSCDWARDYYEQQRARGKAHHAAVRALAYKWIRIFFACWRDGVPYSEQRYLLSRSARAKRPSSGHNAAPVSVQWKTCGGFSKVAKVSS

SEQ ID NO: 138706 - protein, 381 aa, unidentified
MKQASHTKDENTQPTLYLAFELSDQDWKLGFTVGLGQPPRQRKIAAGDTTALKQEIALAKQRFGLPADARVASCYEAGRDGFWLHRFLESEHVTNLVMDSASIEVSRRGKHTKTDRLDVEKLLTMLLRYHGGETRVWSVVQVPSLAAEDQRHLHRQLLALKGERTRYINRIKGLLVGQGIHLDVDSDFLAHLPKLCLWDGTPLPDGLLARLKREFAGWQFVHQQILALETERRTAIRESQEPAMAQVRQLLQLKGIGENAAWLYVMEFFGWRDFHNRREVGALAGLTPTPFQSGDEDHEQGISKAGNELVRAMVIEIAWGWLRFQPESALAKWYQDRFGAGGKRLHKIGIVALARKLLIALWHYLENGEPPPGAVLKPAAA

SEQ ID NO: 138707 - protein, 497 aa, unidentified
MGKGSGQNPTEPESFEEGTKVIYSVGIDLHQGRHRARCLDERAQSCDGFSFQTTPEGLALLEERIFRDGANPIIVLEPAGLPWKMVAVYLRSRHPDCRLVKAKTQKVAALRRYLRGPVKSDRLDALTLAKMPFIDPEKLVEIYLPPAEIHALQRLTRQRKRIESAISGRKIRISAIVDGYLPAVRRVFDDAWSLPVRAFLRSRLNPFAVAREGEEALHDYLSKACPRSKWSRTESHLVFLACHSVAEVCALSRSAGTVDEDFFLDLQDEIARELRLMESEEAESESLARRIAELYRKLHPSDNLTSIPGVGEHTAPIFLSAVGDPARFHSQSTFANWEGVVPGARQSSDVEVKGLRMTKAGPSIMRMGLYQAGDIGRRWDPQLAAVYYREMVYHSKNHRQAMGAVMSHLGARVFTVLKQDRPYELRDTEGKPISKDDARRLILSKYQVPEEIRRERRRRNPKPINVPEAPRKDRETLTYRVHEAAKAPQPVKVSVSH

SEQ ID NO: 138708 - protein, 406 aa, unidentified
MDLVHEHAAGIDISKSDAKVAIRGPGRRAGTFTTDVTTWGATTNQILALRDMLVAAKVTTVVMEATSDYWRPFYYLFEDVLPVMLVNAKAARNIPGRKTDVSDAAWLAQLGAHGLLRASFVPPEPIRKLRDLTQARTLAIQDRVREIQRLEKFLESTGIKLSDSVSDLMGASSRAMLAALIDGERNPQKLAEMAKGVMRKRIPELIEALTGRFGDHHAFICSMHLDRIDSLTRWADKLTTRIDEAMAPFQAAREFLATIPGVSILVADVIIAETGADMTRFETPGRLASWAGLSPGSNESAGRVKSTKTRPGNHYIKGALGVAALSIARHPNDSYLGARYKRILVRRGKIKAIVANEHSILTAAGTCSPRASATTTPETTSSPKKTPPAPKTTPSAASKHSATTSP

SEQ ID NO: 138709 - protein, 489 aa, unidentified
MKGQPPKKAPKDKQESKKTSGKPTPGKWEEMNRKQRREMMRQMQSEDLNLEVVHPHAAGIDIGNASHYVAVPPSRDPQPVRCFGCTTAELKTMAEWLKQCGIRTVAMQSTGVYWIAVYEILEEAGLEVYLVNARETKNLPGRKTDVQESQWLMKLHTYGLLRNSFRPSQEIRTLRTYWRQRHDLVRSTGRHIQRMQKALTQMNIQLANVISDISGVTGQAIVKAILDGERDPRELAAYRDCRVEASEEEIAQALEGNWQQDQLFVLQQEQAGYEFCQKQITECDQQLAQYLAQLKDRTQGATLPEETRKGRRKKKKGNPQFNLREELFRMTGTDLTQIDGIDVMAAMTVISEVGWDMSKWKTENHFVSWLKLSPDNKISGGKVIGKGRLPTNNRATTVLRMAATTLRESDSYLRAQFRRFRTRLGPPVATKAMAAKLARLIYRMLRYGMKYVNQGAEFYETQHRKQQLIHLKRKAAQLGLQIIEVAAAA

SEQ ID NO: 138710 - protein, 452 aa, unidentified
MSFAKRNAPRYNSVEASVRQWTTLLRGSVYMKNTQNEKKMQIHSSMLVVGVDIAKKMHYARAFDDRGIEVGNVCKFSNTAAGFQKLSGWIATLQSKHAKTDVIVGFEPTGHYWWNLGEYLKESGITLAIVNPYHVKCSRELDDNSPSKTDHKDPMTIAMLVTQGRYRDVYLAEGVYQDLREAVSERERLVEDQVRLNNRMVRWLDVYFPEFTQVFKDWKGKTARVILELYPTPASIVAAGAEAIFDALRAHLQRRPARKTVDKLVQAATESVGRKHGAKQAVHSLQQLLASYNLLDSQKQAVEAMMLELLKEIPASEYIMVIKGVGPVLTAIILSEIGDIQRFSDPRQIIKYAGLSLRYNSSGTHKGKTTISKRGRRLLRHAVFRAVVSMLASNPEFRLLHALNQQRADNPLNKMQSITALSGKFIRILYALMTKGVQYDPQQVLQSKGVAA

SEQ ID NO: 138711 - protein, 337 aa, unidentified
MIGIDLAKNSFQLHGMQADGSVAFRRKLSRVKLLGFVAAQPRCVVAMEACGGAHHWGREIGGLGHTVRLVPPSYVKPYVKRQKNDATDAAAICEAASRPTMNFVAVKTREQQARMMLFRTRDLLVRQRTQTINALRGHLAEFGIVAPKGRVHVGRLAEALADPAAALPEAVRALGGLLLGQIAGLDDKIAGLEKDVRSEAYRDEDAVRLMSVPGIGPVCALAIQAFAPPLEGFGRGRDFAAWLGLVPRQHTTGGKPRLGRISKMGQRDLRRLLVVGAMSVIQNAVRRGKIDDPWLAGMLARKPRKLVAVALANRMARIAWALTIKQESYRAPAPAAA

SEQ ID NO: 138712 - protein, 427 aa, unidentified
MSYRIAGIDVHKKMLAVAVADVEVDADFQFEREKVGTTPIELRRLADWLVEHEVDEVVMESTAQYWRPVWEALEQQWRPQRRALKSAPPLAGTLHLAQAQSNRGAGGRKRDFPDAERLVKRLVAQELTLSFVPDAEQRLWRTVMRRKYQVTRNRVQLQNRLEALLEEAHIKVSSLVSDLLGISARRMLQALADGETDPAALATLATARLRATPEQLRDAFHAGPTLHPVYRRLLTLTLEELRLIEDHLSQLDQQMADLLTAHHDAVQRLAEVPGLGVDSAHQIIADVGATAATFPSSKQLASWMGACPGNEESAGVNYSHRCPKGNQHMRRVLNQAANAAVKAKGSIFAIVYRRLVPRLGHAQAIGAIAHRLCRLIWKILHEGIRYEERGPAVSVEAKKVRTRKMIRELRTLGYRVELLPAPSSNPA

SEQ ID NO: 138713 - protein, 347 aa, unidentified
MLYAGLDLSRQRLDVHLLDEDGRTVEVTAVRPDGDALRSLVAQVDRYGQPVSAAIESMNGARFVHDTLELAGWEVEIADALKVKGLAPLAAKTDRIDAWVLAELGRRELVPAIWLPDPANRAERERARFRLHLVRHRTALKNRIHATLIAFGHPVPVSDLFGVAGRELLASLAIPEPWTTTLATSLRLVDELDAEVDACERELRAMGADHPYVGLLRTAPGIAWVLGYTIAAEIGDIARFTSPKKLAGYTGLCPIVRQSGRRDDRGPLAKNGPKYLRWALIEAATHAARHPAYKERYEHTKARLGRQRGSKVARVDIARELNTAIWHMLTKNEPFAPGRSPVNPLVA

SEQ ID NO: 138714 - protein, 320 aa, unidentified
MSTITVVGVDLAKRSFHVYGVDEGGKKVVSRSLSREKFLDFFVNLPSCLVGMEACATSGYWQRKIEECGHTVKRIHPRYVIPYLIGDKNDANAARAICEAVQRPGMRFVPNKSQEQADIQAIHRIRKGFVEDRTRAVNQARALLAENGIVLKQGIANILSQLPDIIMEESNNLSDMVRLLLNRLYEHINSLEAQIAEQESMLRTVIRNSEPARRLLKIPGIGPIGATILFVMLGTAGDFANGRAFAAYLGLVPREHSTGGKHRVLGISKKGDSYTRTVLIHGARAVLSSLQRGGKPFGEGSLHNWLSELIARRGSRWPTK

SEQ ID NO: 138715 - protein, 417 aa, unidentified
MNFTTNANLAQLTDRTLAIGIDVSKEVHVARAFDFRGFELGRAIHFKSSLAGFRGFLEWANALSQSHSKKDLLIGMEPTGVYGNPLAQFLTSSGICTVWVLGLQVHRFKEMEDNSPSKNDSKDARVIAQVMLNGYFRKMRVFSQEMAELKQCTSTTHQLMKKITRAKNQISAWYTQYFPEFAEVFKDPSKKTAYATMRRFPTQAMIAALSEEEIVNAWRIEGVNGGIGRKKAHELKQAAATSIGVKATPASAMQIRFLVDELMALQRQEREAWSLIEALVTGDPDYQALMKIPEMSFKNAAYLLSEVGGFRDFSHPRQIIRLAGFNLTASSSGSKDGQSRISKRGRPGLRRVLYLIMTKMLTDRRSPWALLHTRLKSRAGNPLKPMQSVIALSCKFIRVVWSMIVYGTEYDPGLIAR

SEQ ID NO: 138716 - protein, 436 aa, unidentified
MDADYANRLSWFRQFKQHVNASANTLIVGIDIGKDTHHAFLGTPAGRTVYRRLIFENSIYGFDRLLFLIQRQISAKQLAEVVIGVEPTSVYHKPLAEYLIGLGYAVVYVTNAAIKRNRAILDGRWDKNDTKDSANVADLVSRGRCHFYDLPDINLRDIRNLLSLRKRLKKQEHRLMTRIRNNLVAQYFPELDGAWYRCRQENLAIVRFCLSPQKIAQLGFDDFCRMVTTRRRGMRQYKRLQHIHAGAPESIGCQAGSSVAFEAQLLVDNLYRAREQIAAVEEQLELICGSYKEYELLQTIPGFGPYVSAVVLGAIGYAQRFENARQLLRLAGLDLNASRSGKRSQSAVPVISKAGKADLRYALYQAAKVATSLTAEFKAYFKRILKGREKEKGIKTKMRVKVSAKMLVIAWTLMKTQQPYKAGLLQIDEPVQPRGR

SEQ ID NO: 138717 - protein, 338 aa, unidentified
MYQLGIDVSKKTLDICLMREGVRGRLKTKKIKNDFKAVHIITEWLEHHNCALSDAHVIMEATGVYHELLATGLYLAGVKVSLANPHRTREFARGMDILTKTDKVDAWMLACYGALKQPEAWTPPTEEIRHLGALLKRRDLLVSDATREKNRLEKYRATHTPEAIIISAESMLARLNDELTKIELMLKQHIEKHIFLKEDYELLTSIKSVGPQLGLNMLVILRSHDFRSAEQVAAFLGVAPVEKRSGTSVKGRSRMSKIGPPEIRAKLYLAALCGLRFNIALKSMYERLCLNGKAKMVAIGALMRKLIHWCFGVLKSRRKFDIDYVDLSRTQFSIGGQS

SEQ ID NO: 138718 - protein, 319 aa, unidentified
MNTTVNANSKNHFRNVGIDVGKSTLDIFIYELDLHWQIANAEQDIRCLLATLRRYKLARIVVEATGGYERVLVEACMTKGLPVIVVQPAHVRQFAKAQGLLAKTDKLDARLIAQFGAVLQPEPRALPSQNVRQVKDLLARKRQLNEARTQELNRRQQATKALQASHTRVIKIYDKEIAWVNAQLEKAVAAVAEWHHTYELLSSVPGIGDGVTFTLLGELPELGQLTHRQISALCGLAPINRDSGNLKGKRRIRGGRAPIRTVLFMAMLSAIQHNPVMRRCYTRLVENGKHKKVPITACMHKMITILNAMVRDDRAWQMT

SEQ ID NO: 138719 - protein, 321 aa, unidentified
MAQDGREVFVGIDVGKARLDVHIRPLGQHVVVANDEAGLAELAMRLEAHAPSLIVLEASGGYERLAAIGLIDRGLPVAVVNPRQTRKFAAALGQLAKTDKIDAAMLAHFAEAVRPAARAVTDDAIDRLQKLLARRRQLVVMRNAEKQRLGKATDPITQRSLKAMITALDKQLGVLDKAIGRLIEADPALAEKLARLKTVPGIGDVSARTLLAELPELGLASRHEIAALSGVAPISRDSGRYRGRRRIQGGRVEVRAPLYMATLVAIRHNPVIRPFYRRLRDAGKPAKVALVACMRKLLTMLTGVLSERADAASALSGPPDS

SEQ ID NO: 138720 - protein, 343 aa, unidentified
MKIHALGIDLGKTVFHLVGLDASGQVVVRKRCSRSQLLAFTANLQVQLIGMEACSGAHFLGRALREQGHEVRLMPAQYVKPYVQTNKSDYIDAEAIAEAVQRPRMRFVPIKTEEQLDLQALHRVRERWVMRRTAVVNQIRSLLLERGLTLPKGRSHLDEQLPGILEDAELNLSDSFRVLLAQLKLELEQLAARIEQMDTVIQQTARENEACQRLTEIPGVGPVTATALIAAVGNGSAFQKGRNLAAWMGIVPRQYSTGGKQKLLGISKRGNKYLRRLFVQGARSVLQQRHKQAPSLDHWLAQLLGRTHQNVVVVALANKLVRMAWAVLCKNERYRSPAFAVAT

SEQ ID NO: 138721 - protein, 425 aa, unidentified
MEQREQVQEQDSEQLIERVAALDIGKAMLVCCTRVPGENGRRLQQVSEHSTMTRALGLLADRLLELGVTRVVMEATSDYWKPPFYVLEAHGLDVWLVNARDVKHLPGRPKTDRLDSVWLCKVAERQMIRSSFVPPPPIRRLRDLTRYRVSLVAERTQEKNRVEKLLEDAQIKLSAVVSDLFGVSGRAMLAALIDGERDPRVLSELARGSMRGKISLLTEALIGHVTDHHVFLLERMLRHVDGLSADIAGLEDRIEAEVAPFADAVARLDEIPGIGVTAAQIIIAEIGLDMSRFPTPGHLASWAKFAPGVKESAGRNKGNGSTGHGDPYLARVLGEAAVGASRTHTFLGERYRRIARRRGKKKAIVAVGRSILVIVWHLLSEEQAHFQDLGADFYDKRRGTEAIKRNHVRQLEALGFTVTLQPTAA

SEQ ID NO: 138722 - protein, 341 aa, unidentified
MLYAGIDIHKSVFQVVVLDPDTGELSESRFAPSRERLGEWAAEWQGKLAAVAIESTTGWRWVARELEQRGFEVHLVDPGRASALRGRRRSPKTDKLDARWLALVLARQLLSECEAWMPPAGIQLLRDQTRLRKSLVDSRTSWAQRLHALLAHEGWPCSRGRLLTPEGRRWVIALALDPSVRAQIDVMLTLIVALDQQLKAVETELRRFARSDARCQALETIFGVGPIFACHLLAEIGDARRFKRSRQVVRASGLDPAVIESADSKRRGRLSKQGSPYLRWALVEAATHSSRSTSPDHDLYMSTAQRCGRGRARLTVARKIARRAYHLLAAVEATTLETHTA

SEQ ID NO: 138723 - protein, 348 aa, unidentified
MATMAADTRAITGGVDTHADLHVAAALDSVGGLLGVQEFPAAAAGYAELPGWLRSLGNLALAGVEGTGSYGAGLARYLAAAGVRVVEVDRPDRQDRHRQGESDPLDAVSAARAAQSGRASGAPRGRDGAVEAIRALMVAKRSARQERTQAVNQARALIVTGPEELRARFAQRSPAQLIEAIAALRPRPGGVPGYATRVALRELGRRAQFLDGQLDRLDELIGPLVTERAPGLLALHGVGPDTAALLLVAAGDHPERLRSESSWAHLCGVAPIPASSGKTAGRCRLNRGGDRQANSALWRVVMVRLRSDEATRGYADRRGKEGLPEKEIIRCLKRYVAREVCRQLRAES

SEQ ID NO: 138724 - protein, 346 aa, unidentified
MENYAGLDVSLKEISICVVDRDGKTIARGACPADPEGVAGWFRNRSLMPRRIVHESGNLSIWLQRGMTRLGLPVTCIDARKAHKSLSARLNKSDASDAEGLAQLARTGWFTPVHVRSEEADRLRCLVGARERLIRLRKDLEGHIRGVLKTFGIRMIGIGQGRQRQAFRDQLAAAGETDPVLGAMADAFIVTHAKLCQVAEDLDKAVKKTAKAHPVARRLMTIPGVGPVNALSFIALVDDPGRFSRTADVGAFLGLTPKRHQSGEVDWSGRVSKCGDGAMRGLLFEAASCVIHQVRRFSRLKSWAVRLAGRRGFRKAAVATARKIAVLMLTLWKTGTDYQWTEEANA

SEQ ID NO: 138725 - protein, 423 aa, unidentified
MMKLKYSICCGLDVHKNVIVATIVTTNKDGISEYLQKSFSTINSDIQRFHNWLIENNCYHVCMESTGKYWIPIFNYLENDIDICLTHPKYVKAIKGKKTDKKDSKWIADLYKFDLVRCSFIPPKDFRQLRELARYRFKLVCMKSSEKNRIQNCMTISNVGIASVLSDPFGKTATEIMSYLLEHTADSMDEKAVRKLIKKGAKAKSDEIIEAIKGYTIETDQAKKLELARGHLEYLDDMITQTEVELYVRIKPYYEFVEFVSTMPGMTELSSTIVLAETGVDMDIFDDAKHLCSWCGLSPANNESAGKKKAVRIAKAGDYLKPMMVQCALAAIKSKKQPYFAIKYGRIKKRRGHKKAIIAIARMMMVCIYHMVSEKKPFTPTDYEELMNPQNHVERVVLNENNVFAYLESLGYDSSKLVKRNDN

SEQ ID NO: 138726 - protein, 370 aa, unidentified
MAQTTPLFVGLDVHKDSISVAFAAGGEDAPPHFLGQVGTRQCDIDKLIRRLQSRSRRLLFAYEAGPCGYVLYRYLTKKGLDCRVVAPSLMPKRPGDRVKNDRRDAVELARLLRSGDLDPVYVPTVEDEAIRDLARAREDTLRTLKAAKLRLKSFLLRLGLHYVGRANWNDAHRRYLAQVVCPTPAQQIVFQESIRAVDEQVERLARLETELREQVASWRLAPLVTSIQALRGVQDTVAITVVAELGDLTRFDNPRQLAAFVGLTPSEYSSGATRRLGGITKAGNSHARRVLVEGAWAYRYPAKVSAYIQRRIEGLPKPVRDIGWKAQVRLCKRYRRLSARGKHHNIIVTAIARELLAFMWAIAREVPLHT

SEQ ID NO: 138727 - protein, 312 aa, unidentified
MAEMVRLAGIDVSKETLDVCVAPIGESRTVAYDEAGLADLGRWLIGLGVALVALEASGGYERRVSEALEEMGLVVRRLNPLRVRRFAELRGRLAKTDRLDARTIAEFARAYPEERQRPRDARRERLAEHLLVRRHAQDAIVDCINQLEHLRDAQLRRLILGRQATLKRLCDRLDRRLAELIAEHDDLAHLSHRLQSVPGVGPVLATVLIALLPELGSLTRRQVAALVGVAPFDRSSGQRSAPKGIHAGRATVRKALYMAAMVASRWNPAIAAFAQRLASKPGKVRLVACMRKLIVTLNAMVRDGAQWQHQKA

SEQ ID NO: 138728 - protein, 381 aa, unidentified
MITKTRTYESPAQTPLLLAFELGQRSWKLGFSVGLGQRPRLRQIPAGAVGVVPNEIARAKARLALPSDAPVISCYEAGRDGFWLHRYLTAQGIVNHVIDSSSIEVNRRARRAKSDRLDLVGLLSLLARFVQGDQRAWRVVRVPTVAEEDARHLPRTWETLTQERTRLINRLKGLLATQGGHVRIDADFLDELRTTRLWDGTPVPPGLQERVTRSWAQLQHVEEQLRHLKATRTTHERDLATPTRNAIAQLQTLRAIGPIGAWVLATEIFGWRQMRNRRQLGALVGLAPAPYKSGETEHDQGITHAGNAHVRRIIVQLAWGWLHYQPTSALSQWYQRRFGNGSRRVRKIGAVALARKLLIALWRYLETGVVPDGAQLKSMET

SEQ ID NO: 138729 - protein, 351 aa, unidentified
MKKIFVGIDVSKKTLDVSVIAPSLTEDKPVVISYGKFDNRPCGYRKIVSMARKAAKAVDDAEILFCCETTGGYDHALCDYMSDKHLDIWREHAARIAKTRPDHGKDDRKDSILIAEYAWRNRDRAQMYVPSSRSVRDLRQLLLYRRQLVEMRKQLNVRMTDLKATMQSDPTMSFIYSESEKQVKRLTDCIEKCESMIRETIDSDNEMLKNFGHIMTIKGIGLVSAVAIIAYTGNFKTIDVYKSFACYCGTVPFYEDSGTSIHKREYIGHKSNRMVRSYLIQAAHIATIYNEEMVAYKQRMQSKGKPAGIIVNNVANKLLRLVFSLVANDCDYEREHEFKREERLKKKTMSA

SEQ ID NO: 138730 - protein, 375 aa, unidentified
MKEKVRFLGLDVHAETIAVAVAEPDGEVRSLGTIANRAESIRKLVKKLGPIEQLKACYEAGPTGYVLYWQLAELGVACEVIAPTLVPMKAGDRVKTDRRDAERLARSYRSGDLTAVWVPDEGSESLRDLVRAREAAKQDQLRARHRLSKFLLRMGQRPAAGMKAWTAPYMAWVRQVHFAQVAREATMLDYLHEVDHMGERVKRLEQAITEAVKLASPAIQEVVKGLQALRGIAEISAVTIVAELGSIARFDTARQLMGYSGAVPTEDSSGQRTRRGSITKTGNAHLRRIVVEAAWSYRYRPAIGPRLRKRQEGVPEPIKEIAWKAQVRLHKRSMKLAAAGKDQRKIITAVGRELLGFIWAIGVKAEAASQLQMAA

SEQ ID NO: 138731 - protein, 457 aa, unidentified
MAKKRKISVSTKSQPLKVTHPDTAGIDVGKTLMQVSVPEDRSEKSNRSFGTFTKDLREIVQWLTGCGINRVVMESTGVYWIPLFLMLQEAGMEAILVNARDVKNMSGRKTDVNDADWLRFLGSCDLIKPCFQVAAVARRLREFHRLRDMKVKDMSRELQHMQKAMEQMNIKPDSAISHISGKSGMAIIRAILAGERNPHALASLADYRCKKSKETIAASLDGTWDMEHLLSLQMAVETYDHLASQIIRIDSEMEMFLNSCQLWDTANASVSDLSADKRCAKPKCPLNSIGFDVEMQSFLMFGVNLPGIPGIGEGTLLTLMAELGPDFTTKFSTSSKFCRWCNLTPTDNITGGRIISSRLPKRPNPVGQALRQSAITLRNSKTPLGQYFRRMATRLGPAQAVVATAHKTAEIIYLMVDRNVEYDNRKIESNEARIVENKIKSLEKRLEKLKSHQFSSN

SEQ ID NO: 138732 - protein, 342 aa, unidentified
MNHYAGIDVSLECSSVCVVDASGKILREARVASEPEALIAWFRQSGFEFERIGMEAGPLSQWLFAGMKAAGLAVELLETRHVRKAFEAMPVKSDRNDARGIAQLMRLGWFRPVHCKSISAQETRSLLTARKLVQSKLLDVENSLRGILRGFGLKVGKTTGQTFAGRIEELVHGHPHLQMIAKALLAVRAVLRTEFAAFEKQTRRMVRSDMQARLLTSVPAVGPIVALTYASAIDDPTRFKSSKQAGAHFGLTPKKHQSGETDYTGRISKIGDASVRTALYEAANVMLTKPLKGCSQLKSWAMRIKKRAGMSKAKVALARRLAVIMNRMLADGTPFNAAAAAA

SEQ ID NO: 138733 - protein, 361 aa, unidentified
MPDSTPAPGSVQAPRALRILAIDLGKFTSVACDYDTATLAHTFTTVKTKPAVLHDLIVEREPDRVVIEIGSAAGWVRDLCEGLGVALEVANPNHEAWRWKNVKRKTDRDDALKLAKLSAAGQLPTVDVPTARVRQWRALILYRAKLVRRRTAIKNSIRGLLDRQGLAMPARAAAWTDQGLEALADQSLPLMDCEPEELWRGQLALELQAYAQVDALIDQAGAKLDAVAGCDERVQRLRTIPGVGPRLSELVVAVIDDPHRFKSGKQVGAYAGLVPRQIASGTMDRQAGITKSGHRLLRSLLVEVSWLMLRHNPAFRRIYEKAQRGSKTRKKIAAVATARHLLITCWAMLRDETDWREPAAT

SEQ ID NO: 138734 - protein, 321 aa, unidentified
MEQRKTGTKIAGIDIAKAHLDVALHGAEPGSADEARFANDADGMARLGDWLAKRCVRRVGLEASGGYEKSVVRFLQDSGFETVLHQPMEVRLFARLKRKRAKSDRLDARLIAAATAQVEAVKAAADPYLAELAERMTAYEQAADLLAQARTHREHTRLADLRADLADHIRILAARKKSLAADLVRRIRARADLARRFDLVASLPGVGAINAAALVIRMPELGAMDHGQASALLGVAPFDRDSGAWKGQRFIGGGRQRPRRLIYMAALAARRTDPGLKAFADRLTARGKPPKVVLVAVMRKIIEAANLVLKRGTPWTPAICT

SEQ ID NO: 138735 - protein, 355 aa, unidentified
MESTKYVGMDVHNEAITIAVMNSAGKLIMESIIETKAITIRQFIQGLRGDLHVTFEEGTWAAWLYDLLKPHVTKVVVCNPRKNALLKEGNKSDRIDARKLAELLRNGSLSAVYHGENGVRTLKELSRSYLTISKDLGRVMNRVKALYRSWAIPCAGTQVYAPRHRSEWLSKITEAGVRRRAEHYYQQLDALQTLRHEVRKDLLVESRKHNATKLLRQVPCIGPIRAAQLVALMQTPHRFRTKRQLWTYSGLGLETRDSAQYRYVEGQLQRSKKPQQLRGLNSNHNHDLKNIFKGAATMASVSAGPFHDFYEALLTKGMQPTMARLTLARKIAAITLIVWKKGARFDPQHLKQQAA

SEQ ID NO: 138736 - protein, 362 aa, unidentified
MFRPHTLYIRIRIVRKVHEPVFAMRDQDVSDVIKTKNRTAMQYIGIDVSKATFVVAYSSDKGGEIRTFNNTTAGIKQFIGTLPKDGSIHCVMEATGNYSALLLYMLNVAGITVSMENPLKVKNFARAMLSTVKTDKIDARLIALYGEKMNPQPFKIQGEAILRLRQKRTVIRQLTKQITAMSNLRGSLACLPVPDKGATHTVDETIKFLEKRRDRLQSELTDLVEVEFSRQLALLTTIKGIGITLATALILTTGGFTYFQNAKQVSRYLGICPTYEQSGTSVNIRGHINRNGDAYTRGLLYIAAWPASRFNAQCKETYTRLRQNGKPGKLAMIAVANKLVRQAFAVVAHDKEYIDGFVSNRP

SEQ ID NO: 138737 - protein, 310 aa, unidentified
MDAIVIGIDVSKDKLDVHVLPAAQAFAVARNGAGIEELAARLAALAPAVVAIEATGGFETIVAAGLAGAGLPVVVVNPAQIRAYAKAIKQRAKTDPIDAAVIAKFARATRPEVRPLPDEATRQLADLVARRRQIVEMMAAEGQRGRRVDHKRVARSIARVKKTLEAELAELDQEIGDQVRGSPLWREKEDLLVSVPGVGPVVARTLLAELPELGRLERREIAALAGLAPFTRQSVRWRGRSFIGGGRATVRTVLFLAAMTAARHNPTLKAFRDRLVAAGKPKMVALIATARKLLTILNAIIRDNRPWQNA

SEQ ID NO: 138738 - protein, 424 aa, unidentified
MKVTYQTCCGVDVHKSFLVATSVKTTGGIEPSYQKKRFSTFNSSILEFKQWLLDNDCHDVCMESTGKYWVPVFNLLEDEINVVIANPKWVKAVKGNKDDTKDSKWIGDLFRLGLVKGSYIPCKKVRILREYTRYRYKLVSCRSSEKNRYQNALTVCNVALDSVVSDIFGKSSTSIIDYLLEQSGTSINHEEIASKLLRSLKSKEDAVIESVEGYQMTDTQKYRMRLVRAHMDYITAEINDVDKMIENMISSNPDFENAVQFLCTIPGVKRDSAITIISETGTDMSQFSSSKRLCCWAGLTPGSNESAGKKKSVRITRAGVYLKPALVQCAHAAVKSDKSPYYKKKYESLVKRRGKKRAIIAIARMILTAIYQMLSTGEEWNPSNLYKIDMPVALVEKQKAKAIKQAKKLLQREGILPPDEPLAS

SEQ ID NO: 138739 - protein, 389 aa, unidentified
MLLDHPSDEPAAIRTQFGAIFVSLELSRSNWLVTSLSPGKGEKMSKHNVAAGDIAGLLQLFAELKRRAQARTGQDYPIITIQEAGLDGFWLHRVLQQEGIESHVVDPASIATPRRRRRAKTDRLDGETLLRALLAYKRGEPRVCAMVVAPSPEEEDRRRICRERATLIAERIAHVNRIKGLLSAQGISDYAPLRRDRRARLAALRTGDGRELPAHLRAQIGRELDRIELLLEQIKAVEADQDALVGAAEDKAGKGAVPAPVAMLLALKGMGANFAAVLWSEAFYRQFANRRQVGAYAGLAATPWQSGGIRHEQGVSKAGNPRLRTKMIQLAWLWIRHQPQSELTRWFKARSQQGRKSAIVALARKLLVALWKYVTAGVVIEGAVMKRAA

SEQ ID NO: 138740 - protein, 419 aa, unidentified
MAFKILRKNCCGLDIHKTWIFACIGITDSNGRTEYKQARFSSFSNGLRDLADWLAKYSCSDVCMESTGKYWIPVFNILEKTCWVTLAHPKYTKPQKGNKTDRKDAKWICDLYMCGMVKPSFIPPPDIRQLRDLMRYRVKLTNMLTGEKNRAQNCLTVSNLKLDDVFSDVFGKSSRSIIQYILEHPGEQFDVTPFIHRRCKHPVEEIQAAVDGVVSREQAAKLKECLLHIDQLNAHRERIEAEILRLAEPYPYQLELIRTVPGFAAAPLTAVALISEIGVDMSVFPSAKHLASWAGCCPRNDQSNKKVKSTRISRAGCYLKPLLVQIANAVIKSDRHPECRDRYRRIKARRGHKKAIIAVCRMLLTAIWNVLSKLEPYSAKGYLADKLTEHSVVISKAEGLALLRKRGYIFKDELAVESG

SEQ ID NO: 138741 - protein, 387 aa, unidentified
MPQPNDLGRSLVALDQDSTLVAVIEMGQASWLIAAIVPGLNRHPLKKIAADAEQLLQVLRRWKQEAETAGRTIKRVAVAYEAGRDGFWLARWLRAHGIEAYVIHPSSVPVSREHRRAKTDRLDTELLKRAFLGWLRGEPDHCSMAAIPTLTEEDAKRPGRERENLVGERTRIVNRIRGALARLGIRNFKPMLRNAPQYLETLRTPEGAVLPPNTLAELRRDMARLSFVKQQIKEVETARLERLQRAPGEGGNAMVQLLTRVVGVGVETADMLVQEVFTRNLRDCKAVARYAGLTGAPDESGKRRRERGLAKSGNARVRRGMLQVAWGFLVHQKDSVLAAWYRARTADARGATRKTMIVALARKLLIALWRLATTGEVPSGLALRAAA

SEQ ID NO: 138742 - protein, 347 aa, unidentified
MLYAGLDLSRQRIDVHVLDASGRTVEMIAVRPDADALRMLVERLAGHGHAVRAAIESMNGARFIHDQLEQAGWDVLIADAQRIKGLAPLACKTDRIDARVLAELGRRDLVPAIWLPDPRVRAERERARFRLHLVRHRTALKNRIHATLITFGRPNPMADLFGVGGRRLLARLELPEPWAGTLTAGLRLIDELETEIEACEAELRRLGADHQYVPLLRTVPGIGWVLAFTIASEIGDIGRFPSPTKLAGYTGLCPRVYQSGERDRRGALAKNGPAYLRWALIEAATHAGRHPVYRARYERTKRRLGRQRGTKAPGPRPPLHLAVLPRGRWPRTPAPGVLTEPCPDPAQ

SEQ ID NO: 138743 - protein, 463 aa, unidentified
MPKPVSKKASSGHRSRTAKANQCQPTIRPHAAGIDVGATELYTAVPSDSDPQPVRRFATFTEDLNALADWLAACKVQTVAMESTGVYWIPVFQILEERGIEVCLVNAKHVKNVPGRKTDVSDCQWLQYLHSVGLLAASFRPPAQVCQLRSIYRQRDRLVRFASSHVQHMQKALTQMNIQLANVISDLTGKTGLAIVDAMLRGERDECKLAKLRDHRIKASEKTVAKSLVGDWKAEHLFALRQARASYAHYQNQIAECDTEIQDRLRQFESKVDPAVQPQPAAANFTLKESKEGGFDLREEFHRILGVDLTQVPGIQTTTVGVFLSEVGPCLDRFASPKHFASWLGLCPDNRITGGRVLSAATRDVKSRTAGALRMATQALHRSQSVLGDYFRRMKARLGAPEAITAAAHKLARILYYLVKTRCPYDASIFAAEEEVHRKRREKSLRKQAALFGFQLTPIEAVA

SEQ ID NO: 138744 - protein, 462 aa, unidentified
MQEKRNEEKVENRRGQLEGLPVIRHRIAGIDLGSEQHWVCAPTPEGNGREIAAFGGTTPELIRLVEWLKERKVESVAMESTGVYWIAPHEILEAQGLEVLLVDTRQLARVPGRDKKTDPSDCEWIQRLHSCGLLRGSFRPQEQICMLRTLVRDKASLVAESGDWLRRMQKSLDQMNVRVHRAVADLEGATGMAILRAIAAGERDARKLAQLRDRRCQKSEEQIAQELSGHWRADHLFSLQQALKMYDAIQERIAAYEQEILRTLEQLERQEQRGQNAPPLQNANKAKTIQKRGQEPKRQALYRMSGVDATQIDAIGVETVEVVISEYGPDLSRFPTEKQFVSHATLAPHVPKSGGKPIQKRKRNSASTRVAAALRMAALSLRHSDTALGAYYRKISHRIGGDVAVFATARKLATLIYRLLRWGQPYVDEGAEAYEDRFRKQRIRSLTAKAQELGYQLTPVNA

SEQ ID NO: 138745 - protein, 426 aa, unidentified
MSAADEPRKEPIAAFVGVDWADQKHDIALRSAEPEAKVERSQIANQPEALSDWILALRERFKGGKILICLEQSRGALIHFLMGYDCFELYPINPKQLDNYRKAFRPSGAKDDPTDAELLCKYLSLHHQELRPWRPNDEQTRKLALLCEKRRQAVDARSALSNQLKSELKQYYPLALAVLDNDLTTVLAADFLLKWPNFTSLKKASAHKLRSFFYGHQCRSEQKIEARIQRIQSAQPLTRDSAIIEAGTLTTQMLARQLQALAPFIRQYDEQIAQLFSQHPDRVLFNNLPGAGDALGPRLLSAFGSDRQRFNNVLEPLSFFGVAPITERSGKTTFVHFRWACPKFLRQTFHEFAGCSVRFCDWAAAFYDQQRARGKDHHGAVRALAYKWIRILFRCWKTRQPYDPKRYLSSLAQRASPLASALKNSP

SEQ ID NO: 138746 - protein, 476 aa, unidentified
MKRCSRKDAGANARRTESQFEVLHPDAAGIDVGGSEMWVAVPEGRSELSVRQFGTDTVELEAIAAWLKHCAVTTVAMESTGVYWIALFQVLENHGLEVYLVNARHVKNVPGRRKTDRLDCRWLQKLHASGLLSASFRPPAEICRLRSYLRHRGNLIRAMSKQVQYMQKALREMNVLLDQAVSDVTGLSGMRIMDAILGGERDPKRLAALADRRVKKSAEQIARMLQGDYRAEHLFVLHQALESYRFFQNQLQNCDRQVEQYLVELERVAGRQNVPLPEAGLTGREKRRGHAPDYEVQEHLYRLLGIDLTRIPGIAAATAQALVSETGIDMDRWPTAKHFASWLDLCPLPKVSGGQVIGNTRRHAQNRAGQLFRQAASTLYRSPSWLGAFFRRMKARLGGNSATKAAAHKLALVYYHMMETRTEYRELGGAEYEERFRLRQIRNLQRRAGQLGFELRPQGTCDPNPRPDVPLVAVTA

SEQ ID NO: 138747 - protein, 348 aa, unidentified
MLTIGIDPHKDTHCAVAVDAVARQVATRTEPARREGWGALVAWARGRGDSERVWVMEDCRAVSGGLERFLLDHGERVVRLAPHLMAGARTGVRERGKSDPIDALAVARAALREGIENLPSAQLAGPELEVRLLVVHRERLVRQRTGLICELRWHCHDLWPELTIPRRALIARRWQARLARRLGHAPASARVQIAGDLLARVRELTRTISALTEQLTGLVQALAPQLLAERGIGPLIAAKLIGEIAGIHRFDTDAQLARLAGCAPIPVSSGRTDRHRLDRGGNRQLNHAFHMLAMCKLVNDPATAAYIAKQRHAGKTTPEALRCLKRHLVRRVFTLLHSPKLVPQTVCS

SEQ ID NO: 138748 - protein, 367 aa, unidentified
MKKNSTVKQSPKRAKVPARGPITIGVDLGDKSSRYCVLDEHGQVQAEGSVATTKKGMAGKFGCLKRCRMVMEVGTHSPWLSRLLSSLGHEVIVANARQVQLISASSRKDDRMDAQTLARLARVDPQLLRPIRHRGEKAQQDLLLIRVRAALVEARTSLVNTARGLAKAMGERLPSCDTDSLGVERLEPLPERLRVQLQPLLKQVESLTKEIQEADRKVEQIARTEYPETQLLRQVSGVGPLIALTFLLTLEDRDRFEKSRDVGCYVGLRPKRSESGESQPQLRITKEGDIYLRKLLVQGAHCILSRRGPDTDLKRWGLRLAERGGKNAKKRAVVAVARKLAVLLHRLWVTGEVYEPLRNSAAKKAAA

SEQ ID NO: 138749 - protein, 345 aa, unidentified
MPIVGGLDIHRKQITFDYLDTGTGQVQRGQVSPADREHLRAWLARFAGRDDVAFAVEGCTGWRYVTEELAAVGVTAHLAEPADTAFARGRKRHAKTDKTDCRHLRMLLSEGRLPECWVPPSRILECRALLETYHDLRAEHTAWVQRIHAVLFHHGAPALGAGTLRTRQGAAALQAVAASCLSPAGQLQVATALEVIETLEARMHVVRHQLLDAARHLAGAKILAERLYGVGPFAALAITCWLGGKDRFSSSRQAVRFAGLDVTVWSSDRKGPPGRLSRQGPPVLRWALYEAGKTHARASAPDHAYYAAVKDRCNGKRAALSEARKLLRQAHHILAELGDDALSAA

SEQ ID NO: 138750 - protein, 513 aa, unidentified
MRYKVNGGAEMTEFALVRACGVGRRWSASPDLSMVRESSATVVSAAMRIPFERSSRNRRFPWHRHSLTRMEQIMAMRKRDELVFPHAAGIDIGASSHWVAVPADAAEDSVREFGTMTDNLQALADWLLACGVEIVALESTGVYWIPVFEVLEQRGLKVWLVDARQMKYVPGRKSDVQDCQWLQRLMSYGLLRAAWRPAGEVCEIRAIARLRETLLSEQASWVQRMQKTLVQMNLQLTEVLTDVMGMTGQAILRDIVAGERNPEVLARHRHARVKASREDVVRALTGNWREEHLFVLKQALGMYDDIGRRLAECDAQLQSLLGRRGQGHVDVGRAPKAGSKQATAFTLRQQLADWAGVDLTRINGLEVTTVMKILSEIGTDLSRFANVKHFCSWLGLCPGTKISGGKVLSSGTKRSANRVRQALKMAAMTLSRSDSALGAFYRRLCGRMDKPRANTATAHKLARMVYFMLTRGEAFVDQGQQRYEEQQRQRSIAALKRRAAALGFDINPMQTAS

SEQ ID NO: 138751 - protein, 345 aa, unidentified
MEHFAGLDVSVKETSVCIVDDVGKIVREVKVASEPEALLAVLKNPAYHFKRIGLEAGPLSQWLYSALAEAELPVICVETRHMRAVLKAQINKTDRNDARGIAQMMRAGLYRPVHVKTLRSRKLRMLLTHRKLLQAKAIAVENDLRATLRNFGLKVGVVGTVKFEARIKELVEDVPDLAVLVEPLLVVRRVLREQISVLHRRLLAIVRDDDVCRRLMTVPGVGPVVALTYRVTVDVPVRFRKSKSVGAVFGLTPSRHQSGESDRPGAISRCGDEMMRSMLYEAAQILLVRSTKWSWLKAWAMKIARHRGMKKAIVALARRLAVIMHRIWVNGTAFRWTREQAAAAT

SEQ ID NO: 138752 - protein, 309 aa, unidentified
MEQFVGIDVAKDRLDVHIRPGGESFAVARDGNGLAALVERLQGLPPTLVVVEATGGYETVVAGAIGAAHLPLAVVNPRQIRAFARATGRLAKTDRLDAAAIAHFADAVRPPARPIPDAQAQALGELVARRRQVIEMMVAERNRRRMATQRRVLKAIERHLALLQSELSQLEGDIDGAIRQTPAWQEDAELLNSVPGIGPATRRTLIAELPELGRLTRRKIAALVGVAPINRDSGTLRGRRAIAGGRSSVRAALYMATLVASRANPVIASHYNKLRTAGKTAKQALVACMRKLLTILNAILRERKPWQPA

SEQ ID NO: 138753 - protein, 352 aa, unidentified
MSEHSKESVVTVVGIDLAKRSFHVYGADGHGKQVFSKKLTRARLSLFMANLPACTVAMEACGSAHHWARTFRTYGHEVRLIAPQFVKPFVKSNKNDAADAEAICEAAQRPTMRFVAVKTVEQQDIQAIHRMRSLMVDRRTAQINQIRGLLLEYGIEIAQSRAAVGRRLPEILEDADNGLSARFRAELHELAEELRHLDTRVSHYDEQIEEIARQDAQVQRLMTIPGLGAKGATALVAAVGEDPRLFQNGRGLAAWLGLVPRQHATGGRERLLGISKRGDVYLRQLLIHGARAVLRWVERKEDHTSRWATALKARRPTNIACVAMANKITRVAYAVLTTGKPYDPASGALAKG

SEQ ID NO: 138754 - protein, 339 aa, unidentified
MSIIGCDLHSRYQVIAMVETDTGERVTRRLEHENGEARAFYTTLPKPSLIGTEATGYTQWFERLVAELGHELWVGDPAEIRARAVRRQKTDTRDAEHLLDLLLTKRFPRVWVPTPEERDVRQLLKHRDKLVRMQTSVRNQLHFLAMSQGVCRKQKLWSARGRAELEGLSLGPWASQRRKELLELLDGLRPRIAELDQAVKAEAERRPEAVELMKHKGVGPVTALAFVLTVGPVERFANSRKLVSYLGLNPGEDSSGGHQRLGHISKQGNEMLRWLLVEAGHSAAQFDPELRRKYQRLVFRRGRNVAKVALARHLAVRLYGTLRQASSATPPVRTPGSPR

SEQ ID NO: 138755 - protein, 337 aa, unidentified
MQHLAIDLGGRESQICLRDAKEKILEERKYPTKRLGEYLAKQPPSRVILETSAEAFAVADLARRAGHDVRVVPATLAPSLGVGARRIKTDQRDAQVLSQVSCRVDLRSVHIPSAQARAWRTLCNSRDGLVSSRTKLSNTVKSQLRSRLVLTHRRRSTATPDQIRALWTEVAGSVPEHVERMLTVITMLDVQITAADKEIRQLVKANETCRRLMTVPGIGPVTAMRFVATLDDVTRFETAHDVQAYLGLTPGENSSSSRKQRTHLTKAGSPQMRWLLVQAAWTVLRCAKKHPMSIWAMQVAERRGKRIAVVALARKLAGIAFAMWRDGTTYNHQRGAD

SEQ ID NO: 138756 - protein, 355 aa, unidentified
MSQEKYIGMDVHQATISVAVMDAQGKLIMECLLETKAATIVDFIQGLHGTLSLTFEEGTSAAWLHDLLKPHVSRLVVCDPRKNALLKDGSKSDRIDARKLAELLRTNQLKPVYHAEHGVRTLKELGRSYLTVTKDVTRVMNRIKALYRSWAIPCSGTTVYAPRHRAEWLAKIVEPGVRVRAEHLYQQLDGLQPLRLQARRELLVESHKHAAVKLLHQIPSIGPIRAALLVALLQTPHRFRTKRQLWAYSGFAVETHDSGEYRSVRGKLQRNRERITVRGLNDNHNKDLKNLFKGAAISASTRPGPLHDFYVARVEKGMRPTMARLTLARKIATITLTIWKKGVSFDPQQLPRQAA

SEQ ID NO: 138757 - protein, 424 aa, unidentified
MKVTYQTCCGVDVHKSFLVATIVKTTGGIEPSYQKKRFSTFNSSILEFKQWLLDNDCHDVCMESTGKYWVPVFNLLEDEINVVIANPKWVKAVKGNKDDTKDSKWIGDLFRLGLVKGSYIPCKIVRILREYTRYRYKLVSCRSSEKNRYQNTLTVCNVALDSVVSDIFGKSSMSIIDYLLEQSGTSINHEEIASKLLRSLKSKEDAVIESVEGYQMTDAPKYRVRLVRAHMDYITAEINDVDKMIENMIFSNPDFENAVQFLCTIPSVKRDSAITIISEIGTDMSQFSSSKRLCCWAGLTPGSNESAGKKKSVRITRAGVYLKPALVQCAHAAVKSDKSPYYKKKYESLVKRRGKKRAIIAIARMILTAIYQMLSTGEQWNPSDLYKIDMPVALVEKQKAKAIKQAKKLLQREGILPPDEPLAS

SEQ ID NO: 138758 - protein, 375 aa, unidentified
MSDHSEAFVAFDTSKLRNSVAIAEAGRAGEVRFLGEIENSAAATAKLVRKLAGKYQRLTFCYEAGPTGYGLYRQIKSLGYECLVVAPSLIPRKPGDRVKTNRRDALSAVKLLRASELTAVWVPDPRHEAMRDLTRARGAAVEDLRRKRQQVSAFLLRQGRHYSDGKKTWTKAHMNWLASQKLEHPEQRIAFEEMLLAVRQAQERIERLEQAIRAAVPDWSLAAMVTALMAMRGIDLVSATALLGEIGDLSRFQTAPELMAYLGLVPSEASTGDTVKHGPITKAGNRRARRILVECAWSYQHPPRVGKEKQEKVAAAPRAVREIAWKAQCRLNRRYRALIRRGKLKTVAVTAVARELAGFIWAIGREVTTADAAAR

SEQ ID NO: 138759 - protein, 408 aa, unidentified
MKASNPTFPPGAVAAYIGIDWADQKHVVALRSASEPAKIQHQLIEQRPGALMEWIGQLEQRFGGQGKILVCLEQSRGALIYHLMGYELFELYPVNPLQLARYRETFSPGGAKDDLPDADLLSELLYCHRDRLKAWKPDTELNRKLAFFNEGRREAVDQGTRLSNAIKSQLKVYFPLALELLDDDTSTILAADLLLKWPTLEALQKQNSHSLRKFFYAHNCRGESKMLRRLERVHQAKPLTQDQAVIEPAVLRVQMLARQLKALLPDIARYEEHIAELFAAHPNHFLFDNLPGAGRALAPRLCSALGSDPDRWQAAQEISTFHGIAPVRRASGKKTGKRASIHFRQACPKFLRQSFHEFAACSIRYCTWAHALYDTQRARGNGHHAAVRAVAFKWIRILFACWKHRIPL

SEQ ID NO: 138760 - protein, 348 aa, unidentified
MDYYAGIDVSLEASSVCVVDANGKILREAKVLSEPEALIGWFCGLEHGLARIGLEAGPLSQWLYAAMKQAGLAVELLETRHVRDAFKAMPVKTDRNDARGIAQLMRLGWFRPVHCKSMLAQEVRALLTARKLVQSKLFDIEMSLRGVLRGFGLKVGPTKPTRFALRIEELVAGHATLEVIAKALLAVHEALLRESKGFEKRVRAMAREDQRVRLMMSAPGVGAIVGLTYVAAIDDPKWFKSSKQVGPHFGLTPKKYQSGEKDVSGRISKIGDASVRTALYEAANIILTRPIKGTNFLKSWAMKLARRAGMKKAKVALARKLAVILHRMWVDGMPFAASKTGSTAPVAA

SEQ ID NO: 138761 - protein, 406 aa, unidentified
MSVVAAPVSSSTVVVAVDVGKNCVALSVTDVGRHRLFGPVEFAMTRPALERVLSRVGEVLPADGVVKVGVEAAGHYHLPLITGSAWPAGWEVLELNPAHVGEQRRVAGRRRVKTDAIDLEAITDLVLAGRGIPVTAREEVLSELTAWAAHRTRRVGTRTATKNQLLGQLDRSFPGLTLALPDVLGTKVGRLVAAEFADPARLGALGVTRFIRFAAHRELRVTRPVAERLVTAARDALPTRDAVIARRVLAADLALLADLDQQINQAEAELAALIPASAFRTLTSVPGWGVVRTATYGAAVGDPTRWPGPRQLYRASGLSPMQYESAGHRRDGAISREGSVELRRALIDLGIGLWHSDQPARAYAAGLKARGKHGGIIACALAHRANRIAYALTRDRATYDPTRWAR

SEQ ID NO: 138762 - protein, 392 aa, unidentified
MYIVGIDIGKNHHEASIVSPKGKQIGRSLRFATTHKGADSLMSFIFKNIGNSPCVFGMEATGHYWYPIYSFLKAKGYTIYVINPIQSDSLRKMYIRQTKNDSIDSFLIAEVIRFGQFGTTSMADENILAMRQLCRYRDSVISSRTEIKLRIGTIMEQMFPEYEKQFSSLWVSTSMGILEKYLTPENIENAPIDELFEIIKDKSHNRLTRAKAISIKEAAADTFGIKIAQDAFSFQLKQLIDRMNFLDKQIEALDCQILEYYEKFDCYLHTIPGIGMIAAATILAEIGDINRFKSSSALVAFAGIDPTVRQSGEFSSTHNHMSKRGSPYLRHAIFLAATTCSFHNSPLNAYYKKKREQGKHHLTATGAVARKLTTIIYAVFRDGKPYEPKKFC

SEQ ID NO: 138763 - protein, 421 aa, unidentified
MMHPKMKWTYVGVDSHKDTHTAVFIDCFFGKLGEITFNNMPNEFEAFFKQIQKFKIGGTDFAFGLEDVSAYGRTLAVFLTGKNEMVRHVNAALVADERKRGNILHKTDSFDAECAARVLLTNFDDLPIANPQDKYFILGSLVARRNSLIKINVSLKNHLHSLLMDNYPNYKSLFPSIDSNTALVFFEHYPSPLALSGVTVDELMAQIKSVRYTRCTTSRASSILEHVAKCGFTASEYQMQKDFTITSIVRQVKSNLKELDEIDNMLKDFLSKFDYKLTSMNGIDTVIACKLIAEIGDIRRFESSAKLAKYAGVAPVTFSSGKSDSQFSNERGNRELNQIIFRLALTLTMRFGQNNKVRNHYFHDHYKKKLSEGKTKKQALKSVQRRLINIIYGMMKNGTEYINPPLVESKETHIEATSKIE

SEQ ID NO: 138764 - protein, 324 aa, unidentified
MFFLGIDVSKAKLDCALLGSDANKRKTKVVPNSIAGVQTLLQWCVKQGAEPAQLHAVLEPTGQYHEQAATALHDASVNVSLVNPAQVRDFAGALAVRSKTDGIDSYVLARYGQALKPGLWRPAPLHARQLRALLARRDALAKDLQRELNRQEKTQFSDPPVLVEGSIAKTIAFLREEIKRLDHAINDHIDRHPDLKEDRELLTSIPGIGDRAGNSILSIMHNRHIESAEGLASYLGVVPVQRQSGTSLNSRPRLSKTGPSTVRATLYMAAIVSKRFNPHVGALYARLLAAGKSKMAALGAAMRKLVHLCFGVLKTRTPYRPDYA

SEQ ID NO: 138765 - protein, 349 aa, unidentified
MTMLAEVVDVVIGVDTHKHTHTAAVIDARTGAVLDERTVDADPGGFSELIAMADRHSGLRAWSIEATRGYGAGLTRHLEGLEELVIELDRPNRPARRNGAKSDPLDAVRAGREALAREHLAQPRASGERSALAVLMAARRSAVDASTVAQHQLHGLVVTAPEILRARFRGQSTPAMVATATRLRLNSAWDLETAAYLTVLRDLSRRINAMQTEAKDHERAILAIIKSWRPDLLDLPGVGPIVAATVLCAWSHAGRCRNEAAFANLAGVAPIPASSGQTTRYRLNRCGDRQLNRALHVIVIQRMRHDPATKAYTERRRTQGKTDREIRRCLKRYIARQLYRQLEQPLDAP

SEQ ID NO: 138766 - protein, 360 aa, unidentified
MSDATTSEGTKVTVGLDLGDRHIQVCVLDEAGEVIEEARLATKPQALRRRFCGADPLRIVLEAGTHSPWVSRLLAELGHEVIVANPRKLRLIYQNDSKSDRVDAEYLARVGRLDPALLAPLTHRGPETQADLALLRSRNALVRARTSLISHARGTTKSLGARLPACSTASFVAKAGACVPDELRPALDPVLVVIAELCAQIRALDERVEEMARQRYPETALLTQVPGVGTLTATVYVLTLEDPERFPRSRSVGSYLGLRPRQRDSGSLQPQLRITKAGDEHLRWLLVGAAHYILGPFGPDTDLRRWGLLAAQGGRAGKKRAVVAVARKLSVLLLRLWVTGEVYEPLRNARLRGELLPSPA

SEQ ID NO: 138767 - protein, 463 aa, unidentified
MARNDKGKKHKKPVRSLKTIQPDAAGIDLGSREHWVAGPPLQDNTPNVQRFGTTTPELLRLADWLKEQKVNTVAMESTGVYWIPLFEILDSRGFEVILANARQVSHVPGRKTDMLDCQWLQLLHACGLLRGSFRPSDDICRLRTLLRERNTMIDQRSDWVRRIQKSLDQMNVCVHHAVSDITGVTGMAMIRAIVDGERDPRTLAQMRDRRCQKSEEQIANELTGNWRAQHLFNLRQALKMYDQFCEVVAEYDAEILAYIKSLQPGVDDDGSVPPPASKSKARNIAKKGQEPMRQALYQFTGFDLTTIDGIGVDTAAEVISELGADFSSFPDEAHFVSYLRLAPNLSISAGKKVPSKLKGTTTSRVAAALRMSALGVRNSKTALGAFYRRISRRKGASVAVFATARKLAQIIYRLVCHGQAYIDIGAKAYEAQFNNRRIKYYTKALKDLGYKVKPLAAAESLTA

SEQ ID NO: 138768 - protein, 322 aa, unidentified
MNLKKSALVGIDVSYKTFNAYFSGTDCLYKNTRIGWQKLLREAPPGSVYAMEATGNYHFRLASYLHGRGMAVIVLNPYYVKHWIISQGGKAKTDRINARDIYFYVLGNGSSVRHWQPLPPLYARARVIVTLLSSLSNLSKSANNINHSISLVVGKTNGMLNPMLNVYSVCREQEKALEMELVEIVKKIFPNQYNLLLTIPGLGSKSASVFLATTRGFSEFASYRQLTSYIGLAPSVEESGTSVRRKSRITKTGNNYLRSLLFMCAMTALSKANPCKELYVRLVKRGKPKKLAIIAVMHRLVKISFGVVQSGEPYRGNNLLLA

SEQ ID NO: 138769 - protein, 362 aa, unidentified
MLYLAIDQHGKQLTVNVRNEQGEVILRRQVSTQWQRVREFFSQLRDQAAGGGGFAAIVEVCGFNDWLLKMLGEYGCEEVVLIQPEKRSRRKTDRRDANQLGELLWVNRQRLLAGQRVQGVRRVLPPTAQEAADRQLTTLRKRLGQQRTHTVNKVQHILLKHNLQQDCPAKGLSTKKARKWLQELSLDEIDRDEIDRLELDHLLAQWQLWDEQILTVEKQIKQRQAAHATAPLLATLPGCGAYSSLALASRIGPIERFARPGSLANYWGITPGCRNSGETDRLGSITKEGSSMARFILGQMVLHVLRKDAAMRSWYQRIKKRRGSKIARVAVMRRLACIIWHMLKHEQPYVIGGWPMQQKLTH

SEQ ID NO: 138770 - protein, 353 aa, unidentified
MKKNSTRVVVAVGIDNGDTYSQVCGRERNGDVVLERRVRTTEAGFRAVMGKLPPCRVLIEAGSMTRWIKTLLEGLGHQVKVADPRKLRRIYENENKSDVEDARQLSEEALDRWDRLREVRLRSQEAQERLAVLKARDELVRLRTALVNLARSVLKQDGVMVKKCVPEAFFKNAEPLVPEGLKAALGPVLCQVEALSGQIRSYDRWVAEKAKSEPAVRLLQGVCSVGPITAAAYVWTLDNPDRFPRSRVVGAFLGLRPRRDQSGEMDRQLPITKAGNSFLRRLLTQCAQHILGRFGTDTAIRRWGLRLAERGGKRAKRKAVVAVARKLAVILHRLWVTGAVYERFPGTAVRAAA

SEQ ID NO: 138771 - protein, 413 aa, unidentified
MNYNPCITIDVSQSKSHIQGFTHFNSTTKKPTNITQPKSMRHTKYGYNQILELINFIYSKTGTIPLIVFEYTGVYHKTLEKFLLKHGIKYHIVAPLRAAKSRKNKLRSVKTDKRDCLSLAKMFYNDDLGDFYHENEYYEELKHLNRFYENILLRQQELKVNFRELLAVIYPNFKISKSNPEGAFRNVYTKEALGFLKEFSHPDLVVNSTIDEIACKLTKYISRAHQRYLKSISEHLYNYCSNLISGCSSTSNRVSSLLFYIEQIEKYEDILQDTLDKIHLLVKDSYMFNLLMSIHCVNKNLASRFICEIGDILRFKSYKAIIAFVGTDPQILQSGDNDGLHKHITKKGNKHLRTILYLIVQQMTKAKNIESSIKSFYKKKTQQGLRKLVALIACCNKLIRIIYYMSKTGTAFE

SEQ ID NO: 138772 - protein, 372 aa, unidentified
MNYNTVYVGMDVHKESFTLCSYTIDVEKGSHFQRTEADYKNVLKYLDFLRTVYGNDANFICGYEAGCLGYTLYHQLTANHVNCVILTPTTMFEQRSRRRIKTDKRDAKIIAKCLAQHNYSPVHIPTATDEETKEFLRMRDDHKLALKKVKQQILAFCLRHNYRYDGKSYWTAAHIKWLKALKPEALYKEILDEYLLTYTTLSDKLERLDKRIEELASKDEYKESVKKLCCFIGIKTHTALSVLVEVGDFQRFASAQNFASYLGLVPGEDSSGDGQTRLGITKAGNRHIRMLLTEASQCYTRGQIGFKSKELKSRQSGNSLQVIAYADKANERLRRRYYKMVLGKSKKHNVAKTAIARELACFMWGMMTDHIA

SEQ ID NO: 138773 - protein, 465 aa, unidentified
MTIHSVGIDFHQGQHRVRCLDDRAQPCDSFGFQTTSEGLAAFEEHIFRDGSNPVIVFEPAGIPWLTVAAYLRSRYPDCRLVKAKMQKVAALRRYLRGPVKSDRIDALTLAKMPFIDPEQLEEVYLPSAEIHTLQRLTRQRKRLQSDIAGRKVRIEAIIDGYLPGIRKAFASPWSTQVRAFMRARLNPFAVVRDGEKALSAFLSKASSRDKGIRAESHQIFQACQAVADICKVAEPATTINEVFFVELQDEIARELRLMETEEAESESLESRISEIYHKLHPSNNLCTIPGVGEHTAPIFLAAIGDPARFRNQSAFANWTGAVPRSRQSSNMEAKGLRMTKAGPSIMRMALFQSGDIGRRWDPQMAAIYYKQMVSHGKNHKQALGAVMTHLGARVLKVLLEDRPYELRDIDGKSVTRDYAKELILTKYHVSEEIRRERRRRNSIIGKTEETATNRRNEAAKAPQPV

SEQ ID NO: 138774 - protein, 310 aa, unidentified
MEKVIEYPQVVETGCGLDVHKDIIVGTISRGNQSFETREFGADTSSLTSLRDWCKQSGVTHVAMESTGIYWKPVFNILEEDFEILLVNARHVKNVPGHKTDKKDSAWLSKLLLSGLLKGSFIPPQDIRELRDLVRYKKKLIGQVSSEKNRIIKVLEDCNIKLSSVLSNVDGVTGTKIINAIISGERDVKVLMSFYRGKIKASREDFSKALTGRITPHHVRMLQLHKRRITETEFFIDEIEKEIEKAVAAYRVEIDLLQTIDGIGKDSAIAIISEIGVDMRKFPSEHHLASWAGVSPGNNESGGKKKVPEA

SEQ ID NO: 138775 - protein, 339 aa, unidentified
MKKVFIGIDFSKLKFDAAIYSVDTKAIVSTEVFDNEQSGYVDFLQWVKENTRCQKSGMLFCGEHTGYYSGNLSVFLYESGYDMWLVSGLEMKLTQGIKRTKTDRVDACKIAEHAYRYQDKVVLFQPVSKALEEIRELLSYRERLVETRKVLTTSAQEMKRVKDNASCDYIYQDSLEYIKSLNASVRDCEKRIEALLKQDISLNTNYKLVSSVVGIGLVNAALILVATANFTLFDNPRKFGCYCGVVPFEHSSGTSVRGKTRVSKMANKHLKTKLTLAAQNAARFDPELKEYYQRKRSEGKNNWLVLNNVKNKLIHRIFAVVRDGQMYEKQYVHPLKQVA

SEQ ID NO: 138776 - protein, 363 aa, unidentified
MIVIGTDTHKQTHTCGAVFAGTGQMAGELTAPARKAGFAQLLDWGRRLEEERIWALEDCRHVSGSFERFLVASGERVVRVPPKLMGQSRRGERTAGKSDPIDALAVARAALREGPETLPAAHLDRDALELKLLLDHREDLIRARAEDQQRLRWHLHDLWPDFELPAGCLDRIVWLDRVAGKLTRAEQGARVRVSRELVRAIRDRTKRAAELEREIAAMVDAQAPQLLDLPGCGTLTAAKLLAETAGAARFSSDAKLARLAGVAPIPASSGNRTRLRLHRGGNRQLNCALHRIAVTQSRMHPPAREFLARKRAEGKSSREALRCLKRHLARRVWRLLNDSEIDRSVTTPDSQRGSLSPQIAVAA

SEQ ID NO: 138777 - protein, 357 aa, unidentified
MQSNELNFKGQNIYVGIDVHKKDWTVCIFSEHLEHKKFVQPPSAEALKTYLHRNFPGATYHSAYEAGFCGFHIHTSLLGLGINNIVVNAADVPTTHKEKSNKTDKRDSRKLGRSLRAGELTGIHIPTRKIQEDRSLLRLRYTIGKDLTRLKLRIKSLLNFYGIDHPKQFSSTGTHWSRKYLEWIKTIKMEEESGLSVFQILTTEVQEIRKTQLEVTRKIRTLSQTKTYENDYKLLFGIPGIGLITGMTFLTEIGDINRFPSIDHFVSYVGLIPSCRSSGEKENTGDITSRAKKVLRDLIIESAWCAARKDPALHLAFGNLCKRMEPNNALIRIARKLLNRIYYVLKNKTEYVYAIVK

SEQ ID NO: 138778 - protein, 365 aa, unidentified
MGLVKNTRIVEGKPDMLYIGLDVHSKWMTVKGFNSETGELIEIKKQSNDAESLRETFGSFAGPLYGVMESGTNSWAVYRILEPFFEKLIVVDPATVWGKVVRRGAKTDGRDALTLAVKMQRSELEPLYVPDEQTQDKRALGRAKINASRHVTKTVNEIGSLLRSWGIVVGSSLLSVEGQKIIEDAKSRLPEYSLKVLEMWLRMLKEAQDAEAELESMIKTEAAKDEKCRLLMSIPGVGALTAFVVIAEIGDIHRFRSAEQLVSYCGLSPTISQSSDSIHYGKLNKFANKFLKYVLVLRAQGMARSKQNIPMRQTYWRVVIKGKNHAKIAVARQFARVIFSMLKNKTSWDGSKITDRRISQSQAAA

SEQ ID NO: 138779 - protein, 336 aa, unidentified
MRFIGVDLHTTQITVCYLKTLDEYRFETYGLDEMERFLAGLEEADKLAVEATGNTRWLVNLVKERVSRVVIVNPRDFEVVKQSVKKTDKRDALNLARFLAVDMLPEVRPKSDAAEQVQRMNETRTKFVRLKTSLLNKIHALAVSNGRKLKKESLSSERGLARVMEQEWTISERLELEIIIEQIGSLKRSIKRIDIAIGEESRKLTGFENLITITGIGERSAGVLLSVIGEVDDFPDENKLASYFGIVPRVSNSNETVNHGRITKRGNKTGRTTLVQCTLVAIRYSSYLKKYYEQIKERRGHGKAKIAAARKFLTIIYNTLKNNWVFADFNNFELAE

SEQ ID NO: 138780 - protein, 358 aa, unidentified
MRASKESFKGEDVFVGIDVHKKSWQIGTYFLGTNLKSFQMNPDSGKLKSYLDKRYPGANFFSCYEAGFSGNWLHRELVDLGIENLIVHANDVPTTGKEKDRKSDPIDCRKLARALGCGLLKANYVPSIEQEGDRQLLRCWRSTLKDIRRMKHRIKSQLLVTGKNLPAEWDKSYWNKDLFSWLDQLDMGSFGGNFALKKNLERLQLRISKEKEMKAAVLALSSEERYSNNFKRIKTLPGFGLNISMNFLVELGDMNRFKNLDKLCSYIGLVPSTHSSGAKERVGELTGRTHKILLPLLIQASWVATRSSPEFRKYFYHQKESRKDNPAIIKVARKLLGVMRAVWMNQTEYTFTRNGDKT

SEQ ID NO: 138781 - protein, 411 aa, unidentified
MNPLYVGIDVAQKENWACLMNSTGDELSTFSFSNDLTGATGLKDKCLALAAQHSIDSLLVGMEATATYWWHLSVYLSTEAELSHLYPKVYSINPKIVKGFKKSYPFLPKTDRIDAWVIADRLRFGRLPAECYHDERYQPLQRLTRFRYRLIKQITDEKNYFLSYLSLKFNTFKPRGIITNTFGATSTAILTEFYSVDEIAETDIDELAAFVQKSSNNTITDPVEVAESVKQAARDAYRLDKKILEPINFILATTLRNIQALQAQVKITDLAIAKEIAHIPHTLGTVKGLGPVLCAGIIAEVGDVTRFKDQAALAKYAGLTWHVRRSGQFEAEETHMSKTGNPYLRYYLYEAANSLRVHNDEYRAYYERKYAEAKTHHHRRATALTARKLVRLVFSLLQSKRLYEPKVGVFR

SEQ ID NO: 138782 - protein, 336 aa, unidentified
MKKIFVGIDISKMWIDVCVTLNGNITTHQQFENNKMGFKAMVKWIRQFSRVQQEWLLCMEHTGIYALPLWYFLTEEKISYCVVPGSVITSGLEIRRGKNDKIDAEDIARFTMHYADELKPHQLPTQVLQRLRMLFAYRERLVKASVLLKVPAKEAKEFAARESKEVRTDSSSLVQIIEARISKVEKLMLEVINSDEQTATCYQLIVSVKGFGIVTACYLLIITQCFTVLTKSRELANFGGVAPHPHKSGKSIKGKTRVSPIADKKLKALLSRGASSLIQYDEGTKNYLTRMMAKGKHENLVKNNIKNKMLHTVCAVVKRGTPYIKNYVSPYAQHVA

SEQ ID NO: 138783 - protein, 323 aa, unidentified
MSDPVILGIDIAKQKFDAALLMGGKLKHKSCKNSTEGFELLSQWLRKQRVDRLHACLEATGNYGDELAFYLHEAGHTVSIVNPARIKGFAQSELLRSKNDKMDAGLIARFCLAMHPEPWAPPAPEIRALQALVRRADALVTMRTQELNRLGTAPVTVEPSIREHIAYLDEQIEKIKQQIDGHIDDNPELKSKKDLLHSIPGIGPATIAAILSEISIFERFDQVRKVVAFIGLAPKEALSGSSIKGKPRLCKIGHARLRKALYMPALVSIRYNPMMIGFYKRLRSKGKNGKVIVCAVMRKLVHIIFGILKSGKPFDPYYKPHFA

SEQ ID NO: 138784 - protein, 339 aa, unidentified
MKYIPVGVDIAKHLMQVHFVDEHTGEIIDKQVKREKFLEYFSNREPCLIGMEACGGSHHWARELQKLGHKVRLLKGRFVKAFVMGNKNDVMDARAIWLAVQQPVKSVAVKSEEQQATLGLHRMRQQLVKFRTAQINALHSLLLEFGETTHKGRAALAKEVPEALERLKEQLPLYLINMLDEQYQRITELDEHLDHIEKQLQAIARQNETCQRLLNIPGVGPLIATAAVATMGDASAFKSGREFAAFIGLVPRQTGSGGKIRLLGISKRGDKYLRTLFIHGARAAALLTKEPGPWITELKKRRPASVAIVAMANKLARTVWAIAAHGRKYDKNHVSIRPD

SEQ ID NO: 138785 - protein, 413 aa, unidentified
MDVLHPRCCGLDVHKSSISACILLREAGRVQKHQRRFGAMTQDLQELAEWLGRFGVTQVAMESSGVYWKPVWNILEGQFTVVLANAQHIKNVPGRKTDQKDAEWIAQLLQYGLLRPSYVPCEIIRDLRDLTRMRASLSQEAARLSSRIQKVLEDANVKLASVATNVLGKSGRAMLEDIISGEDDPEHLASLALGHLRVKIPQLRLAFEGKIRSHHRFLLRRLLDQVQFVEQEIALLDQRLEDIGGQRPELAQAVERWDTIPGIDRVAAWALLAEISDNMAQFPTAEHLASWAALCPGNHESAGKRLRGTTRQGSPWLRRMACQCAWAAARTKNTYLSSQFRRLAARRGKKRAIIAVAHTIIVIGYHLQTNQSNYEDLGGNYFDRIHSDGLKRYLVKRLQQLGHKVTLEPMEAA

SEQ ID NO: 138786 - protein, 440 aa, unidentified
MCCTDMPAGALFAQVEAFQTVNPVCFLVVNRPAFPPQLNMNTRTTVADPGFRYLPDTQGYRPIIPPALPVINGSALHQQSASPPDTDTVSLPQKMHRLTFQTLIFILQLPQTPQFGHAQTSEFLLPVNGMDYLLPLRLTVRNVLTRRITMNIVFLGIDLAKNVFQLCGLNQAGKPVYTKRTGRKELLQTLANIPACLIGIEASTGAFYWQREFEKLRHKVKVISPQYVKPFVRGQKNDGNDAQAIAVALMQPTMQFVPPKSPEQQDIQALHRARQRIVNRRTATVCQIRGLLLDRGSPIGSAVSRARRAIPLILEDAENGLSSRMRRTIAELYELFNDLGRRIHFFDKEIETVFRQSEACQRIARVKGIGPKTATAIVAAIGKGTEFKNGRHFAAWLGLVPHQHSSGDRQALMNMMKKRRQASADTFYSWRPRCRQGCHE

SEQ ID NO: 138787 - protein, 466 aa, unidentified
MALRLGIDIACRAAHQASLADETGNFVFTGRRFRTRADELEQLWAALPARTEPADVTVVMEPTRNAWVPLAAWFRRRGAHVVIVPPERSADLRAYFSKHAKSDRLDSRMLARLPMLHPEGLHEEQGLGPGEALRRMTKLRSNLVKRRSACLARLDALLEILGPGWSAVFRADLSNTTPLRFLAAGYACPHTVRRLGKARITRFIYRHSRGRWGAPQADALLAAAAETLALWNGELDYTELAEDIAIEARLALRLAEEIKGLEERIGILFEEADPAGISTSVPGVGKILGAQILGRLGDPSRFSSLAGVRSYSGLVPSLDASGLSGRSGEPTKRGDACLREALFMAADHARRVDPTLARRYQRLMTEGGKHHNSAICSIASTLLTRLVACLRSGELYVIRDVDGTVLDAAKAKAIVAERYTVPPAVREHRRSSSVHLRHQGTSRRSKESQSAPSPDSSLTHATAGRT

SEQ ID NO: 138788 - protein, 430 aa, unidentified
MKSNTQNAKIEAITEKTLVLGIDVGSETHYARAFDYRGIEYSKKPFKFSNTEVGFATFKEWILDLKERHEKDKVVPGMEPTGHYWFNLGKFLQDNEMKPVLVNPHHVKKSKELDDNNPTKNDRKDPKVIAGLVREGRYMIPYLPDGVYADLRTASNIRFQLQAELTRIQNRISRWFNIYFPEYKTVYGKPDAKSGMLILKAAPLPEDILTLGIDGVNQIWRDAKLRAVGKARAKTLIEAAEHSVGSKEGAVSARMEIRMLLEDYESRNTRLQEVMVLIEELVRKIPMAEKLLEIKGVGIRTVSGFLAEVGDISRFNNPKELQKLAGLALVENSSGKHKGETTISRRGRKRLRYLLFEVAMSLVSKNQEFRELHNYYTTRRLNPLKKMQSLMAIAAKLIRVFYAMLTKGVDYDPKKMVSDIKRPAVYLQAA

SEQ ID NO: 138789 - protein, 290 aa, unidentified
MAANRMTDPDHRVTVGVDTHLDTHVAAAFNHLGRPLGHLEIATTPAGYRRLLRWARSLGSDVTFGIEGTGSFGAGLARFLRAASCTVIEVNRPNRQTRRSRGKSDPLDAVAAARAVIAGEAAGPAKSDDHRVGMIRSLRIARRSAVKMRTQIGNQMDALVLTAPADLRERLRHLSTDDLVSVAAGLRPGAVTTPAAATKLALRGLAERHRLLTAELDQLDLELRRLTAEATPALLALHGVGPDVAGALLLAAGDNPHRLRSEAAFASLCGVAPLPASSGEDPPTPTQPRR

SEQ ID NO: 138790 - protein, 407 aa, unidentified
MDLLKTVFGIDVSSRKSNVCIMVNGQKVNDYAISNDMVGFNQLLGDLKQVTNPQIIFEATGVYSRRLQAFLDMHELRYVMMNPLEAKRKTKDDLHQNKTDKLDALYLAKLQSEHPQRLAYVQNKEYQELMANNRIYEQASHDLITNKNRLHKAVQLTFPEIEHLLANPRGKNYWSIALRFPHPDIVLETKEADIIDFLKGLSGIGKKRANDITQNLIRLAKVACPAVKKNSAHIRGLKMAINNILSAEEECQTALQEMAKLAPKRDLEILTSIPGIGENTALRIISELGDIRRFNNPSQLNAFVGVDPQVYESGNLTAHLSISKRGTAIGRKVLYLAINQIQSAKKVGNPCHIADYYEKRKRSSETASHKKAAIASIHKLLRTIFALIKNDQLYSYDVAKHNQRLLS

SEQ ID NO: 138791 - protein, 357 aa, unidentified
MDYGVYCGVDFHARQQTICCLTTEDGVIATYELKHDNKKAVRDFYAQLPGPVLVGLEAGGYSLWFEQLLEELSHEIWLGDASEIRRCARRRQKNDRRDAALILDLLVRGEFPRIHRQTALSREILRMLRYRHRLVKIRTIIKNCLQALAIQSGLALKSQLFTEAGRQQLASLAMSPAMQCQRKHWLELLATLDERISTCEKWLSDQALADQRVRRLRTHPGLGLLTALAVLHTLDPVSRFPNQRKVAAYGGFDPCEDSSAERKRYLGISKAGSKLLRFLLIEAGQTAVKEDAELKRFYWRLQQRRNKPKAKVAVARKLLIRSYILLRDEIDYAEFQRRAVAARLARENARLPCLSSD

SEQ ID NO: 138792 - protein, 359 aa, unidentified
MRIIGCDLHARQQTLAMLDTETGEVVNRTLMHEGNEVREFYSQLPHPVLVGIEAIGPMQWFLDLLQELGIECQVGDATKIRAAEPRKQKHDRRDAELILKLLVEKRFPAIWMPSKELLDLRALLLHRHQWVRLRTQIQNALQAIALANGLRRGPGLWSYDGQAKIAFLPLPPHTSYRRSALQAEYRDMEEEIENLTAQVAEQAEHRSGAQLLLTHPGVGPVTALATDVFLGDPQRFADGKALASYVGLIPQERSSGRRRRLGKITKQGNPLLRFLWNEAGAHAARRDPELKRFYRRKLVQKGLGKARVAVARKLGIRLWIMLRDQIDYEEFCRRGQKQSGAACAGMLGTRLVHNHRPVD

SEQ ID NO: 138793 - protein, 348 aa, unidentified
MVIIGCDYHPGFQQIAFVDTETGELQERALQHREEAEKFYRERAAQGLKVCVGMEASGHARWFERLLAELTFELWIGDAAEIRTKRVRKQKTDRQDAQLILKLMLKDDFPQIWVPSWENRDLRQLLWHRHRMVQARTRLMNQLQAVALNEGLRCKKRLWREAGRQQLEAFRLAPWASRRRQDLLELLDRLNPTIAELTQAIEREVEKCPEARRLQTHPGVGPLTALAFVLIIGKAVRCGKQIASYLGLVPLEDSSGSRRRLGHITKQGNSLLRFLLVEAAQVTVRSDPGWRSKYHHLMMRRGRKIAKVAMARRLAVRMYCMMRKGWNYEQLKKFGSHAGQLVSGDGVK

SEQ ID NO: 138794 - protein, 343 aa, unidentified
MQTIKTIGLDIAKSVFQVHGVDGACQVVIRRQLKRRQVLAFFQKLPPCLVGIEACASAHHWSRELQALGHTVRLMPPAYVKPYVKRQKNDATDAEAICEAVTRANMRFVPTKTPEQQSGLVLHRTRLLFIRQRTSLINAIRAHLAEFGIVAPVGRHGVEELLTVVADPNDRRVPEIARACLSALGGQLRSIKRQILEFDRLIRAWHRSNEMSMRLEEAPGVGPVLATALVATIADPMAFRSGRNFSAWIGMVPKQHSSGGKDRLGNISKQGDRYLRGLFVAGALSVIRYAKIHGTKHRPWLTALLARRPTKVAAIALANKIARMVWAMMARGQRYKEPVALAR

SEQ ID NO: 138795 - protein, 372 aa, unidentified
MKQSTTTYVAMDTHKKTISVAIAEGGRRGETRFLGEIPSQPEAVAKLVDRLVKKHSKLAFCYEAGPCGYGLYRQITALGHECVVVAPSLIPTRPGDRVKTDRRDALTQASLFRSGELTPVWVPDDAHEAMRDLCRTRQAAVEALRRARQQVLGFLLRHGRVYSGGENWTRKHRLWLAAQRFDHPARQIAFEELAKATDEAQARRDRLAEQMQELLPCWSLAQIVAAIQALRGIAMISAITLVAEIGDFKRFANPRHLMAYLGLTPSEHSSGAKTARGAITKAGNTRARRMLVEGAWTYRLQARMGADILKRNEALPQAVKDIAWKAQARLCARYRRLSKAGKPTNVICVAIARELAAFVWAIATNDAIVAAA

SEQ ID NO: 138796 - protein, 336 aa, unidentified
MKQFIRIGVDLAKNYFQVHALANEGGPAVTRKLKRSKMHEFFAQIEPCLIGMEACGSAHYWARELETMGHEVLLMPPAYTKPYVKRGKNDAVDAEAICEAASRPGMRFVPIKSAEQQATLMLHKTRELLVKQQTMSVNALRSHLSEFGIVVAKGIGRVDELLELAESDTTLPEVARAAVKILAQHLEGLDKSIDDLEKQIGRAHAQSEMSRLLDQVPGVGKIIASVISASVPDPSVFKSGRDFAAWLGLTPRQNSSGGKQTKQGNRYIRKSLVLGATSLLHVVGKRKGALRDWIVALLAKKPARLVTVALANKLARIVWAMMKTGECFRAEMFAKA

SEQ ID NO: 138797 - protein, 391 aa, unidentified
MIFVGIDVAKDKHDCFILNSEGTVLADVFTIANNRIGFETLLSRIQSCSQGESKIKVGLEATGHYSYNLLGFLLDSGLTTYVINPLHTNLYRKSLSLRRTKTDRIDARTIAMMLMSDVDLKSYSNTAYHNEELKSLTRYRFDKVKERAKLKSSVARLVNILFPELEKLVSSLHIAVVYALLSNYPGASYIANANTEELAEILCTASKGRYTKSKTAKIQVAAGVSIGSKMPAKSMELKHTIALIRELDKEISEVESAIDKITSQMDSPIFTIPGIGRHMGAMILAEVGDFSNFASADKLLAYAGLSPSTYQSGQLQNCYAHMEKRGSRYLRYALFNAAKYVCLWCPTFSAYLEKKRSEGKHYNVAISHAAKKLVRLIFAMQRSGKAFLADY

SEQ ID NO: 138798 - protein, 343 aa, unidentified
MQAITTIGFDIAKSVFQVHGVDAAGQVIVRRQLKRRQVIAFFQKLPPCLVGIEACASSHYWSRELQALGHRVRLMPPAYVKPYVKRQKNDMADAEAICEAVTRANMRFVPTKTPEQQSGLVLHRTRHLFIRQQTSVINAIRAHLAEFGVIAPVGRKGVEELLRVVADPNDKRVPEVVRACVAALGSQLLSLKKQILDFDRMITAWHRSSQTSKRLNCIPGVGPLLATALVASVADPKTFRSGRNFSAWIGLVPKQHSSGGRDRLGSISKQGDRYLRSLFVAGALAVIRYAKIHGTKHRPWLTALLARRPTKLVAIALANKLARIAWAMMATGARYNYPISLRV

SEQ ID NO: 138799 - protein, 311 aa, unidentified
MYYIGIDVSKKDLSVFDGKDLKFINKEGLTSFKKYLKKKYNLSEIAIIFEPTGVYSLYLKEFCAKNSIKAYIVNPKKSHNFTRALGRRSKTDKIDARILYQFHKHIDLKDIKVPKIDQQAKSLASYLVSYEFALKQRVSLSHHLESLRDKGLIALMKKEQKRAKKLEDKIFNDIKEYLDNNQNLKEDYQRMLTIPGIGEKAAIALLTLFKTYQGTNRAQITALAGLDPIRRESGTSVKGKVRISKNGKGIYRKILFLPTICATVYNHKIQSFYQRLLANHKTKKLALIASMRKILLIAHAMYRDKTEYVAA

SEQ ID NO: 138800 - protein, 414 aa, unidentified
MPHYKEKHIYVGVDLHKHTHTAVIINCWNEKLGEIQFNNVPSAFPDFLKEVKSYVKRGIIPLFGLEDVGGYGRSLAVYLLEEKQRVKEVNTALSYAERKSYPTTKKNDSWDAECVAKILLNKLDMLPDANVQDVYWTIGQLISRRTGLIKSQTSLKNQLHVQLSHHYPSYKKFFSDIDGKCALVFWHTFPSPHLLENMTAEELAIVLRKASHNTCSTKKAEEILAQVKHDGDTTRDYQHYRDFWIQSFVRDLRFKQEELTNIYDELKTLLGQLEYKLGTMPGIDLVTAAYLIAEIGDINRFPNPDKLARLAGVAPALFSSAGKGKEQKSKQGNRILHGLFYNLAVQQVQVAKGNRKPRNPFFHEYYQRKIAEGKSKKQALVCVMRRLVNIIYGMMKKKTAFVLPDAKVIEKQVG

SEQ ID NO: 138801 - protein, 345 aa, unidentified
MPIVGGLDIHRKQLTFDYLDTVTGEVKRGQVAPADRAHLRSWLGRFAGCHDVAFAMEGCTGWRYVAEELAAAGIAAHVGEPADTAAARGRKRHPKTDKTDSRHLRTLLAEGRLPGCWVPPAHILECRALLETYHDLRTAHTAWVQRIHAVFFHQGAPALGEGALRTEQDLARLRAAAAAHLSAAGQLQVATALEMITAVEARMDVLRRQLRGDARQLTGAKVLAERLYGVGPLTALALTCWLGGAGRFSSSRKAVRFTGLDITVWSSDRKGPPGRLSRQGPPVLRWAVYEAGKTHARASAPDHGYYAQVKDRKNGKRAALSEARKIVRQACHILAELGDDALTAA

SEQ ID NO: 138802 - protein, 341 aa, unidentified
MNVTTIGIDLAKTVFSIHGTDQHGKVVVRKRLNRPKLLPYIAQLPPCLIGMEACSGAHHWAREMTKLGHDVRIIAPRFVAPYRKSSKNDDNDAEAICEAVGRPNMRFVPIKTEDQQAVLCLHRIRRGLTKERTAQINQIRGLLAEFGLIIPQGRYAARRRVPEILEDAENGLPMLARRLINNINQRIRQLDEEILAYDREVEAMARSDEQAKRLMAIPGIGPQTATALLASAPDPRQFKSGRHFAAWLGLVPRQYSTGGKVRLGRITKRGDKYLRTLLIHGTRAVIAKLPDKNDRLSDWAKDLVERRGYKRAAVAMAAKNARIIWALLMNQTEFKTQPVEG

SEQ ID NO: 138803 - protein, 411 aa, unidentified
MKLFVGLDVSSFDIKVCFLDSEGDKLNSFTVENDLPGATKLRDEILHAVQGKSVTELRIGLESTSVYSFHPSMFLHNDEFIQALGGQVFVMNPKQIANFKKSYSDMDKTDEIDAFVIADYMRFGRLPMSVVKEEQYVALQQLTRARYQIVQQITREKQRFLQYLAYKCNTFTEDVESSVFGKAMMNLFQESYSLDELAQMPLENLADYLRIKGRNRFPDAKQVAKSIQKAARSSYRLDKVVEDSIDAILATSITLIRTFEKQIKELDKAIERIMKGVPQTLQTIPGIGPVFTAGIIAEIGQIERFDNEEKIAKYAGLYWRKHQSGRFTADVTSLSRNGNQYLRYYLVEAANSVRRQIPEYRDYYAKKYQEVPKHQHKRALVLTARKFVRLVDALLRKNQIYTPKRSEIYEA

SEQ ID NO: 138804 - protein, 396 aa, unidentified
MNGPIISFDVSKGSSHMQGFLDHGKPAGKATVIRHDLKDFAKIDALRGKIREETGSNPVAVYEYTGVYSHTLERYLDSIGMRRYAISPLESAKVRKAMIRPTKNDSLDCRTIAEVYYLRTLREVRNDDEIHDSLRDMGRFYHYLLEVKIVEKGRYYRCLDDVWPCFDKVIEPNSPKSLAIISHYGHPSKIRSKEQVKNFLMKLPRHGRVSTDELAEKIAAYAKTHVSGASPDSYKVKEVKMMSARVKGIIDASERVMDSMISKAENLPEFALLKTIPGIADVTATRLIAEIGDINAYPKADSLIAYAGLDPAVMQSGQMTGEHMHITKKGNPHLRATLYVAVINMIMSKAENMITRYVLKKKNSGPSYKAAVIAGCSKLLRLIHAMLRNGTCYSDK

SEQ ID NO: 138805 - protein, 355 aa, unidentified
MYYSGIDLHKDMCFITTIDESGIMLKQSKVPNDEHAILNYFFSLGKEHRTVVESTSNWYWLSDLLQNHGIGFILAHAKYLKAISYAKVKTDKVDSETLAQLLRLNLIPAAHQISADKRGMRDMMRARLRLVHKKTSCLNSIHRLLEKFNLAIPNNRPLHEPATLELLNDLPFDSEYRLQLDLLKEQIVLLNRQIKALEKALHPLLIPNPDIQRLLHLPGVGKVLAFTIYLEIDGIERFPDVNRFYSYCRLVPGSDNSNRKLKHKSGSKDGNKYLKLAFTEAGFRAIQYYQEINQFYQRNARKKHNNIARILVAKELAKICFVVLKDKTDFNHTFKGAKLSRKKSQQWPRLASPAA

SEQ ID NO: 138806 - protein, 370 aa, unidentified
MAQGSTLFIGLDVHKESIAVAYGSEEREAEVVFLGTIGTRQCDIDKLSRKLQAKGKTLHFVYEAGPCGYWLYRYLTKKTLKCWVVAPSSIPKKAGDRVKTDRRDAVQRARLLRSGDLTPVYVPAVEDEAIRDLVRAREDALKDIKAAKARLKAFLLRQDIRYEGRANWGPAHLRWLAEVVCPTPAQQIVFQEYVRAVSEHTERLQRLEAELQTQVQTWRWVPVVEAIQALRGVQFTVAVTLIAELGDLNRFDTPRQLMSYLGLTPSEHTSGERRRQGAIPKTGNAHARRAFLEGAWAYRSPAKVSRHLHLRLEKLSKGIQAIRWKAQVRLCHRYRRLMARGKNANQVVVALARELAAFVWAIAREVEVAH

SEQ ID NO: 138807 - protein, 378 aa, unidentified
MKKLSKPRNPERRLALSNYIFVGCDSHDKTLVNRIAVNREEGQKKNFAANRSGRRKLIEHLKKGSELAGGAEVVVVYEASGNGFVLCDELKAAGLQCHVLAPTKIERSSKQKKNKNDDVDARRLLDIVRGHYLAGTTMPAVWIPDLQTRDDREPVRARQDLTQKQTVVKTQVQTLLKRQGIEKPEGSGNSWSKAWRRWLQALTTDTRQGWGVRTTLSSLIRQLEFLEQEIDKLDEAMQQLSDTPRWKPVVQAMMKQKGVGLMTALKYSTDIGDFSRFRRGRQVGAFYGLAPSSDESGDNPDRKGHITRQGSPSGRQVLCQSAWSRVRYDEQERKVYRRLVQKNPKKKKIALVACMRRLAVRLWHVGLEAQLEMQRNLQ

SEQ ID NO: 138808 - protein, 391 aa, unidentified
MALFVGIDVSKEKFDACGIRDDGTKVFSVTCPMNRAGFEKLMLHVPKEASPLLGMESTASYHIALFSYFTAQGYRAAIINPLLIANFAKLSLRKTKTDKKAASTIAEFLLLKKDALAMETEPPRLSELKDLSRRRERLADQVTALKNDMLRILSVTFPELESIMGVFTKSALRLLTQFPSAQAIREAGYDAITSVVLNHSRGRKSAASVQALVDAAATSVGVSSPSKDLILKQEAALLLHVQEQAEEITKVMACLADEKMRRDAELLTSVKGIGDKSALSFLIELGGDIKAFENDKRLIAAAGLDPSTHESGKYKGQSSISKRGNRHLRRAIWLMASKVIISNQVFRAYYFKRRKDGLVYKMAVLATAHKLIRVLFSMLVNERQFEPERRK

SEQ ID NO: 138809 - protein, 341 aa, unidentified
MKKFIRIGVDLAKNYFQVHALESEDGRAVKRKLKRSKMHEFFSRIEPCVIGMEACGSAHYWGRELKAMGHEVLLMPPAYTKPYVKRGKNDAVDADAICEAMSRPGMRFVPIKSPEQQAMLMLHKTRELLTKQRTMSVNALRGHLSEFGIVAAKGIGRVDELLDLADSDATLPVAAKAGVNVLAQALEGLDTAINALENEIANADAQNEMVRLLDKVPGVGKLIASVIAASVPDPSVFKSGRDFAAWLGLTPRQNSSGGKQTLGSITKQGNRYIRKMLVLGATSLLNVVGKRKGALHDWIVGLLAKKPARLVTVALANKLARILWAMMKTGECFRAEMFAKA

SEQ ID NO: 138810 - protein, 340 aa, unidentified
MKNISILSIDLAKNVFQLHGINRQGKAVFRKRLYRADLRAFIANLPPCLIAMEACIGAHAWARQFKALGHEVKLIAPQYVKPFVRVNKNDMRDAEAIALAASLPSTPSVSIKSEEQLDLQAIHRVRERLVREKTAIGNELRGLLADMGVVIPTGHGSLRVLIPELLEDADQPLTFKGRQLIADLREQWLEKEAHIARYDCMLQDYVKENVECQKLLEIPGVGPINASLLLSYLGDAKRFASARHFAASLGLVPKQASSGNRERLLGISKQGNGHVRKQLVHGARSAYRVLLKEDATGRLSEWAKRMQASGKHANKIIVALANKLARIVWSMMMKERGYIA

SEQ ID NO: 138811 - protein, 400 aa, unidentified
MKGPIVSIDVSNGNSHFQCFIQRGTKMGKVHRIQHTVEGFRFLKSKVEELAMKTKEEVVVVYEATGVYTTPLQRFLEKSEIKQYQISPLQSAKQRKTEIHNKKTDKKDPESIAEVYYAKELRKYEREADIYHQLRTANRVYEDCLEHLRKYKVTFQSHLSIVFPGYMKLFQDGYSPISLQLLEMYPHPDRLKNKQPETVAKKLNKHTDHSFEVCLKNAKRVIEFANKTYPGCDKEDPWVAVLVEDIHQLQAMIEQAEAKLDKIIKLAKTTPYYFIILSIDGIGPNLASRIIAEFGDISKFKTRGAMAAYVGNDPNRAESGDIDGYHLSISKKGNKRLRCILYLAVTCSIRSKKETPINAFYQKKRQQSTPLKSKAAKVACITKLIRTIHGMCKNGTEFTS

SEQ ID NO: 138812 - protein, 387 aa, unidentified
MTKNKGRVVGLDVHPDSFAGAVVEGTNPASARVLSSSSRVELKQLECWALRHTSAQDTLVLEASGNAFAVAARLRAIRRKVEILDSHRAGKVGKVYCANDRVDAVKIARIYLSALSPIVWQPDAKTLERREIFSAYQAVVKESTRAKQQLRSMLNEHCVRLEKGFRLCHPHAIKRLLAMRAWTPARTMLLQQLHGTLVAARRRRTLLRRHMAQEIVAEEALLRLTRLCGINLVTLYGVVAAVGDVRRFAHSKKLVAYIGLNPSVSQSGNFEGGGALKRHGRGALRALLIQSGKKLLEVNNPLQKWGLAVAARRGRNKAAVAVARKLCVALWHVLMGHAIGALERLDTLETKLSKFATEMGPAALAAFGYNNKADFVKRKLYVLRSYP

SEQ ID NO: 138813 - protein, 383 aa, unidentified
MSAPAQGAVHVDLAAIFVSLELSRSTWLITSLSPGSGERMSKHSVRGGDVAGLLDRLARLQEKAQARAGRTFPIIVIQEAGLDGFWVHRVLEREGIESHVVDAASVLTTRRRRRAKTDRIDGEALLRTLLAYKRGEPRVCSMVRAPSPGEEDRRRLCRERKTLVAERVRHVNRIKGLLFAQGISDYEPLRRNRRPRLEELTSGDGRALPAHLKAQIGRELDRLELLLEQLKAVEAERDALLECVGDAAPEPVAALARLRGIGPEFATVLWLECLFRPFGNRRQVAAYAGLAPTPWQSGSVRHEQGVSKSGNPNLRTTMVQLAWLWLRNQPTSALSLWFRSRVKRDDGRGKKKAIVALARKLLVALWKFVTSGVVIEGAVVRAA

SEQ ID NO: 138814 - protein, 322 aa, unidentified
MTATHATQSTSKVGPVLYLSMDLGENSWTLGFTVGMGQRPRLRTIRARDTATLLAEITKAKKRFNLPEEAPVRSCYEAGRDGFWLHRFLVHHGIANVVVDSSSIETNRRWRRAKSDPLDTTKLIEMLIRWYNGESRVWRVVNVPAVEDEARRQLNRELTTLKDERTEHSNRIKGLLASLGLGGITVNASLPQKLEELRQWDDAPLPAEYKVRILRELERWKLVDAQIRQLEIQQRRTIRDQADPQAEQMALLLMLKGVGVVGAWVAVREIFGWRQIKNRRQLGGLVGLTPTPYSSGESQREQGISKAPDRARLGLAAIPAAK

SEQ ID NO: 138815 - protein, 412 aa, unidentified
MDVVVERCAGLDVHKDTVVACVRTPGKGGSREQTTRTFRTMTVDLMALRDWLVALGVTLVGMESTGVYWKPVFYVLEDDMQCWLLNARHLRNVPGRKTDVQDAEWICQLLEHGLVRPSFVPPKPIRELRDLTRYRKAQIDERGREAQRLDKVLQDAGIKLSSVATDILGKSGRDMLTALISGTHDPQVLAELARGRLRAKIPLLRRALEGRFVSHHRLIVEKILAKLDFLDETIEDLSAEIDRLIAPFAAEVELLDTITGVDRRAAECIIAEIGVDMARFGDSARLASWAGRCPGHHESAGKHKSGRSRPGSKWLAATLAQCAEAAGRSKGTYLGAQFQRLRGRRGHAKARKAVEHSILVAAYHVLDQHVPYRDLGADWFQRRRPEAHARRLAQQIEALGFRVTIEPTDQAA

SEQ ID NO: 138816 - protein, 338 aa, unidentified
MEIAILGIDLGKSTFHLCGQDRAGHVLLRRKLSRSQLLPALVQLPPCLIVMEACAGAHYLARKLTEMGHQAKLIAAQYVKPFVKGNKNDFIDAEAICEAARRPTMRFVAIKTLDQQALAVLHRMRDGFVRDRTRCMNQVHGFLLEFGLVVPKGHAGMRQLAVLLDAKKEQLPQRFIHLLERLHAHYVDLSKQIAELERECSRLLAEDEAGKRLLTVPGIGPVTASLMVAQIGNATQYVNGRHMAAALGLVPRQHSTGGRPRLLGISKRGDKNLRRLLVQGARAVLIQREKHHDALNDWVQRVMARRHINVAVVALANKIARIAWAVLAKGTSYEPKLM

SEQ ID NO: 138817 - protein, 364 aa, unidentified
MTTIAQSGVERRVLGGVDTHKDVHVAAVIDDVGRILATASFPTTRHGYRRLLVWLGGFGEILAVGVEGCGSWGAGLARYLAARGVRVVEVNRPNRQNRRRRGKSDTVDAEAAARAVLAGDATVTPKAGTGPVEALRQLRVARAGAMKARTAAANQLHSLIDTAPDPVRAQLRALTFKKKVAVASSWRPRVTTTPDGASRYALTSVAHRWQDLAGEITQLDARIKTILTDIATPLLAVHGVGYDSAGQLLVTAGDNPDRLVYEASFAALCGSSPVEVSSGKTNRHRLNRGGDRHANSALWRIVIVRMTSHQPTKDYIARRTAEGLSKQEIIRCLKRYVARELFPHVQHTITTPQLEPAATTQRAA

SEQ ID NO: 138818 - protein, 421 aa, unidentified
MRDIGLDVHRDFCEVAIWEDGELRSAGRIETTPERLELFAQSLGRSDRVALEVTGNAWEIARILEPHVAQVLVVSPSDTGIRQARAKTDRLDARALARLLAAGSLDGLWLPDEQTGALRRRLGRRAQLVRARTRAKNEVHGALVRRLIAKPRVADLFGQAGRQWLEGLELPEEERETVASALRQVDFLEAEIAEVEALIAHQALESEEARRLMTVPGVNVITAATFLAAIGDIRRFQSPRKLVGYLGLDPKVRQSGPGPATHGRISKQGSAPARYALVEASWSVVRQPGPMHAFYERIRSRRRHQVAIVATARKLAVLFWHLLTKAEDYAYAQPSLTRKKLRRLELLAGARRGEVRPGIWSANKAIRQAERELAEQAERAYQRTVADWQAKKGASATPGRASSRPLGGKQRGKASVPHPAL

SEQ ID NO: 138819 - protein, 368 aa, unidentified
MNTDKYVGLDVHKDTTVAAIAEGGREGECRIYGTISSDLHALEKLLRKLGAEGARLRVVYEAGPTGYVIARRLAQLKIDCIVVAPSRTPQPKGQRQKTDRRDALMLARLHRAGELAGIQVPDAVDESVRDLTRARADAVHDLTRAKQRLKSFLLRQGYRYTGKANWSEAHQRYLRELVLPLPALKAVLEEYLLTITQRMQQVDRLDDLIAAQVPQWRMYPAVQALMGLRGVQLNAAAVLVAELGDLYRFQHPRHLMAFLGLVPQEHTTGDSRKLGSITKTGNAHARWILAEIVQHAFLPPKVSSHLALRQQGLPTAYRELSWKMQTRLHQRGRHLLGRGVMKPKVTIALARELCGFVWALLRQVPTPR

SEQ ID NO: 138820 - protein, 381 aa, unidentified
MLSSASRIRGLLRRGVTSVGTLEVDQTTTPQREETPLQQEIVSRQEPRHYVGIDLHRRRSVIVRMDEEGQVLSIDQVLNDPVQLSAAVAKAGPGPEVALESTYGWYWAADLLQANGAHVHLVHPLGLHWDSRRVKNDIRDSTELAYRLRRGDLPESYIAPPEQRELRELVRYRAKLTALRTSVKAQVHAVMAKEGILPALDDMFGPGGQALLDKMPFEGAYAMRVDSLRKLLEIYSGELVVVEAELASRLSGHPGYYAIQAICGVGKIIAAIFVAEIGDVSRFPSARHLCSWAGLTPSHKESDTKVQRGHLTKQGNHLVRWAAVEAVAHYHGGEPITPTYTRVARRRGKMIGRIAAARKLLTLVYYGLRDGEIRCLAERAG

SEQ ID NO: 138821 - protein, 321 aa, unidentified
MVYIGIDIGKSSFVAAYPSVNGYCTKTFPNTTAGVRKFIVTLSVAEHHCVMEATGNYSFLLLYLLHQSGIAVSLVNPKQIKHFARMMMAVTKTDKKDACMIAMYGEKMNPPIYKMPSQAIILLKQKKTVVRQLRKQLVASKNLQESLVVLPYRDKACLRTLDKTIDFLTKQIEQLEVELADIASAEFDKQLKALTSIKGIGITLAMALILTTGGFTYFENAKQLSRFIGICPTYQQSGTSVNIKGHINRNGDEHLRALLYVASWSALRSNAACRECYRRLKANGKPSKVALIAVANKLVRQAFAIATTDSTYIDGFVSTKK

SEQ ID NO: 138822 - protein, 341 aa, unidentified
MKYYAIGIDLAKNVFQVCGVNKRLNPQFNKKIKRKDFITFMAVQEPTDVYMEACYSSHYWARKLTELGHNAELIPAQHVKPFVRGNKNDHNDAVAIIEASQRPFIKFVPAKTEHQQEISSLHRIRERLVRSKGAVSNQARGLLSEFGVVFDLGQEAFCKGMKAFVSDDSYSTRLRSLMADQFKEYNELLIRIKDIERELITFIEATPSGKILMSIPGIGVIIASAILAAIDKGQAFKNPREFAVWLGLTPRQYASGDSCKMGGITKRGNRYLRKQLIHGARTVVCHAKNKPDQLNIWACKLRENKSFNKTTVAMAHRLARLAWILLQREELYKPQFSIQSS

SEQ ID NO: 138823 - protein, 388 aa, unidentified
MDILYKSCAGIDVHQSNIVVCVLHGSLTSTRPKREEARFDTTTSGLKDCHDFLSQFEVEVVGMESTGIYWKPVWHALCQDFELILANPAHMKAIPGHKTDKKDAFWIAKLTRIGLLPKSFVPDETIQELRELTRLRKYVVEDRTREVNRIHKILQSAGIKLSTYIEDIMGTSGRNLMKLLCDEAEINATSVRQAVYTSLKKKVPDLLKALDGYFSEHHRFRLKQALRIYDHYQEEIQLLEERIDSYLTQFQEEMEILDSIPGIDRLTASVFIAEVGTDMSQFPTAGHLASWAGLCPGNNESAGKKRSTRIRPGNAYLKRCLCQSVYAARRQKSSPIAQRFCQLKSRRGPQKATIAIAHHILKLAYYLLSTHQTYQQARQKEKGRLEAS

SEQ ID NO: 138824 - protein, 381 aa, unidentified
MQVTELNSDGSQEKNHRVPLNEERLAPFLARFDRDTKVVFEATSNAYYLYDLLQPRAGEVLLANPLKLKAIASGKIKTDKIDSRTLARLLAADFIPEVWVPDKLTRDLRSLLHYRVRLNKIRTSLKNGVWAILTKNGLQFKKSDLFGKGGRSFLESLKHLPRLDQIILSSSLRLLDEVEKQIQALEGEIASLASKGPYKEQVEKLMGFSGIDFYMALLVLCEIGDISRFPHSKNLASYAGLVPSVHSSGETHRTGRITKQGRKYLRWAAIQIANGAARSEGTLKKFYLRIKKKRGHNVAIVALARKILTLIWKILTYQENYGEMKEESLRRKISRMRSLASPYVLEGDYPREPVEEIVREYILKDVREYTLKDGLAACIFS

SEQ ID NO: 138825 - protein, 353 aa, unidentified
MTSLTDLRDVVDVVIGVDTHVHTHSAAIVDAATGGVLDEITVEATPEGYAELVEFANNHATLRAWAIEGTGGHGAGLSRQLLEASEIVIELDRPKRAARRNGAKSDPLDAIRAAREAMARPRLGTPRTGGERQALSVLLAARRSAVNASTEAQQQVFSLVVAAPEPVRARFRGQKLAAMLNTAASLRVHSSWDVETTSTVVALRTLARRAHAMLKEARELQKAIVAIIRSWRPDLLEEFGVGPIVAATVLCAWSHPGRIHSEAAFAMLAGVAPIPANTGQVTTRYRLNRYGDRNLNNALHTVVQSRIQYQQATRDYVVRRTAEGKTSREIKRCLARYVARDLYRLLENRAATA

SEQ ID NO: 138826 - protein, 315 aa, unidentified
MTTSSGKFVGIDVAKDKLDIAVLGEKKASQVENDEVGIAKLIKRLQTLDPELIVVEATGGYQRAVVLGLYEAGLPVAVVNPSRVRQYARASGLFAKTDKLDAFNLAEFGKQMKPRKFEAKSEGERYVSALLVRRRQLEEMLKAEKSRLRTVPAAMRPSVERIIEVLKEEIKQLEKELDKFMKENEEWQAQEQILTSAKGVGRVTAATLLAELPELGKLDRKKIAALVGLAPMNSDSGKKRGYRKTKGGRMEVRNVLYMSTLVATRYNPLIQVQYQQLLKRGKVKKVALTACMRKFLTILNAMMRDKVPFRQTDIA

SEQ ID NO: 138827 - protein, 427 aa, unidentified
MAYRIAGIDVHKKKLAVVVADVEVEEEYQFERRWYGSNPEQLQRLAEWLVEQEVEEVVMESTAQYWQGVWGALERYWRPICQKREGAGAMSGKLHLAQALSNRGRRGRKRDFPDAERLVKRLVAQELVLSFVPDPEQRLWRTVTRRKLQMTRLHVRMQNQLESLLEEAHIKLSGFVTDLLGVSARRMLQALADGETDPAALAALADKRLRATPAQLCDALGACTELNPVYRRLIKMALAELQFLEQQIAQLEQEIAHLLRPHEDAVKRLAEVPGLGVDSAQQIIAEVGPTVATFPSDKQLCSWVAVCPGDNESGGVNYSHRSPKGNRQMRRILNQAANAAARTKGSIFEIVYRRQVTRMGHNQAIGVIAHRLCQLIWILLHRKVRYEERGPAVTERSKRKRTARMVRELLSLGYHVDPPTLQQNTSA

SEQ ID NO: 138828 - protein, 352 aa, unidentified
MPTDIIVGVDTHKHTHAAVAMTGLGARVAELTIKVGLAGYRELEAWARSLGGVRAFGVEGTGSYGAGLMRFLCAAGHTVYEVDRPDRRLRHQQGKTDHLDAEGAARAVLGGQATALPKAGTSRVEMIRHLKVARDTAVKARTQAMLTLKAIIVGAPAALREQLEAIIGKMALVRHLAALRPGPLTSTAASAKASLRAIVRRWLDLDAEIKSHDSGLEELIEQCAPTMVAAHGIKTGTAAEMLALVGDNPERIRSEAALAKLCGACPVPASSGTTSRHRLNRGGHRQANAALYRVVIVRMRAHQPTIDYVRRRTAEGKSKPEIIRCLKRFVAREIFGYLCRAPRAAGPEQTAA

SEQ ID NO: 138829 - protein, 355 aa, unidentified
MSQDKYIGMDVHAATISAAVKNADGKLLMECVLETKAATILEFIQGLRGTLALTFEEGTLATWLHDLLKPHVSRLVVCDPRKNALMREGNQNDRVDARNLAELLRTNQVKPVYHEEHGIRTLKELGRSYSTLTKDSTRVMNRIKSVYRSWAIPCAGTSVYSRRHRTEWLAKLVEPGVRIRAEHLYQQLDSLEPVRQAARRELLRESGKHAAVKLLRQIPAIGPIRSALLVAILQTPHRFRTKRQLWAYSGFAVQTYDSGEYRVVRGKLQRNRERITVRGLNRNHNHDLKNLLKGAAISAIQRPGPLQDFYAARVEKGMRPSLARLTLARKIAAITLIIWKKGASFDPKQLQRPTA

SEQ ID NO: 138830 - protein, 412 aa, unidentified
METVVERPAGLDVHKQQVTACVRMPGEGGGREQHVGEFATTVRGLLALHDWLEALDVGQVTMEATGVFWKPVWAILEDDFECVLVNARHVKQVPGRKTDVSDAAWLCQLAEAGLLRASFVPPKPIRRLRNLTRYRKTQIQERQREANRLHKALEDTGIKLDCVATDVLGVSGRAMLAALCEGTTDPEVLAELAKGRLRQKLPALREALVGRFDRHHAVWVGAILNHVDFLDEQIDALSDAIEEEIRPFAAFVELVCSHVGIQRRGAECILAEIGVDMTVFATDKHLVSWAGQCPGNDQSAGKRRSGKTRKGSKWLDWALEEAALAAIRVKDSYPAAQYQRLKPRRGHKKALGAVKHTILTNIWHMLTTGELYNDLGADYFRKRDPERITKRLIAQLESLGHKVTLEQLPQAA

SEQ ID NO: 138831 - protein, 401 aa, unidentified
MKNIAGVDVHKNLLEMAYRKAGNIQVETIPYTPDGIARIIRILKRLGIKSVFMELTGDYYYPLYYALKGAGIKVNVMNAYKIKRPEPNKTDEKDAIWLLKIGETRLFRASYIPERGILALRILIRERTWLTDKIADFKRKVTSLCWRLGIRIQNLASILRSKKRRQVLLNVLDGKSSEQKYNELAGVVRSILKQREVRAHIVILRSYLQAIDFLENEVARIDRELASLASKFKTEVEILMSVPGISFILAVGILAEIGDISRFPTPSNLASYAGLAPVIRESAGKMYLGRASKKSNKHLRRHMFMAAMAAIRSKSPKIKTFVERLSSRGKHFKVIAVAVARKLLTIIWHLLTRGIPWSKEDFSKTVKFPRRRSCKIPTKEAILMFERAGQEVMFRRYEESP

SEQ ID NO: 138832 - protein, 357 aa, unidentified
MTTQERQRTMFVGVDVHKNTHTAVGVSPFGEKLFEIKIGNYKKDFESLIEKVDQIKDALSPYYGLEDCHGYGERLSTYLYENGHQICAVPSVLVDRARSKATHPEKSDSLDALGVAKVMMNSIDSLPVYTISEDSKIAKQVKELSMDREYLVEERTRLKNHLHNLLHRIWNTEYQEKYKNPFSLKALSYWLKAKPKCDPFLLRAMRRKVKRLIDIHYEVLDLEKEMEILLEENYTIQTASGCGVTVAGMIVGEIGDINRFHSPGALAKYAGCSPRECSSGKTNRHRKTRSGNRRLNCAFHRMALSQISRSGNDKAKTYFRKKISEGKSKNQALVCLRRQMVNIVWMMLKHKTVYKND

SEQ ID NO: 138833 - protein, 354 aa, unidentified
MAEALKNSIAFVGIDIGKNSFHVVGLDECGAIVLRQKWSRGQVEARFANMPPCLIGMEACVGAHHLSRGLQKLGHDARLMPARYVRPYSKGQKNDFRDAEAIAEAVQRPTMKFVATKTADQLDLQAMHRVRERLASQRTGIINQIRAFLLERGVAVRQGLRFLRSELPGILARPSDILSPRMVRIIEDLAGDWHRLDERIEGLSSEIEAIARRDSSCERLMSVPGIGPIISSAMIAAIGAGDVFSKGRDFAAWLGLVPKQISTGDRTVLGKISKRGNRYLRVLFVQAAWVVLIRPKSWERHGLKSWIEAAKKRLHRNVLAIALANKLARIAWSVLAHGRSFEASKLAEVAAKSA

SEQ ID NO: 138834 - protein, 364 aa, unidentified
MKRKVYVGMDVHKETIQIAYLTGNSKEILKEQQIKHNEVQIKKFIKKLKTEWNEIYCCYEAGVTGYPLYRYLKSLGVNCILVAPGKIPRQNTDKIKTDKRDAIKLARLMRSGELESIHVPSEEDEAVRDYLRSRDSLRLDLGRNRQRLMKFLLRKDIKYSTTKYWTVSHYKWLNNLHFNNEILQETFNDYYSRVRVQEENLKAMDKKIQEIAESEPYREKVGILRCFRGVDYLTAMFLLCEVNDFKRFKTAGSFMSFLGLVPGEYSSGSKRKQTGITKTGSPRLRRILTEAAWQHRFPGTGSKIITARRSGQPALVVALAEKASLRLHKKFRNLQLRGKTPQVMITAVSRELSGFLWAAMNLVA

SEQ ID NO: 138835 - protein, 322 aa, unidentified
MVTLGIDISKRDFHAALLIGDQTRKKSFPNNAKGFEQLAAWLRNRKVDNVVACMEATGSYWYALAKFLFNGGHSVAVVNPRRIKSFAESELLRIKTDAVDAALIARFASTQQLQLWKPLAPEIEELQGLYRHLEFLKGSHTQHVTRAQTPDLPERVRQSAQTIISQLDIQIDELERAIRDHIDQHPGLKGKHDLLTSIPGIGDTSATAILSEMPAIEEFRNAQAVAAYAGLSPLIRQSGTSVRGKPRLCKTGNARLRKALYFPAIVGERYNPILQAFGRRLRAAGKVPMVVVGAVMRKLLVIAYGVLKSGKPFDPAFLGSRA

SEQ ID NO: 138836 - protein, 344 aa, unidentified
MQTVTTIGLDIAKSVFQVHGVDAEGNVLIRRQLKRRYVLAFFEKLPPCLVGIEACATSHHWSRELKARGHNVRLMPPAYVKPYVKRQKNDAADAEAICEAVTRANMRFVETKTPEQQSCLMLHRTRQLFIRQQTSVINAIRAHMAEFGIVAPVGRKGVEQLLDVVADARDRRVPEVVARACIAALGAQLRLLKAQILEFDRRILAWHRSNETSRRLDELPGVGPALATALVASVADAKAFRSGRNFSAWIGLVPKQHSSGGKDKLGSISKQGDRYLRSLFTAGALAVIRYAKIHDTQHRPWLTALLARRPTKVAAIALANKIARMAWAMMARGERYREPVALAA

SEQ ID NO: 138837 - protein, 339 aa, unidentified
MGLYAGIDLHSTNSYVGIIDEEDRRVFKKKLPNDPGLIVTALKDYQEELVGVVIESTFNWYWLVDLLMDEGYQVHLANPSAIKRYEGLKHSDDRHDAFWLAHMLRLEILPEGHIYPKEDRPVRDLLRKRGHLVKLRTSLILSLQGIIQRNCGFKMNVNKVKKIKEDNVTPVFSGQEDLELSGRVSKEAIDFLTGKIREIERAVLKKAILKESFKFLETICGVGKVLSLTIMLETGPIDRFSNVGNFVSYCRKVPTQWTSNEKRKGKGNKKNGNRYLAWAFSEASELARRYDNDARAYYNRKATKTNFMVAHTALAHKLARAAYYVMRDSVPFDPEKLFA

SEQ ID NO: 138838 - protein, 344 aa, unidentified
MQISILGIDIGKSSCSVVGVDDRGAVVVRRTMRRHTLIEFVEKLPACVIAMEACCGAHHLGRLFAARGHEIRLMSPEYVRPYVKAQKNDDRDAEGIAEAASRPTMRFVELKSQEQLDIQTLHRVRSRLVAERTTLINQLRAVLLERGVIFAAGRVKFESALDGLLAEADEILSPRIRSLVIELRDEWRMLDKKIEALNAEFVALARQNSAMRRLTSIPGIGVLNATALVAAIGDAGSFKHARDLGAWLGLVPRQFTTGGKARLLGITKRGNTYLRTLLVHGARAAMHTLSQSDTPVGQWLQTMLSRGVHRNVVIVALANKLARIAWAVLRKGQPYERAYGVAAI

SEQ ID NO: 138839 - protein, 351 aa, unidentified
MGLAGDADLVIGVDTHLDTHTAAICDARGREVSQLRVPATSAGYAELLSWVRSAAGGSRTIWAVEGTRHYGLGLARHLVSEGERVSEIDTSRHVGKRRAGKSDAIDAVRAARELLARPHQPQLRADGDREALRLLMIDRDHAVQSAKTARTALAAILVTAPARLREQLRGLPRERRARECAALTCPPGVDRQTQVLYQTLMRLGQRIADLAAAADDLEAQITQIAEEMAPGLVAAEPGLGALSAAQILLSWSHAGRIRSEAAFAMLSGTAPVPVSSGRTDRHRLNRLGDRQLNRALHIVAVTRMRCHPATIAYVQRRRAEGKTDKEIRRCLKRYLARHLYRILNNQISQTT

SEQ ID NO: 138840 - protein, 398 aa, unidentified
MTESSDYESVQVFIGVDVGKDTHHAVAINRSGKRLFDKALPNDENKLRSLISDLKQHGQILLVVDQPATIGALPVAVARSEGVLVGYLPGLAMRRIADLHAGEAKTDARDAAIIAEAARTLPHALRTLKLADEQIAELSMLCGFDDDLAAQTTQASNRIRGLLTQIHPALERVLGPRLDHPAVLDLLQRYPSPEKLASLGEKKLAAQLCKLAPRLGKRLAADIAQALAEQTVVVPGTNAAAVVLPRLALPLITLRKQRDEVALAVEQRVLAHPLYPVLTSMPRVGVRTAARLLTEVACRAFASVAHLAAYAGLAPVTRRSGSSIRGEHPSRRGNKALKRALFLSAFAALRDPLSRAYYTRKMSQGKRHNQALIALARRRCDVLFAMMRDGTFYTPQAS

SEQ ID NO: 138841 - protein, 342 aa, unidentified
MNHYAGIDVSLECSSVCVVDASGKIVREAKVASEREALIGWFRSSGIALERIGLEAGPLSQWLFAAMREAELTVELLETRHVRKAFEAMPVKSDRNDARGIAQLMRLGWFRPVHCKSLSAQETRSLLTARKLVQSKLRDVENSLRGILRGFGLKVGKTTEREFAARIKELVAGHPHLQMIADALLAVRETLRKEFTAFEKQTHRMVRSDMQARLLTSVPAVGPIVALTYASAIDNPGRFKSSKQVGAHFGLTPKKHQSGETDYTGRISKIGDGSVRTALYEAAHIMLTKPLKGCSQLRSWAMRIARRAGMSKAKVALARRLAVIMHRMLVDGTPFNAAAAAA

SEQ ID NO: 138842 - protein, 340 aa, unidentified
MLIIGCDFHSRFQQIAVLDTETGAVEERRLDHERGEAQEFYAGLTEPALVGMESMGYTQWFEELLAECGHELVVGDAAKIRAKEPRKQKHDRRDAAHLLNLLVKGDFPRLWLPSAAERDARVWLEHRHQLVQMRTRTLNGLQAVALNHGLCLRQKLWTKRGQAELQKLPLREGRARRRADLLALRAQLDGWIAELEQRIAQEVAHRPDAQRLLTHPGVGPLTALGTVLILGPVERFPDAKHITSDVGLIPQEESSGGRQRFGRLTKQGNGLLRFLLVEAAQIATRYDAGLGRAYRRLTFRKGRAWPWRASWPSGSTSCCGTRSITRNFVGEVRMPECSGK

SEQ ID NO: 138843 - protein, 337 aa, unidentified
MERQYVGIDLHRRTSTIYRMNAEGKMLGCVRIPSQPLELAEAMAEAGEAPEVVLESAYGWYWAADLLQELGANVHLAHPLGNNWGHRRVKNDERDAKDLAAMLRLGRLAEGWIAPPETRELRELVRYRFRLVGQRSSCKAQVHGVMAKNGILPALGEMWGPGGAAQLDSLELPRAYATRLDSLRDLITFLDNEIDIFDRFIHNELKDDPGYNAIQKVDGIGKVIGAVLVAEIGDVTRFPSPKHLCSWAGLTPKHRESDEKVRRGPITKQGSPLVRWAAIEAISKYRGGEKLRADYLRIAEHAGKFKARVAVARKLLTLVYYGLRDGDIRCLEPAQAA

SEQ ID NO: 138844 - protein, 353 aa, unidentified
MIHLPEEREVILGVDTHLDVHVAVLIDVVGRIVATTSVPTTALGYEQLIEWARGFGRLTRAGIEGTGTYGAALARRVHAHGVQVLEINRPDRSRRRLRGKSDPTDAENAARAVLAGEANAIPKAQSGVVEAMRAVSMARRSAVKAKTQAINQLRALLVTAPESIRATLWKVKPEQCVARCARLQSLGDTPLLKALTSTLRLLARRWMSLAKELHQLDAALEELTKRAGRRLLTRFGVGPQTAATLLVTAGDNPNRLRSEAALAALCGASPLEASSGKTTRHRLNRGGDRAAHNALWTISMVRMRSDPRTRAYVTRRTAEGLSTKEIQRCLKRYIVRELYPLILADLAESIRKT

SEQ ID NO: 138845 - protein, 377 aa, unidentified
MGDYSEAYVGFDTSKSRNSVAIADGGRRGEVRFLGEIENTPAATAKLVRKLATKYERLTFCYEAGPTGYGLHRQIRDLGFECVVVAPSLIPKRPGDKVKTNRRDALSLAKLLRADELTSVWVPDGRHEAMRDLTRARETAMLDLRTKRQHVSAFLLRLGRPYPESRKTWTKAHVSWIASQKLEHPQQRLVLEEMMLAIRQAQERLARLEQAIAAAVPEWSLAPVVTALMAMRGIDMISATTLLAEIGDLSRFRTPTELMAYLGLVPSEDSTGDTVKRGPITKAGNRRARRMLVECSWSYQHPPRVGQAKQAKVDAASPLVREIAWKAQCRLYRRYRTLIRNGKLRTVAIVAIARELAGFIWAVARAVTTAPVVATPA

SEQ ID NO: 138846 - protein, 348 aa, unidentified
MTMTIVEAARAVTGGVDTHLDVHVAAALDPLGALLGTERFETDPGGYKALLTWLESFGQVTKVGVEGTGSYGAGLARFLRRADVEVIEVDRPNRAERRRSGKSDPLDAVEAARAALGGRATSISKSKDGAVEAIRVLVVAKRSARQARVKAVVQMRHLVITAPDQLRCRLKGLSVAGLVAESARLRPSRSGDPVMAAHKASLCSLARRIQGLKDEIAELDERIERLLVRTAPELLSRFGVGPDTAAALLVSAGDNPERLHSEAAWAHLCGVAPIPASSGKSNRHRLDRGGDRHANSALWRIVMVRIAHDPETTAYFERKVKEGRSKRDVIRLLKRYVARELYRYLPRG

SEQ ID NO: 138847 - protein, 352 aa, unidentified
MQHFIGCDMHTRNQMVAWIDPETGEIRKRRLEHGGEEVGKFYGQFPAGTVVGIESTFPAYWFERLLEELGHELWVGDAARIRASEVRYQKTDARDAELILDLLRRERFPRIWVPSAAERDLRQLLVHRMKQVRARTQVKNQLQALAISQGVCRKRRLWSGKGRAVLEGLVLLPWAARRRQELLEALDRLDEQVRELDRAVEEAGRARPEVALLRTHPGVGMVVALAFDLTVGPVTRFLHSRQLVSYLGLNPSEDSTGGRQRLGSISKQGNTMMRWLLIEAAQTAARLDPQLRRTYQRLKSRRNSGVAKVAVARRLAIRLYWMLRTRHNYAQPVPMSGSPSSAVVPPTAGPTV

SEQ ID NO: 138848 - protein, 402 aa, unidentified
MASLNHHRGSLSDLIGAWRNVTSQFCPFGLRWLPNQPHLCMTSSSWPMPGIVVIGIDTHKDVHVAVALDWRGGRLGDLRISTTHSGYEELLEWSLLFTSGSLSQLTFGIEGTGSYGAGLSRYLQAVGAMVREVSRPDKTARHRLGKSDEIDADLAARALLSGSATNVPKSGEGVVEMLRMLKSARDSATEARVKAINQIKAILVTAPGSLRDQLRELSNPLLVRACSHLQSMEMASPLAAAIRSLRLLGRRCLLLTEEIEQLSLDMDALTLQAAPQLRELHGVGVDAASTLLIAAGDNPERIRSESAFAALCGVNPLPASSGKTNRHRLNRGGNRKANCALWRIVLVRLRWHEATKAYMQRRTLEGKGKREIIRCLKRYVAREIYKVLLMTLGTPEAKQAHC

SEQ ID NO: 138849 - protein, 436 aa, unidentified
MRGCRCSMIMGFTKPIEHFNLQRKKVITMNTLYVGIDVSSKSNVIYLMLPNGDKHSNFSVANSHEGSTQLVKRILSALTSHSLDTVLIGLEATSVYGDNLVYFLREDATLAPFNRKIHVLNPKQVKKFHDAYNDLPKNDYVDSFVIADCLRFGRINKEVYMGDYRYKALQNLTRARFFAVQNLVKEKQRFMNVLFKKYSTMTQEKVFSDAFSTTALAVYDEFESAEALANMDLHELTDFIIEKGKNRFPDPDAVAKAIQKAARSSYRLPKTVNDSVNQVLSISITSMKALESQIKEFDKAIKAQMELLPNVLISIPGIGPVYSAGIMAEIGDINRFNSQAALAKYAGLAWKQHQSGGFESEVTRLIPSGNRFLKYYLCEAAFSLVRCDKEYSDFYHLKYKEVNRCQHKRALALTARKFVRLVFRLLKDNRLYCPAK

SEQ ID NO: 138850 - protein, 343 aa, unidentified
MNATRIGLDLAKLVFQVHGVDRDERVVLKRQLKRSQVLPFFAKQPACKIGMEACAGAHYWARKSAQMGHEVKLIAPQFVKPYVKSQKNDANDAEAICGAVGRPNMRFVAIKTIAQQDMQAVHRIRSELVKSRTAKVNQIRGLLAEYGEIVPARIEQIRRAIPLLQEDAAIGLTPLFRRLLEGLRLDLVELDCRVGELDQEIAVAAKEDPVAQRLQTVAGIGPITATALVAAVGDGRQFKRGRDLAAWLGLIPGQHSSGGKDHLLGISKRGDSYLRTLLIHGERAVLRAVGNKNDPRSRWLAGVAARRHKNVAAAALANKNARIVWALLTRGGNYDSAHGMATA

SEQ ID NO: 138851 - protein, 341 aa, unidentified
MQVIRFGIDLAKSIFQVHGVDASGAVAAQRQLRRGQMLKYFSAQPPALIGMEACGSAHYWARELAKLGHEVKLMPPTYVKPYVRRGKNDARDAEACCEAVSRPSMRFVPIKTVEQQGQRALHRARDLLVRQRTQSGNAIRAMLYETGLIASKGRSGIAELIELVEAGGDAIAPSLRVALAPMVRSWRHLEAEIAAMDTALVAQARAHPDARRLMKIPGVGPVTAHAVVAAVGDARQFASARDFAAWVGLTRLNHDTGGKTRLTGHISKAGDRSLRRLLVLGASASLRHIRAKPGAGSPWIRGLIARRPVKVAVVAQAAKTARIIWAVLTKSEDYRAQPHQA

SEQ ID NO: 138852 - protein, 462 aa, unidentified
MKRSTSASKKTRKAKRVAIEATRSKVAGIDIGSREHWVCGPVGDDGEREVRVFGASTPQLQAMAAWLLELGVKSVAMESTYVYWIPVYELLAAAGLEVVLVNARTLRNVPGRKTDMNDCQWIQLLHSCGLLKGSFRPEDAVCRLRALQRQRGNLIESRSRFVQWMQKALDQMNVRVHHAVTDITGVTGMAIIRAIVAGERDPLRLASLRNRGCKQSERTIAQHLTGNWRDEHLFNLQTALHFYDEVEHAIADYDRRLLREVEALQPVERRHEPVPSHPNPKKQREIRKCGDEPLREALWRFANVDLTTIDGISAPSAQVILTEIGTDLQAFPTEKHFVSWLRLCPRAPISGGKPIKKRRNGMGASRVAAALRMGAVSVQRSKTALGAAFRRLARYKGLTVAVSAVARKIAQHVYRLLRYGQAYHDIGEQQYEARYKHRRLIALHHSARELGFALTPTAAAAP

SEQ ID NO: 138853 - protein, 345 aa, unidentified
MNKYNVIAIDLAKTIFQVCVMNKQGEIVLNRAMKRQELKEWLARQKLSLVAMESCGGASYWARLSVSVGHKVMMIPPRQVKPFRTGQKTDANDAVAIAVASQAPNIRPARYLSTEQQGVQSIERMRDMLDTQKLQLSNQIRGLLLEFGIVINKSVASFKRRLPEILEDAENELSFAMREALHQMWCIYRQLEKEFDVIDRQLKQLSLQDADCKRLMALEGVGPIGAVHLKLQLENKEHYKSGREASACVGVTPKQHSSGGKIIIGSISKSSCDRRLRSCLFLGARSVVSALKRRPARTEKERWLKALTERRGVNCAAIALANKTVRTAYALLKNGTDYKPVLLAV

SEQ ID NO: 138854 - protein, 412 aa, unidentified
MERIHERCAGLDVHKDTVVASLHVPGEAGERHREVRTFGTTTAELLTLADWLMAHRVTHAAIESTGVYWKPVFHVLESVCEVVLVNPAHVKALPGRKTDVQDCEWLAQLLEHGLVRGSFVPPTPIRELRDLTRYRKTLIQQRAAEANRVQKLLEDANIKLGSVASDVLGVSGRAMLWALIEGERDGARLAALAQGALRKKTAALAAALTGCFTAHHGFLLRQILSHIDELEQHVATCNLRIEEQLRPFEAELTRLQTIPGVGRRTAEVIVAEIGIDMGQFPTAAHLASWAGVCPGHDESAGKRRSGRTRKGNRWLRGTLIEASWGAMRSRDTYLAALFRRIMRRRGAKKAAVAVAHSTLVAVWHMLKHGVDYHELGPSHFDQIRTEQLIRHHLRRLGDLGLKVTVETSGAAA

SEQ ID NO: 138855 - protein, 378 aa, unidentified
MKYYTRFVGLDVHKDSILPAVAVLGRGDAQVFGRIPNEDQVIVRWLNRRLRAWGTLEDVLFCYEAGPCGYGLYRFLAGLNLDCQVVAPGLVPRRPLDRVKTDRRDARQLARLLRAGELTPIWVPDEAHEAFRTLVRGREATLEDRTRSRHQLSKFLLCRGLRPPAGVKSWTRRFQEWVDSLRLNQQADGLVLLELRHHVREGTDRLSRFDGYIKECVETSVWRPAIEALQCLRGVRLLTAATIVAELGEIARFTHPRQLMSYAGLVPGEHSSGKRVRRLSITKAGNAHLRRILGEAAWHYRHRPHVSVRLARRQRGQPREVVAISWRAQTRLNYRYRYLLGHRKEKNRVITALARELVGFIWEILQVVPSPTAELSAA

SEQ ID NO: 138856 - protein, 320 aa, unidentified
MNPVLGIDVSKAKLDVALRLTNGKVRSKVILNNSKGFADLAAWLAKFETTGLHACMEATGTYWEEIAQFLADEGFKVSVVNPSRIKAFGLSRQVRTKTDAVDARLIADFCSSQNPDPWTAPTPVIRELRALVSRREALIGMRTQEQNRLLVARPNVIKSIQSHIQLLDAMIAGIDSNIRDLMEQDPDLKGKRDLLDSIPGLGKATIPILLGFLAGPNLFRTSRQAAAFAGLDPRQHLSGTSVQRKTRFSKVGHAFLRKALYMPAMVTLSKTKWGTAFRDRLATSGKVPMVILGAMMRKLIHVAFGVLKSGQVFNENLHCA

SEQ ID NO: 138857 - protein, 339 aa, unidentified
MRLYAAFDLHSNNSYLGIIDESGKRVFKRKIPNDPAIIKETLEPFKSDIQGIVVESTYNWYFLVDLLREEGYHMHLANPSKIQQYSGMKYSDDKHDAFWLAEMLRLGILPEGYIYPREDRPIRDLLRKRSHLVRLRTSLIVSLQNIVSRNLGGTLRSNDIKVLSADRVTPLFENHEDLAQAGRISKETIDFLTSQIKLIEGTVEEKMQLRKPYDLLMSIPGVGKTLALTIMLETGSIERFKKVGNYASYCRKVSSVWLSNDKKKGKGNKKSGNKYLAWAFSEAAELARRFYPQVRSYYNRKMQQKNAMIAHAACAHKLARAAYHIMKDGVEFIPDKVFG

SEQ ID NO: 138858 - protein, 341 aa, unidentified
MENQEQIQPYLWILGIDVSKESMDACLIRQADGQLFENKFHNNLSGFRHLKAWCKQMQCECDQHTLCCMEHTGLYTRLLVHYLISREVQVWLESSLQIKRSQGLIRGKSDKIDAQRIARYAHLHQGKAHIMKIGVLTLEKLKDLQANRRRLMKALQTIRTSVEELKQFDASTAKVMDKVNREAIRGLEKSLDKVDEQILRYISEDESLKQKYDLMLSIKGVGKVLAAMLLVYTHGFDRLVDSRKLACYSGVAPFVYESGTSIKGKTGVSKFANGELKRILHMAAISSVQHNPELHDYYQRKVEEGKNKMSVINAVRNKLLHRIVAVVKRGTPYELQPKNSL

SEQ ID NO: 138859 - protein, 349 aa, unidentified
MAMTIVEGTRAITGGVDTHLEVHVAAALDPTGGLLGVREFCTSRAGERELLVWLAGFGPVERVGVEGTGSYGASLGRFLAAAGVAVVEVDRPNRQARHRAGKSDPVDAVEAARAAQGGRATGAAKSRDGNVEAIRALMVAKRSARSVRIKTLNQIRHLSFTAPEEIRARYKDITSRQGIATQVAALRPRPGGDPVLYATKVAMRTLGRRVLALDEEMAALDELLTELVTATAPQLLELCGIGIDTAAILLVAAGDNTQRLRNEAAWAHLCGVAPIEASSGKTVRHRLNRGGDRQANHALWRIVITRMSADARTKTYVTRRLAEGRTKPEIIRVLKRYVAREVFKQLPRA

SEQ ID NO: 138860 - protein, 331 aa, unidentified
MSEVSIIGLDIAKHVFQAHGVDARGGAVLRKKISRAKLLPFFASQPRCRVVLEACGGAHHWARELAKLGHDVQLIAPAYVRPFVKRQKNDAADAEAMRFVPVKSEGQQAAAMVFRGRDLLVRQRTQISNALRGHMAEYGWVAPKGLAHLDKLAALLADPTAVPEGVRSVCTVLLESLALLDRQIAALDKEIVRRAREDEIARRLMTIPGIGPITATAITALAPPPGTFAKGRDFAAWVGLTPRQHSTGGKQKLGAISKMGERTLRRLLIIGSSAVVLQASRRGAPRGSWLEQMLARKPRMLVTVALANKTARIVWALLVKNEDYRAPAVAA

SEQ ID NO: 138861 - protein, 350 aa, unidentified
MKKIVKQVAGIDVAQKELVVTLGRMYDDWTPELYSHKSFANTQKGFAALVLWVKKQSVEQAPVRFVMEATGVYHEGLAYFLDEKGYQASVILPNKISNYFRTLDVKTITDKTSSEAIARFGLERKLDSWKRPKPVFKKIRQLSREREQLVQIRTMVKNQLHAEQAEAEPNAGSMTRLKKQIVFLNKQEQQVKEEITVLSKQDAKVQESIKVITTLPGVGLLTATTVLAETNGFELIRNKRQLSSYAGYDVKEKQSGTSVKGKARISKKGNKYLRKAMHMPSLAAIRSDKHFKAIFDRLVSKHGIKMKAVVAVQRRLLEMIYILYKTNTPYDKDYLKKLESNRSRSLNRLA

SEQ ID NO: 138862 - protein, 436 aa, unidentified
MSFRLWCPRDRQVFPFCWCNSAEELQVSVANSGGSPRVLFAGVDWAKDDHAVCVVDEHGLVAERFTVAHQAAGLARLVKVLHRREVVAVGIERGDGPVVDALLAAGLPVFVIAPGQIKSLRGRYGSAGNKDDRFDAFVLADVMRTDRVRLTRLQVDTDDTVVLRKLCRARKDLVGHRVAAANQLRAHLDTAMPGVVGLFHALDAQISLAFLARFSTQDALERLTETRLQGWLHRQRYSGRTSAAVLLDRIRTAPRGPVGAPAAGLSAITKALLATVHVLAEQIAGLDKQITAAFAAHPDQEVFAGLPKAGTLRAARLLAEIGDARGRFPTASSLACLAGAAPSTRQSGRSRVVTFRWAADKNLRDAVCDFAGDSFHTNAWANDLYQRARARGHDHPHAVRVLARAWLNVIWKCWSTHTRYEPAKHRRLQQVLTQTG

SEQ ID NO: 138863 - protein, 411 aa, unidentified
MPKIVHKICCGVDVHKSFVVACIAATDEKLVTTYSKPKRFSTFTNDLRRLAKWLADNNCKDVCMESTGKYWIPVWNVLETTCKLVLSHPKYLKAIKGKKTDKRDAKWIADMFKHDLLNGSFIPPADIRQLRDLVRYHTKLTSYTTGEKNRAQNCLTVSNIKLDDVFSDVFGKAASAITTRLLESNEPFDVKPYLTKNLKASAEEIQSAVDGEMCAEQAEKLRIIRSHMSSLNLCKANLESEILSVAEKLLPQINLVSTVPGITAFSAVSIIGEIGADMSVFETSRHLCSWAGLTPQNDQSAGKKKTTRISRAGVYIKPLLVQCANAAIKAKKNPEIANRYNAIKKRRGHKKAIIAIARMLLTAIYNILKKNEPYNADLYHKSDNPPIKREVTVEQAIFILQRQGYLVSNST

SEQ ID NO: 138864 - protein, 429 aa, unidentified
MASYNHGVGSPVVFVAIDIAKARHEVLIEAPDGKRKRLAVANSKTDFDDLVAMLRRYQVPCHIAFEATGDYHRPLASVLGQQGFQLHLVSSIATNRTREALYNSWDKNDPKDAQVILHLLKTGGTQIYHDPLVSGYNDLQELANTYQQLSLRTVRLYHSILTHFLPLYFPEAEAYMGTSRAEWFIHLLLLTPCPAAVLHYSKASFVRAASRVRGRKVDKVRWLSDFYEMAKHSVGLPVPTSSEAIRMFRLVLGEYAALCERRYQLEEHVETKLGAHPDFRRLQTIPGVGPVLAMLILAEAGDLRRFSHYRKFLKYCGLDLCTDQSGKFRGTTRLSKRGNARLRYAFWMAGTGAVRARQNSFREKFDNYVRSDPKNADLKRKAYTAVAAKVARVAFGLLKTGTDYRRFPEVAIPSGRIPSHRAVEALSTS

SEQ ID NO: 138865 - protein, 360 aa, unidentified
MTMIGTRRPDSKVEVILGVDTHLDVHLGVAVDHLLGRRLGELSVPTTAKGYERLLCWAESFGPVRCAGIEGTSSYGAGIARHLKAQGVEVLEVERPKHRQRSSRRNVKSDASDAESAARAVLAGETSGVPKSGGGCVEMIRALRAARRSAMKSRTQAANQLQGLRVTAPEQLRHRLRGLSSKELVSVAARFRLADDPRDVAAATRFALRSVARRYEALSAEIAELDTQLDRLVRQVAPELVSLAGIGTDHAATLLIVAGDNPQRLRSEASFASLCGVSPVEASSGKVVRHRLNRGGNREANRALYMICLARMRRDRRTKEYVARRTAEGKSKREIIRCLKRYVAREVYGVLVPAAPPIRP

SEQ ID NO: 138866 - protein, 343 aa, unidentified
MDEYDGRQFVGIDLHRRRSVIVRQSESGEQLSAVRILNDPVALGLELERAGPDPEVVLEATYGWYWAVDVLQARGARVHLAHPLGVKGFCYRRVKNDVRDAGDLADLLRMGRLPEAWIAPPQTRELRELVRYRAKLVAIRSGLKAQIHAVLAKAGVLIAASDLFGVTGRQRLAKVPLGAAYAQRIGSLLELIDILDGHEARFAAMIAKRLAADRGYQAIQQLPGVGPVLAAVFVAEIGDVARFTDPPHLCSWAGLTPTHRESDTVVRRGHITKQGSKLVRWAAVEAIQRQPDTTKIAHDRKRIEARRGRNIAKIAAARKLLTLVYYGLRDGHIRALAHRQTAA

SEQ ID NO: 138867 - protein, 412 aa, unidentified
MLKIVYPVCCGMDVHKSFVVACVASTNDHGVTTYRSGRFSTFTGDLRRLAAWLHAHSCTDVCMESTGKYWIPIYNILESSCRITLAHPKYVKAIRGKKTDKKDAKWIADIFKHGLVCGSFIPPADIRQLRDLMRYRAKLTGFSTGEKNRAQNCLTVSNIKLDDVFSDVFGKTASAITQRLLENDAPFDVTPFLNKNLKASADRIQAAVDGHICAHQAGKLRVIRSHMENLAACKKSLEVLIFGLAEKYLPTLDLILTVPGIQVFAAIGILSEIGADMSVFQSSKHLCSWAGLTPQNNESAGKKKTTRISRAGAYIKPLLVQCALCAIRKKSNPEIRSRYLNLKKRRGHKKAIIAIARMLLTAIYNIIKRNEKYNPALYRKADTPPRNREVSVNEAIYILQRQGYLVTAPQSA

SEQ ID NO: 138868 - protein, 365 aa, unidentified
MAEVTRGEAARVGVDLSKRVYQVHAVDRAGRVVMAKPMAPERFFNWCAQLPAGCVVAMEACGGAHHVARRLRSLGLDARLIAGHFVTPYRMAGKSGKNDANDAAAICEAAGRPHMRFVPVKTAEQQGQLSVHRLREGYKAERTALINRIRGVLVEFGMSFPQSPEALRRVLAEVIEDGSNELTGIARLVLQRAHLHWIELELQMKWCEERIGTHVRSDERASKAAALQGIGPIGASALVASVGDFKQFASAKQFGAWLGLVPSQNSTGGKASLGRITKRGDDYLRTLLIQGAKSAVMTAHKRSDRISQWLVQLKERAGWQKAVVALANKNARILWAVLTRDGEFDANHLPERPAPHCALSQRPAT

SEQ ID NO: 138869 - protein, 411 aa, unidentified
MNPVVGLDISKGESQVQAFLDKKKPYRKSFKVEHTNEGLALLHEFLKHIKETTGQNPAIILESTGHYHASVVQFLEDRNYLLIIVNPLVSHRAKSSSLRKVKTDAVDAYHLCELYYKEDLEPYKKRGVQLLNLRNLTRQHENITGNFINTKLQFQAVLEQVFPEYRGVFGELYSYVSLRILKEFKASEDILKTSEDKLANRIADLCKSRSEKWAYEKAQKLKEAASRNPFKKTLYQSHLLSMDMYIDMLLQFKEHLSKLEAEIDTLAKEIEEYNIIKSIPGIGEKIAATIISEIGEIDRFNHPKKLVAFAGVDPSVFESGRFTASMNRITKRGSSRLRHALFLAVRCAIRDKRKKKTRNEILPRNKRMREFYDKKRSEGKPFRVAVIACVNKLLHWIYALLKNKTTFQDID

SEQ ID NO: 138870 - protein, 429 aa, unidentified
MDVVHPRVAGIDVHKKVVWVAVRLPGERPGERIVTVKRFRTFWRALRQMAAWLSGLGVTDAAMESTGVYWWPVWHALAGAGIEVCVCNAAHMRNVPGRKTDLADCQWIAELHEHGLLRPSFIPDAQVAVLRQRTRYRKKLIEQRTSEGQRLAKVLEDAGIKIDSVASDLLGVSGRAMIEALTGGERDPARLAGLARGVLRRKAGELAMACDGRFTAAHGQMCRLHLDAYDHLTGKITELDALVAEAAAPFAALIARLVTIPGIGQRTAEVIIAETGGDMARFATSARLAAWAGLAPGDNESAGRRKKAPARKGDRHLRTAMVEAAWATRRTATRPGARFRRLARRFGKGNEKKAAVAVAHTLLSIAWAVMRYDADYADAGTDYYERRDQRNREHLIRYHQNALARLGIPVTATPPGNAPPPAGNPDQAA

SEQ ID NO: 138871 - protein, 355 aa, unidentified
MNSIQYVGLDVHQSTVSVAVLDDNGKLAMQCVLATEARAIVDFFRGLRGTLCVTLEEGTHAAWLYDLLVRRVAKLMICNPRKNALLKAGNKSDAIDARKLVELLRAGLLSPVYQGQRSTAAVKQLGRSYAALTEDTTRTMGRLKALYRSQAIACAGQKPYSLRHRAEYLSQLSEPGLQRRAQRLYQQLDLLQQLRREARRDLLLECRKHRESQLLRSIPWLGPIRVALLLARVQTPHRFRSKRQFWAYCGLALETRSSADYQMVNGQLQRRSKPAFIRGLNLNHNHDLKNLFKSAATTASSSGGPFGSFYKNLLLKGMKPELARLTLARKIAAITLHIWKKGEPFDAEYLKLHAA

SEQ ID NO: 138872 - protein, 338 aa, unidentified
MTLYCGIDLHANNSVVAVLDSDDTVHYEKRLANDLDMITSALLPYAGEVVGAVVESTYNWYWLVDGLEDAGFKVHLANPSAICQYEGLKYTNDATDARHLARLLRLGLLPEGHIYPREVRAVRDLLRRRMLMVRQRTTQLLSLQSTITRHTGQCLSGGKIKRLDDEAIEVLLGTGPVALSAKVARAAMHALDHAASELESAAAVEVKDDGSPKLLRTIPGTGQILSLTIALETGDIGRFPNAGHYASYARCVKSEKLSNGKQKGRGNRKNGNKYLAWAFIEAAHFAIRFEPKISAYYQRKRAKAHPMVALKAVAHKLARASYHMLKKRTPFVLNRAFG

SEQ ID NO: 138873 - protein, 347 aa, unidentified
MKHSVGLDVSVKETAICIVDEVGKVVREAKVVTEPEAIIALLNSAGLEYERIGLEAGPLSQWLVNGLAEAGLPVICVETRHMKAVLKAQQVNKSDRNDARGIAQMMRVGLYKPVHVKTLASQQERMLLTTRKLLRDKLQDMENELRGTLRNFGLKVGVVSPGRFEARIRELVAGHLRLEMIVTPLLAVRRVLREQLAKLHKMVLDQVRGDKLCRRLMTVPGVGPVVALTFRATVDQAQRFARSKTVGAHFGLAPRRFQSGEMDYDGRVSKCGDAMMRTALYEAAQVLLTRTQKWSWLKAWAIQVARRRGAKKAIVALARRLAVVMHRMWIDGTEFRWRKETNAAAAA

SEQ ID NO: 138874 - protein, 370 aa, unidentified
MAQPTPLFVGLDVHKDSIAVAHAQGQSSDPPVFVGAIGPRQADLDKLIRRLEAKTPDLVFAYEAGPSGYILHRYLTGKGFACQVVAPSLIPKKPGDKVKTDRRDAVELARLLRSGDLTRVYVPTIEDEAIRDLCRARDAARLTLKNAKLRLQAFLLRLGRHYVGRADWTDAHRRYLAKVVCPTAAQQIVFQESVRAVDEQVDRLHRLEAELRERGPAWRLHPVVQALQALRGVQWLVAITVVAELGDLTRFDSPRQLAAFVGLIPSEYSSGPARRQGGITKAGNSRARRALIEGAWAYRHPAKVSEHIQRRIDGLPKPIQDIGWKAQVRLCKRFRRLTARGKHPNVAVTAIARELIAFMWAIANEVAVTV

SEQ ID NO: 138875 - protein, 324 aa, unidentified
MSSYTSPVRIKNDEADRLDELLEPFRPLEVVVETSPAWPWLFDRLDGPEVHFVLAHAKRLRVIAESNYKSDDIDAELLARMRLAGLIPEVHPKTIEQREQAVLLRNRARLVRERTRMVNRIHAQLQNVGLHLERGRLLTEDGRRWVRSEAWPLLGDERRLFITMQWALIAQLAPMIKTLDRRIEHMGREIGAVALLETVPGIGPYRALLIATETLPIQRFRTPAHLVSYAGLAPRSSQSGLRPIRHGSIPAGANRWLRGTFVRAVVSHVTHAPDSWLSQSYEQIRQRLGWQVARVATARRLARAVHAMLRTGEVWRDDPVTRPN

SEQ ID NO: 138876 - protein, 402 aa, unidentified
MRFVGIDIAAEQHTVAVVDESGAILLRATAVAEDASGYRRLLELLGAAEDCLVAMEATGHYWRNLYAALVTAGFTVALLNPLRTRRFAEEELQRTKTDDIDALGIARFAAQKRPRATRLPEPGLLELRELVRLRQQILQQLGDRVRHLHRAVDLGFPEFTRYVRTLQSELATTILSHCPTAAALRKVSVKKLARLVYDGSHHVGEELARALSEAAKQSVGAHHGEPYQLQVRYACEDIDLLRRRLRSLESDIERRLMQHEVGKLLTTIAGIGPQTAACIMAETGDPSRFHSLAALASYVGVIPRLHESGKRKKTSSGPRVPLGNARLRRVLWMPALSAIHYNPWLRAYYLRLRAAGKLAKVALVAVIRKLLAAVYSVAKHRRPFILPAILPTVAGGAVSHAG

SEQ ID NO: 138877 - protein, 415 aa, unidentified
MRAHRNCCGLDVHKKIIAACLIREDAEGDSVREKRLFGTMTRDLHELAQWLCAAQVTAVAMEATGVYWMPVWNVLEPYGLQLLLINPEHYKAVRGKKTDMKDGTRIAELLQDGRLEGSYVPPVATRMLRDLTRYRTKLVQYQSSLANRIQRLLEQCNIKLAAVASDVLGVSAMAMLRALAQGETDAARMADMAKKQLRKKIPQLQLALEGCVLPHHRLLLSEMIEDLDHVGAKIARIEETIEQQMRPFQSAVNRWLTVPGIKHRLAWTLVAEVGPTVEAFPSAADLVSWAGVCPGNNQTAGKRKSGTTRAGNPWLRRALCEGAWAASKSKGTYLQSQFRRLAALRGPKRALIAVANSILTAGYYMLHRATTYQDLGPDYFDKRNTVRATHRLVKRLEALGHRVILEPRFTTDPSG

SEQ ID NO: 138878 - protein, 328 aa, unidentified
MIQLGIDVGKSKIDLCLRPDGPEGRKKTKILTNGPDVAVSVLEWLAKQKVAPADVQVVMESTGTYHEHLAYGLYERAVRVIIANPARVRAFAQGMGILTKNDTVDADVLARYGAMRQPDVWQPPSPAIRELKALISRRDALVHDVGREQSRLEKLLSTRCSLLVEASVRKILQVLNNELQVVQALIDNHIDNHPELKRDMEYLTSIKGIGSAVGSTMLVVLRGNHFISAEQAASWVGVVPKEKRSGSSVRGRTRLSKNGPPEVRAKLFMAAIVAVKHNPLLKQFYDRLLAAGKAKMSALGGVMRKLVHICYGVVMKQQKYDENYATAA

SEQ ID NO: 138879 - protein, 366 aa, unidentified
MKKTSTIRVNGNMIFKGHKLTIGLDLGDRWSFYCVLDEAGQIILEQKLPTTPEAMKQTFGKIQRSLIALETGTHSPWVSRLLRELGHEVLVAHAQKVQLISKSNRKDDRHDARTLARLARIDPELLGPVRHRSAKAQIHLTVIRARAELVSARTALVNAARGLAKSYGERLRQCGTQQVSRELAAEWSVELREVLEPLLQEVESLNERIKGYDARMEKIARESYPQVELLKQVKGVGTQIALTFVLTLEDPHRFPKSREVGCFLGLRPGRRDSGESQPQMHISKEGDPYLRTMLVQGAHDILGPFGQDSDLRRWGLKLTARGGKNAKKRAVIAVARKLAVLLHRLWVGGEVYEPLRNSHQAMGAVA

SEQ ID NO: 138880 - protein, 343 aa, unidentified
MDQFAGLDVSVKDTSVCIVDETGKIVREVKVASEPDALLTVLKNRTYHFKRIGLEAGPLSQWLYSALAEAELPVVCVETRHMQAVLKAQINKTDRNDARGIAQMMRVGLYRPVHVKTLRSQKLRMLLTHRKLMLSKAIAIENDLRGTLRNFGLKVGMVGTVKFEARIKELIENLPDLAVLVEPLLVVRRVLREQIGILHRRLLVIVRDDAVCRRLMTVPGVGPVVALTYRATVDVPARFRNSKAVGAVFGLTPSKYQSGEINRTGAISKCGDEMMRVMLYEAAQVMLTRTNKWSWLKAWAMKVARHRGMRKAIVALARRLAVILHRIWVDGTDFRWTREVAAA

SEQ ID NO: 138881 - protein, 365 aa, unidentified
MRSRGFELVVEIGGRQHLAAEEIGRNRGPRLSAELECVSEVAAAAVKEAMTVLGIDVGKDFIDCEILADDKRSTKKVANSIRGFEQVVSWLRNRKVTKVHACMEATGGFSDELAFFLHEHGHVVSIVNPMQIRAFGQSELSRTKTDKADAALIARFCLAMRPAPWEPPKPAERRLKQLVRRRRSLVEMRAQEENRLEAPGTENVRDSILAMIDVLGDQIQEIEDQIKATIESDDDLKGKRDLIESITGIGPITSSTILGETPHIENFESSKALAAFAGVCPQLRQSGRSVSSSHKTKIGNRAIRQVLYMAAISALRTNPVVRAFGNRLRERGKRPMQVIVAAMRKLLVLVFGVLKTRRPFDPNWA

SEQ ID NO: 138882 - protein, 346 aa, unidentified
MNSMPVGVDIAKNVVQVHYVDEETGEILNKAVKRAKFLDFFANRAPCLIGMEASGGAHHWARQLSDMGHHVKLMPGEFVKAFNIRNKNDTADAHAIWRAVQQPSKAVAVKTEGQQAMLALHRMRSQLMKFRLMQTNELRGLLAEYGEVMGTGRARLVTAMPGILARLSERLPTVLIESLREQLGEIDRIEKRIADTERRIRELSKGDPAVKAISDIPGVGLLTATAAVAAMGDAKAFRSGREFAAWVGLVPRQTGTGGKVLLHGISKRGDKYLRKLLVNGAHSVLLHSKEPSAWICELKKRRPKNVVSVALANKNCTSLRSTRAIWLLWPWMPLPSPAATVWRSAG

SEQ ID NO: 138883 - protein, 394 aa, unidentified
MKLVGIDVGKNSHHFCVMDKETGEFNVAPSSFSNNKEGFDFLINSLKPYSKKSILLGMEDTGHYHVALLKFLLSNGYTVALINPKTTDLTRKMEGGITKNDKLDTITICDVLDTPERKKQYRITKVDRFDLYEQRQLTRHHHNLKEELNVYCNRLQKSIDLVFPEFNTLFSSKYSIVYMNLLKTFGSAEAIASTDIRTIRKCFEVKGRGGRISLTPEKLKECAKNSIGISSEVETIQIKHLVNQITLIKEQIAEIDKKIEEFSIKNNSPILSIPGISHFSGTSILAELGDIGNYSKPSQIIKFAGVAPYHYESSQYNAQHTGITKKGSKYLRKTLYQIILTVINNNPVFKKYYLLKISQGKGHRCAQGHCIRKLLRIIYHLLETGQSFDPALLR

SEQ ID NO: 138884 - protein, 352 aa, unidentified
MTEITTVGVDLAKDVIVVCASNAAGAVVLRKQLSFSAFAAWAANIPGCVIGMEACSTAHHWVRVLSSLGHSPKLMAAEVVAPFRMSRGAKNDHNDAEAILVAVQQPTMRFVSPKSIEQQAMLSWHRARAGFLQERKSLLNRTRGLLAEFGIWVGRSAAVLIRRLPELADEPRLPDLFKPILLHTLDHLRQLDQRIDECDARIADHARHSEAAQRIQQLSGVGVLTASAVVATVSDAGDYRNGRQLAAWAGLVPRQNSSGGKSRLGKITKRGDSYVRGLLTQGARSTLQSALKRQAHQRSRLQQWIVALQGRVGYHKTLVAIANKHLRMIWAILAKGEDYDPNAWRRYKRSAA

SEQ ID NO: 138885 - protein, 341 aa, unidentified
MSDYSYFCGIDLAKNHFSLHAVDQNGKVILHKSVTHSKLLTTITNMPLMRIGVEACGGAHYWARTLNKLAHDARIMAVKYVVPYRTKGKNDLNDAVAICEAVQRPSTRFVPVKSPEQQAILSVHRMREHWVRERTALMNRMRALLSEFGLIIPVGRSSLMKQIPLMLEDAENELPHLARTVIADAYHHLGELNQRIADTEQVFDSFAKVSANVQRVMKVRGIGPQTATAILASIGNGSQFDKSRDFSAWLGLVPKQYSTGGKPRLGRITKHGDKYLRTLLVHGARTVIANLGDKQDKLSQWCRGVLERRGMNRAIVALAAKNARIIWSLLHNQTEYENYAA

SEQ ID NO: 138886 - protein, 383 aa, unidentified
MQPTLKQDCTLDAAVLAVSLELAKGSWKVALHDGRRAKPAVHTVAHEQAAGRLAEAVQLVEATKRKWQLGAATRVVVIYEAGQDGFWIERALAALGYEVKVVDPASLPVARRARRAKTDRLDAIGLVLSLLAWLRGERDRMQVVRVPAAAAEAQRHGVRERGALQKEIGQHRDRIRKLLRTVGCWEEVKSDFAQRLARGAVVCHDDSELPAQLRTRLERECERLALAVGQLKTLEAALMEALPEAVRERIGRLMQIKGVGQVGATRLVLELFWRDFANRRQVGACVGLVPQPYDSGESRVDQGISKQGNRRVRALLIEMAWLWLRYQPDSTLTQWFAYRTQGSGPSKRGKRIAIVAVARKLVIALWRYLEQGVIPEGAALKAA

SEQ ID NO: 138887 - protein, 364 aa, unidentified
MLDSSTLVRKIRPQEYEVFIGMDVDSRSIVMTQVDHLGIEKSVSMPHQGRFLLRYVGNHLRGQRIAFVYEAGPTGFGLHDTLSQAGYPCLVVTPAAVPTARGRRVRTNRLDARKLALQLRGGGLEGIRVPSEDYRLLREYVQLRKLHMTEAARCKQRIKALFLRHGLEFPEAPAGGYWSQELIRQLRDYPCAPALQFKLASLLTSLEFSRLQAATAQAAMRRFVAASPEIAESVGYAMSLPGVGWIVATYAVARIGDWRLLGDSKEMASFFGLTQREDSTGKGAQRGSITKAGDPVMRSLLIEGAWSAIRTDPELRGFYQRVKDNHAQDKAARIAIVAVARKLACRLHCVLKERREYQIRKTED

SEQ ID NO: 138888 - protein, 432 aa, unidentified
MTTSRLQVGIDFSQKKADLCLLFPDGRPLEQHRSFDNSLPGYSLSKALMIDALETYQFDGLDVSGEATGFLWLPFFNQLAADPDLEAYDLNLFLLNPRWVKWFKKCFPQDDKTDQRDSFYIADRTRTRRPEVAWSPQLDTLPLRFYTRLRFHLVKNLAREKCYFTAFLFLKASSYRRLKPFSDIFGVTSRQVLSQYTTLDDLASIPVEELASNLHEMSRHHLPDPFDNARKLHRVATESFPLPDALALPVHRILDLTLDHIRFLEDQIDQVEAWITSEVQLHPTILKLATIPGVGPVFSCGNGAEIGDTQRFLQGQKWDKKRKRYRPRNLRDAEDAVAKIAGLWWPRSNSGDFEAEDRRMAKTGNRYLRYYLIEAANLMRQQIPEYADFYRRKYREASKHHHKRALVLTARKSVGLVVGLLHRNETYRPKEV

SEQ ID NO: 138889 - protein, 366 aa, unidentified
MPNLASRDAVFVGLDVHRDSISAGILHPDDDTAVVERIFNDAESIRRLMGRFENPRLLRVCYEAGPTGYDLARLLASMGVACQVIAPSMIPKAPGDKVKTDTRDCRRLARLHRAGELVAVRVPTPVEEAVRDLCRTRGDMVEDLTRARHRLSKFLLRHSRVYRGGSAWTHKHEAWLGAQSFDEPALATTFSHYRATVLTRDAALTAVEADLVPWQDHPLFADAVHRLAAYRGVTRMGALTLQAEVCDWRRFGRAASLMGFVGLVPSEYSSGASTHRGHLTKAGNAHVRAQLVEAAWTYQHRPYVGPEIAKRHEGLAPEVVARAWAAQLRLSGRFRHLASRKNTKTVVAAAIARELAGFLWAEMTAA

SEQ ID NO: 138890 - protein, 338 aa, unidentified
MGSYVGIDLHRQRSVIVVLDDDGNRVSWSRIDNSAVNLAREITAAGVDAEVAMEACWGWYWAADVIAECGARLHLAHPLGIAGYANRRVKNDIRDATLLADLLRMGRLPEAWVAPPAVRELREEVRYRHKLSRLQTGLKCQVHQVLGKEGAIPATKGIWWSGGQRWLDELQLADAYTNRIGSLRDLIELNHREIVQSDTRIHLRLKGHPGYEAIQQIAGVGRVLAAVFVAEIRDVHRFPDARRLCSWTGLTPRLRESDTHTHRGRITKQGSRLLRWAAIEAVSRAARDRRVASVKARVGARRGHNIGRVAAARHLLTLVYYGLRDGHIRCLATTADTA

SEQ ID NO: 138891 - protein, 354 aa, unidentified
MKQQAIQYLALDVHQATVVATLRDDQGKVVMRATVATEAKAILTLVRSAGPRVHVAFEEGTQAQWLHDLLIDHAERVIVCNVRGRSETTNKSDRIDADGLSELLRLGGLKSVFHGAPEILTLKELVRNYNALVEDSTRVMQRIKAIFRARAIRTPGVSVYRVSQRKEWLAKLERGAQVRAATLLIQLDVLLELRPKAKAAMMATARRQPGWKILRSIPFFGPVRVAEILAIMRTPFRFRTKRNLWPYAGLAVVTRSSADAEFKNGELRRSKKAPRTRGLNRNHNPILKSVFKGAATAATATPGPLRDCYEASLARGVKDDMARVTLARKIAAVALRLWKKGELWDPVKLTMQAK

SEQ ID NO: 138892 - protein, 391 aa, unidentified
MKPPPRHVRRRSALLPLQPKGDRMIVVGIDPHKRTHTAVAVNQTTGEHRGELTVSARQPGHEELMRWARELEGERLFALEDCRHVSGPLERFLIGHGERVVRVAPKLMGQNRRSSRSYGKSDPIDALAVARAALREPELPEAHLAGPELEVKLLLDHRDDLVGEANRIVNRLRWHLHDVDPTLEVARGRLDRSAWMERLARRLAGLEQSPRVRICRAQLRRLRSLAREIRAAEQELLGLLRRHAPELLALPGCGVLTAAKVVAEIAGVERFRDDASLAMVAGVAPLDASSGRQRRHRLNRKGNRQLNLALHRIAVTQARVHPPARAYLERKRAEGKSRREALRCLKRHLARVVFKLLRAIAQGCQGVKKLSPSIERKIIEMPGVVSEPALT

SEQ ID NO: 138893 - protein, 339 aa, unidentified
MEPTIVGVDIAKRVFQLHWVDRETGEVFDRQLKRGAFLEHFANREPCLIGMEACGGSQHWARRLGELGHRVKLMPGKLVKAFVTGNKNDVADARAIWAATRQPGIKTVAVKTEAQQAVLALHRMRQQLVIFRRSQSNCLRGLLSEYGEVMALGRAAMTRAMPEVLARLESRLPAVLIDSLREQWQRLSNVDEAIARIERRLRAWLQESEACKAIADIPGVGFLTATAAVAAMGDAKAFKSGREFAAWLGLVPAQIGTGGKVRLLGISKRGDRYLRTLLIHGARSVMKHVKDSESWAAKLSRRRPLNIVIVALANKMARTIWALLAHRCSYRADYPVATA

SEQ ID NO: 138894 - protein, 355 aa, unidentified
MNQTSTEQANQVVGLDVGDRYCHLAVLDHTTGEILERSRLRTTQGALRSRFAGVTPMRLALEVGTHSPWISRLLSELGHEVIVANPRKLRLIYENRNKDDQIDAEYLARLARVDPKLLAPVQHGSAQAQADLAVLRARQMLVRTRTRLVLHCQGVAKSHGLRIPGGSTSTFARRLGEVLPDFLEPALGPLLEMLGQLNRQIWAYERQLECLAQERYPETQLLRQVRGVGPITALAFVLSLQDPKRFRRSREVGAYLGLVPARRESGQSRPQLRIRKEGNTMLRALLVQCAHYMMGPFGEDCDLRRFGERLQARGGPGAHHRAIVAMARKLAVLLHHLWTSGEVYDPLFQEHRRAA

SEQ ID NO: 138895 - protein, 405 aa, unidentified
MLISAHHSQAPSAVRVDLSAIFVSLELSQSKWLITSLSPGNGEKLSRFTIAGGDVAGMLARFDEVQRKTQSRTGQRFPLIVIQEAGLDGFWIHRVLKAERIESHVVDPASIAVSRRRRRVKTDRIDGEMLVRTLLAYKRGEPRVCAMVRAPTPEEEDRRRVARERKTLINERIRHVNRIKGLLFGQGIRSYEPLRRDRRKRLDALTTGDGRPLPAHLKAQISRELDRLELVMEQIQVCEQARDALLTATQPATAAEPANPVQAGEPGLTTPSVPAMLLALKGIGPETASVLWLEGLSRHFDNRRQVAAYAGLAPSHWQSGQIDHDQGVSKAGNPRLRTALIQLAWLWVRHQPDSALTLWFKARVAQNGGRLKKTTIVALARKLLVALWKYVNAGVVIEGAAVQPA

SEQ ID NO: 138896 - protein, 412 aa, unidentified
MEVQRNKVCGVDVHKRFLVATILSRDGMKQTQRFRMTPDELSKFRTWVVENGCEQVAVESTGIYWIPVLNAIEGYVDLILANAYKIKNTSRPKTDLTDSEWMAELCLNGMIKPSRIFPRDDRDLRSLTRARERYVNDTTREKNRIHKLLDSCNIRLSSVLSNMFGKVGRYVLEGLLEGKDIDEIIEGIPVKRLMKKADQIREAVKNGLDITKIQLIRGSMELIAALERRVDELEAEIRRRVVHKKENIRILMSVPGIGFISAVTILAEIGDFRDFEKPEKLAAWCGLVPSVYQSADKLITGKITKHGSRHLRWILVEVAQTVARCGSPKLKRFFLRIMERKGFKVAIVALARKILCILHHLLMNQETYEDEATKKEAMIKLAAPETPMSIEEMIEYMIKAGYEVKKKSGVGG

SEQ ID NO: 138897 - protein, 391 aa, unidentified
MSMYFIGIDISKYKHDCCIISAADQKVVSKVTIKNNKAGFDELLTIINSLSNPEDIRIGFESTAHYALNLELFLESSLLTFMEVNPVLISVYKKSKTLRRTKTDSVDCESIARWLMTVEYKPHSKGFYHAYSLKSLTRLRDKLIRQRSFYLVKITNVLDHTFPEFKPFFNERFSKTALYLLENYGSAEKMARMNSASYEKLRSLSRGKFSPQQFLKLKALAANTVGVNNSIFDVELNSLLSLYKSLAKEIDTIEKEINKLIEEVHPHYMSIPGIGSLSAAVIYSEYGDISNFSNPGQMLAFAGIEPGVNDSGTESHGGRMVKRGSSQLRYTLINCCLPLIRFDMTFATYYSKKRGEGKPHRVAITHVAKKLIRVIYALERLDIDFNTQKLH

SEQ ID NO: 138898 - protein, 421 aa, unidentified
MALCPHHWKIGETICNDPQVCRIVDLPVYYELKTNNGNRDYRIQIGGHYMNYNTVYVGMDVHKESFTLCSCKYEDEKASHYQRTPASYKNVLRYLAFLRTIYGEDTRFVCGYEAGCLGYSLYHQLENFNVECVILAPTTMLEQRSKRRIKTDKRDAEIIARSLAQHNYSPVHIPTETDNQTKEFIRMRDDHKAELKKIKQQILSFCLRQGYQYDGSGNWTAKHVKWLRSLKPAGLYKEILDEYLLTYTILTDKLNRLDQRIEELASKEEYKESVSKLTCFLGIKTHTALSVIVEVGDFQRFVSARKFAGYLGLVPGQHSSGDDRNGLGITKAGNTHVRRLLVESAQSYTRGKIGYKSRVLRSRQAGNSPQVINYADRANERLRRRYYKMVLKDGKKYNIAKTAIARELACFIWGMMTDNIY

SEQ ID NO: 138899 - protein, 349 aa, unidentified
MTNYATETMTCGLDLGDKLSYVCLLDGSGEVVEETRLRTTQESMGTFFARHAPMRVVLEVSSHSRWVQKLVTKAGHEAIVANARRVQLISQNERKTDRVDAELLARLGRADPTLLKPIQHRTDDAQKDIVLLRARAALMRARTLLINCVRGVVKTVGARIKSCASDAFGKRTEEIPESLRPALAPMMDQIRKLTAEIRSYDKQIKGLAEGAADIAPLLTTTGVGALTAVAFVRTLEDPTRFRNGRAAAAYIGLVPRRSQSGGLDPQLRITKCGDSYLRQLLVNCAQYILGPFGSDSELKRWGLKLAERGGKNAKKRAVIAVARKLAVILYRLWTTGQDYLPFPKGRPTV

SEQ ID NO: 138900 - protein, 418 aa, unidentified
MKVVYPICCGVDVHKTFLVATIITSQGIEPHYSKQRFSTFNSSIRQFKQWLIDNNCFDVCMESTGKYWVPVYNILEDTIHTTVANPKWVKAVKGNKDDKKDSKWIGDLFRLGLVPGSYIPYKPIRILREYTRYRSKLISCKSSEKNRFQNAFTVCNVALDAVVSDMFGKSASSITDYLISSDSFDPEYCSSLLQRSLKKKAATVVESIEGYQMTPEQKERIVIVRSHLEFVQQSITKLDEKLDKMVAPYESAISLLCTIPGVDRASAITIISEIGNDMTQFASSKRLCCWAGLTPGNNESAGKKKSVRITRAGVYLKPALVQVAHAAVKSNQSPYYKVKYERICKRRGKKRAIIAIARMILTAIYHMFITGEEFNPSDLYKINMPQEMLDKQKERAINQAIKLLISQGLIKASDISVA

SEQ ID NO: 138901 - protein, 482 aa, unidentified
MPTVHPHAAGIDLGNAAHFVCVPADSVPAGQTPVRQFGVFNPQLDEMVEWLKQCQVQTVAMESTGVMWIPVFQKLEAAGLEVLLVNTKRLKHVPGRKSDVLDCQWIQQLHSYGMLSGSFRPADIICRLRTLMRQRQNVIASASSETQHMQKAMQEMGVHLHVVVGDVTGDTGLRIIDAIRGGERDPKELVQLRDRRVRKSTVAQMEAALQGDWREELLFVLRQSRQAYGFFQEQLSALDERIIALLAEIPQAPPPASDGSQAPSASSPDPARPVPGGQNASACTAGSAAAGPKASKAVKGPKRNYRGGNPLPVDIRVQLAQVFGIDLTYVPGLSMLGVLIILSEIGTDLKKRWRDGDTFAAWLGLCPGSKISGGRVLSSRTPHVVNRVAVLLRLAAVAVGRTDTCLGIFYRRLKARHGAPKATTATARKLAVLIYHLVTTREEYQEPDLKQYDERVRKAKIIRLQRQARELGFDLVPREQAA

SEQ ID NO: 138902 - protein, 456 aa, unidentified
MSESISAPEPDFAAFIAIDWADREHTFALQMSDDNKRERGKFENKPNIIESWALQLAARFPGRRVAVGLEQSRGALFYALSKYDHLVLYPIHPSTSFGFRKAVHPSGSKSDPRDADILLDLLTLHRHRLRRFEPDDEPTRKLQLLVEKRRQMVDMRTAETNRITDQLKLYFPQILDWFEDLSAPIVSAFLRRWPTLAELQKETVEAVRAFFHEHGSRSARRIEQRIEEIQQAKAPLDDNAIIEPGTLLVRSLLDVVAVLREGIRHFDKAIAETTESHPDYVIFASFPGAGPTLAPRLLAAFGSRRDRFTSANQLQTFSGIAPVMEASGKQQWIHFRVSCPKFLRQSFHEFAALSTQQCQWAREFYDRQKEKGKSHHAAVRSLAFKWIRILFRCWQSRQTYNENLYEAARSARAIPLSRVPQAPTNAIPAALTASGKPQNAEMKKLGDLLKSLIATA

SEQ ID NO: 138903 - protein, 370 aa, unidentified
MAQSTPLFVGLDVHKDSIAVAHADGQGTDPPVFVGAVGSRQADIDKLIRRLQAKTRSLVFAYEAGPCGYRLHRYLTNQGLTCHVVAPSLIPRKPGDKIKTDRRDAVALARLLRSGDLTPVYVPTVEDEAVRDLCRARDAARLTLKNAKLRLTAFLLRLGRHYMGRADWNEAHRRYLAKVVCPTPTQQVVFQESVRAVDEQVDRLRRLEAELLERAPAWRLYPVVQALQALRGVQWLVAITVVAELGDLTRFDNPRQLAAYVGLIPSEYSSGTARRQGGITKAGNGRARRALIEAAWAYRYPAKVSEHIQRRIDSLPKAIQDIGWKAQVRLCKRFRRLTARGKHANVAVTAIARELVAFMWAIAKEVPVTA

SEQ ID NO: 138904 - protein, 315 aa, unidentified
MTSTQVFVGVDISKAQLDLALRPEGQFSVPNNEAGFAQVLEHLNAVHPTLVVLEATGGLELPLTGVLAAAGVPVVVVNPRQVRDFAKATGRLAKTDALDAQMLAHFAEVMRPEPRPLPDEQTQALAAILARRRPLVEMLPAEKNRLGTAGKPVRKSLRTHIAWLERELSHTDRGLAQTIRESPVWREKEALVRSTPGVGPVVTTTRLATLPELGTLTGKQIAALVGVAPLNRDSGTWRGKRTVWGGRAQIRAVLYMAALVAARCNPVIRACYQRLRAAGKAKKVVLTACMRKLLIVLNAMLKHRTPWRAELVQCA

SEQ ID NO: 138905 - protein, 459 aa, unidentified
MDVVITRCAGLDVHQATVVATIRVPTDQDGRRIVTETFGTMAADLLALRDWLQAYGVTHVALESTGVYWKPVYYMLEDTFTLLLINMHALKRVPGRKTDVKDSEWLAQLLECGLLQSSFVPPPPIRELRDLTRYRVQQVRDRSQEVNRLCKVLEDAGLKMTTVITDVMGVSGRAMLAALVAGTTDAVVLADLARGMLRKKLPELQRALQGRFRAHHAFLLQQVLAKIDFLDEALGRLTAEIDRRLVPFEPVLAALDTIPGVNRTSAISIVAETGADMHRFPTAGHLCSWAAMCPGHNESAGKRHSGKTRKGNRYLRAALIQTGLSATRKNGSALQARYHRVKRQRGHKKAVVAVGRQILEIAFHIMRDGVTYEELGADYFDRRHGERATRRHVRHLEALGFRVTIEKAAPNTPPADSRHIFCAAVWTKPLACAADAAHQLCGLNRGDLGRWRGQPRSDV

SEQ ID NO: 138906 - protein, 373 aa, unidentified
MSKVIMIGCDLHEESMVLKVAEDRQPPQTRLVKNTSSGRAGMIADLRRRAKAAAGARVVFAYEASGQGFGLYDQLTAAGIECYVLAPTKIARSPRRQREKTDEKDALDLLEVLRAHLLAGNRLPTVWIPDAQTRDDRELVRMRLDVGEKITALKTQVQSLLKRCQLRRLPGLGKGWTKAFRGWLQRELADPLTTRESPLGRGGQAALFSLLRQLQSLEEEEKRLNQEVAALAWSPRYEARMRELTGLCGVGVLTAIVFLTELGDLSRFVNRRQIAAYLGLAPSSHESGEQNDRKGHITHQGSARVRKVLCQASWCRVRRNEEEKAVYERIKAKNPQKKKIAVVAGMRRLAVRMWHRGCDVTVPDEVLSPAASG

SEQ ID NO: 138907 - protein, 424 aa, unidentified
MDSKDQNSWEQHRYYMGLDWAKQEHAIAVVDGDGRIMTETTIEHTAEGWHRLREKLVDLAGPDLSLVAATIETNRGPVVERLLELGCAVYPINPNAAKCYRSRKAPSGSKTDRLDALSFADALRTDGHGWRPLNPEDPKTQELRLLCRDEMSLIEQRTTLVNQLQQALHEYYPAALEAFDDWTSLSSWAFLERFPTPQALKKAGKRHWEKFLHTHRLYRPETYQKRLEIFAGATEFCGSQAVTNAKSMLAVSLAKQLRLLEQQLKAYREHIDKLFQEHPDYTIFDSLPGVGEKLGPRLLSECGEDRDRFEDHEALQCYAGTAPVSFQSGQINRVRFRYACNKNLRTAVHMWANLSRKKCAWAQVYYHQKRLEGKSHACALRCLGQRWLKILWKMWQTKTPYDEQMHTRNQIKHGSWVLALTASK

SEQ ID NO: 138908 - protein, 433 aa, unidentified
MKVMYERVAGIDVHKDMIKVAIRSPGEKPWTRKTEIFEFRTFYGVLQEVARELRRRGVTHVVMEASGVYTEPVYYALCEQDFTEVAVINPAHAKALKGHKTDAKDCARLAELFECGLLRGSYIPAPELKEVRDLTRYRTKTVQARTSEIQRLGKALESAGIKLGSVASSITGTSSTAMIEALIDGERRSAVLADLAIGRMRTAGKLADLSMALAGRFTDHHALLCRLHLDRIKTFDDAVDGLEDQIAGKAAPWQREVDLLKTLPGFGDTVAQAWLAEIGPAPHLHFSSHEKLASWVTLCPGNNISARKRKHGRTGDAGTYIKPMLVQAAWNAIRVRGRLQARYNRLVRRFGGQKNPAAKKKAITAIAHTLLKIAYQVLKTGTPYQDLGTDFYTRRESPEQKHAYLERQLQKLHPGCTITITISPPEAALPPGA

SEQ ID NO: 138909 - protein, 396 aa, unidentified
MTTIGIDIGGRTHVVARCRDGTSRADREILRVNQSRAGFAALDAWLGRQTEPVTLVTMESSGHYWMPLASHLCRRDIPVAVVNPLAAKYFAKSRLARTKSDPADARSLAEMAMRDTPPARDPLTGVELRQAARFAMTLVAEQAKVCQRLIRLVELGFPELGELFDDPTCRTAREILRIAPTARAATRRRTSTLANANAGPGRRRLGTTKAERLQTAAVDSIAVPELDAEVAFEVGLLLDQYDLLERQIEEADRRVASLLDGETARRLQTIPGVGPSIAATLLAEIGDIARFTDFDQLLAYAGVHPAERSSGRKGANPETAWRMSKAGNSHLRAAAYRMALVGIQHNPVIAAHYARKRAAGKSKMNALGHCMRKALSIVWGVWRNGRDFDPNWGVEA

SEQ ID NO: 138910 - protein, 320 aa, unidentified
MSQNTSAIMNDKTTSVYAGLDIAKASLQLHLQSKSYDLPNTSQGHVQLIKRLAAIPGGHVICEATGGYERAAVAALHAATIPVSVLNPARVRQFARASGELAKTDPIDATMLTAFGQAFTPEPTTARTASEIKMAALVTRRVQLLELRVAEAQRAHTCADRELRKLFTPWLAQMEKQITKIEALIEALLKTQAPLADQVRRLDDIMGVGRITAVMVLATMPELGQLNRRQAAALAGLCPYNRDSGQWAGKRCISGGRAEVRRALYMAALSASRSNHLLKPFYDRLMAAGKPAKVALTAVMRKLIVLMNHLLKNPNFSLAH

SEQ ID NO: 138911 - protein, 391 aa, unidentified
MAGVRNQTGEPDTMPSENTVHIAIELSFSSWLVAARLTGAKKSRLHRIEGGDTGALLALIAELRSRALTELGGAAEVACCFEAGRDGFWLHRLLTAHGILVYVLEPTSILVNRRSRRAKTDRLDAEGMLRVLAAWLGGDRQVCSMVRVPTPEEEDGKRPHRERERLVQEKLRIENRIEALLFTQGIRARPSLRSWERELTELRTGDGRTLPPLLRAELDRLRRRLVLILEMVRELEAERAAALAAAPDEAMAQKITSLQRVRGIGANFSAVLVREVLYRSFANRRQLASYVGVAPMPYQSGGMDRDRSISRAGNPRARTTLIQLAWLWLRYQPGSALATWFRERVGTLQGRTRRIAIVALARKLLIALWRYVEAGVLPAGVEIRTGTVPAA

SEQ ID NO: 138912 - protein, 426 aa, unidentified
MWDARRRVLKIKSLKHGIIQDKRGNVMRAVFGIDVSKTSSEVAILVNGEKVHGYTILNDAFGFNRLLGDLKTVHNPEIIFEATGVYSRRLQAFLEEYGYAYTRLNPLEAKKQLDSLRVRKTDKIDAEKLAKSQLVHNRKPTYVQEEVYQHLRDLSRFYQNLTEDLVRAKNRLHKVLQITFPELENLLSTPTGEQYWNLVMAFPCKEFVLSLSQSDLCEIIRQSTSKRISEKRIAYLTDKLIKLAKQSFCAVKKTSPMLEEVRYYAQELLRLSERRQVVLNDMVALAQPLPEYDILRSIPGIAETTATSIIGELGDIRRFQSTNQINAFIGIDLRHYESGNFLAKEHITKRGNPYARKILFKCIHNIASASHTNPCHIADFYEKRKRQSTIASTKPHTIASIHRLIRTMYYLITHNKLYDYSLTQNR

SEQ ID NO: 138913 - protein, 380 aa, unidentified
MKTNSDTTTKLYIGLDVHKEQTSVAVADPGPQGEVRSHGSIMTSQPSIEKLLRRLAKAKEISLSEIHVCYEAGGCGMWIARALRKLKVQCTVVAPSLIPTKAGDSVKTDKKDAIKLARLLRAGELTAVHVPDEADEAIRDLCRARVDAVDDLRRAKNRLSGLLRRLGHRYIGGATWSEAHMRYLRDLKMPYPSHSFILEEIIQQIGELKERISRIETQMELQCADWTRVDAIMALRGFRIIASMMVVSEIGDFVRFTHPKQLMSYLGLTPGEYSSGGKQKQGAITKCGNSHLRWLMVECATHYRLDPKVSTNLSKRQEGQPRWIKDISWKAQNRLNTRYKTLQQRLMHYNKIKVSIARELTGVIWEIGFKMQSIPTQEAK

SEQ ID NO: 138914 - protein, 357 aa, unidentified
MVERETEAKSSGSGVTNPYHRTEHCDKIHAYRCDKEIGVIGIDVSKDHLITSRGRVRRYENKKEGYEEILKMKPCTIVLEPTGVYAIKPSQYFKERGVRVLQVSPNVLSREKEFRGKKTDFYDAEKLENMVDKAKEYDYNPLKELVTLYLFLKDIETKYKNRLKRALFLVSDNDKVSKDRLEKLAKGDFTQEELYQLEYTPLVLEEIKILAKNLLETRERLKEVRRMIEGQVPQDHVLLTIPGVGRLAAGIIIGIVGDVKRFPKPESFVAYCGLDPVVERSGKAVVSRGISKRGNKYLRSLFYFLAMRSYSRNPTLLKFYETHKDRLKGKKLYVALARKLARVVWSVWYNNKPYEPK

SEQ ID NO: 138915 - protein, 410 aa, unidentified
MQTLVERGCGLDVHQATVVACLLIALKNGRVQKQVRTFGTKTRELMGLREWLLSESCTHVAMESTGVYWKPIYAILEGAFEIVVANAQHVKKVPGRKTDVKDAEWIADLLCHGLLRPSFVPPSPIRELRDLTRYRRKLVESRTAERNRLLKLLETANIKLASVATDVFGVSGLLMLHALVEGKATAQEMAELAKKQLRKKIPELELALEGKVEEHHRFLLRVQLRRLRTVEEDLGILEQRIQEKLKPYAAQFTLLQEIPGIDETLAAAIIAELGVDMGVFESVSQLSSWAGVCPGNNESAGKRRSSHIPKGNVYLKTALVEAANSAAKAKGTYLRDKFYRLKARRGYKRAAVAVGHKILVAIYHMLSHQVCYNELGDVYLDNLNKHHVTRNLVNRLERLGYAVTLQQKAA

SEQ ID NO: 138916 - protein, 373 aa, unidentified
MKKNITETPKMSRTKRLSRGQLTGSLTAGIDLGDRTSRYCVLNQAGDVVEARAVATTRKDLTRVFGALRHSRLALEVGTHSPWVSRHLQALGHEVIVANPRRTRLIAESDNKHDRVDAETLARLARADAKLLFPIRHRGEQAQADLAVIRVRAALVEARTRAINTARGLTKSFGERLRKCDAQSVDERLAEDLPPAVQTVVAPLLAQTRELNARIREHEETIQKIARERYPETALLTAVHGVGVLTALTFILTIDDRSRFACSRDVGAYLGMRPRRRQSSGSDPALGISKAGDRYLRKLLVQGAHVILGRHGADSDLRRFGRKLAERGGKGANKKARVAVARKLAVLLHHLWVTGEVYEPVHHTRTAPVAAAA

SEQ ID NO: 138917 - protein, 401 aa, unidentified
MVSDFRKGRYNLMKIFVGIDIAKLNHFAAAISSDGEILIEPFKFTNDADGFQLLVSKLESFDKNSIIIGLESTAHYGDNLVRYLVAEFYQVCVLTPIKTCQMRKNNVRKTKTDKVDTFVITKTLMMQDDLRFITFFDLDMMDLKALGRFRQKTIKQRTRLKIQLTTYVDQVFPEIQYFFKSGLHQNAVYALLKEAPSPKEIASMHMTHLANLLKVNSHGHFTKEQAKELRVLAQKSVGANDSAISIQITQTIQQIELLDSQLEKIEAEMTDIMKFNDSVIMTIPGIGYINGGMILGEIGDIHRFSNPNKLLAFAGLDPSVYQSGNFQAKTTRMSKRGSRVLRYALVNAAWNVVRNNATFKAYYDAKRSEGRSHYNALGHCAGKLVRVIWKMLTDEVEFNLE

SEQ ID NO: 138918 - protein, 345 aa, unidentified
MEIRTIGIDLGKTVFHFVAVNARGQVVVRKKGSRTQLLRFTSNLPECLIGMEACGGSHFLGRALREQGHDVRLMPAQYVKPYVKTNKNDYIDAEACSEAVTRPTMRFVPIKTDDQLDLQSLHRVRERWVVRRTAVINQIRGMLLERGITIRKGRHYIEESLPGILEDADNKLSGALRVLLTQLRSEMQYLHGQIEETNKLIARICGELEQCTRLVAIPGIGPITATATVAAIGNGAAFKKGRGFSAWLGVVPGEHSTGGKQKLTGTSRRGNKYLRKLFVQGAHTVLLQKTKQSSSLSTWLVNLTSRKRPQVATVALANKMARMAWAVLFKGEAYRPPTVPQVIAA

SEQ ID NO: 138919 - protein, 386 aa, unidentified
MIYVGIDISKYKHDCFICSNTGEVIVENLSFENNQKGFQQFSDLLKPYDNSNVHIGLEATGHYGLNLKLFLEKNNYSFMEFNPLLIKEFAKSLSLRRTKTDKVDATIICQKLMSVPYKPNSKLFYHKYGVKSLSRLREILVKQRSKYLVQMTNVLDILFPEFKSFFGNHFNSTSIFILNKYKTTNKIANMKDFNAINSNSKGRFSYAKFIKLKDLAKNTIGESNENFEFELQIILNLYNEVSSKIDSIDKQLSTIIKDLNSPTLSIPGIGVISCASIISEFGDISKFNNPGQMLSFAGLEPGISESGTMSFKGKMVKRGSGYLRHSLMNVAMVVISNNHTFYEYYHKKRLEGKCHRVALSHVCKKLIRIIYTLETKHIQFDPSLMK

SEQ ID NO: 138920 - protein, 356 aa, unidentified
MNEITTVGVDLAKEVIVVCAADAQGRTRYFKQLSFHGFAEWAVLLPPCTFGMKACSTAHHWSRFLRAHGHTPKLMAAEFVAPFRKSQGAKNDRNDAQAILVAVRQPDMRFVSVKSADQQAMLAWHRTRSGYQMERTALLNRTRGLLAEFGIWIGRSTAVLIRLLPQLREDTRLPEHFRPILSSTLEQLKCLADCIAECDDRIHSHVRNDEAAKRLCEITGVGELTASAVLSTVTDARDFKNGRQLSAWVGLVPRQTSSGGKQRLGVITKHGDSYLRGLLTQGARSTLQVALKREPLRRSQLEQWIVALHGRIGYHKTLVAIANKHLRILWAILAHGEAYDPNAWRRHTPQRAPTAN

SEQ ID NO: 138921 - protein, 339 aa, unidentified
MLYIGLDIHSRHISMCVLNEAGQIVKRTRVRMIHQMMQILEGLPDRFEVCYEASCGYGHYHDLFRPLAARVLVAHPGQLRLIFRSKDKNDRKDAERLAKLLYLGEVPTVHVPSIDVRTWRELINCRSQVIAKRTRAKNTIRSLLRSAGQTAPRHPGLWTKQGVAWFRQLPLPTVSQQLRRDLLLEEIETLNRQLRRIEQQLNHQANDSAAVLQLRSIPGVGIRTAEAVAAFVDNPHRFRHAKAVGRYFGLVPRQDQSGNKNQLGHITREGPPVVRRLVAEAAWQALRRSPTVRAYFERTQRGDPQRTKIALVATAHYLIRVMYALLKHGTLWQERVATE

SEQ ID NO: 138922 - protein, 397 aa, unidentified
MSALYIGIDVSKDFSTAQAIDGKGNKCFYLELAMTADGFNKLLKDITTHGKDIAQVTVAMESTGCYHINLFSFLTHKGIRCIIINPLLTANFARLSLRKTKTDKKDALTIAQFLLVHKDAFLKTDLSPDRQDLKDLAREHESLTNLIAGMKNDIRRMLQITFPELESVCNIFSETILDLLRQFPSARSIKIAKPNTIAKALLHEDKRKKISVSAEDIIRAAKASVASHGAAKEIILPEKISTLQHLIEKKVRMKKALVEACEGMMVEDIEIITSIGGISEITASRLLAEIGDYRAFSTYKHIIAFAGLDPSVHQSGKFEGISRISKRGNRHLRYIIYLMTTCVVRGDNIFRTYYQKRRAEGQPFKKAIMATAHKLIRVLFTMLSKRTTYQALEVNAI

SEQ ID NO: 138923 - protein, 408 aa, unidentified
MQITCGIDWSERHHDVALMDEAGTVVCRLKIGTGLAGFTELMTAIAEHSPEPIGVPVAIETDKNLLVAALQAAGMTVYAVNPRAVARYRDRHGQSGKKSDPGDAAILANILRTDRPVHRAMPSVTESALAVKSLARQHQEAIWALHQLNSRLRSVLLEFYPQALQAFPNLKHKAALTVLAAVPTPAAGLKLTSKKVVALLHRCGRRNDPKLAQQILTDLKTPTLRQPVAVENALGVTVTTLLRISVQMQAAVQELEAAMAKAFDAHPLAPVLSSAPGLGPVLAARILAEVGDDPARFTTAGGLRAFAGTAPVTRASGRSRGYVKARKVRNRRLGDACHWWAFSMLTKSPGARALYDHRRAVGDHHNAALRNLANKLVGRLWWCLTQNQPWDEAAAWPEHVAAPPAVAA

SEQ ID NO: 138924 - protein, 397 aa, unidentified
MSKVFVGVDVSKDFSTAQGVDKNGKKLFYLRFIMNSGGFSELLKAMMKCAGSVTEITAAMESTGCYHINLFSFLSSEGVACVVINPLLITNFARLSLRKTKTDKKDAQTIAQFLLANEKALSAIVFSQDTQDLKDLARERESLTVLISGMKNDIKRLLQGTFPELEKLCSPYGETMLHFLRQFPSARIVQAAKKRDVEKALICPTENRKRVEVSAENIIAAAKISVASSGAAKELILSEKISTLLYLQEKNERITDILIETCESLRIEELDIIRSIDGVNDITGSTFLAEIGDINNFTSYKHIIAFAGLDPSIHQSGQYEGRSTISKRGNRHLRRIIFIMTLCAVRSKNVFREYFLRRKQEGLPPKKAILATAHKLVRVIFAMLSNKTLFRKGVAVE

SEQ ID NO: 138925 - protein, 351 aa, unidentified
MLQKTNAVAVRTIGIDTGKNTLHLIGLDQQGTIVLREKLARGRIGRRLANASPCLIGIEAGMATHYVARELLALGHDVRQVPPAYAKPFRQGHKNDFRDAYAIAEAVLRPSTRCVPVKTDDQLDLQALHRVRSRLVGQRTAVINQIRSFLLERGIAVRQGPRFLRQQLPEILAKRTDVLSPRMIGIIEDLSGDWRRLDERIERVTEEIEQLAHGSESCRQLMTVPGIGPLIASAMVAAIANGAAFAKGRDFAAWLGLVPKQMSTGDRTILGHISKRGNRYLRTLFMQGARVILLRPANWARHSFGPWLTAAAKRLHHNVLATALANKLARIAWTVLAQRRNYETRVVTEAA

SEQ ID NO: 138926 - protein, 336 aa, unidentified
MNGSTGRWVGIDVSKGKLDVAVLDERDKIKSHVFANDSKGHAALITWLEQRGCGAQLAQVCLEATGCYSESIATALVDAGWQVSVVNPARVKGFAQSELMRNKTDRADAALLARFGQALHPEPWIAPPVEVRQLRALVDRLQSLKEMHQQEVNRLEGATNRSGTRESIESHLQWLQQSIQQLERQINDHIDVHPGLRDDAKLISSIPGVGKATAAKVIAYLGDVRRFKNAKALAAFIGVTPRLKLSGSSVRGRSMISRSGHAEMRRSLYMPALVALKHNPIIKTFGVRLRATGLAPKAVVAASMHKLVHLIYGILKSGTPFTANFMVASLDIQDGI

SEQ ID NO: 138927 - protein, 343 aa, unidentified
MQITTIGLDLAKSVFQVHGVDAAGQVVVRKSLRRSQMLPFFAKLPSCLVGMEACGTSHHWARELIKLGHEVRLMPPAYVKPYVKRGKTDAADAEAICEAVTRPTMRFVPVKSLEQQAALSIHRARDLLVKQRTQLINMIRGLLAEFGVDIPKGLERALLMARQIVDGKAPAVPIEAAKIVATLSRQALDTHVRLREIDRDLLVSLRGNDVARRLMTIPGIGPVGATALAASVTDPHQFRSGRQFAAWLGLTPLQKSSGGKERLGRITKMGDKYLRKLLVVGMTALVRRARQNPESDPRLADLLARKPTRVATVAMANKTARVIWAIMTRGEEYHAGHRPALAA

SEQ ID NO: 138928 - protein, 428 aa, unidentified
MDQVNHNRLEEFRQLRQEVRHSGEYLIVGIDIAKDRHYAFFGTATGKTLLRRLVFSNDHEGFRKLLDQAEALRVQHGLKKVVYGMEPTANYHKPLGEYLIGLGRTVVLVSGVTVKRNRETLDGRWDKHDIKDSANVADLISQGKCLYYEHPSAELRGLRGLLSLKRRLKKQEHGYKVRIRNHLIAQYFPEMDRDYAQLGAEGLSIVRWCFPASQIVQLDVDPFIERVTSRRIRVEKRRRLEVIWEKAGESIGCDGVPGVEHEAKVMVEGLRQIREMIKETEEKILGLCKQFPAYPYILTIPGFGPDVSAKVLGAIGDPDRFQNGKQVLKMGGLDLSADRSGKDSDKATPVISKRGKADLRYALYQAAFIASTKNRDFMRYYTTKLQGREKEKGIHTKMLVKLSAKMLLIAWTLMKKKEAFDPAYLITE

SEQ ID NO: 138929 - protein, 428 aa, unidentified
MKYNKQNEKIEMITEDFLIVAIDVGSTTHYARAFDYRGIEYSKKAFSFKNTDQGFKTFKSWACAIAVQNKKKIFLVGMEPTGHYWFNLGKFVQNSGMILAHVNPAAVKKSKELDDNDPSKNDRKDPKVIAGLLKDGRYSFPYMPEGVYAKIRDISYLRDDAQKSLIRIKNRLARWLSIYFPEYKEVYGQIDAKTGMLILEEYPLPKDIVTLGVEGVIKIWKSHKARGAGQRRAEKLVNAAKRSVGRTESDEIARIELKVLLKDLKEYQQRVQVYENLAFEALLEVPNAEKLLNICGVGVVSVMRFVAEVGDISRFNNAKEIQKLAGLSIKTNSSGKHEGVGKITYRGRKRLRYGMYELAISLVSRNKAFKSIHQYFTTRQNNPLKGMQSMVAISCKVIRIFFGILVNGYEFDENKMLQDIVRPEATIA

SEQ ID NO: 138930 - protein, 415 aa, unidentified
MEGMELLHSHAAGIDVHRKSLSVCVRHVGTDRRIRQEVRTFGTMTQELLTLRDWLEAEGVTHVAMEATGVLWKPVYNLLEDRVEVLLVNARHVKQVEGRKTDVKDCQWLAQLLSCGLLRPSFIPPKPQRELRDLTRMRSQLVGERTRVVNRIHKVLEDANIQLGAVASDILGMSGRQMIEALIAGEQDVETMAQMARRRMRAKLPQLRLALDGRVSEHHRFLLQMLLEQYDGIDKQVQRLAERIEKGCVPFAPAIEKIVEIPGYDQTSAQNVVAEIGSDMSRFASDDHLCSWATICPGNHRSAGKQTSGRSVHGNHWLKAALCQSGWAAARMKGSYFGAQFHRLAGRRGKRRAVLAVAHSQLRVIYHLLNSGQSYKDLGADYFQKLNTRRVVRYHRKVLESLGYKVIPPQADQAA

SEQ ID NO: 138931 - protein, 414 aa, unidentified
MLYLGIDQHRKQLTVSIRNEAGDAILRRQVSTEWDRVRAFFDELQRLAEPEGGFVAIVEVCGFNDWLLKMLYEYDCRETVLIQVEKRSKRKTDRRDAHQLSGLLWVNRLRLLAGQRIEGVRRVQPPTEQQAEDRQLTAFRQRLGQLRTRTINRIKHLLRKHNLQQDQPAKGLDTKRTRKWLTALPLAPFDRLEMNLLLAQWKVWDEQIETLETEIKKRQAASATAGVVATIPGCAAYGSLALAARIGSIERFPRPASLANYWGLTPGCRNSGEATDRLGSITKQGSAMARFILAQLVMHVLRRDPWMKAWYGRIKRRRGSKIARVAVMRRLATVIWHMVKNNEAYVVGGPPRRKLKGHSGFSEAWQGVQGAEKRPPAGSTRQRPDAPLAHLDLAIPCRVASPQSPTPLHQAYVL

SEQ ID NO: 138932 - protein, 404 aa, unidentified
MNCVGIDVSKGKSTVAVLRPFGEVVASPFDVIHNDNDLKRLVKLIRSLPGESKVVMEYTGTYFEPIAQFLHNNGIFVSVVNALLVHNYGGNSLRKVKTDKKDALKLASYALDRWTELDEYVPADEQRKILKLLNRQYNQSIKIQTTMKNNLISLTDSVFPGINRLFTSLERQSDGHEKWVDFLHAFPHKDCVAKLYLSAFKAKYKSWCSRNKYRYSESKAEKIHSYAKSVIAVLPLNESVKLIVTQVVSQLNTILETAFSIRTEMNRIASSLPEYDTVMSMFGVGKVYGPQLIAEIGDVSRFTHREALTAFAGVDPGVDESGQHKSKSNRASKVGSARLRKTLFQIMTTLLQNAPEADPVYRFLDKKRSQGKPYYVYMTAGANKFLRIYYGKVKECLRNLEQTE

SEQ ID NO: 138933 - protein, 339 aa, unidentified
MPLYAACDLHANNNFLAIIDEKGKRVFKGKLPNDAKRILAVLRPHRNDLVGIVVESTYNWYWLVDALMAEGYRVHLANPSAIQKYSGLKHADDQHDAFWLAELLRLGILPEGYIYPKEERPIRDLLRKRGHLVRLRTSLIISLQNIIIRNCGLGLKVNDVKRLKEDRISPLLEGNEDLALAGRVSKETIDFLTRQIRAIESVVERKVQLKEPYRYLLTMPGIGKILALTIMLETGPIQRFAQVGNYVSYCRKVSSQWSSNGKAKGKGNKKNGNKYLAWAFSEAAEIGRRFDAQARAYYDRKMQKSNFMIAHAALAHKLARAAYYILRDQVPFAPEKLFA

SEQ ID NO: 138934 - protein, 336 aa, unidentified
MDLHRRRSVLVRMTPDGRKLETERITNSPAELRRAIARAGTHPRVVLEATYGWYWAADTLAEAGAEVHLAHPLGVKGFAYRRVKNDVRDAADLADLLRMGRLPEAWVAPHEVREMRELTRYRVKLVRLRTSCKDQVHAILAKLGIPVTCTDIFGVWGSTWLDGLELPQPYAGKMASLRKICAVLTGEITVLEAVIAGLVKDHQGYQAVRTLPGIGPVLGAVIVAEIGDVTRFPRPAELCSWAGLTPRHRESDTKVSRGHITKQGSRNLRWALIEAIQHVPAGHPLRQRMDGIITRRGAQARSIAKVAMARQLLTWVFYAMRDGQVRSLATAARQAA

SEQ ID NO: 138935 - protein, 344 aa, unidentified
MMTHFVGLDVSQKMTAICVVDNAGRRLWRGQCPTAPEQIAAMVRRHAGDESCIGIETGAMTPWLVHELRALGLEVICLDARHARAALKMQINKTDQNDAEGLAQIVRTGWFRSVHVKSFDSHRARALLGARAQLVGMTTRLSNHIRGVLKTFGLLPGAMRGLRFDRKVEVLLEDRSDVAPIVRPMLVAWRQLREQISAFNKAIRVLVRSNSPCRLLMSVPGIGVLSALAYVSTVENPARFSQSRSVGAHLGLTPRQYQSGDVDRSGRISKCGDTLARTLLYEAAVVIMTRVKKASELKDWAVAIAKRSGVGKARVALARKLSVILHSVWRSGKPFRWAERAIAA

SEQ ID NO: 138936 - protein, 348 aa, unidentified
MTVYIGVDFHARQQTISYLTTETGEIRQLELLHEDPAKVRAFYEQFAGQRIIVGFESSGYAAWFEELLEELGCEIWIGHATYIRQFAKRRQKNDRRDADLILELLVSGDFPRIHRYSRSTRQMLQQLRYRQRLVKMRTMVVNMLLFTASSRGHSFRTQLQSKRGQARLGQLPLPEPLAQQRDELLSLLAQLDQKITTIERWLEQQTAEDVTVQRLRTHPGIVLLTSICVRYTLEDVGRFATTRKVSAFAGFDPMEDRSDERRRMGAISKQGSRWLRFYLVEAGQVAMRKDADLARVYQRISRRGGHAKAKVAVARRLLVRAFIMLRDEIDYAEFLRRGVAARSSRGSA

SEQ ID NO: 138937 - protein, 385 aa, unidentified
MSQFSGSPQAAIDYNSTIIGALELSEKKWVLAVQLPGVDRHSRHVLDGGGETLASFVERLKVRCVSAGRKIARVILTHEAGRDGFWLARFLARRGIEVHVMQPSSLPVDRRARRAKTDMIDVEMLLRTLMAWLRGEPRVCSMVPIPSEADEEARRAHREREDLTRERRSIVNKIDGILATLGVKGYKALRRDRREQLNYARQPGGDPIPQKARARIERLLDRLDLVLKLIDQVESARDAVLKKDAPADEAEEMIRSLTELRSIGPDVATLLVREAFVRQFRNRRALAGYVGLGGTPFSSGGSEREQGIGKDGNRRVRAAMVELAWMWLRWQPDSALSVWFRARVGTMGGRIRKIMIVALARKLLVALWRYVTDGVVPEGAKLKAA

SEQ ID NO: 138938 - protein, 343 aa, unidentified
MDYFAGLDISVKETSVCIVDDAGRLVREVKVASEPDALLQVLTTPGLAFKRIGLEAGPLSQWLFSALAEAGLPVICVETRHMRAVLKAQINKTDRNDARGMAQMMRVGLYRPVHVKTLRSQKLRMLLTHRKLLQSKAIAIDNDLRASLRNFGLKVGLVGMAKFEARIKELVEDLPDLAVLVEPLLIVRRVLREQIGILHRRLLAIVRNDEVCRRLLTVPGVGPVVALTYRATVDIPARFRNSKAVGAVFGLTPSKYQSGEVNRTGAISRCGDEMMRMMLYEAAQILLVRSTKWSWLKAWAMKIARHRGMKKAIVALARRLAVIMHRIWVDGTEFRWTREATAA

SEQ ID NO: 138939 - protein, 433 aa, unidentified
MRRVIGIDVHRTFGEVVFWENGRLRHAGRIDMTRTALEGFGKILLAGDEVVIEATGNSMAVSRVLTPFVARVIIANPLQVKAIAQAHVKTDKIDAGTLASLQAAGYLPQIWTPDPETERKRRLVTRRYQVVRRTRLKNEVHSILHAHLIPKCPHADLFNARGRAWVAAQQLPDDERAAIDQHVRELDRLAEDLALLDREIARDAIEDSAANRLMTITGVNLAVAAGIVAAIGDISRFSSPQKLVSYFELTPRVRQSGLGAAHHGRISKIGRSHARAMLVAAAWAAAKATGPLHAFFVRIRARRGHQIAAVAVARNLTVLCWHLLTKGEDYLWARPALVANKTRAMQLQAGHPQQKGNRRGPAYAYNMKALRDCEMLIAAQAEQSTNDSCRNGSRGTQKPARGRLSSAGQNRQSGDACSRRVTLRHEVARAQQP

SEQ ID NO: 138940 - protein, 343 aa, unidentified
MHIASVGIDLGKTTFLLVALDDHSKVVIRKKFSRKQLLAYTANLPSSLIGIEACSGAHFIGAALRRQGHDARLIPAQFVKPFVKSNKNDFLDAEAITEAVTRENMRFVPIKTDDQLDLQALHRVRDRLVQRRTAVINQIRGFLLERGITFGKGPAQLRNHMAEVLEDADSNLTPRMRTLLERLWVEWRQLESDLAVATADIEQICSEDAACQRLRQIPGVGPLVASATLAAIGNGAAFRKGREFAAWLGLVPRQHSTGGRTRLLGISKRGNIYLRRMFIHGARAVVFRIRYDTGGLGQWVQRLQQRAAPCKVIVAVANKLARIAWAVLFRGEPYRHAAVCGLA

SEQ ID NO: 138941 - protein, 372 aa, unidentified
MMYSSTIRPRIHPGDYDLFVGMDVDKRSIAITTRDHLDLGKSLMMPHDADLVLSYFHNRHAGKRVAFVYEAGPTGFGLHDAIVAEGHTCLVVAPQAVPTARGKRVRTNRLDSIKLAVQLRGGQLVGIHVPAGRYRELRELTALRNSQIDGIRATKCRIKALLLRNSLEFPKAPDSGQWSKRLTADLRGLNCTGAVRFKLDSLLDELAWQWGNVLKTQLALRTVLATDEEFWDSMRYLMSVSGVGWVVASHYLARVGDWRKLGRSDETSSFIGLVPSEDSTGDRADRGRITKGGDKKLRSLLIQAAWVAIRKDSELREFYDRVYRSHPRNVAARVAIVAVARKLAVRMHCVLWERREYEIKPCEKEAESPTCG

SEQ ID NO: 138942 - protein, 344 aa, unidentified
MPASTPSPTRYHLFVGVDIAAQTFTTVWMTLDASPGRPITLDQTPQGFATLQTRLLTTGHAAADILVVLEATGSYGVSLATTLAHAGFAVAVINPDQAHNFAKALLQRAKTDAIDARPLARLAATLQPAPWTPPPAIYTALQQRLAARDTLIGLRQQVRNQRQALVQLPVVIPAVRARMEELIATFDAQISAIEREITRILPQDAGWAANADLLVSIAGIGVLTAAWLLVTTLHVTIGAPPAAVTAYAGLAPVPTESGTSGRGRGASGHGGNKRLRTALYRATLSATRYNPPIKACYDRLRAAGKPTTVARCAAARKLLHLAWAVVRKGRAFDPLYAQQRQEAA

SEQ ID NO: 138943 - protein, 341 aa, unidentified
MKHDLNVVGIDIAKRIFHLVGLDDRGKIILRKRLMRGEVMAFMAKLPRVTVGMEACGGSHYWARQLREQGHEVKVMAPQYVKPYVKTNKNDLRDAEAIAAAVTRPSMRFVPIKEVEHQDIQALHRVRERLMGARTALVNEMRGLLGEYGIVLPQGVNAFRKGVLEKLEAEQAKLTSLSQEIFSKLFDELVKLESELAFYDDKLEAMSHSHPECQRLLTIPGIGPITATARIAAISDVDVFTNGRHFSAWLGLVPKQHSTGGQTRLLGISKRGDSYLRKLLIHGARATLRWARTKTDRRSQWIRGLLERRGWNRTAVAVANKNARIIWALLRRGGVYREGTS

SEQ ID NO: 138944 - protein, 405 aa, unidentified
MITEVVVGQQLWAGVDAGKSDHHCVVIETEGRRLLSQRVPNDEAELLELIRAVTALAGGDEVTWAIDLNHGGAALLIALLIAADQRLLYIPGRTVYHACGGYRGEGKTDAKDAAVIADQARMRRDLQPLRPGDGIAVDLRILTARRADLVADRTRAINRLRAQLLEYFPALERAFDYSTSRAALILLTGYQTPDGLRRVGAARLETWLRKRKVRNAAAVATAALEAADAQHSTVPGQQIAAAMVARLAKEVIALDTEIAETETMVEDRFRRHRHAEIILSMPGFGVTLGAEFFAATGGNMAAFDSVDRLAGVSGLAPVPRDSGRVTGNLKRPRRYDRRLLRACYLAAQIAIRTDSASRTYYDRKRAEGKTHTQAVLALARRRLNVLWAMLRDHAAYQPTTTAAAA

SEQ ID NO: 138945 - protein, 323 aa, unidentified
MAVVVGVDIAKRSFDLAVLQSNGKYRTKGKLSNDQAGFAVFADWLQQHAEPGAWIVMEATGIYHEALAEHFHALGYRIAVLNPAQIARYAQSQLQRSKTDKLDAKLIATYGQRHEDSLRAWHPEPVSIRTLRALTRRLEDLQSLRQMELNRLEISPEKVQDSIRAVLQRLDEQIAWTLEQIKRHIDDDPDLRGKRDLLVSIDGIADKTAALILAELGDIDRFADARAVTAFAGLNPRLQESGLARGHTCISRMGSVRLRSALYLPAVVALTYNPAIKAQAERLKARGKKGKQTVCAAMRKLLTIAYGVLKSGKPFDPALAIAH

SEQ ID NO: 138946 - protein, 399 aa, unidentified
MKTTDRTAAAIGLDVHRRFSTVTARNAEGKIAWRERLEHEDRDDLRKHLATWPRGMPVILESSFGWEWMCEELEQAGLEPQLASSRKVAAWRNARGMAKSNRTDADLLSELGRQTDRWWQVWLAPPEVRDRREWMRYRMSLVRMQTGLKNRVHAILHRHGILHDLADLFGGQGRRMLTRLANDAENPRLRESGRATLKGYLQLLDHLRRQIATVTRTIYHQLRATPQAERLQSLPGVGAILAHTILAEVGDFGRFRSAKHLASYSLLAPRAFDSGEETDEAPKGRHVGHMGRRTLKWAWIEAGHGAVRRGGRFREVFDRYTDGGKRNRNRGYILVGHELCRTAYAISKKETEYRDDPPARPGSSKKGAASRERARRRRAKSQNPRPGTGQPEPPRVAVG

SEQ ID NO: 138947 - protein, 351 aa, unidentified
MEKIRKGIGGKKDIFMGIDAHELTYSVSMFFEGEELLNSTYPSDVRHLEKLLERYEKFTIHAVYEAGPFGYTLYDWLKKQGVQVIVTPPSKIPIAVGDFVKTDKRDARHLAHLLSSGLLKSVPVPDKRKREDRDLLRTRDQLVDQRRRIFLQVQSKLRFHGIPIRNRLLISRKNRTLILEYPEMGSSLREAFRLMLDSYDYYTESLKRVRKAVLELSEDKAYRDGVAILKGIPGVGLITALSFLLELPDMRSFDSNEKVGSYLGLTCCEYSSGEKQHQGRITRCGNARVRGLLVQCAWKTIAGDEAMKRFYERLKRRRGGKRAIVAVARKLSGRMRTVLMRNVPYQIGLIQ

SEQ ID NO: 138948 - protein, 419 aa, unidentified
MEEDCLKVIYPICCWIDVHKTFLVGTIISTTDGVQPHYQKKRFSTYNSDLNRFADWLHSNNCLDVCMESTGKYWVPVYNILEERKIRVTIANPKWVKAVKGNKDDTKDSKWIGDLFRLGLVPGSFIPTKDIRILREFTRYSYKLTSMKSSEKNRFQNAFTVCNVALDSVVSDMFGKSATAITDYLISEDTFNPEYCVSLLKHSLKKKSESVLESIEGYSITQEQKLRIRIVRSHLNYIESLISQIDSAIDVMVAKHESLISLLCTIPGVDRNSAITIISEIGNDMSQFGSSKRLCCWAGLTPGNNESAGKKKSVRITRAGVYLKPALVQVAHAAVKAKDNSYYRLKYEQISKRRGKKRAIIAIARMILTAIYQMMSTGEVWNHTDLFKVDMPETLKEKQLSKAVKQATKFLEKQGLTVA

SEQ ID NO: 138949 - protein, 353 aa, unidentified
MLIIGCDFHPSFQQVAIFDNQTGEYQERRLGHRAEAEQFYRSLAGQQVRVGMEACGHYPWFERLLAELGFELWLGDAAAIRATVVRKQKTDRRDAEHLLTLLRENRFPRIWVPSLEERDVRQLLVHRHKQVQARTRVKNQLQAMALSQGVQKKRKLWTEAGRQELEKLELLPYAAERRKQLLQALDGLEAEIEQLNRRVEEEVQKRPAAVKLQTHPGVGPVTALAMVLTLGPAERFPSGKQVGSYFGLIPSEYSSGGQQKLGHISKQGSSFLRFLLVEAGQTAARYDAELGRFYRRLAVRKHRALAKVAVARKLAVRLYLMLREDWTYAQLCRAVVQASPSHPVVGRQSRTLE

SEQ ID NO: 138950 - protein, 366 aa, unidentified
MCVGPDTHKAKIAVAVAEPGRSGEVRFRGEIANRPEAVRQLLERLAEKHGRLRVCYEAGPCGYGLHRQIIALGHDCTVVAPSLIPRKPGERVKTNRRDALTLARLHRAGELTPVWIPDPTHEAMRDLVRARTAAMEAVRRARQQLQGFLLRHGRVFAGRKAWSPAHRRWLAGLRFEHPAQQIVLQEQIDAVEEAERRRDRLEAQIRELVPGWSLAPVVAALQAMRGVALLSAVVLAAEVGDFRRFANPRQLMAWLGLVPSEHSSGPRVERGGITKAGNGRARRVLVEGAWSYRFPARVTGPIQARLEGVPDAVRTIAWKAQLRLCARYRRLVAAGKNANLVTAAVAREMAAFAWAIACQVRPAAAA

SEQ ID NO: 138951 - protein, 389 aa, unidentified
MKIYVGIDIAKLNHFAAAISSDGEIIIEPFKFTNDADGFQLLVSKLESFDKNSIIIGLESTAHYGDNLVRYLVAEFYQVCVLNPIKTCQMRKNNVRKTKTDKVDTYVIAKTLMMQDNLRFVSFFDLDMMDLKALGRFRQKTIKQRTRLKIQLTTYVDQVFPEIQYFFKSGLHQHAVYALLKEAPSPKEIASMHMTHLANLLKVNSHGHFTKEQAKELRVLAQKSVGANDSAISIQITQTIQQIELLDSQLEKIEAEMTDIMKFNDSVIMTIPGIGYINGGMILGEIGDIHRFSNPNKLLAFAGLDPSVYQSGNFQAKTTRMSKRGSRVLRYALVNAAWNVVRNNATFKAYYDAKRAEGRSHYNALGHCSGKLVRVIWKMLTDEVEFNLE

SEQ ID NO: 138952 - protein, 329 aa, unidentified
MPRIYFFYFIIMAEVVTFEQIVQRGCGLDVHKQTVVATIDGAGLKRETREFRTTTRSLTELKEWLEQAGITHVVMESTGVYWKPVYHVLESSGMTVWIVNARHVKYVPGHKTDKRDSKWLCKLLLAGLLKPSFIPPREQRELRDLTRYRRKMIEQIASEKNRVIRILEDCNIKLSSVLSDTHGVVGTKIIEKLCKNGKISMEDIEEVYHGKLQASREAIYEACEGVVTAHHVFMLQTIKKDMTSCEAIISELNARIKTMLAPYDNVLELLKEVPGLSTKSIEDLIAEIGLDMSVFPDEKKLSSWCGVAPGNNESAGKKKADALPTVTNK

SEQ ID NO: 138953 - protein, 420 aa, unidentified
MGALNEIDFVAYVGIDWADKKHDVCIQQANSGQREFVVIPHKVDRIDEWAKSLHKRFGSPIAVAVELSKGPIVSALQKYDFFVIFPVNPFTLAKYRETFTPSQAKDDPTDAELAVDIILCHPDHFKPLKPQSVEMRTLALLVEQRRTLVNDRIRITNRLRFALKQYYPQVLEWFEHIDTVLFCDFIARWPTLMQAKRARKNTLKTFFAEHNMRFAQVLERRVRAIKEALPLTTDEAVIIPHRLQALVFVEQLQVTLNAIKRFDEEIEKLADNHVDYGLFSTLPGAGPLLAPRLLVAFGEDRARYQNAAELQKCAAIAPVTVRSGNKHWVHWRWKCSTFLRQTFVEWAGQTVNKSYWAGAYYRQQRAKGSNHQAAVRSLAFKWIRILYRCWQTRVPYDESRYLKALERRGSPLVKPLTEMA

SEQ ID NO: 138954 - protein, 346 aa, unidentified
MLYAGLDLSRKRLDFHLLDGEGVSVEVGASPPDADGLGGLSERLGRHGEPIRAAIESMNGARFVHDRLELAGWQVEIADAQKVKGLAPLACKTDRIDAWVLAELARRDLVPAIWLPDPLVRAERERARWRLHLVRHRSSLKQRVHAVLLTHGKPCPVSDLFGVRGRQLLANLGLPDPWQGTIEASLRLIDELDREITECERELRRLGADHRYVPLLLTVPGISWVLAYTIAAEIGDITRFPTPRKLAGYSGLCPRVYQSGERDLRGPLSKQGPRYLRWALVEAATHACTSATYRDRYQQTKTRIGKQRGAKVAQIDLARRLTAAIWHMLSRHEPFAPKGATDPLAA

SEQ ID NO: 138955 - protein, 466 aa, unidentified
MKPFYMGIDVSKGYADFMIINSKKQPVVQSFQLDDTFEGHRSLYNLLSRFLADYPESTLFAAVESTGGYENNWYNSLIEFQGSLNIQTARLNPLGVMHNSKADLKKNTTDKISAQNIAEYLVAHREKVVYQQHDQLAGLRKQWGFIKMLTKQCTQFLNQLNALIYSANPELLSYCQAEMSAWMLKLLVKYPSADRLKKAHVKTVAKIPYVSKQKAQQLIAGAKRSVASDTDVTTQQLIVATAEQILHLKKTIADQTNQMLRECSIPEVELLKTFPGISDFSAVGLIIEIQTIKRFAEAKKLASFFGVHPVYKISGDGVGGFKMSKQGRTAPRQILYMAALSAIQCNPLIREIYEKHQKQGKHNMAAMGICMHKILRILYGMLKNNKPFNPHIDIANRLRSVRMKNDTPVKNTSRRFQDYDQKAPVSKRQRKKRLERERSHSVSDTKVGITAPVPLADIIANILPQL

SEQ ID NO: 138956 - protein, 348 aa, unidentified
MNKKIVKQVAGIDVAQKELVVCLGRMYDDWAPELYSHKTFPNHEKGFMALVLWVKKLAVEEVPVRFVMEATGVYHESLAYFLEEKGYESSIVLPNKISNYSRTLEVKTVTDKTASEAIARFGLERKLDPWKRPKKLFKNLRQLTRERDQVVQMRTMAKNQLHAEQAEAEPNPGSVTRIKQQIVFLNKQELQIKKELLVLSKQDSQVQQSVKLLCSITGVGSLTATTVLAETNGFELIRNKRQLTSYAGLDVKEKQSGTSVKGKAHISKRGNRYLRKAMHLPALTAIRHDDRFKAIFARLVSKHGIKMKAAVAVQRKLLEMMYIVYKTNIPYDKKYLQRNEEQQQIKNG

SEQ ID NO: 138957 - protein, 350 aa, unidentified
MTRYVGIDVGKARCRAALMNQKGIIEQEFFFENNQKGIEHLTSQLTCDDKAVMESTANLWLNIYESLDNKNIKVVLANPMKTKAIASAKVKTDKVDARILAHLLRADLVAESYVPPKQIREIRALIRHRLSLMKMRTMVKNKVHSLTDKYGYRCEFSDMFGVSGLKWLKSLEMGELDLLILENHLRHIEVINLQIDVADEAIKMRACEDEDVRLLMSLPGIDVRTALLLKSEIGPIERFEDYKKLVSWAGLAPRVHQSGDVLWNGGITRCGSGILRWAMVEAAWTAVRYDEKFCEFYGRVKARRGSQKAIVAVANKMLKVVWVMLVRRESYSGVNKELYEGKLNRSGFVM

SEQ ID NO: 138958 - protein, 457 aa, unidentified
MRKKNKRTPGVEEAHPFSGMSRIHAYAAGVDIGAIEIVACVPGDENTQIVKAFGNYTVDLQALAQWMKSYRIKTVAMESTGVYWIPLFEELERQGFECLLISSRSLRRVAGRKSDISDAQWIQTLHTYGLLEGSFRPQGDLVALRTLLRHRSQLVEHRSPHIQHMQKALLQMNVQLSQAVTDVTGMTGLKIIRAILAGEREPQALAALREAGCKKSAEEIGKALTGTWREEHLFVLKQSVLLYDFYTEQIQACDEEIERLYGLTRPDWETGEVEPFTRRKKNSRSKNLPQHPEEIRKHLKRISGVDLSVVDGFGVSLAQTVIMEVGTDMSRFPDEKHFCSWLGLAPKHEISGGKVLKNNTLKTRNRAGQAFRMAAQSVKQAECVFGVFYRRLKARLGPSQATVATAHAIARVVYRMLKYQVEYEPLSLNEYQRQYEAQQIKYIKKRAAKFGFQLVPT

SEQ ID NO: 138959 - protein, 452 aa, unidentified
MKKEKMALDVVNPQAAGIDVGSRSHYVAIGQRDEDVKEFGVYNEDLMALAKWLLDNQVKTVAMESTGTYWQSLFTTLQGVGLEVILCNGKFTKNIKGKKTDVKDCQWIQKLHTLGLLSGSFLPDEATEQLRTYCRHRANLLEQAADTSRKMQKYLRLLNLRLDVVVKDVTGLTGLSIIDAICKGEMNPEKLASLRHGNCKKSEQEIAKALQSNGRKDLLFSLTHEYELYQIFQRKISECDKQIQKLLNEQINNDDNKKHHFIEGKVHKRLNKNNPDININLLSYQYFEGVDLLAIEGVSHSTVLTLMSEVGHGINKFESAKQFTSWLRLAPNNKISGGKILSNKIPKGSNRLKIALRQAANAVGNLKDTALSNFFKRIAFRKGRTSAISATARKLEVIIWNMITKKVPYKTDTQYEFLDQKRKRKVMEMKKLIHKFDITSDDLGLQLNINNL

SEQ ID NO: 138960 - protein, 360 aa, unidentified
MQRQITTLDFKGQNIFVGIDVHLKSWTVTILTEELTHKTFTQPACAETLCNYLTRNFPGGDYNSVYEAGFSGFWAHYKLKGMGINNIVTNPADVPISQKEHLQKDDPTDSRKLARSLRNNELKAIFVPSPAILEDRSLVRMRATLVKDMTRFKQRIKSFLYFYGISYPPQFEKSGTHWSKRFMKWLEEEISLQHESGIQALKILVQEAEQQRKLMLEVLKKIRLLSRSEKYAKNIVLLRTIPGVGLITAITFLVEIENIERFANTDNFAGFVGLVPNRHSSGPKTSDGEMTFRGQKMLKSLLVESSWTAARTDPALIMSYHSYVKRMEPNKAVVRIAKKVLNRMYFVLKNKMEYVPGVVK

SEQ ID NO: 138961 - protein, 316 aa, unidentified
MDAVLECCVGLDVHQETVVACVLFGSLEHKPKKEIRTFGTTTPELLTLTDWLEEQKCSHVAMESTGVYWKPVWNILETGSFQLILANAQRIKNVPGRKTDVKDAEWIAKLLRSGLIEGSFVPPVEIRDLRDLTRYRKKLLQDTTQEKNRIHKVLQDANIKITTYMSDIFGVSGRNIIESLIAGEVITVESIKMMVRGKLRSKVPGLVDALNNRLRKHHREMIRLSWEHLKYLERTILEVEDSIEQSLRPYREEIELLDSIPGVNETGAAVMIAELGTDMSVFPTDNHVSAWAGVSPGNNESAGKKKELEPPQGTRR

SEQ ID NO: 138962 - protein, 344 aa, unidentified
MQHYVGLDLSVKETSVCIIDKAGKVIREVRVATEPVAIFAVLTEEPLAIERIGLEAGPLSQWLYSALAEAGLPVICVETRHMKAALSAQINKSDRNDARGIAQMMRVGLYRPVHVKTLASQKRRMLLTSRQLLQAKALDIENDLRGTLRNFGLKVGMVGTVKFEARIRELVADHPDLAAIVEPLLIARRVLREQLGVLHRQLLEIVRHDEVCCRLMTTPGVGPVVALTFRATVDVPSRFTSSKAVGAAFGLTPRRQQSGEIDRMGGISKCGDALMRETLFEAALVLMTHRGKWSWLKAWGMKIARHRGMKGAIVAVARRLAVIMHRMWVDGTEFRWTREEAAAT

SEQ ID NO: 138963 - protein, 335 aa, unidentified
MIVIGVDTHKSSHAMAAVSADTGQLSSEQAIAASEEGHRQALSWARALGPERVWAIEDCRHVSRRLEQALMTAGERVVRVPPNMMGASRRGEREAGKSDQIDARAVARAVLREGMERFPKAFLDERALEIRVLCDHRDSLIAERTRMISRLRWHLVEICPQLEATIPYRRLHTGVALDRIARRLRREPRVARVRVALELVASIRSLTRHATGLERDLRLLITAYRPALLAERGLGVMTAATLIGHTAGAERFPTDAHFARHAGVAPIPVSSGRNDRHRLHRGGNRQLNRALHTIAVTRARIDPQTRAYLERKRSEGKTRREALRCLKRRHQESQA

SEQ ID NO: 138964 - protein, 398 aa, unidentified
MEVMDAAGRRLSAAKLPEGIAGMARFHAMIAAQLDPDADLDAQAGQVLIGIETDRGPWVQALIAAGYRVYAVNPLQAARYRERLGVSGAKSDPADAHLLADMVRTDSHQLRVVAGDSDLAEAVKVVTRAHKTLIWERTRHTLRLRSTLREYFPAALAAFEDLTDADTLELLAKAPDPASAARLTTTQIMAALKRARRHHRDRRAGEIQAALRTEQLGQPAVVARAYAVAVRAQVAILGVLNEQINLLQEQVEAHFGQHPDAEIYTSQPGLGQILGARVLAEFGDDPTRYGDTRARKNYAGTSPITRQSGKKKVVLARYVHNDRLLDALGGQAFAALTRSPGARAYYDKQRDRGLGHRAALRQLANRLVGILHGCLKTGTRYDEATAWSHAQQDQQVAA

SEQ ID NO: 138965 - protein, 346 aa, unidentified
MMIIGCDFHPSWQQVSWLDTETGETGEQKLVHATGDAERFYRQMPVPSLMGMEATGNSQWFVELVEELGHALWIGDAAQIRASYVRKQKTDKRDAGHIRKLLEEGRFPKLWTPDREQRDHRQLVMHRHKLVQIRSRVKNELQHLSLNKGMQKQNKLWSAAGQKALRELRLKPWAACRREDLLQLLAMLDQQIGKLDAAVQQAAEHNPQAKLLMTQPGVGPVTSLAFVLTLGDVSRFPRGKQVASYLGLIPREHSSGGRQMLGSISKQGNRLMRALLVEAAQTAVRYDPGFRKEYLHRCHQKPKGVAKVAAARKLAVRLYWMLRTQKPYPEVVRIESSPRVALVGAS

SEQ ID NO: 138966 - protein, 354 aa, unidentified
MSQKFESAIAVIGIDIGKNSFHVVGHDARGAIVLRQKWSRGQVEARLANIPPCLIGMEACVGAHHLSRKLASLGHDARLMPAKYVRPYSKGQKNDFNDAEAIAEAVQRPTMKFVATKTAEQLDLQALHRVRERLVSQRTGIINQIRAFMLERGIAVRQGIGFLRTELPTILATRTDALSPRMLRVIEELAGDWRRLDQRIDGLSGEIEALARQDQACSRLMTVPGIGPIISSAMVAAIGTGDVFSKGRDFGAWLGLVPKQISTGDRTILGKISRRGNRYLRVLFVQAAWVVLVRIKDWERYGLKSWIEAAKRRLHHNVLAIALANKLARIAWAVLAKGRAFELTRTDDASVRSA

SEQ ID NO: 138967 - protein, 421 aa, unidentified
MRGFGLDVHRDFCEVAINENGRVRSAGRIPTRVAALEVFAQSLVVGDVVALEATSGTDRIVSVLERAGVRVVVANTRKLKAISEAKAKTDRLDARTLAKLLGAGLLDEVWSPDERTRALRRLTHRRERIVRARTRAKNEAHGVLGRNLCERPPVTDAFGKAGRRWLAEQELPVDERLTLDGCLRQIDFLDLEVATLDREIARIALEWPEVLRLMTVPGVNVQTAAAFMASVGDISRFSSPRKLVSYLGLDPRVRQSGNGPARHGRISKAGASEARHMLGEVAWKVMMTPGPLRAFFERVRARRGPQVAATATARKLVVLFWHLLTRGEDYAFGRPAMTRHKIRQLELLAGAPSQKGRKGIAGGKSKAVFDAERELSRQAEVAYRRLTADWKATRSPKVGAGATPGRASQEPSKGKAARQTP

SEQ ID NO: 138968 - protein, 309 aa, unidentified
MTAVGIDVSKSVLDVAVDGQSAVRRFPNTSAGVARLVRQLSQYEAVRIVVEATGGYEEAVLGACAQAGMWIARVNPRQARDFARATGQLAKTDGIDARMLAEMATVFHARLRRYEPREAWQDELRAWLRRRHQVMDAIQRQRQHMDMALPAIRTLANKTTVTLRKELTAIDNAMQTLLNAHVTPALQSAKGLGPIFQATALALLPELGHLSRQQIAKLVGVAPLNRDSGQTQGKRRIYGGRSPMRIALYMATLSAVRWDPRMREHYQQLRQRGKVAKVALVACMRKLLTIVNARRRDELRLATRCTQLA

SEQ ID NO: 138969 - protein, 352 aa, unidentified
MEKNNKLDFGGQHIYVGMDVHKKSWSVSIHTEQFEHKTFTQPPEVEKLTYYLERTFPGATYHTVYEAGFSGFWLHDKLRAKGIDCMVVNPADVPTKDKERAGKTDRVDCRKLARGLRNGEIKGIYVPPRMKVEDRTLVRTRQSMVRKQTRCKNQITSILFFYGIVIPEEGRWSRRFINWIESIRMERASGDFALKAHLEELNHLRQIIANLNKAILSLSRTEEYMANVLLLKSVPGISTLTAMILLTELADLSRFSSLDKLASYAGLIPDIRSSGETEYTAGITFRRNAALRALLIESSWIAVRKDPALIMVFNKLSTRMKKTKAIVHIARKLLNRIRFVLKNRQEYVPAVV

SEQ ID NO: 138970 - protein, 459 aa, unidentified
MTKPKPKRSRREREMSPVHAGAAAIDVGATMHVAAVGPGRDPEPVRSFGTFTADLHRLADWFKQCGIKTVAMESTGVYWIPTFEILEQRGFAVVLVNARDAKHVPGRKTDVTDAQWLQRLHEYGLLRASFHPERRVAALRDYLRQRERLLDYAASHIQHMQKALMQMNLQLHHVVSDITGASGMRIIRAVLAGERDPAALAALRDQRVKASEETVRQALVGNDREEHVFALLQAVELYDAYQAKVAACDVRIEAALKEIEAACPPPASPIPAPRHRTRQPNALAFPAREALHRILGVDLTQIHGLGPYLALKLVGECGTNLSAWPSAKHFTSWLCLAPSNKISGGKVLSARTRRSSNRAAALLRLAAVTVGRTETALGAFYRRLAGRVGKAKAVTATARKMAVLFYNTLCHGMDYTDPGASYYEDRYRRRVLTNLQRRAKSLGFVLHPVEPKPGSAGVS

SEQ ID NO: 138971 - protein, 308 aa, unidentified
MTTIYVGLDIAKLNLQLHLAGRFHDLPNTHAGYRRLLKLLAKIPGVQVVCEATGGYERELVAALHQAAIPVSVLNPARVRFFARAQGQRAKTDPIDAKVLTDYGQAFHPKPTPARSQNQQQLTELVRRRKQLLEMLVAQRQQADRLTLSSLRRQAQRLVRHLEAALKQIQEQLQELCSQVTVLDRRVQTLQTITGVGTTTALAVLAEMPELGTLNRGQTAALAGLAPHPRESGQWQGRRFTGGGRSALRGALYMAALVASRSNPILKEFYQRLRLAGKPAKVALVALMRKLLVLMNHLLKPLSLEHPF

SEQ ID NO: 138972 - protein, 339 aa, unidentified
MKYIPVGVDIAKHLMQVHFVDEHTGEIIDKQVKREKFLEYFSNREPCLIGMEACGGSHHWARELQKLGHKVRLLKGRFVKAFVMGNKNDVMDARAIWLAVQQPVKSVAVKSEEQQATLGLHRMRQQLVKFRTAQINALHGLLLEFGETTHKGRAALAKEVPEALERLKERLPLYLINMLDEQYQRITELDEHLDHIEKQLQAVARQNETCQRLLNIPGVGPLIATAAVATMGDASAFKSGREFAAFIGLVPKQTGSGGKIRLLGISKRGNTYLRALFIHGARAAALLTKEPGPWITELKKRRPASVAIVAMANKLARTVWAIAAHGRKYDKNHVSIRPD

SEQ ID NO: 138973 - protein, 343 aa, unidentified
MKLSRVGVDLAKNVYQLHGVDRHGKTVWKRRLRRGQWLKALVEKAEPGCEIGMEACTGAHHWARVLQARGFTVRLIAPQFVKPFVKSNKNDANDAEAICEAMSRPHMRFVSVKSVEQQDIQATHRVREELKAHRNAKANQVRGLVAEYGLVAPQTLLALRRAIPEWLEDAENGLTDTFRSLLHGLWNDLLMLEERLKGLDKQIEKLARSNEVTQRLQQLRGVGPLVATALVATVGDGRQYAKGRQMASALGLTPRQNSSGDKFRLFGISKRGDVYLRTQMIHGARAVVSQARHRDDPLSRWVTDIAKRRHPNVAAVALANKTARMAWAMLQNETDYDPGLAVG

SEQ ID NO: 138974 - protein, 327 aa, unidentified
MKPGLFVGIDVSKANLDVALGSDGEVMQVPNDEGGIGRLLARLAELAPTLVVMEATGGYESLVAGAISGQGISVAVVNPRQVRDFARAAGILAKTDRIDARVLARFAEAVKPEPRPLPTAEAKELQEFLSRRRQIVDMLTAEKNRLQIAATERMKKSLRKHIQWLEEALRRADDDIDKAVRNSPAWREQEDLLRSVPGIGPVTARTMLAELPELGALNRKEIAALVGVAPLNRDSGTMKGTRTCWGGRASIRQVLYMATLTAVRRNPTIRSAYLALVGRGKKAKVAHVACMRKLLTILTAMVRDRRRWSLDLSRPPLTTATVPGAPA

SEQ ID NO: 138975 - protein, 449 aa, unidentified
MARKKTKKDKGKLQIINRLAAGIDIGARSIFVAVDPSCSAPTIREFSTFTDDLHSMAEWLKFCGITTVAMEATGIYWIPPYEVLESEGFEVILANTKHIKNVPGRKSDVLDCQWIQQLHSYGLLSASFRPGPEMVTLRAYVRQRGTLIRYCASHVQHMQKALGQMNILLHHVVSDITGKTGFDIIHAILGGERDPQKLAALRDGRCKRSEAEIARALYGNYRPEHLLQLRQAVKSYEFYQAEILECEQAITHQLALIMRESDSGHDQDAGYGPDGDLTREEALKRICGVDLTKIEGISQASALTILAEVGTDMSRWKSAKHFASWLGLCPGIKKSGGRLISGATRKVSNRAAVTLRMSAYCLHRSKSALGGYLRRLKSRIGTPKAITATAHKLARLVYALLKHGQEYVQAGQETYERQFQARKLYALHNNAKSMGFMLVPLEQATVCSL

SEQ ID NO: 138976 - protein, 415 aa, unidentified
MALKIVYKICCGIDVHKTFVVACIASTDSNGVTIYEHHRFSTYTKGLKDLLQWLLKHNCKDVCMESTGKYWIPVYNVLENDCSIVLAHPKYVKAIRGKKTDKKDAKWIADLFKHDLVAGSFMPPADIRQLRDLMRYRFKLTCFMSSEKNRLQNCLTVSNIQLGNVVSDTFGKSAQAILDTLLENPADTSFDLEPLVYKSLKKKLPELRDAIDGYITPEQAGKLKVIKAHYENLESRKAELEELILALAAPYQQELAILQTAPGIRSDFTAIGIISEIGTNMEAFPSAKHLCSWAGLTPTNNESAGKKKSVRVSKAGCYIKPLLVQCANAVVTSKKHPEIRNRYLRIKKRRGHKKAIIAIARMLLTALYHMLKNGENYNAELYRKSDLLSVDREITVEQAIIIARKQGYKIKSATA

SEQ ID NO: 138977 - protein, 341 aa, unidentified
MMIIGCDFHPRFQQIAFVDQETGEYGELRLSHPQEAEEFYRSLGGRQVRIGAEATGNFRWFRRLVEELGHEFLLGDASAIRACCPRKQKTDKRDARHILTLLVEDRFPAVWQPPVENDEMRQLLLHRCRLVRMRTRVKNQLDSMAKSEGLLSSRVWSPKRRSQIEALPLPGWYAYRRADLLVLLDELDKRIKPLDEAVCEAAEGNAEAILLMTHPGVGPIVSLAYVLTIGDWRRFARGKQVGSYLGLIPAEESSGGKRRLGHISKQGNTLLRWLLVEAAVHAQRHDPSWHRQYVRLSMTKHHGVAKVAIAHKLAVRLYWMLRSGDDYRKVMERGSHVGQSV

SEQ ID NO: 138978 - protein, 408 aa, unidentified
MEVIHERCAGIDVHKDVVVVCVRIATGGRARCEVRSFGTTTSQLLALGDWLGSESVTHVAMESTGVYWKPVWHMLDGLFELTLGNATHIRNVPGRKSDVNDATWIADLLAHGLIRGSFVPPVEIQELRDLTRTRKELTREVTQHVQRLQSVLQDCNIKLDSVASSVMGKSGRAMLDALVEGKTDPVELAELALGALRKKHDQLVEALRGKVLPHHSFLLKLHLDQIDALQRGIAELEAKIEEMLRPFADAVAHLMTMPGVGDTAAHVLVAEIGLDMKRFPTAGHLVSWAGLCPRMDESAGKRRSTRLRKGGNWIKTTLVQCAWAAVRAKGTYLQGQFLRLKARRGPRKAIMAVAASMLTSAYHMLRDDEPYREPDPTQLDERERRRAAKRLLSRLGELGYAIQLPEFS

SEQ ID NO: 138979 - protein, 485 aa, unidentified
MERSTILIARRSDLRPRSAIGIDPEAKGIRCSLVGIGEDKPRMKGFLVTQEGMEGFILWVKRAGDVIIAIEGSNGQSKPIEQALRAEGLVFYSFKPSDVAGFRKAVLGQNKNNDKDAESVARYAMALEAQGKLNSHKRVWFPDAELQGLTRSHEQKTNQLTAEVNRMWKLLRTASPDLYLALGGVNPDIEINGNMLQNQGILALLAEKPDIVEWKTLSGMDFLEAMGGRLYNGRQKLIKELQKVAKTFRPIPSSLSLMIENSVAQILLLKKQLKRLHNMLEQITQDNKAISILRGYRGIATLTASTLIAEIVNIRRFVSNDSLACYAGLGMKEYSTGERSNMVHSSLFNHRLKDALMTAAKNFVLYNPDSHLSGYYRNLVKGGMSVTESRKRVARALVRVIFRILHSIDEDNNTGITEHDDVQEEKRESNMASGQVRSDKNHESNISLSPLKNHDTNCDGKVNNRLAQREVKEPERILKKSEKSA

SEQ ID NO: 138980 - protein, 423 aa, unidentified
MTDPPVQSFLRFVAIDIHKSYLMVGAIDSQQHIVLQPRKVELHRWLAWAQANLLPTDAVVLEATTNAWTMYDQIVDLVARVVVAHPAKVKLIAEARVKTDKVDVLTLAKLLRADMLPEVWVPPLHVRDLRALLSHRRRLVAFQTTAKNRLQSVLHRLNLKPASGDLFARKQREWWRELDLSATERLRVDQDLATLDHIRPQIEEIDAELRRLSTSEYWAEQVPYLVQLPGVGLLSAMTMLGAIGDITRFGAAKQLVGYAGLGAGVHASGKTHRDKGITKQGRRDLRYVLVETARVAVQTHPHWKKEFERLAARIGEPKAVVAIARKLLIVVWHVLMARSVDRRADAEQVAFKLMVWAWKLSEEQRGGLTSRQFIRAQLMRLGLGDELTHITRGGTKRPLATSEEVLAVLAERRNQMPDEQTNE

SEQ ID NO: 138981 - protein, 344 aa, unidentified
MKNCNVIGIDLAKNIIQVCIINKHGEVRSNKAMSPLKLKEFLTKSSPSIVAFEGASTCHYWGRFASNLSHDVRVIGPRKVKAFLQGQKTDANDALAIAVAATQPGMLFSQLKNEEQQVLQSLETSRRFLDKHRVSLENHIRAFLYKYGITVARGAKYLRESVLDILSEGSDELPHHLLAPLLSLWEQYRDTVKRVAAIEKELTQLVKKTDACQRLKALEGVGDVCAIKLFTSLGNGEGFKNGRQASAYIGVTPKQYSSGGKVSMKGIDKVGGNKVLRANLFMGARAVIKALPDKPRTSKEQWLIALIKRVGEKRACIALANKTVRTAWALLASGEKYKSTALVS

SEQ ID NO: 138982 - protein, 423 aa, unidentified
MISFPKRERAQRAAACVGVDAGKFAHTLVVRPTGRPDSKPCTFPTTRAGFEQAVAFVRQQVPGASPANILVGIEFAGNYGFTFAHYLRELGFPIVSVLAAHTKRWKDVAHNQPLKTDAKDAGTITDLLAQGHFVGFPFLEPAYADLRYLVTARERLAVLRRGAITQLRALLQVVFPEYETIFPLVSQRTAVLLLRAFPGPQQLLAAPKAKVLRVLRAGSRGHLGAEIYERLVGAARATLGLPGAQVRLRQEIVLTLDRLALFEHQIRALEVELVAALEAVPETPYLLSIPKVAAVTAAVFLGSIGDPRAYDAGAQILRVAGLSLVERSSGVLHGTKRISKRGRPLLRAAAYLFAVRSITKGGLFRADYEALCARNGGQKLKAIVAVMRSGLQLLYSIARDRRRFTVEPPPRRRARPTLEVTPA

SEQ ID NO: 138983 - protein, 374 aa, unidentified
MSKVRFVGLDVHAETIAVAVAEPDGDVRALGMIPNRPESIRKLLKKLGPPDDLRVCYEAGPTGYVIYWQLTGLGVRCEVVAPTLVPVKAGDRVKTDRRDAQKLARSYRAGDLTPVWVPDAAHEALRDLVRAREAGKKDQLRARHRLGKFLLRHGRRPPLGTRAWTHRYLLWVKRDVHFEHAAQGATFLDYLHEVEHAADRIVRLEAALDRAVTTAPPAMRAVIEALQALRGIALVSAVTIVAEVGELSRFAVAPQLMGYSGLGAREHSSGERTRRGGIGNAHLRRVVVEAAWAYRHRPAVGGALRKRQATLSEEVKAIAWKAQHRLHGRTRRLLGRGKSAQQVVTAVARELLGFIWAIGVITETEQRTQPATAA

SEQ ID NO: 138984 - protein, 365 aa, unidentified
MDVHAETIAVAVVESDGEIRSLGTIPNREQAVARLMRKLGPASTLRVCYEAGPCGYVLYWQMTQLGVNCQVVAPTLVPMKAGDRVKTDRRDAEKLASCLRAGTLTAVWVPDAAHEALRDLVRAREAATTDRLRARHRLGKFLLRQGKRRPEGVAPWSMRHLAWLKTVEFDQPAHDATLVDYLTEVNHATDRIERLDRALDAAIEQAPPQMREVIEALQTLRGVGKVIAITLVAEVGQFSRFARPRELMGYSGAVPSERSSGNKVRRGAITKTGNSHLRRVLVEAAWLYRYRPSLYAALRKRQLGQSEEIKAISWKAQQRLSSRYHRLTARGKPQPQVVTAVARELLGFIWAIGVHVEQQQQAQAA

SEQ ID NO: 138985 - protein, 337 aa, unidentified
MTLFCAIDLHSNNSVAVVLDENDTVLYQERLPNELPAIERALLPFRDELYGVAVESTFNWYWLVDGLQAAGYHVMLVNTHAVQQYKGLKHTNDVSDARWLAHLMRLGILPTGYIYPYEQRTLRDLLRKRLFLNRERVMHLLSAQCQIRRCAGLQVDCTELKRASPQLLQVHQHPNLRFALRCHLVMVQALNEQIELIERQVAKQTQDNPYLQSLLTVDGVGPILGQTIALETGDIDRFATVGQFASYCRCVNSQRLSNGKAKGRNNTRNGNKYLSWAFVEAAHSIIRHNKVAHRFYQRKRAQKNGALATKALAHKLARACYYVMRDGVAFAGTRLFA

SEQ ID NO: 138986 - protein, 399 aa, unidentified
MDYLGIDISKRTSVIAHYFEDKFQKEFTIQNNKNGYNQLLKYLKKLNQPQLIFESTGVYSRGIVQFCQVNHVKYIEMNPLEAKFKTNSLRSWKTDHSDAHKLAQLGPTLKYTDSLNTKNEIYFELRERVRFHLEIEKNQSRLKVQIIELLHQTFPGLEKLFKNRYSMIALNIAEIYSHPSFVQQQDIDTLISNIFNSTEKGLSTRKAENYADKLSKIAHESYPSVKSSSFLVRKLQLLIRQLKDSIEQLSQLDKEMINLAQELKCYEIIQSIPGIGELTAAMLIGELGDITHFKTNKQLNAYVGIDIKRYQSGNTHYKDTINKRGNKKARQLLFWIVMNIIRGQRNYDNHVVDYYYKLRKQPNEKSHKTAVIACINRLLKTIHYLIMNQKLYDYQMSPH

SEQ ID NO: 138987 - protein, 352 aa, unidentified
MDKGNKLDFSGQHIYVGMDVHKKSWSVSIYTEQFEHKTFTQPPEVGKLTNYLQRTFPGATYHAVYEAGFSGFWLHDHFREQGIDCMVVNPADVPTKDKERAGKTDRVDCRKLARSLRNGDMKGIYVPPRVKVEDRTLVRTRQSMVRKQTRCKNQITSILFFYGINIPEESRWSRRFIHWLESNHMERASGDVALKAHLEELKHLRQIIANLNRAILSLSKTEEYRADVLLLKSVPGISTLTAMILLTELADISRFPSLDKLASYTGLIPDIKSSGETEYSTGITFRRNAALRSLLIESSWVAVRKDPALMMAFNKLSLRMKKTQAIVHIARKLLNRIRFVLKNRQKYVPAVI

SEQ ID NO: 138988 - protein, 267 aa, unidentified
MLIIGCDYHPSMQQIAWVDTETGLYGERRLTHRSEAEQFYRELKEKRVHVCVGMEATGTARWFERLLSELNIELWVGDPAQICAKRVRKQRNDRRDAQHILKLMREDNFPRTWVPSAENRDLRQLLWHRHCLVGMRTRVMNQLQAIAMNEGLRRKRSLWTKKGRTQLESLPLPQWSDRRRQELLQLLDGFDRKIEQLMAAIEQEAERWPQVQCLRSHPGVGPLTALAYVLVLGTPDRFHSGKQVGSYLGLIPCEDSSAQRWRLGHIT

SEQ ID NO: 138989 - protein, 398 aa, unidentified
MDPVIGLDVAKGESQVQAFLARKQPFGKTFKFKHDTRGLRDFFMFYKELELHADSNPVIVFESTGHYHEPVLQYLEERRIVYYLVNPVVSYETKKSSLRKVKSDPADAKHLCEMYYKEDLVAYQRKSVQTMNLRNLCRQHDSLTRNYVQLKLQFQTILDQIFPEYKGVYSNLYAPLSLKTLLLYPTSHEVLKVPSDELAKEMGGLGGKRSNGWFYEKALKLKQAAERNPFKKTLYDSHLITLKMYIQMLLQQRDFLNALEQEIDKLATEFEEYEILTSIPGIGTKIAANLISEIGDVTQFSHPKKLVAYAGLDPRVYQSGKFTASINRITKRGSTKLRQTLYTAVQCGLTNNRNIRIREYYDKKRSEGKPHKVAIIACANKLWHWIYAILKHKQMYNP

SEQ ID NO: 138990 - protein, 418 aa, unidentified
MSEDENTRGSRRYIASDIHKKYSVIGGVDREGRVVLHAVRVEHADLEGWLQKNLLPTDHVVIESTTNAWHIYDLLEPLVERVVVANPARVKQIAQARVKTDVRDTFILARLLAANLVPDVWVPPVHVREMRQLLSQRRQLVETHTQIVNRMHSVAHRHHLQHERGKRFNEKNTAWQKDKRLSKVEQFQLELEMENRAYIEKQISRIGKEVAKMCHQKPWADSMTYIMQLPGFGVITGMTVLAAIGEIQRFGTPQHLASYSGLTGGLDQSGTHLVQKGITKEGRKELRWAMVEAAQRAVKSDPHWKRKFQEMEKRMHRNQAIVAVARQLLELVWYVLTRRQPYRHFSQERIAYKYLTWAWQMDEAARDGLTRQQFTRYYLMRLGIGHDLTRIALDPKHPRKISSEAELLTLRPELDHIE

SEQ ID NO: 138991 - protein, 343 aa, unidentified
MSVYVGIDVHRKRSQLAVIDARGEVLVNRNVPNGVEPILKVIGGLPPGTPAAFEAAFGTGWLVELLEGYGFEPHLVHPLQCKAIASARLKNDKVDAEILAQLLRADLLPEAWIAPPAVRQLRALLRHRVQLVRLRTLLRNRIHAVLADHGHDRPAGYWSGPGREWLASLSLPAVSREVVEDGLALIDATEARIDRLDWEIVQRARSDPRVKVLTQLPGVGPFTALVILAEIGDITRFPTARKLASWAGLTPTVRGSDRVAHYGHISKQGSVWLRWVLCEAAQTAKRSPQFAAGYQAIAARRGKKIATTAVARKLLTRTWHLLTDAERAAPQPATARPPEKQRR

SEQ ID NO: 138992 - protein, 362 aa, unidentified
MPKMIWLGMDVHAASITVAQYEDQAPTAMVQTIANDPAQVRRLVRRLPAGSDVRACYEAGSCGYGLHRQLTALGVHCDVIAPALIPRRPGERIKTDRRDAEKLGRFYRSGELTTITVPTPSQEGVRDLVRAREDVRRDRTAARQRLAKFLLRHGHRYPGSHWTKRHWEWVCGHTFDGPARTVFVHYCDHVLALNERLAHLEREIRTLAESAAYQPVVTRLSCLRGLATLSALVLIAELYDLRRFRTPRELMAYLGLVPSEHSSGARERRGRITKTGNALARRLLIEAAWAYRHPARQTRRVQQALTTQPPAVHAISDRALHRLTARYRRLLSRGKTPHHAVTAIARELCGFVWAIALVPDLT

SEQ ID NO: 138993 - protein, 340 aa, unidentified
MRQLYAGCDLHGNSNLIGIVDGEGKRVFKKKLSNDFSLVRDTLKLFQEELVGIAVESTYNWYWLVDALMGEGYKVHLANPAAIQQYSGLKHADDKHDAFWLAEMLRLGILPEGYIYPKEERPVRDLLRKRGHLVRLRTSLILSLENIISRNFGSKLPANHVKGLRKDQVTPLFEGNEDLALAGRVSKETIDFLTHQIRQIEGVVEKRIQLKEAYRYLLTLHGVGKILGLTIMLETGPIGRFETVGDYTSYCRKVPSQWISNGKRKGSGNRKNGNKYLSWAYAEASDFARRLHPESRAYYNRKMQQSNPAVAHSALSHKLARAAYYIMRDQVAFRPEKLFG

SEQ ID NO: 138994 - protein, 421 aa, unidentified
MMHGAHIGGQRAGAFLELVDGVDPRRVLLVGVDVAKATWFVVASNLVGEVVVDGVRLVADRAGLAVLERLIAATSGQLDAAVVVVGVEAAGHHHQTLVGHLGDREGLVVRLLNPAQVAAVRKQQGNRRRKTDWLDAAAICELLARGEGSPPHLDASPAATLRPLWSGRKDLVDARGRLRQQAGALVDCLWPGFSATDKHAGVAPVLSSPFDTKAGRVVVGLLAEGWTPAGIAAADPAELRQIFAARGCRLSGPLAGRLIARAASALAPHPAATAGKAATLAGLLGALAALDLQIAGLEAEMAPLLAATQGAKLTQIRGVATVAAAGFVALVGHTGRWADWSKVWRAAGLDPARSQSGATDAMASAGKARPGAGGRSWTWLPASAANQAASTTATRLACATASTPRWRWPRSATRSDGPALP

SEQ ID NO: 138995 - protein, 356 aa, unidentified
MDVDKQKIVLARLGAGRDTRAVEQVIANTPSAVKKYFASLLGAAEVHATYEAGCFGFGLYRQLSAMGVTVVLAAPGLIPRKPADRIKTDRRDAHSLALALRAGQLTGIYVPTEQDESVRDYLRMYESLRGDLRVCKQRVLQFLLRRGISYDGGSPWTVKHRHWLSALQFPQARDRQTLDMYLSQMQELQAKCEEAAAEVESIASQDCYRQQTKKLTAFKGIKTLIALSFVTDIGDFRRFCSARQFMAFLGLVPSERSSGNKRRQGGITKAGNSHLRRLLVEAAWHYRSYHPSSRDLTERRRGLDPAVLTYVNRAGRRLNRKYMRLLLRGKRSQVAVTAVSRELAGFLWGAMTDQVA

SEQ ID NO: 138996 - protein, 331 aa, unidentified
MKFRAFIGIDVSKSTIDIHLRNAGRHSVFVNDLEGFEVMVEWLMDILGQVCPEEMMFGMEHTGLYSELLISFLNDHNFPFTVLPGLEVKKSMGIRRGKSDKADSKDIAEYIYEKREKIKLFRMPSRNLESIRKLASYRERLVKERTAFKTRLGEYQKVYGKESYEIYTESHKQIIACLDKQIKGMEAEMERLIKDDQEMLRQYQLVKSVKGIGPQTAIMMIVLTKAFTAFPDWRKFASYAGIAPFPNQSGTYMGKTRTSKLANKRIKALLTMCAGVAVQYNPEMRLYYEQRVNEGKNKMSTMNIIRNKLVSRIFAVIERGTPYVETMKYAA

SEQ ID NO: 138997 - protein, 465 aa, unidentified
MAKAQKFRSKSQAKQNHRAKLKAQDCTLGLQVVHPKAAGIDVGNEEHWVAVAPDLDPEPVQSFGCFTQDLQEMADWLVRLGIETVAMQSTGVYWIALYDILAERGIRVFVVNASDTKNLPGRKTDIQECQWLLKLHAYGLLRNSFRPEEEILVMRTYWRQRQQHIGDASRCIQHMQKALTQMNVQLANVISDISGTTGQAIVSAILSGERNPWILAKLRDPRIRASEATVAKSLQGNWRPELLFVLQQEQESYRSFQTKIAECDRQLQRHYASMETKADPKELPALPRDKRAHGNVPAGFDLREELYRTTGVDLTAIDGLNVLTVQTLIAEVGADMSRFATEAHFVSFLGLSPRNKISGGKVVGREKQKTKNRAGVALRLVAGTLLNSDTYLGAQYRRLRTKLGAPKARKAMANKLARIAYRMLKYGEQYVDKGKEFYEQKYRQLQIRMLTKKANELGLQLVQSA

SEQ ID NO: 138998 - protein, 359 aa, unidentified
MDVKESAGRPVVGGVDTHKDLHVAAIVDECDRVLGAQSFSTTRQGYRQMLAWMGSFGEVQRIGIESTGSYGAGLLRFVQKAGIKVLEVTTPDRHDRRRRGKNDDLDAQNAAHAAFAGQRTVTPRSRDGMVESLRVLSACRKTAVAARRVALQMIQNTIVCAPDGLRDLLRGMTRMQLIRTLAAWRPDLTAYRDVEAAYRITFKSLARRYLELHDEIADLDVMISAIVDDLAPDLVARNSIGHIGAAQLLLTAGDNPERLRSEASFAALCGTSPVPASSGKTIRHRLNRGGDRHANSALHIIAIGRLRTDPNTKTYVAKRVAEGHSKLEAIRALKRYIAREVFGVITRRQKEINQTRIAA

SEQ ID NO: 138999 - protein, 343 aa, unidentified
MEHYVGLDVSLKLTAICIVDQTGRIEREGVVASNPEAIAAFIKSHAPHVARIGLETGATSTWLWTELNKMGLPVICIDARHAKAALRMQINKSDRNDAVGIARIMQCGWYKEVRVKDLDSHAIKALLVSRALLVKIKRDLENQIRGLLKNLGLVIGRAKMNVFAVCAAELTEDRPELAAAVEPLLKAREAIERQIADLDRKVPRLARNDAQVRRFMTAPGVGAITALCFLATIDDPTRFKRSRSVGAYVGLTTRRYASGEVDWTGRISKCGDKLLRSYLYEAANVLLTRVAKWSALKAWGIRLAKRSGLRKAKVAVARKLAVILHRMWIDGTEFNWSTKKAAA

SEQ ID NO: 139000 - protein, 352 aa, unidentified
MANQAHSAVVYGIDLGKTWFHVAGCDATGRSLHKVKLSRSRVFPFFANTSVALIGMEACPGSQWLARRLQALGHTVKIMPAQFVKPYVKSNKNDAVDAEAIAEAVTRPSMRFVQVKQTEQVDLQALHRARDLIVSTRTRLICQMRAFCLEYGIAMRNGAGAFKLDVLKVLNDDTNELTPAMRHLLRELWNQLQELEARIQKFTRQIESIASRSQFARRLLTIPGIGPLGATALLAAVGDGKQFKSGRDMAAWLGLTPAQYSTGGKSTLLGVSKRGNAYVRRLLIHGARSCVIHLDRTRDRLGSWITDLQRRMHINKVVVALANKLARIAWVVLTRPGALYQRVDPAFSGGST

SEQ ID NO: 139001 - protein, 380 aa, unidentified
MNSQAVPAKENTPDILYLAFELSRKKWRLGFSDGRSATVRQVTISAGDLQACGEEIEKAKQRYGMAATAGVRSCYEAGREGFWLHRALTEKGIENMVVDASSIEVNRRQRRAKTDRMDVEKLVRQLIRYVRGERDVWRVVRVPDAEAEDLRQTHRELETLKEERTQHRLRIQSLLFTQGIDMKVGATFWKKLDGLRCWNQQPIPTQMKRRIEDECHRLQLVEVQIREIQKAQAERVKRADQDQVMEKVRKLQQLIGIGRSSSWIFVMELFGWRQFKNRREVAGAVGLTPTPYDSGDSVREQGISRAGNRRVRRLLIEIAWCWLRLQPNSKLSHWYKQRFAGGGARMRRIGIVAMSRRLLIDLWRYVEVGQIPAGAQLKAQ

SEQ ID NO: 139002 - protein, 455 aa, unidentified
MAKKGKKNTPSPENMPILHPHAAGIDVGAEEHWVCVPADRDAQPVQKFSAFTCDLHRLADWLTACRITTVVMESTGVYWIPLFQILEARGFEVALVNARHVKNVPGRPKTDRFDCRWLQKLHTYGLLAPSFRPPEDICRLRSLLRHRDNLIQMTVKHIQHMQKSLDQMNLHLHHVISDVTGVTGLRIIRAIVAGERDPKLLATYRDYRIKSDQDTIAKALEGDYRPEHVFTLTQSLALYDFTQQQITDCDQEIERVLSTFETLVDPALHPLPPPTTAHRQPQRNEPAFDLRTHLYRITGVDLTQVPGLQAPTIHIVLAEVGLNMHKWPTDKHFASWLGLCPDNQISGGKVLSTGSRRVQNRASRALRMAAQSLRTSHSYLGAFFRRMRSKLGPAKATTATAHKLAKIIYHMLKEKTPYRERGADYYMHKDHERKLRQLRKQAQHLGFDLVPQASH

SEQ ID NO: 139003 - protein, 331 aa, unidentified
MEQRKAIIGIDVSKKTLDIFIKALDVYLQISNNAEGFKKLMALLKANKLKPEDCFFVLEYTGGYEYRLVQFCQSRQISYVRISGLAIKRSMGLVRGKNDKIDARRIADYGDEKQSKLEAATASLDGIVRLKRLLSQRDVFVCDRKAHQNRYQEIQYMMDLPEKDPMLKRYKKIADELQKLIDKTEEEIRKLINDNDAFRFNFDLITSVKGIGEVNGWTMIAYTENFTSFDNARQFGAYIGVVPYPYTSGTSIKGKSRTSKMANQHIKALLDMGARAAINHDRESTLYYERRIAAGKHHMSVMNEIKFKLVRIMFAVVKKQQPYVDKYKIAA

SEQ ID NO: 139004 - protein, 335 aa, unidentified
MQNVTLIGIDLGKHSFHLHGQDARGKAIFRKKCNRKQLTTLLATFHPCTVVMGACAGAHHMARQLIMFGHHVKLISPQFVRPFVKGNKNDAIDAEAICEAASRPNMRFVSPRTEAQQILSALHRVRESLVRDRVKACNQIHGFLLEFGVSLPVGPGVIKRLPSVLAEHPLPARLISILERLHSHYKYLDEQITEVEQDLRRQLQEDDLGQRLMGAPGVGPITASLLSAELGDGKQYGCARDFAASIGLVPKQYSTGGRANLLGISKRGDKNLRCLLVQCARAYMMHLDKQKGILADWVRAMLTRRHSNVVACALANRLARTVWSMAFRRSEYHAA

SEQ ID NO: 139005 - protein, 346 aa, unidentified
MMIIGCDFHPSWQQIAWLDNETGETGECRLVHAAGEAQKFYAQLAVPSRIGMEATGNSQWFIELVEDLGHEIWIGDAAQIRASYVRKQKTDKRDAAHILKLLLEDRFPRLWAPNREQRDLRQLVLHRHKLVGIRARVKNELQHLSMNKGMQRKRRLWSEAGMQRLRELRLKPWAACRREDLLQLLASLDQQIGKLDQAVQLAAEQHEQARLLMTQPGVGPNTALAFVLTVGDASRFRRGKQVASYLGLIPREESSGGRQKLGAITKQGNRLVRSLLVEAAQVAVRYDPGFRKHYLHHCHQKAKAVVKVAVARKLAVRLYWMLRTQVGYPEIVRIESSSRVARVGES

SEQ ID NO: 139006 - protein, 344 aa, unidentified
MITIGIDPHKASLTAVALDATGRQLAVRRVAVNAGTYKTLMGWAARWPQRRFAVEGAAGLGRGIAQLLAGGGEDVVDVPATLAARARLLDTGGARKSDPADAASVAHAAMRHKRLRAVVAEDHTTQLRLLAERRDDLAGERVRVLNRLHVLLRDLIPGGAPSDLTADKASALLRGVRPLTATDACRRELARDLLADLRRVDRQLSANQAKTSQTLAVTRSTLTEIHGVGPVVAGKILGHVGDIHRFPTIDHFASYTGTSPLDASSGDRRRHRLNTTGNRQLNTALHTIAVCQARDPGPGRVYYLRKIGEGKTPAEARRALKRRLANVVYRHLAKDQQRRPTVSP

SEQ ID NO: 139007 - protein, 430 aa, unidentified
MGRLKIVFPVCCGMDVHRDFVVACIAATNSQGVTDYKTKRFSTYTGELRKLALWLKENQCFDVCMESTGKYWFPVHNILEKDFHVVVSHPKFVKAIKGKKTDKKDAMWIADLFKHDLIRNSFIPPEDIRQLRDLCRYYQKLVWNTTGEKNRAQNCLTVSNFKLDDVFSNVFGKSASAILSQLLDHPGEDFDVASMMDKSCKASPQKVLEAIDGTFSPWQAEKLRIIRTHISNLDDLRDALHKLIFKLAEPYSRQIELLLTVPGISDPMTAIRVISEIGVNMKQFESSKHLCSWAGLTPQNNESAGKKKTTRIGKAGQYIKPLLLQCAIAASNPRSHRYPEILAKYQILKKRRGTKKARIAIARRLLTAIYHMFLNDSPYKPFDSSAKESSPADRVISLQQAIAFLTRKGYVIQNVTVSSGLPLVEAAPSS

SEQ ID NO: 139008 - protein, 430 aa, unidentified
MTTGWKRGDLQNTPPRACVVKRRARRHVHKSPHRCKKPSYLIQCYLERTSHCGCAKTKATDRRAKMNNVYYTTIGMDVSDRTTKVCVMAKAGRDPRIVMETTIPTTKDGLARFLSTQDVASPVAFETGTHCRWMNEVAQGMGFKVYVANPCRLRMVTDSKAKNDKNDARMIARLALADPGLLHPVRLRGAEYQRMINLHEMRGLLVKQRNGIIVQLRAVAKSMGFRIAKASAASFHNLDRAAWPKELRDIAWPMLKNLEQLAVTVKTYDKLIRELAGTPAFKAQVDRLMEIHCVGILVATAFVAVTGGDMDRFERPRDVGPWSGLAPKQDQSGDVDRQCHVTKAGSPLLRRLLVESAQLIMRDCSSDTDLKAKGLRICARGGKIARRKAVTAVARSLAVMMAAMLKKPDAPYVPLSERCEKELLAMRATV

SEQ ID NO: 139009 - protein, 359 aa, unidentified
MNYIFVGCDSHDKTLVTKIAINLEASEKKTFSATGSGRRKFIQYLAERAKGGAKVVVAYEASGNGFILCDELRAAGFDCHVLAPTKIERSTKQKRNKNDDRDADRLLEILRGHYLAGNRLPSVWVPDVQTRDDRETVRTRQDMSQKATAVKTQIQMLLKRNGKEKPEGIGKGWSKSYRQWLKGLAESGRERLGMRTALGSLLRQLEFLEDEIERLDQAMQQLADSPRWKPITEALMKEKGVGLNTALKFATDIADFSRFRRGRQIGAYYGLVPSSRESGENNDRKGHITREGSPSTRQILCQSTWARVRHDEKEREVYRRLTARNPKKKKVALVACMRRLSVRLWHVGLQAQLKMKMEG

SEQ ID NO: 139010 - protein, 364 aa, unidentified
MDVHLRSTTVCALDAETGEAVTRRFRGNPWGEVAEWMSGFPGPSLAAYESGYLGFAPQRELSGLGVDCVVAAVSKVPRSAADLSSKNDRNDAARMAKAILSHDVTPVWVPSPEIEGLRDLAGAHDAATARLAAAKQRLLAFLARRGYAYGGTTPAGNPRRYWTYDFLRWLDKVRPADDGGIRALAALRNEVEAAAETRDDLLAEYRAAVAAGPLSAEVEALQSIKGCGFALAAAFASEVGDFSRFRSGRQVTAYFGLAPKQRSSADSVRLGGISGAGNALVRKLAVEGSWSYVQASHQPKLMPKGSGVPLEVRMHGRKGSERLLRRREEMLARGMPQAKANAATAAELVRWLWALGAMCREATE

SEQ ID NO: 139011 - protein, 392 aa, unidentified
MYEQFCGIDISKDSFDITFIDNNAKVKLQNKLTMDKKGFDTFLEYLSSYSKDKLLISMESTGIYHLPLLSFLLDNSFQCVVVNPLLIKSFISSTTLRKTKNDKLDSTSIALFTLKTHHSLHLATFDAIENIRPLIRERESLSKEIAKLKTEIKANLIQLFPELLHINIFTKSILNMLLKAPSAKSIRNFKKHKLQKLLDTHSGNKAKISAVDIISMANSSIAISDKYLETVLTSKIRRLFSIQDELSFLDSELQNSLEDTDINNDIDILQSIPGIGSVTSNNFMVEILSIDKFHSVKQLCAFIGIDPSIKQSGSSINISGNISKRGNSYLRRTIWQMAIGTIRSCDKFKSYFTKKRSEGKSFKQAVIATANKLLRTIFTLLKYKTKFNPNLA

SEQ ID NO: 139012 - protein, 392 aa, unidentified
MIYVGIDIAKNKHDCCILGMEGQILFDSFTFPNSKSGFQELTSSIQACLQKANEKEVRVGLEATGHYSTNLVAFLRNSGIEPVLFNPLSTNLFRKSQTLRKTKTDKVDARCIASMLRSANPAPHVSVSYHTDELKALTRSRYRLIGYRSKLKISLNRLLDIVFPELAGLVWSTNQKSVYALLLELPNTNAISHCRMDKLTRILHDSSKGKYDREKALLIRQAAMDSIGSNSPALALEIRQTIHLIQNVQVEVDQLEQVIENEVKSTNTPLLTIPGIGYTLASIILAEIGDIDRFDSPEQLLAFAGLEPSTHQSGNYSANHTPMVKRGSTYLRWAILQAARLVAMRDSTFKAYLKKKRHEGKHFLVALSHTGKKLVRVIFHMLKTNRVFVPQS

SEQ ID NO: 139013 - protein, 412 aa, unidentified
MKTYILRHPHPVQRQSRRAFTPAAEVRPAPRCGPALCIGLDVHTDSIAVSLAPSDSSEVRRYGLIGGTHDDVLKLAKKLQAAHPGRELRFCYEAGPHGYPLGRCLQRHGYACILVAPSKVPRQPGDRVKTNRRDADQLARLYRAGELTAIYVPDPQDEAVRDLLRARGQVQRQQHRARQQLKMFLLRHNFRYAGTKPWGQKHLNYLATLKMPFPEQRFVFQEMLDVITEATERLERYETQLPRVVAGWRWAPVVKAMMSLRGVALLTAATLVAELGDLHRFATARQLMGYLGLVPSEDSTGNERRQGGITKMGNGLARRALIEAAWHYRTPARLSRELLKRQQGLPQAVKELAWNAQTRLHHRYQHLTCVQHKQSTVAAAALGRELSGFVWALGRMVRPHPPQPEPAPPAAA

SEQ ID NO: 139014 - protein, 343 aa, unidentified
MEHYAGIDVSLELSSVCVVDATGRMVREAKVASEPEALIGWLRGLGFELARVGLEAGPLSQWLYAAMRDAGLPVELLETRHVRDAFKAMPVKTDRNDARGIAQLLRLGWFRPVPCKSVSAQETRVLLTTRKLLQRKHLDVEMSLRGVLRGFGLKVGRTPPRSFAARLRELVEGHATLIVVAEALLAAREALGAQLRDLEKRLRDQARADERVQRLMTVPGVGVIVALTFAAAVDDPGRFRSSKTVGAQFGLTPKKSQSGEKDVTGRISKIGDAGVRTMLYEAAQVMLTRPVKGSELKSWAARIAKRAGLCKATVALARKLAVVMHRMLVDGTPFAADRAAAAA

SEQ ID NO: 139015 - protein, 346 aa, unidentified
MTMLAELVDVVIGVDTHRDTHTAAVVMAPTGAAIATATVSADPVGYTALVALADRHGRRRAWSIEGTGSYGAGLTRHLTGIGEHVIEIERPNRARRRNGAKDDTIDAVRAGREALARSDAAQPRAAGQRAALATLLAARRSAIDAATDAQRQLNALAITAPETLRTRLRGQKTRALLNTAAKLRIQSRWDLETTTAAATMRSLARRSAALEAEAAEHEAALRSIVERWRPDLLDQTGIGPIVAAAILCAWSHPGRFRSEAAFAQLAGVAPIPASSGLTTRHRLNRSGDRQLNRALHVIAIQRLRLDPRTIAYRDKRRADGKTDREIRRCLKRYIARDLYRMLEHPA

SEQ ID NO: 139016 - protein, 357 aa, unidentified
MVTGLKHQMEKRSMEHFAGLDVSVNETSVCIVDDAGSIVREVKVASEPDALLAVLKSGVYRFRRIGLEAGPLSQWLYSALGEAHLPVICVETRHMRAVLKAQINKTDRNDARGIAQMMRAGLYRPVHVKTLRSQKLRMLLTHRKLLQSKAIAIENDLRGTLRNFGLKVGVAGAVKFEARIRELVKDLADIATLVEPLLVVRRTLREQLGILHRHLLTIARDDEVCRRLMTIPGIGPVVALTYRASIDVPARFRNSRAVGALVGLTPCKYQSGESERTGAISKCGDEMMRVMLYEAAQILLMRSTQWSWLKAWAMQIAKRRGMKKAIVALARRLAVVMHRIWVDGTEFCWTREEAVAT

SEQ ID NO: 139017 - protein, 371 aa, unidentified
MNDFSKYVGLDVHKETIAVAVADAQGGEVRYYGEIANTPEEVVKLVRRLGKEGAKLSFCYEAGPCGYGLHRQLKALHQNCQVVAPSLIPKKPGDRVKTDRRDAMTLARLLRAGELTPVWVPDEAQEALRDLTRGREDMKHLQRVAKQRLSAFLLRQGRRYPGKKNWSQAHFRWLESLKFEQPVQQIVFQEYIDTVQALTRRVAAFDAQIESAGTEAVFFKQIGGYMALRGIDRLTATTIVAEIGDLKRFPDAPGLMKYLGLIPSEHSSGPTKSRGGITKTGNGHVRRVLVEAAWTYRHPARKSPLLQRRAEKASEAVQAIAWAAQKRLCARYRMHEGRGKKKVLVCTAIARELVGFIWAIGQTLPAPETKA

SEQ ID NO: 139018 - protein, 392 aa, unidentified
MTTFVGIDIAKEVHWVCAIDVAGAVLLNRKLLNTPEDLLRLTDELRQLAAPVRIGIDVLGGIAALAQAVLLDAGLAVVHVPGLAVNRARQGTVGGESKSDPRDARVIADQVRTRVDLRGVTAQTELDIELRLLVSRRQDLTTDQTRRLARMHDLLVGIFPELEHTLDLTSKTALTLLTRYVTPAELRSAGADGVAAQLGSLARRSFGQKLVEAALQCAERQRIAVPGQTLTARLIKELAIEALANIDRLKALDAEIEQRLALHPDAALILSLPGMGAVLTAEFIAQAGSIQRFKSADSLAAAAGLAPVLKQSGKTRWLKRPSGGSKGLKRVFYQSAFASLRCADSRAFYARKRQEGKRHHQALIALARRRVNVLWAMLHSRQPFIASVKKSS

SEQ ID NO: 139019 - protein, 407 aa, unidentified
MEVVYRCCCGIDVHKKVIVACLVNGGEQELREFGTTTSEIKTLANWLTESGCEMIAMESTGVFWKPLYNLFELMDLDAMIVNAAHMKALPGRKTDVKDAEWIADLLRHGLLKASYIPNREQRELREITRYRKSLTEERCREVNRLQKILEGANIKLDSVVKDITGKSARKLLQRIIDDDIPDSDEVSKLVHGRMRPKLEQIVASIEGITTPLQRKLLAQIIDHIDDLSRRIGELDKLVQEYMAEYEAAIEAIDEIPGIARRSAEVILAEIGLDMGRFPSAAHLCSWAGVCPGNYQSAGRRKHGKTTKGNKALKTILTQCAKSAKTVKSSYFFAQYQRISARRGKNRATLAVAHSMLIAIYHILKNKTAFHDLGSDYYDSFNRDRKINSYLKRLKALGWEPDAIPSSA

SEQ ID NO: 139020 - protein, 371 aa, unidentified
MSSIIYVGMDVHTTNYTICCYSITTDKIFAQATTEPDYKHIVKYLAQLERELGGDCHFLCGYEAGSLGYSLYHQLTRSNIECVIMAPSTMAVPRKKKGIKTDKRDACNIAKCLAYNTYNHVYVPTGEDNAVKEYIRMRNDMKDTLKRIKQQTLAFCTRHGKRFTEGRTYWTRKHLDWLKKLDFGDSILQETLREYMTLYHQAADKVELYDKRIEELARTERYEEKVRKLSCLIGIKTHTALSAIVETGDFARFPTARQYASYLGLVPGEDSSGDTVRRTGITKAGNSHLRKLLVEAGQCYSRGAIGAKSKTLKARQAGVNPKAVAYADRANERLKRKCYRIMFNSKRNIAVTAVARELACFMWGMMTDNVA

SEQ ID NO: 139021 - protein, 427 aa, unidentified
MSYVKAAVDVHKKMLAVVISDVSVEDEFEFTKRKFGTTPTQLRQLAEWFIENKVEEVVMESTAQYWRPVWAALERYWKPVAQKREGAGPKSGSLHLCQAESNKAPRGRKNDYRDGIRMLKRLEAEELRLSLVPDPEQRLLRTVTRRHYQLTRAKVTFRNQLESLLEQGHIKLSSFVSDLLGVSARRMMRAIADGETDAAKIAALADGRLRATPEQLRDALGACAEMSGLLRRLLDLALKELEMIEEHMVKLEQEAMELLKGKEEVVERVAAIPGFGVTSAIQVIAEVGHDALAFSSCKKLSSWVGVCPGDEESGGESKSSGSPKGNRQMRRILNQAAHAAVKVKGSIFEIVFRRLKSKPNFGYKEAIWAIAHRLCRVLWIILHRGANYEERGPAVSAKSKRTRESRMIRELRKLGYRVEKEPTPAHA

SEQ ID NO: 139022 - protein, 416 aa, unidentified
MAEEVEWFVGVDWGSQSHQVCLVDARGECLGERAVAHGGLGIEELCDWLIARTGAAPEVIAVAIEVTHGPVVEALLERGFCVYGINPKQLDRFRDRFTVAGSKDDRRDAWVLADSLRTDRHAFRRLSNDEPVIVQLREWSRMADDLQQERMRLASRMREQLWRYYPQMLEIADDLAADWFLDLRQRAPTPARAGRLRPTTIERFVRTYRLRRWQAPEVLRILKQKPLSVAPGVVEAASQHIGTLTARIRLVNQQLKAAHRKLDDLCAQLIPSAEDQPGQQCPHRDVAILRSMPGIGRTILAVLLGEVWQPLRRRDYYALRTLSGVAPVTRRSGKTCVVVRRYARNKRLEHALYHWARVATQHDACSRQRYGALRRRGHSHGRALRTVADRLLSVACTLLEQQTLFDPAYQVRDAAA

SEQ ID NO: 139023 - protein, 318 aa, unidentified
MTNYIGIDISKRDFHACLGEDSEVVIFNNDTTGIKQFIKHLKACKYTTKNTLLGLESTGSYHLPVAYLCTQSGYTIHVINPLITKKQNQVSIRRVKTDEKDARLIRHCLLNGAGYPFQETAESLALKTLVRQRSGYSMLRHRVRLRQEEVLKREDYLSISITTLNQELYDFLDIRIKDLDCILRKYNSKTQKLLQTIPGVGPQTAVTCLSEIGDITRFSDAQKLTAWIGLDPRVHQSGTSINGKGYITKRGNKLLRTRLFNAASVAVIHPPNIFYEFFQRKRSEGKPYRVALCAVMRKMVHVIHAVWSRETPFVNKFK

SEQ ID NO: 139024 - protein, 344 aa, unidentified
MEYSAIDLHLRRSQFRIVGEDGAVVREGKIDTSRADLSRVFGDRPRMRILVESSIESEWVARHLEALGHEVIVADPNYAPLYGSRSRKVKTDGRDTAALTEACRTGIYRRAHRVSAARRAQRQELRVRRHLVQMRSRSIGLLRALLRQDGWRLPRGSAEAVDARLERLRLPTGLATILTPLRTWLKELNALLDAADRAVEAQAAADPVAAHLMTAPGVGPVVALTFEAVLDDPARFGGEAARASAFLGLVPSEDSSAERRHKGHITKTGPSELRALLVQASWVIWRGRSAAGAALRAWAQALAARRGRRIAIVGLARRLSRILFALWRDRSNFHVEGGRPLVAA

SEQ ID NO: 139025 - protein, 403 aa, unidentified
MNAVGIDVSKGKSMVTILRPFGEIVSSPFEIKHTSSDILSLIKLIHSIEGESRIVMEHTGHYYEVLAQQFSAAGLFVSAVNPKLVKNFNNDSLRKVKSDKADSIKIARYALDKWQNLKPYSIVDELRTQLKVMNRQFHFYVKQKTAMKNNLINLIDQTYPNANTYFNSPPRSDGSQKWVDFVYTYWHVDCVRKMSLNSFVKHYQNWCKQKKYIFNKSKAEEIYTKATELVPVFPKNEITKRIIRQAIAQLNSTSATVETIRILMNETASKLPEYPIVMQFKGIGPSLGPQLMAEIGDITRFTHKGALTAFAGVDPGVNESGSYAQKSVPTSKRGSSNLRKTLFQVMDVLIKTMPQDDPVYQFMDRKRAQGKPYYVYMTAGANKFLRIYYGRVKEYLCILSESS

SEQ ID NO: 139026 - protein, 347 aa, unidentified
MKFYNQQHKFYCGIDLHARKMYVCILDQKGRTKVHQNIDTDPKTFFELIFPYIQNVVVAVECVFCWYWLADLCAEHKIPFVLGHALYMKAIHGGKTKNDKIDSYKIAALLRGGNLPMAYPYPAKMRATRDLLRRRMHLVNKRAELLAHIQNTNTQYNMEEIGKNLGKKCHRRDIAQRFDDPATQLAVQTDIELINFYDQLLPKIEAYIERCAQQHDPNALYRLRTMPGIGYILALSILYEVGDITRFQTVQDFCSYARLIRPKKESDGKWAGTSNKKIGNHHLKHAINEAAMLFLRRSEMGQTYRLRLEKQHDKGKSYGIFTHKIGRAVYFMLKNNKPFNAKKFFGS

SEQ ID NO: 139027 - protein, 337 aa, unidentified
MNIVFLGIDLAKNVFQLCGLNPAGKPVYTKRTGRKELLQTLANIPACLIGIEASTGAFYWQREFEKLGHKVKVISPQYVKPFVRGQKNDGNDAQAITVVLMQPTMQFVPPKSPEQQDIQALHRARQRIVNHRTATVCQIRGLLLDRGIPIGSAVSRARRAIPLILEDAENGLSSRMRRTIAELYDLFNDLGRRIHFFDKEIETVFRQSEACQRIAKVKGIGPKTATAVAAIGKGTEFKNGRHFAAWLGLVPRQHSSGDRQVLMNMTKKGDKHLRTLFIHGARAVVRVATNNNDGHINQWVNQLKERRGFNKTTVAVANKNARIIWSMLRNETGYQVV

SEQ ID NO: 139028 - protein, 315 aa, unidentified
MKNCIGIDVSKNSFDVYCTHNEEHSSYANSSSGIKDFVKYCQKQEPELIVLEATGGYESLLVSVLIAKDFIVSVVNPRRIRDFARATGQLAKTDKLDAKIIAKFGATLEPRPYTIIDKQRLVIKELVVRREQLVVMRTAEKNRMDKAFNKVAYNSNESIINVINKQIDKIDKAIADHIDKMPELKQKAEILESIPGVGNKTASMLVATMPELGVLNRGQIAMLVGLAPINRDSGKMRGKRATGGGRKNVRHKLFMPALTIVRYNPALKIFYERLVAKGKPKKVALTATMRKLVCIMNVMLKNNSVWENRLIIKDA

SEQ ID NO: 139029 - protein, 408 aa, unidentified
MNPLYVGIDVSSKNNVIYLMLPNGDKHSSFSLANSHDGSTQLVKRIFTAMTSNNIDSVLIGLEATSVYGDNLVYFLKEDTTLASFDRKIHVLNPKQVNKFKESYNDLPKNDYVDAFVIADCLRFGRINKEVYMDDYRYKALQNLTRARYFAVTNLTKEKQRFINVLFKKYSTMTQEKVFSDTFSTTALAVYEKFESAETLAKMDLQELTAFIMEKGKNRFPDPDAVAKALQKAARSSYRLPKTVNDSVNQVLAISITSIRALESQIKAFDKAITKQMELLPNVLISIPGIGPVLSAGIMAEIGDINRFQNQAALAKYAGLAWQQHQSGDFEAQTTRMIHSGNRFLKYYLCEAAFSLVRCDKEYNRFYHIKYKEVNRFQHKRALALTARKFVRLVFALLKDNRLYRPAE

SEQ ID NO: 139030 - protein, 321 aa, unidentified
MNKNTEIFGIDISKDVFDVYSHQKGHQSFKNDAQGFKSFLKVITKDALVVMEATGYYHYLFAQFLHKKKVQVSVVNPLSVKRFIQMKLAKVKTDKSDAKAICEYGQMNEVPLYTALTDVQAECLQLFRLLDNYLKKRTQTKNKKHGEEVLGIPSKYVYGSLKRDLKHLDKEIKGIEARLLELVKKDQQHQLTLLKSIPGMGMKTALFLIVVTDGFSKFETASQLCSYVGITPTIRESGSSVRGRSRISKVGNKKLRNLLFLCAFSACKHNKACREIYERIVNKGKSKKLALIAVANKLLKQAFAIAKSGRPYDENFVSKLV

SEQ ID NO: 139031 - protein, 340 aa, unidentified
MEKASMIGLDIAKNVFEVHGRTAAGEVVVRRSLKRGQVEKFFTTQPKAVIGLEACGSAHYWARMLGQLGHEVRLMPPAYVKPYVKRNKSDAIDAEACWEAMNRPNMRFVQVKTAEQQASLSLHRSRELLVRQRTQLGNALRSLLSEFGIVAAKGRTGLACLVDELRAGTLALPQEAVFAALTLADQRAALELSIKQLERRIVAQAKADGRTALLQTAPGVGPLSAHATLATVPDPAVFKSGRDFAAWLGLTPRLDGTGGKTRTGHITKQGDQTLRRLLVLGATAWLRQVRANPGKGSAWLRGMLARRPFKVVANAQAARTARILWAMLTHNQPYRAPAIG

SEQ ID NO: 139032 - protein, 325 aa, unidentified
MSNIILGVDISKATFDVALLNDNKVKTKKFTNTSKGFSELKQWLKNKEIDTAHVCMEATGGYEAKLAEYLYDNNFKVSVINPARIKGFSMSKLSRVKTDKADSELIARFCQAMKPDLWQPTPLHIQELQQWVRRLDSLIANKNQENNRLDGASKAVTINISTHIKFLNKQIKEVEKLISNHIKRHKGLNDKSKLLDSIPGIGEKTIGVILAFLSVESFDSAKQVAAFIGLNPKARQSGSSVRGVGRISKTGDADLRKAFYMQAVVSIRFNPIIKNFAERLSDAGKPKMIVVIAAMRKLLHIIYGVLKNKTPFNANIKTISIDDFR

SEQ ID NO: 139033 - protein, 348 aa, unidentified
MSQELDTAIAVIGIDIGKNSFHVVGHDKRGAIVLRQKWSRGQVETRLANLPPCLIGMEACVGAHHLSRKLQLLGHDARLMPAKYVRPYSKGQKNDFRDAEAIAEAVQRPTMRFVATKTVEQLDLQALHRVRERLVSQRTGIINQIRAFLLERGIAVRQGLRFLRAGLPDILATRGDVLSPRMLRVVEDLAEDWRRLDARIEGLSSEIAALARQDQACVRLMTVPGIGPLISSAMVAAIGAGEVFSKGRDFGAWLGLVPKQISTGDRTILGKISRRGNRYLRVLFVQAAWVVLIKPSSWERHGLKPWIEAARKRLHRNVLAIALANKLARIAWAVLNKERAFETASQPA

SEQ ID NO: 139034 - protein, 347 aa, unidentified
MRFYNNQHNYYCGIDLHARLLYVCILDSLGNKVLHKKIDADPDALLELITPYQDNIVIGVECMHCWYWVSDLCLDYAFDFVLGHALYMKAIHGGKTKNDRIDSYKVASLLRGGNFPIAYVYPKAMRATRDLLRRRTKIMRHGADLKAHVANTFSQYNQQSHNVQLRYPCAREQVRNQFDEPSINRSIDMDLNVIAFYTKELASVEHFIEKTAKQHNAQDYNLIQTVPGIGRILALTILYEIGNIARFPSVQNFASYSRLVKCKAESAGKQKGTNGNKIGNAYLKWAFSEAAVLYLRGNEPAKKYIQRLQKRMSKAKALSALAHKLGRCVYFMLRDKTVFDEKRFLSQ

SEQ ID NO: 139035 - protein, 343 aa, unidentified
MDHFAGLDVSVKETSVCIVDDTGRIVREVKVASEPEALLQILSNPAYHFKRIGLEAGPLSQWLFSALAEAGLPVICVETRHMRAVLKAQINKTDRNDARGMAQMMRAGIYRPVHVKTLRSQKLRMLLTHRKLLQSKAIAIDNDLRGTLRNFGLKIGVVGKVRFEARIRELVENLPDLAALVEPMLVVRRVLREQFVILHRRLLAIVRDDEVCRRLMTVPGVGPVVALTYRATVDVPARFRKSKSVGAVFGLTCFKYQSGESERSGRISRCGDEMMRVMLYEAAQVMLTRTNKWSWLKAWAMQIARRRGMKKAIVALARRLAVIMHRIWVDGTEFRWTRDVATA

SEQ ID NO: 139036 - protein, 368 aa, unidentified
MKQQTSCATETHNKSSKTIDYTGKTIHVGIDVHLKDWQIASVNETVVLGNHRMEGKVENVVTHLQKKFPGAIFKCVYESCAWGFELQRQLTARGMECIVVHAADVSGSDKERKRKTDKVDAVKLARYHAAGLLQGIYVPDEELQKQRNLVRFRCKLTRDLTRSRNRLKSLLKYQGIETPKQFGKARWSRNFLNWVEQEAQKDIVLKDTLLFMLEQVKFLRQLLLEVERKLRVLMNSEKYNDSIKLLMSVPGIGRTIAILWLLEIGDVRRFENIDRLNAYVGFCPDTNSSGETQHDRGISSRRHNQLRVNLIQAAWQAIRTDPAMLETYQQLIKRMKGTQAIVRIARKLVRRIRAIQLHATLYQKGVIE

SEQ ID NO: 139037 - protein, 392 aa, unidentified
MYIVGIDIGKNHHEASIVSPEGKQIGRSLRFATTHKGADSLMSFIFKNIGNSPCVFGMEATGHYWYPIYSFLKAKGYTICVINPIQSDSLRKMYIRQTKNDSIDSFLIAEVIRFGQFGTTSMADENILAMRQLCRYRDSVISSRTEIKLRIGTIMEQIFPEYEKQFSSLWVSTSMGILEKYLTPENIENAPIDELFEIIKDKSHNKLTMKKAFSIREAAADTFGIKIAQDAFSFQLKQLIDRMNFHDKQIEALDIEIMKYYEQFDCYLHTIPGIGIIGAATILAEIGDISRFKNSSALVAFAGIDPTVRQSGEFNSTHNHMSKRGSPYLRHAIFLAATTCSFHNSPLNAYYKKKRDQGKHHLTATGAVARKLTTVIYAVLRDSKPYEPKKFC

SEQ ID NO: 139038 - protein, 331 aa, unidentified
MQARGTMEEPGTADRLVDCFVGIDVAKRQLDVHILPSAHTFSVARDAAGLERLVSTLRPHAPRLIVMEATGGLEVVVCAQLAAAGLAVAAINPRQIRAFAVALGRRAKTDRLDAAVIASFAERVRPDPRPLPDATTQALGELVTRRRQIVGMITAEGNRLQQGVDQRLQKRLKAHLVWLQRELSSIEDDLDRAIRNSPIWCAQADLLTSVPGVGPATARCLIAELPELGQLDRRRLAALVGVAPISRDSGARSGTRQIGGGRARLRAALYMATLVGVRHNKALAACHARLIAAGKRPKVALVACMHKLLLILNAIIRTNQPWHDDHSPASI

SEQ ID NO: 139039 - protein, 420 aa, unidentified
MDEITEERGALVERVAALDIGKASLTACLRVPHEGKAGARRQEVRTFATLTPALLELRDWLICQGVTLVVMEATSAYWKPPFYLLEDDIECQVVNARDVKNVPGRPKTDKLDSVWLCKLAERGMLRASFIPPRPQRQLRDLTRYRRTLTHERTREKQRAEKLLEDAQIKLSSVISDIFGASGRAMLAALIAGQRNPHELAALARGSMRAKTSVLQEALTGHFTEHHAFMLTMMLARIDALTAQIDTLTTRIEQAIAPYAAQVAQLDEIPGIGVIAAQDLLAETGADMSRFPTPGHLVSWAKFAPRARQSAGRSKAATTGKGNPWIGGTLGEAATSAARTKTFLASRYKRIARRRGKQRALVATGNSLLTITWHLLSDPAARFTDLGPDWHDRLAPLRRKRQLITELERLSGKKVTLHDAA

SEQ ID NO: 139040 - protein, 426 aa, unidentified
MLNSQINKIQAITSDTLIVGVDIAKNIQWAQFINFRGIEVSKHICFENNYSDFNSIMEKIEEIKSKNNFLSVIVGMEPTGHYWKTFATFLHNNGIKVVQVNPYHTKKAKELDDNSQTKSDKKDALVIAKLIKDGRYSAIYFPEGEYANLRNLSNTRLEVSRLLNICKNRIHTCVDEYFPEFETVFKSFIKGKVALHILKRIPFPTDILELTLEDIISVIREAAKKSVGKKKAEELIRAAKVSIGVKVGLEGARIRLNNLLEEYELYHNQLEKIEKEMAQELEKTGYKDILTSIPGIGIISAASFIGEIGDPKRFSNPQQIIRLAGYNLVEDSSGKHKSKTMISKRGRKILRMILYKISLIVVCKNQEIKLLYKYLITRKENPLKKKQALIVISGKMVKIMYSLIKKEEVYDKEKVLGIYRKQQIVA

SEQ ID NO: 139041 - protein, 483 aa, unidentified
MKSKSEEQNKRATNHPTQHHWHEMNRKQRREMMRKMQTEDLSLEVIHPDAAGIDIGNESHYVAVPPGRDSQSVREFGCTTAELKAMAAWLKQCRIRTVAMQSTGVYWVAVYDILEQAGLEVYLVNARDTKNLPGRKSDVQESQWLMKLHTYGLLRNSFRPSQEIRVMRTYWRQRNDLVQSAGRHILRMQKALTQMNLQLANVLTDISGATGQAIIKAILAGERDPHKLAAFRDPRVKASEEQIAQSLEGNWQEDLLFVLKQEHEGYEFCQKQMAECDRQLQQYLQQREDRSHGAPLPEEKRKGRLKKKKGNAPQFDLREGLFRMTGTDLTRIDGIDVMTATTVISEAGYDMGKWKTEDHFVSWLRLCPDNRISGNKVIGKGRLPTNNPISIALKMAASTLRESKTYLGAQFRRLRTRLGAPIAIKAMAAKLARLVYRMLRYGMKYVDQGAAFYELRHRELQIKRLKSKAEKLGYRVTPIPAAA

SEQ ID NO: 139042 - protein, 388 aa, unidentified
MTVVFGIDVSKDTSAIAENVDRVLVWQSKINNNWFGFQELLKRLQEYSEPQIVFEATGVYSKRLSRFLEENGYRYTMLNPLAAKKQLDGLRTRKTDKNDAVNLADTQFIFERRLTYYQKPVYRDLMDLSRFYEQINSDLVTEKNRLHKSLQMTFPELEGILDKPSGKLYWHIVATMPHPDLLNNMTVEELATQLKESGAHISVTRATIIAKKLFTLGQASFPGSVVEAPDVDETRYHSEQVARLDTKKNEIIAKMVKLAKPLPEFEVLMSIPGFAEKTVVRLIGELGDIRRFGSSNKLNAFVGIDLRHYESGNFIATDHISKRGDHIARAILFRAIANIVSAGRYQPSRVNDYYREHKKKLPKVNGKAWAQRKLPSLQWVAYYVRFTT

SEQ ID NO: 139043 - protein, 443 aa, unidentified
MSFYRLKRTQRRKRLLGHKLKPSRATLFVQNSKPHLSMKPTYFLGIDAAKHKMRATLSNRSEHVLFEKDLSVEATGLRQLLAAIKRQLNDPEQLLVLIEATGLLHLNWSAALTKAGYAVAVINPLIARRLYTLQNSIRDNKSDPIDARGLCTIGLLHGEKLLVHYRFSLRPEQFTLQRAQSVRKALRSALTNLKKTYQSLMDLSFPELGGLLQLDGVGIRQLLIQAPTPAAIAGKRLCTLEKNWMVRPKAAALKVLAADSMADPGLAAASGPALVALLQSVAAMEARLHALDQQIAKLACTSVDPQTKALIETIPGFGPVNAAKTLAWLPTEILHSGSNRKVAARLQAFRGNDPRLRQSCQCKGHTKMSKRGVEMLRTAFFQSAFSAAHNDPKLRAYYQGKRAQGKTHQVARSHLMRILTRRLVAVLRSGKPYQSHYNLKNAA

SEQ ID NO: 139044 - protein, 343 aa, unidentified
MDHFAGLDVSVKETSVCIVDDTGKIVREVKVASEPVALLAVLTPAYHFKRIGLEAGPLSQWLFSALAEAELPVVCVETRHMQAVLKAQINKTDRNDARGIAQMMRVGLYRPVHVKTLRSQKLRMLLTHRKLLQSKAIAIENDLRATLRNFGLKVGMVGTARFEARIKELVENLPDLVALVEPLLIVRRVLREQIVILHRRLLAVVRDDEVCRRLMTVPGVGPVVSLTYRATVDVPARFRKSKAVGAVFGLTCSKYQSGEIDRGGRISRCGDEMMRVMLYEAAQSMLRSKKWSWLKAWAMQIARRRGMKKAIVALARRLAVIMHRIWVDGTEFRWTREQAPAAA

SEQ ID NO: 139045 - protein, 393 aa, unidentified
MDKQQKLIVGIDIGKHYHQATVIDETGNMLGGSVRFPNTTAGGELLLKRITSVNPTDLPLIFGLEATGHYWLPLYAYLTEKGYQIVVLNPYQSDAFRKVSMSSTKTDKEDALLIAELLRFGSYPQTKMADEDMIALRNLTRFRLTLNQQVTDSKRRILTILDKIFPEFESMFSDIFGKTGRSLLKRYPTPEEMETVSLRKLTSLITKLSKGHFKEEKAQEVKMKAKTSFGITLALESLTLQLKLLLETLEFTEKQLKVVDIQVEDLLPDTCVLLTLPGISKVLSAAIISEIGDIKRFRTSAQLVSFAGINPTVRQSGNFLGSRNHMSKKGSPYLRLALWQAAITSSRFNPILKEYYQLKVKEGKSHMTVIGAVARRLTGIIFAMLRDQTAFTV

SEQ ID NO: 139046 - protein, 322 aa, unidentified
MKTIGIDVSMDEIDLAICEKGKSSYYGKMKNNRQGFDKIVKLVEKNKIDLVVMEATGVYHFQIADYLYDKKVKVSVVNPLIVKRFCQMKLSRAKTDKKDSTLIALYGYQEKPRHYQPRSKEEEELKSLYGLRKDLLQTLNQTKNRIHALEKKTHEQVFCIASLEKVEEILKQELREIENKIKEILENDFKEENDLLQEVPGVGLIGKAGIIGILGSFKYFENHKQVSAYIGINPSYRQSGKSLNCTERISKKGNGDLRTIFYMMALSAKKSNKACKIFYERLVEKGKSKKQAIIAVANKLIKMLMSILKNKKRYDENFVSSK

SEQ ID NO: 139047 - protein, 387 aa, unidentified
MRAVFGIDVSKASSEVAILVNGEKVHGYTISNDALGFARLLGDLKTVHKPEIIFEATGVYSRRLQAFLEDNGYAYTRLNPLEAKKQLDSLRVRKTDQIDAEKLAQSQFVLNRKPTYVQEEVYQELRDLSRFYQNLTEDIVRAKNRLHKVLQVTFPELETILSTPTGEQYGNLVVAFPCKDFVLDLSKDELSESIRQSTSKRISDKRVAYLAEKLIALANQSYCAVKKTSPMLEEVRYYAQELLRLSERRKAVLDQMVELAQPLPEYDILLSIPGIAETTATSIIGELGDIRRFQSANQINAFIGIDLRHYESGNFLAKEHITKRGNPYARKILFKCIHNIASASHTNPCHIADFYENEKTIANDFNQAAHDCLHTSAHSDNVLPHYA

SEQ ID NO: 139048 - protein, 347 aa, unidentified
MNFYTQQHKQYCGIDLHARAMYVCILDQSGTSLVHKNLPTTPEAFLRVIAPYREDLVVGVECIFTWYWLADLCQQEGIAFVLGHALYMKAIHGGKAKNDKIDAHKIAVLLRGGMLPQAYVYPAEMRATRDLLRRRCHLVRKRAELLAHIHNTNSQYNLPEIGKRLAYKANREDVADHFPDPSVRKTIEVDVSLIDHYDKLLGEVELYITRSAKAHDVQTFSRLQSVPGIGQILALVILYEIQDIARFPRVQDFVSYCRLVKCAKESGGKRLGTSGKKIGNVHLRWAFAEAAVLFIRQSQPGKAYFTKLERKHGKAKALTILAHKLGRAVYYMLTREHAFDLTRFVTA

SEQ ID NO: 139049 - protein, 347 aa, unidentified
MKVLIGVDPHKASLAVAAVDEAKGALEERASFPQDRAGLRRLERWANRFPERRWAVENAGGLGRHLAVRLAAAGESVVDVPPKLSARVRVLSTGNARKSDELDALATALAASRNERLAEVEPEAASEALRLLSERREDLVAERTRALNRLHALLRDLLPGGVARSLSAERTARILRGIRPKGACARLRRRLASEVLRDVRTLDKKIADLNRRIEAEVKASGTTLTEIFGVGPILAARIIGTVGDVGRFPTSRAHFASYAGTAPVETSSGEAVRHRLSLAGNRHLNYALHMVALCQARSDARGGTYYRKKIAEGKSCKEALRCLKRRVSDAVFRSLLADSQAASRGAA

SEQ ID NO: 139050 - protein, 332 aa, unidentified
MNAVSTLGIDLAKNTFSVHGVDEDGVVTVRRTISRGKLAELVTRLPPCLIGMEACSGAHEWARRFAAAGHTVKLMAPKFVTPYRKSGKNDGNDAEAICEAVCRPNMRFVPIKSVQQQAELSLHRVRQGFVEERTATLNRVRGLITEFGYVLPNGVEQLRRQVSEVIDRLPARVARCVRDLLEHAERLRNKALEYEREIRTSLQHNELARRAHTRPGIGPITASALVATVGNGHDFKNGRQFSAWLGLVPCQYSTGGKTRLGHITKRGDPYLRTLLVMGARSVLQRAYRESDPLSRWALAVQQRRGYHRACVAIAAKNARVAWALLAKESAAA

SEQ ID NO: 139051 - protein, 349 aa, unidentified
MRVLVGLDVSLEKTAVCVISEHGRIVREAQVISEPEALLSWIGEQDGKIAAIGLEAAPLSRWLHRGLSEAGLSEGGLDVVLMETRQVKGALKAMPIKTDRRDAEGIARLLHLGWFRPVHCKSVSSQEVRAALSARKAVRQGVIALEMSLRGLLRNFGLKVGAISRGRFEHRLRELAAGNPMLEAATEPMLGARASLRQELAGLERQVRQLALEDSVCQRLMTMPGIGAVVALTFRSAVDDPARFTSSKKVEPWVGLTPSRNQSGERDVSGGITKAGDVNLRRALCQAATVMTNRGRSTWLRTWAAQIARRRGRRRAMVALARRIGAILHRMWLDGTAFRSEVPTAPQTA

SEQ ID NO: 139052 - protein, 478 aa, unidentified
MKQENIQRRENQAIREVFDRAGSLRKVMIVGLDYAAREHRAAFCNGQGDLLCKPVWVHNDRAGLAFVEARMAMLCSKHTIDPRNTVLGGETPGSWAVNFVHNLRRNGHLVIDLHAQDVKKHRENATTDNDNLSALTISQCLIDKKGREQLYTGLYCELRMAVRFHAKLVGEVTRIRNRIHSCADVCFPGLLDSDRSGVPAFGAACLWLLENHSPASVGGMRTDRLVAHLRKRGVGSADKAVTKLKELADQALPASEETRWANRWRLGCLIAQYGLLEGQERQAANEAARLLRLTPGALLTSVKGIGVKFAFQLTAELGDPDRIGNPAGKVNYFGLTEKSHQTGGGNKPRKKRGSQRRCNHFGKRAILGISDSVARWGPPEYRDFHMRRKLEGRNARYALGRKLLRFAIGVLKLPHVYAPSEFRDEPPDNPAWRVHLRALAEQMHKKWRAYPECSDPEHDVLGQWEEMARAVYKVDIGI

SEQ ID NO: 139053 - protein, 312 aa, unidentified
MSQNKTILHVGLDVAKLSLQLHLVNQFHTLANNKTGHRKLLKLLRDHPCAHVICEATGGYEQAVVGCLQSADIAVTVVEAGRVRYFARAQGLRAKTDPIDAAVLSAYGRTFAPPPTMPLTAQEQRLSSVTQRRRQLVQLLLTQRNYGEHYTDALQLRQSRQLIKLLEKQIDECEQVISQLIAEDVALSKKAQRLQSIPGVGPIVAATVLAEMPELGQISKTAAAALAGVAPYNDDSGDRRGKRRIAGGRRTVRTALYMATLSAVRHDRILKEFYQRLCTSGKAPLVALTACMRKLIVLMNRLLKNDQFQLAN

SEQ ID NO: 139054 - protein, 341 aa, unidentified
MKITTIGIDLAKNVFQIHGANEHGKPVLRKQLRRDQISVFFANLPPCLIGMEACGSAHHWARKLQEFGHTVRLMAPQFVKPYVKSNKNDAADAEAICEAVTRPTMRFVPIKNIEQQSVLALHRVRQGFVKARTAQANQIRGLLAEYGIVVPQGISHITTRVPALVEQAGDGLPGVFRHLMTRLLEHFKELDRQVGEIEVQIKLWHRNNEASRRLEAIPGVGPLTATAMVASIGDAKNFDNGRQLAAWLGLVPRQHSSGGKNNLLGMSKRGDSYLRTMLIHGARSVIYRIRQRPDAQGWLAKLVARRNANIAAVAMANKTARTIWALLAHQRTFQTDYAYAA

SEQ ID NO: 139055 - protein, 369 aa, unidentified
MPHVTSIGLDVHARSVAAAAFHPFTGEVVHRDFGTDAAEIAEWALGFEEPRACYESGPTGFHMARELRALGLDCAVAAVSKMQRPAADARRKNDRRDAEFIARMLATHNIVEVPLPDMAVEAARDLDRALDDATRELRRSRQRLNMFLIRLGHVWDERNADGARKKAWTRAHWRWVSEIRLEGPQRDALEYYVTAARCAESDRRQLERRVVALAGTDRWRATVEALSCIKGVDTLTAFRLAAEAGSFSRFRSAPAFASWCGLTPSEHSSGESERRGGITKAGNALARTALIESAWHYSTCSPRPKAPAPGTDVPPAIRSRADDCTARLHRRREALAAAGKSACKANAAVARELACWVWEIGCRSEGTVL

SEQ ID NO: 139056 - protein, 360 aa, unidentified
MDSTQLQQVVGARERVAGLDVHCAFTELAALGPSGRVIRRDRVATAIPELLACLAHVGQPRVVVFEEGPLADWLMRGLTERGERVVVCDPRRNALVAKESDKDDPIDALKLAQLARGGYLRLVHHPQTLDRMVFKRRVALYHDRVRNRVRQANRVMAQARFYGLFVQEHAFADRAKEAALLARLPASPEVRRDWRLLLDGYRAAQRQEVQVERGLVRLARAYPEILRFQALPGYGWIRAATFFVFVDTPWRFRNKAALWKYLGIGLARRGTGGPVRLGVPQAVNRVLKTAVVGAAQTAITAGKNEFGALYERWLTNGLTPRLARRNVARTQTAVLWGMWKNGGEYRPEWIGRSLQTAVVS

SEQ ID NO: 139057 - protein, 410 aa, unidentified
MQVLYPRCCALDVHKATVVACLRLIIDGKVIKEVRTFETTTASLMALSDWLADNKCTHIAMEATGVYWKPVWHILAAGDFELVLANAAHVKNVPGRKTDVSDAEWLADLLAHGLIRASFVPDTPTQELRALLRTRKQLVREQSSHVLRVQKTLEDANIKLDSVISDVMGKSGRAMIKALITGVTDPAKLALLADGRLKASPAQLCEALRGRVTKNHRFLLRLHLRQIDALDDAIAAIDRQVEADIEPFRAAVKRLITAPGVKTLGAQVILSEIGLDMSRFPSAAHLISWACICPRSDESAGKRRSTRIRKGSPWLKTTLVQAAWAAVNKKDSYLRAQFHRIKARRGAKKAIIAVAASILTAIYHMLKNATTYQDLGPQHFDRRSKAQQADRLLKRLADLGYAVPLQPRTA

SEQ ID NO: 139058 - protein, 304 aa, unidentified
MFGIGIDVSKATLDVAVHEEQFRQFSNDKRGFVSLIRWLKKWPIKQVVLEASGGYEHAVLDALHAAGLPMVRINPARARRFAQGTGRAAKTDRLDATVLAEMAHLLKLTRYVPPAPWQQRLAEFAQCRRHLVQMRVSETQRLRRLVDPALIAIKQRHIAQLSEDLKQLDRAIAEQLEGQPGWKEIGSLKGVGPILVSTLACELPELGSLGGKAIASLVGVAPMNRESGTWHGQRRISGGRAVVREALYMAALTAIRYEPKLRDFYAGLKAKGKASKVALVAVMRKMLVILNARKRDAEVALGSP

SEQ ID NO: 139059 - protein, 452 aa, unidentified
MAHKRKNVKNKARKPSPRSLKTIQPNAAGIDLGSREHWVAGPPKHDGTPNVQRFGTTTPELLGLADWLKQQGVETIAMESTGVYWIPLYEILDGRGFEVILANARQIHNVPGRKTDMIDCQWVQLLHACGLLRGSFRPCDEICRLRALIRERNTMVKQRADWIRRMQKYLDQMNVCVHHAVSDITGVTGMAIIRAIVDGQRDPVALAGLRDRRCRKSQAQIAEQLTGNWRPEHLFNLRQALKMYDQLCTVIEDYDSEILTYINTLQPKDESDTSAPPLASKAKAKNLVSRGQEPMRQALYRLSGVDLTTIHGIGVDTATEIISELGIDLSVFPDENHFVSYVRLAPNLSISAGKKVPKKLKSSTCTRIATALRMAALTLRNSKTALGAFYRRVAWRKGASVAVFATARKLAQLVYRLLRYGRAYVDIGIEAYEARFKQRRIKFYTKALNTLG

SEQ ID NO: 139060 - protein, 348 aa, unidentified
MLADQLDYLVGVDPHRDTHALAIVDVRTAGVVFEASVEASGIGYARALELARSHAPGRRSFAIEGAGSFGAGLSRFLSGEGERVLEVGRLRRERRSAGKNDALDAIRAARSVLAESRAAEPRAGGEREALRALMAAREGAVTARRAGLCQLRGLLVSAPEPLRAELRSLTRAQLLRRLAAVRPENRRDPELRGTLLALRALARRVKTLTVEERELAAEIETLARKLAPQLLDQAGVGPLTAAQLVISWSHQGRIRSEAAFARLAGCAPIPASSGQTIRYRLDRGGDRRLNRALHMILVTRRRSHPATIAYIERRVQEGKSSREASRCLKRYLARNLYRLLEHGAPLAT

SEQ ID NO: 139061 - protein, 335 aa, unidentified
MKTKYFIGLDVHKEKTTFVVRNKVGNILAEGETATLYDELYIRLKPYLSSSTIGLEASTSYYTLYRVFLKHGYDVKVANTIQLRQLIAKNDKLDARRLSEMLRLGTFPTSYIPGEDIQHLRSLVNVRHSLMEEKVRCNTRIQAFLDRNGVVMPSCKAFSKRWRYALMRYMGSGDVSMELRYEYDHYVFLEKKNEQLDQEMIGYAKKHWKEEFELIQSITGFGSILACYILANVHPVQRFPSNRKLRRYAGVVPTFHESGNYTSKGRIPKNSSRTLLRWALIEAANAIAKTNTKLGKYYRKKKKQKKNASIAKVAVASSLVDIIYKVLTTKKPYTC

SEQ ID NO: 139062 - protein, 323 aa, unidentified
MSQPNPLCVGIDVSKTTLDIATANNEFAQFTAGNDTDGFELIIAELRKHSVALVLMEATGGLEAAVACSLQAEGFDIAVINPRQARNFSRAMGYLAKTDRIDAKVLSQMAEVINRHPERERFIKAIPDAERQILAAMVVRRRQLITMLVAERNRLHPAHPQNRKSINTIIKTLEDELSRIDEAMNNHIKTHFKELAARLSSIKGVGAMTVATLLSEVPELGSLSRREISALIGVAPVNRDSGTMRGRRTIFGGRAGVRTALYMAALVATRFNPVIKAFYTRLITAGKVRKVALVACMRKLLTILNAMIRKNEEWSDSYHKFSL

SEQ ID NO: 139063 - protein, 383 aa, unidentified
MAPVPYKEADMRNLGIDVGKKESLFYVVDDVGRKIGSGTISTTEATAAELVRHYQGDEGVAVALETGNLTFMLSRAMLQAGADVFVVDTYQNALIAQSTKKTDRLDAKQLAHQRRLNMLPPHSVYVPTKEAESLRRLVSARARLVKERTGLSNRAIRLAERQGITDIKKGALSESGAWKRLLKLSSGWRLPMDQVLIGQYATDAERLRRQIAELEEVMTRHTQTHFPSETELLQTVPGVGPVTAAALISQVEEIERFDSARQVCRYVGLTSSVRKSGKTVFSGHISKCGNGRLRGYLTQAAIHFLRHAKSDDPMLIWYQHLKSRRGWRKARVALARKIAAVCYGVLKHRVPYNTSYTQEVLRRSGHEVIKHDESLRPVFEQVL

SEQ ID NO: 139064 - protein, 347 aa, unidentified
MTQTACAVFDDATGEVVSRRVMGRPHEVLEWLLALEPPVRAVDEAGPTGYGLARRGRAAGIDVRVCAPGMIVRAATERVKTDKRDALRLARLLAAGQLVLVHVPSVEHERLRDLARCREDARGDLMRARHRIGKFLLRREIYYDGRTWTREYRSWLARQRFSDSASEATFADYLHAHDVLLARRDALDRAIDALAASCAWAPTIARLRCLHGIDTLGAFGLCAEVGDFARFPRPAALSAYLGLVPSEHTSGERRRLGSITKAGSTLARRLLVEAAHHYRRPPRIGGALQRRQEGAEPWVIDLSWRAQRRLHGRWQRLRTDRHKHNGIAAIAVARELAHYTRELAITD

SEQ ID NO: 139065 - protein, 343 aa, unidentified
MQTVTTIGLDIAKSVFQIHGVDAAGNVIVRRQLKRRYVLPFFQKLPPCLIGIEACASSHHWSRELKALGHTVRLMPPAYVKPYVKRQKNDAADAEAICEAVTRANMRFVATKTPEQQSCLMLHRTRHLFIRQRTAVINAIRAHLAEFGIVAPVGRNGVEQLLDVVANASDKRLPEIARACVLALGAQLRTLKVQILNFDRQIVAWHRSSEASKRLDEIPGVGPALATALVASVADPKAFRSGRNFSAWIGLVPKQRSSGGKDKLGSISKQGDRYLRSLFTAGALAVIRYAKIHGTKHRPWLTALLARRPTKVAAIALANKIARMAWAMMARGDRYKEPAALAA

SEQ ID NO: 139066 - protein, 412 aa, unidentified
MEVVFERCCGLDVHKATVVVCLWMRDQWGKIHKEIKTFGTMTADLLVLHDWLRSKEVTHVAMESTGVFWKPIYNLLEDSFTVLLVNAAHIKRVPGRKTDVTDCEWIADLLAHGLLKGSFIPPKPIRELRDLTRYRKSLSDERVREVNRLHKLLQSANIKLSSVASDVMGMSGRKMLEALLGGNTDPEVLADLARGKLRKKLPELRKALQGCFSAHHRLILEHILGHVDFLDEAMERISEEVAAHTAPFDEQIQFMDTIPGVDRKASEGTIAEIGLDMEQFPTHRHLASWTGLCPGNNESAGKRKKGRMRKGNLWFRRYVIEMALAASRTKGTYLNALYHRLVRRKGHKKAIVAVAHAILVIIYHVLKHRVPYRELGADYFDKLNATYIKRHHLKRLESLGFKVTLEPLEVAA

SEQ ID NO: 139067 - protein, 340 aa, unidentified
MISTTKFFIGIDVSKPYFDASLMAVVNHLKQPVETARFDNNATGIKTFDKWLKNHRVTFDEQSLVVIENTGIYHRLIWSFCSRKHLPIHIGNAAHIKWSFGIARGKNDKIDSLRLCNYAYRESDTLKLTAPLSPVLLHLKDFISARTKLLKQITSLGVSIKELGNVNEKAHQKLIERSLRSAIDGIAKSISNIETEIKKIIEENKAFKSNYRLLLSIPGIGHVTAVYLIGCTANFAGSPSGKQLACYAGVAPFEHSSGISIKGKTRVHRMANKELKRLLHLCALSAIQHNLEIKNYYNRKKDEGKHGMSILNAVRNKIVLRVAAVVKNQIPFKNNHKIAA

SEQ ID NO: 139068 - protein, 356 aa, unidentified
MKITTIGIDLAKNVFQLHGVDGHGKTALKKQLRREQMATFFANLPPCLIGMEACGGAHYWARLLQELGHTIRLMAPQFVKPYVKTNKNDAADAAAICEAVTRPDMRFVPVKTVEQQAILSVHRARAGFVKARTATANEIRGLLAEFGIVIPQGIHTICRRIPEILENGESELTHTFKQLLRTLLNHLKELDLQVEALEQDIQCWHRNSAASIRLAKIPGVGPLTASAVVATVGDAKNFSNGRQFAAWLGLVPRQHSSGGKSTLLGISKRGDSYLRTLMVHGARAVLRFATGKTDRTSTWLNGVMVRRHTNVAAVALANKNARIIWALLAHGCEFRSDAPPSNYRGVVGPVNFDNAD

SEQ ID NO: 139069 - protein, 388 aa, unidentified
MYYIGIDVSKFKHTCLIASNSGEVIKDAFDFDNSTIGFSLLKSIIESLDSNQIKIGFESTGHYSANLSQFLIDNRYPFAELNPYLVKKFSLSLSTRKTKTDKIDAGVIARFLMTVDSKSNLPLSYHISFLKSLSRHVFRLTKYIAKTKVELVNLLDLAFPEFFQFFSSIYGKTSFSILEKANSLRSIASMSESRFESLKSLSRGKFTNSKYIKLRHAAKSSVGLNDDFLWLLIHSVVKRISFLSDEKSSIENQIIEFMSSYNSSILTIPGISYLTSAAIISEVGDVSRFSNYRSLIAYAGLDNSVYQSGTSLKLGRISKRGSVYLRTALYKASVSVVNNSKIFYDFYFKKKLDGKHRTLALTCVSRKLLRIIYSLLKSNSTFNDSLIQ

SEQ ID NO: 139070 - protein, 350 aa, unidentified
MKVNTIGVDLAKNVFQVHGVDEQGKVVLRKQLRCNQVMNFFAQRTPCLVGMEACGSAHDWARRLIKLGYTVKLMAPQFVKPYVKTNKNDAADAEAICEAVRRPNMRFVPVKTEEHQAVLSLHRARQGFVRQRTAQANQIRGLLAEYGVVIPQGIRHIGQCLPEILEDADNALPGLFRQLLRQLGEHLKTLTRLVEEMEEQMQQWHGGNEASQKLAAMPGIGAITATALVASVGDARNFSNGRQFAAWLGLVPRQHSSGGKTTLLGISKRGDRYLRTLLIHGGRSVIAAAERRKTSPVEESLTQQRSWLQGLVSRRNKNVAAVALANKNARVIWALLAHDRSYQAGYAVAA

SEQ ID NO: 139071 - protein, 347 aa, unidentified
MNFYNNMHPYYCGIDLHARILYVCIIDQLGEILVHKEISADPQKLFNLLEPYIGNIVVGVECMHCWYWVSDFCQNRSIDFILGHALYMKAIHGGKAKNDRIDSFKIAKLMRGGNFPLAYTYPKKMRATRDLLRRRTKIVRHGATLKAHVSNTTSQYNLPPNNVNLKNVCAREQLKSAFPDPVVQRTIDLDMAILDAYAKELSKVEWFIGQQAKQHNPVHLKLLKTVHGIGAILSLTILYEIGNIDRFDSVQNFASYSRLVKCKAESAGKNYGTQGNKIGNAHLKWAFSEAAVLHLRGNDKAKKYLANLQKRMSKAKALSVMAHKLGRCVYFMLKNETVFDENRFLKG

SEQ ID NO: 139072 - protein, 401 aa, unidentified
MNAVGIDVSKGKSMIAVMRPFGEVVISPFEVQHTDSELSELAKLLKSLNGETRVVLEYTGSYHAPIARVLSDAGLYVSVVNAMLVHDYGNNSLRRAKTDKKDALKLANYALDHWLSLPRYVPEENTRLMLKNSYRQYEQYSKLRTMLKNNLISLLDQTFPAVNRLFTSPRRADGSEKWIDFVGAFWHCECVSGLTEKTFNSRYLKWCRKHGYNFSESKAHEIHAVASSCIGVMPTSDATRLLVEQAVSQLRATATALAVIQQQMRTLAASLPEHDVVMQMFGVGSALGPQLIAEIGDVRRFHSKKALVAFAGIDAPPFQSGQLNVQSRSISKRGSSSLRRTLFLVMSVFLQHSPPDEPVYQFMDKKRSEGKPYRVYMMASSNKFLRAYYAKVKAHLEAPKA

SEQ ID NO: 139073 - protein, 312 aa, unidentified
MDATIVGIDVGKDRLDVCVRPSGESFVFDRTTTSVLELAQRLKTFTPRVVAVEATGGFETIVAAGLAGAGLPVLVVNPAQVRAFAQALGKRAKTDPIDAAVIAHFVEATKAEPRALPDETARLLADLIARRRQIVEMIAAEGQRDRRLTDKQVKKSIARLRKALEKELTELDAEIDDHMRGSPAWAEKENLLASVPGVGSIVARTLIAELPELGSLDRRQIAALAGLAPWTRQSGQWRGKSFIGGGRKSVRSVLFLAAMVASRHNPPLKQFRDKLVAAGKPKRVALIAVARKLLTILNAILRDQRPWQPKTA

SEQ ID NO: 139074 - protein, 365 aa, unidentified
MFNETVVGLDVHADYIVAAILPPKSDTPEVVKLSGDLMQVRRLFRRLSAEGPVRSCYEASGAGFVLHRLLSYDGFACEVIAPSLIPRKPGDHRKTDRLDAIMLARLYRSGHLTPVHVPDEDHEALRRLLRLRETYHAYCTATMHRISGILRNHGHVFKEGKSTWTKKHRRWLGELRQSLQGPLQTALGAELQHFEYLETEQASFDAELERYAALPQYRKAVEALCCLRGVKTLTALTLLVEIGDVRRFRSPRSLMAYFGLVPSEYSSGNREYRGSITKAGNAHVRRLMVEAAWNNRHNAAAALVLKRRRQGQPPEIVAIAMKAQLRLVNKFLRLDKRKHRHVAITAVARELCGFVWAILMALPEQ

SEQ ID NO: 139075 - protein, 436 aa, unidentified
MSCLNLNAAGVDIGATEIYIAVPGDRDPQPVRHFSTFTEDLHAAAAWLKACNIESVAMESTGVYWIPLFQILEARGFTVFLVNAHHVKNVPGRKSDVSDCQWLQYLHSVGLLRGSFRPEQAVCTVRSILRHRDSLVQMASSHVQHMQKALDQMNLQLHHVISDITGLTGITILEAILAGERNPHQLAKLRDRRVKATEETIAKSLVGDYRREHLFTLRQSLEAFRHYQQLIGACDTEIEQYLEAFESKLDPPPGSTSPSKDGSKLKASEPRFDLQTHFHRIFGVDLTQVPGINVLTTQTLLAEIGPDFSRFATAPALTSWLGLCPDNRVSGGKVLSVKTRKVKNRAATALRMAALSLHRSQSFLGHFYRRMRAKLGAPKAITATAHKLARILYHMVTTGHAYDETICAQNEVQNRHRMEARLRKQARELGLQLVAI

SEQ ID NO: 139076 - protein, 347 aa, unidentified
MENATRLFLGLDVGKSEILATLMDDTEAELFRGSFKNQLSGFRKMMKAVNKETSKVSGKHMIHAGMEATGTYYLKLVKFLYEKEEEVIPYVINPGSVKKYMEYRGSRTKTDLQDSRIIAMCVKDGMEKKIFRPWFPARKEHEELKQLVRLREDLLTMRTMEKNRIEGLSQDPDHSEPVMKILQDHVEYLSNQIREIEDILKENIRHGNFPDIGEDIELLKSIPGISDLTATSFISEIGDIDRFDGIKQIVAHAGLAPMERQSGTSVRGRTRICKRGSKKLRQLLYMPTLAAIRCNPAIKSFYERMIEKGKRKMVAVTACMRKLLHIMYGILKNRTPFDPVICIGYVK

SEQ ID NO: 139077 - protein, 355 aa, unidentified
MQMQITKKIDFSGKNLYIGLDVHKKSWQVTILSQEMSLKTFSQPPTPKALHLFLESNYPGANLHSAYEAGFSGYSHHRELNELGIHNIVINPADVPKSNKDSHQKNDKSDSRLIAEALRGKVLKGIYIFDPDSEEFRGMFRSRLALAKDIRRTKVRIKGFLLYRNIEIPAAVNNPNALAYLNWLKQLEFDDQKAKIQLSLLFDRLLFLKEQRRQLEQQLKDTARNRDKQLFNLLQTIPGIGPITAIGIMAEIGNIERFKNIKNLASYVGIIPRIKQSGETERVGNITYRHNKYLRPLLVEAAWQAVRSDPAMLQYYQDNCLKGNAKKAIIKVARKLLSKIMFVMRNRIKYERGIL

SEQ ID NO: 139078 - protein, 337 aa, unidentified
MVYGAIDLHMRYSQIRVIDGDGHVVRDQRVVTTADRLIGSFASHGPMRILIEASTESEWVAQALEGAGHVVIIADPNFAPMYGDLQRRVKTDRRDVAALAEANRRGWYRATHRVSAAQRVVRQVLRTRRQLVQMRSGTISLIRSLLRQRGYRVGSGASETVPTRVARLALPDDLVHVLGPLLRTVTALSTELRALDAQLEQQAAADPVVARLRTVPGVGPIVALSVRAFIDDVARFPDAAHVSAALGLVPREDSSAERRQRGHISKAGPSEVRSLLIQAAWVCWRTCRQGPLRAWTDQLAARRGKRIAVVALARRLSRILFAIWRDQTVFERTRVAA

SEQ ID NO: 139079 - protein, 405 aa, unidentified
MTTEAVFAGTSTLKEDVTLCASVELGSTGWLVTSRASDQEKIQRTRIGTNDWQSLIALLGRQRKARQAGRVVCGYEAGREGFWPYRALREAGIEACVLDPASIAVNQRGRRTKTDRTDGILELEAIEALDLGRRTAARRVVVPTEDQEDARQPGRTRSRLVKDRTALIAYIKSALARVGADLPAANQPGWLERLAATRQWNGQPLPRNLVRDIELAHERLMLVCRQIDALEADQRAALLSCERSGKRRQLKSRQAAQAWEAQANPAERAVAGLAEQLYRLNGIGRVIALSLAGEVYWRDFVNRRQVGGYVGLGGTEHSSGAQRRELGISKAGNRRARFVLVEAAWLWVEHQPGSALTHWFKQRAPKGASPRQRRIAIVALARKLAVALWRYLNDGIVPEGACMKA

SEQ ID NO: 139080 - protein, 429 aa, unidentified
MNNPYISVGIDVGADFSYVCIMMPSYELFCKPFKVVHTDLSSMNKAVSTIKKAEVEFQMKSQIFLESTGIFHFPLFCFLRASGFEVSVINPLIIHSTKNMDIRKVKNDKFDSKKIAKVGLDSTIRKSLIPDEFVLNLRFLCREYYSLSDDRTALINKLSGYVRLVFPAFIGIFSQLAGGASLAVLNYTQSLDHLLSASDDEIIGIIAKAARKGKKYAAEKYIAILDAATVSKTLSMQLPNVFPLIHSIINHISLIDQQMDDILKTINSILDDNHDHVFVRQIQLIDSIPGVGFLSAVTIMCEIGDFKAFKNPKQLFSYFGVDPSVNDSGKFKGSRNHMSKRGSRFARRVLYSIALASIRNKPNSQPMNAVLQAYYQGKVVSKFKKVALGAIMHKVCNIIFAVLRDDSPFVLRSPKEHICLHALSASNAA

SEQ ID NO: 139081 - protein, 411 aa, unidentified
MRLFAGDDWAEDHHDVEVMDEAGKVLAKRRLPEGAAGMAQLHELIGRLLPEDADGAEVVIGIETDRGPWVAALVAAGYVVYPVNPLQASRYRARHGVSGAKSDQGDAHMLADMVRTDSHQLRPAAGDSPQAGGIKVLARAHKTLIWERTRAVQRLRHQLREYFPAALEAFGDLDAPDALELLGKAPDPARAARLTRAQVSAALKRARRRNIADKATAILAALRSDQLGQPAELTAAYAAAVRSLIAVIATLNEQVKILQGQVEEHFGRHPDAEIYLSQPGMGAITGARVLGEFGDDPGRYADGKARRNYAATSPLTRASGKKKFVTARYVRNDRLVDALNSQAFTALNTSPGARALYDDLRARDIEHNDALRRVANRLVGILHGCLKTGTLYDEATAWGHRENLQQSSAAA

SEQ ID NO: 139082 - protein, 408 aa, unidentified
MNTLYVGIDVSSKSNVVYLMLPNGDKHSNFSVANSHEGSTQLVKRILSALTSHSLDTVLIGLEATSVYGDNLVYFLREDASLASFNRKIHVLNPKQVKKFHDTYNDLPKNDYVDSFVIADCLRFGRINKEVYLGDYRYKALQNLTRARFFAVQNLVKEKQRFMNVLFKKYSTMTQEKVFSDTFSTTALAVYDEFESAEALANMDLHELTDFIIEKGKNRFPDPDAVAKAIQKAACSSYRLPKTVNDSVNQVLSISITSMKALESQIKEFDKAIKSQMELLPNVLISISGIGPVYSAGIMAEIGDINRFNSQAALAKYAGLAWKQHQSGGFESEVTRLIPSGNRFLKYYLCEAAFSLVRCDKEYSDFYHLKYKEVNRCQHKRALALTARKFVRLVFRLLKDNRLYCPAK

SEQ ID NO: 139083 - protein, 333 aa, unidentified
MKNYDLFIGVDVSKLKLDITGIDQDNAIHLKHCVIRNDAKEIKKYFRKMLKNQGKPMIVGFENTGVYSALIAFVLQELGIDYCQLPSLEISRSRGISRGKNDKIDALKIAQYLLSHRFKISLSTVTEIHLTEMRLLYTHREKIIKSISQYEKEFENTDFLPREIQKEILKSTNSILKSLHANLKKIEDRLGVILKEHAAMEKNFKLITSIPGIGKQTALYLMIVTKNFTAFKEARQVACYAGVAPFPYQSGSSINGRTKVNNLADKKLKSLLNMCALSANKYDIELKEYFQRKVGEGKNKMLVLNNIRNKLLARVFAVINRQEPYVNLRKYAA

SEQ ID NO: 139084 - protein, 415 aa, unidentified
MAHMVSTIDVHKKMLAVVVGDSAQQGEVQFQRRKFGTGAGDLRVLFDWLTALDVKEVVMESTAQYWKPVWQALEEAGHFHLELAQAQSNQGPKGRKSDFRDAERLWRRYEADELRLSFVPEPEQRIWRTQSRTRMRLTRDKARLQNQLEALLEEMAVKLSSVVSDLLGVSSTRMLRAIAAGETEPEKLAEMADPSLRATKEVLCDALRAVSKLDQRYRLVLKQFLDRLDLNERQSEELKEELAKSLNPHGDQVERVAEIPGMGMDSAQQAIAEVGPEAKKFATAGDLSSWVGVTPGENESAEENHSDRSPKGNEAMRRILAEAANAAVKAKGTVFEARYKRMVWRDPKQHNKPIWAVAHHLCRVIWKVLHDGVRYEERGGRRNPKADKRRAARLTRELKSLGYTVRKAAAPEVRA

SEQ ID NO: 139085 - protein, 343 aa, unidentified
MQIRTIGVDLAKNVFQVHGVDSAGKVVITRQLRRKQVIEFFSKIPPCLVGMEACGTAHHWAREVSKLGHTVRLMPPSYVKGYVKRSKNDAADAAAICEAVTRPSMRFVAVKSTDQQASLMLHRTRDLLIRQRTQLINALRAHLAEFGLVAETGREGVAQLAALITDESDREALPFAMKQALQAIVDQLAALDLQVGTLDRAIHAHHRANDMSSRLETVPGIGVIGATAIASAVTDPSNFKSGRDFAAWIGLVPRQHSTGGKERLGGISKQGDRYLRRLLVVGATAVVRHARQHPQKHPWVMRLLAKKPAKLVAVAVANKMARIAWAIMAKGGYYRAPELAAAA

SEQ ID NO: 139086 - protein, 410 aa, unidentified
MTEIIIARDAPVLVAIDVAKARHEVLIAIPDKKRRRRLTVLNELADFNRLITTLRDYGGPVRVAFEATGNYHRALAYHLATAGFEVKLVSSVALARTREALNNSWDKNDPKDAQVILHMMEIGNEQFYHDPLMHGTNDIQELSKTHDIVSKSKTELWHRVLTHYLPLYFPEADRFHRSSRSDWFFAFLERYPSPHFITAMGKDAFTADAWDVIGRKVAKERLLADIYETAKSSVGLPVAPGSDAIRMFRLVLEEGRSLIAQRNQIEDRAVALLKDLPDYQLLTSIPGIGPINALTILAEAGNLRRFGHHRQFLKFCGMDLATIQSGTFRGQTKLSKYGNARLRRTLWMAGQVAILQRTNSFRDKFERYIAKDRHNTHLRRKAYTAIAAKMARTVHGIIKHGEPYRPFFEG

SEQ ID NO: 139087 - protein, 299 aa, unidentified
MTRYVGVDLHRRRSVIVVLDSDGTELWTKRIDNDPLTLGLEIEKAGPAPEVVLEATWGWYWAADVITEAGGRVHLAHPLGIKGFENRRVKTDRVDARLLADLLRMGRLPESWIAPEGIRHQRELVRYRRKLSQLRAGLKAQVHAVLGKEGLIAPITHMWGPGGSAWLDETDMADAYETRVRSLRRLIRLYDTEITKLDARIAEVFKHDEGYRVIQQLNGVGPVIAAIFCAELGDVERFRSAKAVCSWAGLTPRHRESDTTVHRGSITKQGSGLVPWAAVEAIIQKPWRRPHQSPLPEGF

SEQ ID NO: 139088 - protein, 366 aa, unidentified
MKQGTTFVGIDAHKKDLFVAMLGGVATAPVTWQLANEPAAVRRLVRKLEREAPGPVHVFYEAGPCGYALQRQMTTARVACDVIAPALMPRKPGERVKTNRRDARKLAELGRAGLLTVVQPPTPADEAVRDLARARDDAREDLQRCRHRLGKLLLRRGLHYAGRNWTQAHRRWVDSLTWTHAAERAVVDDYQLAIDHTEARLVELDARLAELAEQAPYREPVGWLRCFRGIDTLTAMLILAELHDFRRFGSARALMAFLGLVPGEDSSGEKQRRGRITKMGNALVRRILVEASWHYQHRPGVGRALAARRTGQPARVIAIADKAQQRLCRRFRRMLAEHKPPAKVAVAVARELAGFIWAALQPPVVA

SEQ ID NO: 139089 - protein, 409 aa, unidentified
MDPVIDCVAGLDVHKATVVATVRAPGAHGRRTSRTETFGTVTADLIALRDWLQASGVTHVALESTGVYWKPIYYVLEDTFQLLLINMLELKHVPGRKTDVKDSEWLAQLLECGLLKASFVPPPAIRELRDITRYQVQQVRDRAAEVNRLCKVLEDAGIKLTSVATDVLGVSGRAMVDALVAGTTDPTVLAELARGKLRAKLPALRRALHGRFRRHHAFLVEQILAKIDFLDETLGRITAELDERLVPFAPMLANLDTIPGVNRTTAVSIIAETGGDMARFPTAGHLCSWGGMCPGHDESAGKRRSGKTRTANRYLRAALIQSALGASHTKGTALQARYHRVKRHRGHKKAVVAVGHQILEIAFYLMRDGGTYDELGADYFDRRHTDRTVRRHVRQLEALGFQVTIEKAA

SEQ ID NO: 139090 - protein, 325 aa, unidentified
MAVITAVGLSETAQRECYEFKNSVSGFRQLVKWVERNSNGIATSSWLFSGENTGDYSKPLCNFLYGKGYDIWLENAKSIKDASGIRRLKSDRADALMIAEYAMRNYDKAFMYEPLSASLSQLRELFLYRQMVIRHRCSFQVRRGEKRLAMEKSPVKTIISQSGRHIVSELNKEIEKIDKRIAELIDSEEELKEIYHIVTSVPGIGCQNAVCLMVYTDNFRRFNYDARKIACYYGIAPFGKNSGASVHTDPHVHYLANRQIKAMLTQAALAAINHNPVLSQYYLRLVERGKKKQVAMNNVKNKLIHLVTAMVRNRQVFSPEYKISA

SEQ ID NO: 139091 - protein, 344 aa, unidentified
MITIGIDPHKRSVTAVALDAHSQPLGTLRVAMTDQAVAQLLAWAGPWSARRWAVEGATGLGHTVAQQLVGAGEVVVDVPAKLAARARLLGTGSARKTDRTDAASVAAVALAHRRLRQVAVEDHTMALRLLTDRRDDLVAERTRTLSRLHVLLRDLHPGGAERNLTADRAAALLGRLRPVARVDRERKRIARELLADVRRLDQRITAATKAIGEAVTSSGTTLTEVFGLGPVLAAKILGHAGDLTRFPDRDHFASYTGTAPIEASSGDVRRHRLNRGGNRQLNTALHLIAVCQIRDPSPGQVYYQRKLRQAKTPEEARRALKRKLSNVVYRHLVADHRHRHAPPS

SEQ ID NO: 139092 - protein, 345 aa, unidentified
MTYYTGIDVSLRSVSICVVDDKGEVCLEAKVAAEIDAIVERLRRFSGDVKSVGFEAGTLTQYLTYGLQAAGFEVICLEARQVSVTLAAMRNKTDRNDARGLAQILRTGWYSRVHVKSLHSHQVRALLASRKAILKKCVDLENELRGLLKVFGIRLPSRVGHGSFDAELRETVCSDEMLACALVPLLDARTVLYKTYLKLDNAVKGRVRLDPICRRLMSIPGVGPVTALTFKAAVDDPNRFKSSRTVAAHFGLTPRRFQSGEVDNPGHISRAGDADVRSALYVAAHSLLTRNAQWSTLKAWGVRLAKIRGHRRAVVAVARKLAVILHRMWIDGSEFRWGSPAQTVA

SEQ ID NO: 139093 - protein, 349 aa, unidentified
MQKSSGYWIGVDLHSRVIQVCVLDSRGEVVFEERCNGSGLVEGRKLVGELAVRFSGAQLTVEALGSNRWFVAACREAGLEVTVANAAKLQLKKAGKKTDRRDAYELARRLRLGDVAKNAKTYHPTDQEYGLRQLLRRRHGLVSSRTALVSQIRAMLRSHRAPQPRGDLYGNQALKSLRATELANPLETAVLRTLLEALEALQTAVSNLDLLIESQSKQGAPAVLRLLPYVGPLTATTLVAELGDVHRFRNSKAVGSYAGLVPRVIESGQRSYHGPLVNHGNRELRFVLGEWAVQLLARNELVKRWAQPRLKRSPKNQVRVALARRLLVGVWHTLRTGEAFNLERCLALT

SEQ ID NO: 139094 - protein, 363 aa, unidentified
MTIVAHAHQFVIGVDTHARTHALSILVAATGAIVDEEQFPATEAGMARAIAWAGRRTEGDLATLWVIECAGSYGARLASVVTRAGYQAVEAARMDARGNRGVGKSDPLDARRIATAVLPLALDRLRNPRKDDGLRAALRVLISARDQMTTERTAAINALTALLRSFPLGIDARRALSKTQIAAVAKWRARCEDISLVTARAEALRLAKRIINLDEEVAENTTTTTQLIQQSHAKVLLDKVGVGPVTAAVVITAWSHEGRLRDEAAFASLAGVNPIPASSGNTVRHRLNRGGDRRLNRALHMAVITRMTHDPETRAYVERRRAEGRTNREIRRILKRYLARQLFRTLNATASAETESHRVAVAA

SEQ ID NO: 139095 - protein, 399 aa, unidentified
MQPTRYVALDIHKFYLVAVGVDRDQNIVFGPSRTTWDRFDAWIARHLTHQDAVVVEMTTNTWQVYDTLLPHVHSLIVVHPQHVKAVVDAQVKTDRKAALTLAQLHAAHFLKGICVPPQAVRDLRALTAQYRKMSRLGTVAKNRLHAVLHRHHILVPEGFELFHPDLRPWWNLLHVSELEKMNIQSDLATLEFAQKQKAILEEHIGKAAAQDARFPLLAQIPGVGLINGTNILAAIGDIRRFDQPRKLVGYAGLGARVHDSGESRTTGKITKAGRRDLRSAMVQAANIAVQHHVFWKKELARLEPRLGRGRAVVLIARKLLVAVWHILSKEVADRHADPRDVASSLFQHAYKMKVRNLPNQMSAKQWTRYQLDRLGIGADLNEIPWGTKTVKLPPSRLKP

SEQ ID NO: 139096 - protein, 385 aa, unidentified
MTSITYVGLDVHTTNYTAACYRFETDNTFAVAELKPKADEIEKYLKRVKKNLGEDCEFLCGYEAGCLGYSLYHELTAKGIKCVIMAPSTIESAPVNKIKTDKRDAKKLARCLATGGYKAVHVPTDEDNAVKEYIRMRDDVNGALKRIKQQITAFCIRNGKIYRGVVGKNYWTHKHLNWLEKLEFNNPVLRETLEEYMAVFYVLREKIDTYDAKIAELSQTPRFEEPVKKACCLLGIATHTAMATISEISDFTRFPSAGSFAAYLGLVPGEHSSSNKRNQLSITKQGNTHVRRLLIEAAQSYTKGQIGKKSAALKKRQAGMDPKIIAYADKCVERLKRKYVRIALHSNRNVAKTAIARELACFIWGLMTNNYGECRGNVENRPILC

SEQ ID NO: 139097 - protein, 369 aa, unidentified
MPHVTSIGLDVHARSVAAAAFNPFTGEVVHRDFGTDAAEIAEWALGFEEPRACYESGPTGFRMARELRALGLDCAVAAVSRMQRPAADARRKNDRRDAEFIARMLATHNIVEVPLPDAAAEAARDLDRALDDATADYLRARQRLNMFLIRIGRVWDERNADGTRKKAWTRAHWRWISEIRLEGPQRDVLEHYVTAARCAESDKRQLERKVVALAGTDRWRPAVEALSCIKGIDALTAFRLAAEAGSFSRFRSAPAFASWCGLTPSERSSGETERRGGMTKAGNRLVRTALIESAWHYSMCTPRPKAPAPGADVPAAIRSRADECTARLCRRREALSAAGKNACKANAAVARELACWVWEIGCRAEGTLG

SEQ ID NO: 139098 - protein, 338 aa, unidentified
MTQFTFFVGVDIASASFMACVGTAPWSLTVKPVKFDNHEDGFASFLNWLKNNSLIAEKTVVCMEATGVYGEGLAYFLFASGYTVAVEPPLNIQRKFPANASKTDELDCQYIAEYACRYVDKLAFWKPRADILEKVKLLLTTRQHFSVQLTGHKNALIAVNRKKVSSELAKQVHQDMIEQINKHIKAIDQEIRRLIDEDPNFKQTFLLLLSVPGIGLQLAAHLLIHMQETLDPRVLAAFIGICPIKHESGTSVYSPPTSRHYGPPVMRKLLYLGACSARTHKKQFQQYFFRKVAEGKHKKVVLNNIENKILKIACAVVRYQKPYIPNYVSVNPLVLKKA

SEQ ID NO: 139099 - protein, 391 aa, unidentified
MIFVGIDVAKDKHDCFILNSEGTVLADVFTIANNRIGFETLLSRIQSCSQGESKIKVGLEATGHYSYNLLGFLLDSGLTTYVINPLHTNLYRKSLSLRRTKTDRIDARTIAMMLMSDVDLKSYSNTAYHNEELKSLTRYRFDKVKERAKLKSSVARLVNILFPELEKLVSSLHIAVVYALLSNYPGASYIANANTEELAETLCTASKGRYTKSKTAEIQVAAGVSIGSKMPAKSMELKHTIALIRELDKEISEVESAIDKITSQMDSPIFTIPGIGRHMGAMILAEVGDFSNFASADKLLAYAGLSPSTYQSGQLQNCYAHMEKRGSRYLRYALFNAAKYVCLWCPTFSAYLEKKRSEGKHYNVAISHAAKKLVRVIFAMQRSGKDFLADY

SEQ ID NO: 139100 - protein, 342 aa, unidentified
MQQSIFVGLDLGSSHCHQTVINADGTIIRSRSVPTSEQHLRNSFADLQGDIHVHAEASELSDWVRSIINPLVTRFVISHPRSLAWIAKDSVKDDAVDARKLAELLRFNLVHEVYYEDRADRRSFKQLVVHHEQLSREQARLKSKIKARLRTLGIIRKDARLFSESGQSELFASITDLLIEQMFHQSFAVLNQMLISLMDAKTAMIEFSRRLPEVRLLQTAPGVGVITACRFVAYIQTPQRFSNKQKLWRYARLSITRRESNGKRLSHPHLDPAGCGSLKDVSRKIFEAARRTKTDNSFKRLYEQSLANTKNAVHARLSTQRKILATLRAMWQANQPYRNDGG

SEQ ID NO: 139101 - protein, 360 aa, unidentified
MLKQSSELNFEGHNIFVGIDLHLKSWTVTILTDKLSHKTFTQPASVETLHNYLEKKFPGGVYHSVYEAGFSGLWTHYKLQEMGINNIVVNPADVPTTQKEDLGKDDSVDSRKLARSLRSGDLTPIYIPAPSTLEDRSLVRLRATIVKDMVRFKQRIKSFLYFYGVSYPLEFEKAGTHWSKRFMKWLKEGVSLQHDSGNQSLKILIQEAEQHRKLLLETTRKVRKLSCSEKYASNMVLLRTIPGVGFITAITFLTEIENIERFGNSDHFAGFIGLVPNQHSSGDKKRIGEMTFRGQDTLKKAIIESSWFAARLDPALNKSFHSYLNRMDANKAIIRIARKVLNRMYFVLKNKMEYVPSVIK

SEQ ID NO: 139102 - protein, 414 aa, unidentified
MNGMKSQFAAYIGLDWADKKHDLCMQVGDVDERNYYVIAHTPEAIEQYLFDLHKQVKGNIAIVLELNKGPVVYALQKYSFVTVYPIHGLTLARYRQAMFPSGAKDDPSDAELALDMMLHYPKKVKPLKPSSNDTRTLNHLVEQRRTLIDDKRRHVNRLINALKQYYPQPLSWFVHRDTELFCDFLIKWPSLQSVKRARATSIEKFFKSYGGNAVSNTAKRIEAIKTSLPLTEDEAVIIPHQMLVVALCKQIITQIENIRVFDKAINELFHKMPDAELFESLPGTVPCLAPRLMAAIGEVRSRFNSALEIQNYAGLSPVTERSGQSCWVHWRWQCSKFVRQSFIEWAAKSVHQSYWAGLYYANQRAKGKSHQQAVRALAYKWVRIVFRCWKTRTPYDESKYLKALKERNSPLLAA

SEQ ID NO: 139103 - protein, 372 aa, unidentified
MASIIYVGMDVHTTNFTFCCYTADSDRGFAVAQTEPDYRQVIKYMERVQKQRGEECKFVCGYEAGCLGYSLYHQLTRCGVDCVILAPSTMHQEKGKRIKTDRRDAENIARCLAFSLYSPVYVPTTEDDAVKEYIRMRDDIKADLKRVKQQIIAFTTRHGFAFDGKSYWTQKHLKWLETLVFEHPLYKETLQEYLILYYMLDEKVAVYDTRIEEMSHLEHYEENVQKLCCFRGVAAHTALSLLVEVGDFQRFRSAKHFAAYLGLVPGEHSSSDKQIRTSITKAGNTHLRRLLVEAAQSYNRGAIGKNSAALKARQGGNPAEVIAYADKANERMQRKYYRIAFKSRHNIAKTAIARELACFVWGTMTGNISNAA

SEQ ID NO: 139104 - protein, 365 aa, unidentified
MSSVPSAAEMIHLGMDTSVKEIVAGVLRPGEEVPVISRIPGDEESVRRLIGRFPDRQLLAACYEAGPGGYELHRLLTSMGVACDVVAPSLIPKGTSDRVKTDRRDAIRLALLHRAGLLTPIRVPSPAEEAVRDLVRARGDLLDDRKRMQQRLNAMLLRHGRIWHGSKWTYAHRNWVSGQVFDEPALAETFALYRGALDAREAELAAAEATMAAWAGRDPLAGPVARLGAYRGIAQLTGLTLAAEVVDWRRFACARAFMGFAGLTPTEYSSGGRDRRGHITKAGPEAVRTALVEAAWAYRYRPAIGATLKRRQAGQPPETLARSWKAQQRLHAKYKKMTARGKPPGVAVVAVARELAGFVWAEMTT

SEQ ID NO: 139105 - protein, 359 aa, unidentified
MINDKYVALDVDSANIVAGVYDEKGKCVIEAQMRPEKKAIEQFLSGLKGRLHVTFEEGTQAGWLYEVIRPLASEVIVCDPRRNKLVHSGNKSDRIDVRKLGELLRLGALRSVYHGEQSLIGLKHLVHAFDRLSTDTTRTRNRVKAVFRGRGIGCRGREVYEKSKQEEWLKKLEIEGLRTRADLLYRELELQVELKDEARKKMCKEARKQPAYKLLIQLPGVGEVRAAQIIAATGSPHRFRTKRQYWPYCGLAVVTRSSGDYEWVGEKTKRRKKPVQTRGLNRNFNRSLKAAFKGAALESIRSNEEFKQYYQRMIDNRIRPEMAQLTVARKLAAIALAVWKRGEAFDPKRVNQAARPDNQ

SEQ ID NO: 139106 - protein, 421 aa, unidentified
MKSTIPTILAGVDTHSTTHTLALLDEHGRVTDAETFNADPKGYERLIAMIGDPALCLGVGVEGTNSYGAALSRRLAAAGYTVHEVLRPKRSVRRSDGKSDPIDAIAAARSVLAGDGISTPKASDGWCEALRHLIAAREQLVTSMTAISNCLAGLLTTAPEGIRERYRSLPSKRRIGKLAACRPSGGIVERNVLSSLKTLASSWRELHDRADVLECRMRQILEENARPLLDVYCMGTMSAAQLAVIGGDNPERIRSEAAFAKLCGACPLPASSGKTNRHRLNRSGNRQGNRALYNVALVRMSHHQPTKDYVVRKTKEGKGKLEIMRCLKRYIAREAYRALIAIRNGEAGREPAVERGARLREVRVSLGKTQQQVGDALGVPSSRVSEIERGVRDLPELERQIIEWMDSILGQSQHSNTFDNV

SEQ ID NO: 139107 - protein, 356 aa, unidentified
MSDGSWVGVDLHARSAVAAVLAGASGELRTERVPAASGPLVGWLQTLPWPVRVAYEAGPTGFELSRACTRAGIACLVAAPGKIPRAPAERVKTDRRDAERLARLLRLGELTAVRVPSELEEQTRDLVRAREDARADLTRARHRLSKLLLRHGLLWERSAWTREHERWLRGLRFAGPLALCFDESCGAVLEARARRDRLDRAIVEAAAAPAYADTVARLCCLRGISTLSALALTVELGDWRRFEPARLGAFLGLVPSEQSSGERRRQGPITKAGNVHARRLLVEAAWHQRRPPRPSGALAARRAGQPAAVRAEAEAVARRLHRRWWDLERRGKRRTIVAVAVARELAGHCWRLATME

SEQ ID NO: 139108 - protein, 332 aa, unidentified
MENNCFIGIDVSKNKLDICVLQGKEVLQEDVIDNNPSAIQRFLVDMAEKRGLDLCSCLVCAEHTGNYTYPLTLACRDLGCRLWLENPAQLKYSSGVHRGKNDRVDARRIALYASRFNDKAMLYHELTPELERVKQLRQERSLYRSDLSKYKGQLSDQKNFMESTVYKAKANRLKHVIKELEKMIDVVEREITGIIDSCDVLKRQMKIITSVEGIGRETALCFIVETAAFTRFTDSRKFACHAGIAPFQYTSGSSVRSRNRVSRRANKQVKTLLHMAALSITRKKKSELKVYYKRKVEEGKNKMTVINVIRAKLVARVFAVIRKNDIYSINFT

SEQ ID NO: 139109 - protein, 351 aa, unidentified
MLLIGVDYHPSFQQIAFFEEETGECGERQLNHSDGEAERFYRELRQRGSCVRVGMEATGYSRWFERLLAELGCELWIGDPAEIKAKRVKKQKTDRKDAQLLLRLMREDNFPRIWVPSPENRDLRQLLWHRHRLVQMRTRIMNQLQALAMNEGRRWKAKLWSELGRAELEKLALAPWASRRRQELLELLDRMNPTIEELTRAAEQEARKRPEVLRLMTHPGVGPLTALAYVLIIGTPARFHRGKQIGTYVGMVPSEDSSAGKQRLGHISKQGNSLLRFLLVEAAQAATRINPEWRRRYIHLAMRRHRSIAKVAMGRRLAVRLYWMWRNGSAYSPSFEFGSYVGQPGTGHGVN

SEQ ID NO: 139110 - protein, 358 aa, unidentified
MDKIKNSKLDCTGQPVYVGLDVHKKSWSVSVFSRYGEYKSFTQPPQVDTLVSYLKRHFPGGEYHSVYEAGYCGFWIHDQLKERGINCTVVNPADVPTKQKEEQHKRDRVDCRKLARGLCNGEMEGIYVPSRQMREDRTLVRTRQALVKKRTRCKNQIKGMLSFYGIHLTDEQTFAPWSERFIKWIESIRMERDSGNTALKAHLEELAYLRQLIATVNRAILKLAGSAEYATPVMMLKSAPGISTLTAMILLTELCDMARFASLDSLCNYVGLIPAIKRSGETEYVRGITPRRNAHLRWILIEAAWVAVRKDPALMMAFTEYCKRMRKNRAIVKIARKLLNRIRYILKHQTPYVPCIAK

SEQ ID NO: 139111 - protein, 409 aa, unidentified
MLFVGDDWAEAHHDIEIVDADGRRLARRRLPEGVDGLAGLHALIADYLAEDDEPGQVIVGIETDRGPWVQALIAAGYTVYAVNPLQVARYRERHGAAGAKSDSGDAHVLAELVRLDRAHHRPVAGDSAVAEHVKVLARTHQTMIWSRQRQTNTLRSMLREFYPAALVAFGEELAGRDALAILAIAPSPEAGRRLSQSKITATLRRAGRQRNLPATAERIQTALRAPQLEAHPGVIGAYTAAVGSLVAVIGELVRQTEVLRGEVEAGFGRHPDAEIYLSQPGLGPILGARVLAEFGDDPARYADPRARKNYSGMAPITRASGTRRVVLARYARNRRLADALYQQAFTALNTSPGARAYYDRQRARGTTHHQALRALANRLVGILHGCLRHHRTYDELTAWPQTAQQPLAA

SEQ ID NO: 139112 - protein, 346 aa, unidentified
MKISRVGVDLAKNVFQLHGVDSRGKAVWKRKLTRDVWLRVLCETVEPGTEIGMEACTGSHHWARQLMAKGYRVKMIPPQFVTPFVKSNKNDANDAAAICEAMMRPNMHPVKVKTIEQQDLQALHRIREDIKAHRVAKANQIRGLVAEYGLVAPQQLSALRVALADWLEDADNGLTDFFRQLLAGLRDDLTRLDHRMTQLDREITRIANQHPTAKRLQQLRGIGPLIATALVATIGDGKQYRKGREMAAALGLTPRQHSSGGKDRLLGISKRGDAYLRCLLVHGARSAIRTLSGKDDRLARWVASLQKRRHTNVVAVAMANKLARVAWVIMAKGEEFDPSKSVAVES

SEQ ID NO: 139113 - protein, 359 aa, unidentified
MDRMYAIGIDYHKRYSQMTVMEKDGTIVKEGKVANRPEAVKEFLGSYEGEAQAAVEATLNWTVIFDMVEELLGEGQVKLCHTSKARAIAEARIKTDTLDSRALAHLLRTDLLPEAHVRPKKERAIQQALRQRMFFVRVQTMVKNRIHVLIDRQVTVRETAQGFTDLFGKAGMEFLRAVELPGPERELLDGELALLEAVRERIAESNALIHELAEGDPRVPLVESIPGLGSFFSVLVAKEIGEVERFASPEKLCSYAGLVPSVHASGGRSYTGRITKQGNKWLRWALVEAVAPAIRTDAGLRGYYERIKRRKGVNSAKVATARRLLTIVYRCLKENRVYEERLPGVEYGHKSVRTAFSCP

SEQ ID NO: 139114 - protein, 391 aa, unidentified
MSMYFIGIDISKYKHDCCIISAADQKVVSKVTIKNNKAGFNELLTIIHSLANPADIRIGFESTAHYALNLELFLENSLLTFMEVNPALISEYKKSKTLRRTKTDSVDCESIARWLMTVEYKPHSKGFYHAYSLKSLTRLRDKLIRQRSFYLVKITNVLDHTFPEFKPFFNERLSKTALYLLENYGSAEKMARMNSASYEKLRSVSRGKFSPQQFLRLKELAANTVGVNNSIFDVELNSLLSLYKSLVKEIDTIEKEINKLIEEVHPHYMSVPGIGPLSAAVIYSEYGDISNFTNPGQMLAFAGIEPGINESGTESHGGKMVKRGSSQLRYTLINCCLPLIRFDMTFATYYAKKREEGKPHRVAITHVAKKLIRVIYTLESQDINFNAQKLR

SEQ ID NO: 139115 - protein, 425 aa, unidentified
MSGGVLLAFKIFRFNCCGLDVHKTWIFACIGITDANGRTEYKEKRFSSFSRGLRELSAWLASYNCTDVCMESTGKYWIPVFNVLEKTCNVVLAHPKYTKPQKGNKTDRKDAKWICDLFMCDMIKPSFIPPANIRHLRDLVRYRFKLTNMLTGEKNRAQNCLTVSNLKLDDVFSDVFGKSSRSITEHILAHPGETFDVSPFVDRRCKTSIEEIQAAVDGAVSPEQAIKLRQCLDHIDELEKHKEEIEREIVRVSDPYLDTLELIRTVPGLDKNPFTAIQILSEIGGDMSVFPTDQHLVSWAGCCPRNDQSNFKIKSTRISRAGTYLKPVLVQVANALIKSKKHPEITERYRRIKSHRGHKKAILAICRMLLTAIWHILTDLKPYTAEGYLAPKPVKKDKILTTSQALNLLKLRGYVIKDDLPVAVS

SEQ ID NO: 139116 - protein, 357 aa, unidentified
MQRNKLSFKGQNIYVGIDVHLKTWHVTTVTESGYKYSFAQHSDARELFDRLNRKFPDAHFLSAYEAGFCGFSAHYALTELGFENIVVHAADIPTTGKEKAMKTDAVDSEKIAWALKRGELTGIYVKDKQYMDDTNLMRLRQRFVADLSRQKNRTKHLLYTQGVTFPERFRKNRTHWSRNFMRWLRDEVSLLSLEKQSLVLLCDQVENTRKSILAVTREIHRLSATDKYKENYDLLSSVPGFGLIMSMSMLTELDNNVTRFPNERTFVSMLGLIPTCHDSGEKKVCGEKTNRGSKHLGPLIIETSWVAIYRDMELGAYYSNCCQSMKPHKAIIKVARKLACRAYAVLKTKTKYKYEQS

SEQ ID NO: 139117 - protein, 334 aa, unidentified
MEQKYFIGVDVSKDKLDCAIILSNFSVVREKVVKNNDLKIASFLRAVVRKFKLNDSDILVCCESTGIYNRPLERVCSDLGIPLWVEQALKIKRASTDMRGKSDRKDAIRIAEYAVRYQDRKVLFKKPSDIVEKLNNLSKVRETLLGQKVAIENQLREAKTHDPKSHKELLALYRPCLRVIANQLKKVEIDINTCVEEQSDLKKNIELIQSIPGVGKQVALQFLISTNNFTDFESAKHLACYAGVVPFANESGTIVKRPRISKMANMKLKCLLHLAAMAAVRTKTDLQTYYIRKVAEGKNKMSVINAVRNKLVHRIWAVIQRQTPYTPQREILSN

SEQ ID NO: 139118 - protein, 418 aa, unidentified
MLKIVYPICCGIDVHKKFVVATIGTTNKSGVTDYQTRQFSTFTESLLQLLDWLKIHSCVHVCMESTGKYWHPVFNILEDYCDVVVANPKYVKGIRGKKTDKKDSIWLCDLHKHGLVPSSFIPPLPIRQIRDLMRYRFKLINVKSSEKNRIQNSLTVSNIMISSVVSDTFGVSSMRIINHILDNPDDKDFEVSSMLHGSMQDKAETITKSINGNLTKPQAEKMRVCLHHFENIEKHITDIERVVLGLAQPYLPQIEIILSLPSIKDVFTAIAIISEIGSDMAVFNSSKHLCSWAGVTPQNNESAGKKKSVRISRAGVYIKPLLVQCANAAIKSKKCPYFKNRYDQIKKRRGHKKAIIAIAHTLLKCIYYMLNNGETFNYDLYKIDSKPKQSYASQITEEMALRYLETLGYQIPDMRNTT

SEQ ID NO: 139119 - protein, 353 aa, unidentified
MEDQSVINEVILGVDTHLDTHVAVVIDCAGKFLGALAMPANANGYIKLLAWARSLGCLHRAGVEGAGTYGAGLARVLREQGIEVFEVNRPDRAKRRLKGKSDPTDAENAARSVLAGESTAIPKSQSGAAEAMRIISVARRSAVKAKTQAINQLRAILVSAPQDIRERLWKVKAEQCVAGCAHLRNLGSTILLQTLTTTLRLLAKRWLALSAELKELDAELEKLTCQSAPRLRDQFGVGPQTAATLIAVAGDNPERLHNEAALAALCGVSPLQASSGKTMRHRLNRGGDRAANNALWTIAMVRMRDEPRTRAYVERRTAEGMSNKEIHRCLKRYIVRELYPLILADLQMAASVS

SEQ ID NO: 139120 - protein, 332 aa, unidentified
MEHCAIDLGGRESQVCVRRANGDLLFEGRYDTALLPDYLRQLPPSRVILETAAEAFRIADAAKEAGHEVRVVPATLVRTLGVGARKTKTDKRDARVLSEVSCRIDLPSVHIPSARSREWKSICGMHDALISSRTKLINNLRGWMRGQGLRLPRGTAETFAQRMTRLQPLPEYVASQVEALAELTERTRASVRRIEAIALNDELCCRLMTVPGIGPSTAVRFVAAIDDISRFDSAHKVEAYLGLAPGESSSSERQQRLSITKAGPATVRWVLIQAAWALQIRCRTAAARPLQLWAAEIARRRGRLIATVALARKLAGIGYALWRDGTTYQPPR

SEQ ID NO: 139121 - protein, 408 aa, unidentified
MQVEHPVCCGIDVHKDTLTACLRRVEDNGQVHKEGREFATTYTSLLALSDWLVEQHCPVVAMESTGVYWKPVYHVLAGTVEVFIGNAHELRSRPGKKTDKRDAAWIAELLAHGLIRPSFVPPPESCALRDVTRTRVALVQTRSQSKNRVHKLLEDTNLKLGSVVSDLFGVTGRRMLAALVAGERDPQVLASLALGSLKHKRPQLALALTGQFTAHHGTLLGLLLELIERLDRQSATLDQQIGALVAPLQAPIAQLDSIPGVDIIAARDILAEIGTDMRRFGDAARLASWAGVCPGNHESAGKRYRGKTRKGNRYLRRILVQCAWGARKTPTFLGRTFRRLEVRIGKKKAALAIAHKILVIVYHLLAAGTCYEEARYDQYNPRQEARERQRAIKALERLGYTVTVARAA

SEQ ID NO: 139122 - protein, 359 aa, unidentified
MSSIPVYVGLDYHQDSVQVCVLDRKGNQLCNRGVENKAKTIEQVIRRYGTPRRIAIEACCGAADLAEELATQRKLPMRLAHPGYVNRMKRSPDKTDFGDGQLLADLVRVNYLPGVWLAPRSTRELRRLMRHRAQLVRRRKDTKLRVRGLLRENRLKCPGANAWTKAWHAWLLNQAELSESDRWIMQDHVAELRSLSVRIAAVEERLRARTQDDPVVAQLMAQQGVGLVTAVTLRAEIGRFDRFDTGKQLSRFCGVTPRNASSGSRQADAGLIKAGNPELRTVLIELAHRLIRASAGRWGKLAAGMLARGKPKNVVVAAIANRWVRWLHHELRRQEGAPPTSAQAQQKGAAPSLITVAST

SEQ ID NO: 139123 - protein, 321 aa, unidentified
MEGTPVSARLEIFVGIDVSKHSWDVCLLPAMIRRSFPATDEGLAALLELLRQPPATLIVLEATGGYERRLAAGLHDAGCEVAIVNPKQVRDFAKALGRLAKTDRLDAEVLALFAQKIQPRPSEKCPENRAELDALVARRRQLLQLRTMERNRLHVAEHQLPRKSIQKVIDVLDKQLDQLDAAIAKLVESDDDWRQQAQLLESVPGVGAVTSATLVAELPELGKLNRQAIAALAGLAPFNCDSGQHAGQRRVRGGRAGVRTALYMAALTARRFNPVLKRFADRLQAAGKSAKVILAACMRKLLTILNTLVKNNTHWNPKLAS

SEQ ID NO: 139124 - protein, 340 aa, unidentified
MHMPYVGLDVHKKSISYCLKSADGTILREGSVPALRAELSVWAASLPSPWMGAMEATRFSDWMYDHLRPLAADLRMGHPARMKAISAGKKKNDELDARMICDLLRCDLLPPAYVMPADLRQLRRVLRYRNLLVRNSVQARNKIAGLLLEMGIPYDRSRLHGKKYFAGLIEQQRGEIPDSARHLLDFSREQFETLDRMERKLVRGLEAHPQIAERVARLTTIRGVGPILALTWALEVGPVERLGNIGRAQSFCGLTSALKESAGKQTRGPISKQRNLHLQTVLIEAAHLAPRFNPLLAQVRDRELERGNANRAALAVARKLVAFLMAADRSHSPAAIHAAA

SEQ ID NO: 139125 - protein, 461 aa, unidentified
MRNNRKSGDHPGSTRPIEGLPIVRAQVAGIDIGSERHWVCAPGLEGSGREIADFGATTPELVRMAEWLKERKIESVAMESTGVYWIAPHEVLEKDFEVLLVDTRQLARVPGRNKKTDPSDCEWIQRLHSCGLLNGSFRPQEQVCMLRTLIRDKAILVAESADWVRRMQKSLDQMNVRVHRAVSDLNGVTGMAIMRAIAAGERDARKLAQLRDRRCRKSKEEIAEQLSGHWREDHLFSLRQSLQMYDAIEERITAYEQEILTKLATMELEEHPGGAVPPVKNLEKAKAIKKRGQEPMRQALYRMSGVDVTQIDAIGVETVEVVLSEYGPDLSRFPTEKQFVSHATLAPRVPKSGGKPLKRKKRNSASTRVAAALRMAALALRRSPTALGAYYRRVARRIGGDVAVFSTARKLATLIYRLLRWGQPYVDEGAEAFEKRYRQQHIKGLAARAKELGYQLMPTTT

SEQ ID NO: 139126 - protein, 353 aa, unidentified
MIVIGIDPHKSSHTATAVNPVTNTDLGSIRIDATLADYKKLIAWAKAWPTREWAVENAEGLGHHLAQWLLAVGEIVLDVPATATARVRQLSRGGRRKNDRIDAAAAACVAALQGDARPVAPEGPTDVLALLDERRTNLSGSRTRIVNQLHALLRQLLAGGAPTSLTAAAATALLRGFRARSEVDRIRVGLCRDLIADIRRLDGRLAENEKQMTRALDAQGTGLREVDGIGPVTAARLIGRTGRVSRFPTAAAYANYNGSAPVQIASADTDRHRLSRYGDRQLNSALYTIAMVQIRMPASAGRAYYDKKIAEGKSPRAATRSLKRHLSDHVWRIMLADEKHSHRQHEKESDRAA

SEQ ID NO: 139127 - protein, 346 aa, unidentified
MNKITVVGLDLAKNVFQVHGADARGQAVVRKPLKRKDVLAFFAKLPPCLIGMEACGGAHHWARRFQAQGHTVKLMAPQYVKPFVQRHKTDARDAQAICEAANRASISTVAVKTTEQQAVLALHRVRQSLMKARVAQINQIRGLLTEFGIVLPVGVRKLKAELPGVLEDGENALPDMLRALLQSLREHLHVLEQHIAQIEQRLTHWHRSNDASRRLEALPGVGMLTATALVAEVGDAKHFARGRQFAAWVGLTPREHSSGGQSIRLGISKRGNRYLRTLLIHGARAVLKARMNKPEHVQDWAVRVSDRRGHNVAAVAQANKTARRAWALLTKGEEFNPEYVRERAAA

SEQ ID NO: 139128 - protein, 414 aa, unidentified
MDIVHMHCAGLDVHKKTVVASVIVSDGKVGLQKETRTFGTMTSDLLALSDWLMGYGVTHAAMESTGEYWKPVFNILENNFEVLLVNAQHIKAVPGHKTDVKDSEWIAELLRHGLLKASFVPPVGQRELRELTRYRSTFVRERATLVNRVQKVLESANIKLASVASDVMGVSGRAMLEAIIEGQASPADMAELAQKRMREKRDLLAKALEGRVKPHHRFVLTELLCQIDSLDETIEHFNKEVEEYCRPFEEAVVLLDTIPGVGRQVAEIIVSEIGTDMNRFPSAGNLASWAGVAPGNNESAGKRRSGKTTKGNKALSTALNQAAHAASHTKVTYLSAQYRRLAVRRGKKKAIVALEHTILVIAYHLIIRKEPYRELGGDYFDKRRPEATATRLVKRLEQLGYSVSLQQPVLCTAG

SEQ ID NO: 139129 - protein, 341 aa, unidentified
MYYIGLDIHKKSISFCVKDASGQIYQQGKVAATRRDLDAWMKTLPQPWTAAMEATIFTGWIYDHLKPHAAAVKVAHPLMLRAIAASKKKNDRVDASKIADCLRCDFLPECYMDSLEIRERRRTLRYRSLLVRQVVQLKTRLASLLMETGVSYDRQQLHRLGFVSELLASEDATKSIRPLLRVSQDSILRLRHIESALIRSLERDPLLAERVRRLQTIPCVGRITALTWALEMGDISRFRSIRQAISYCGLCGDEQKSADKTVRTPLSKKRNKHIQHVLVEAAKLAPRYDPSLALLYAKEKQKGNANRATLAVARKILTYLLAVDREQRDFVPVGEFHVAAA

SEQ ID NO: 139130 - protein, 398 aa, unidentified
MTESSDYESVQVFIGVDVGKDTHHAVAINRSGKRLFDKALPNDENKLRSLISDLKQHGQILLVVDQPATIGALPVAVARSEGVLVGYLPGLAMRRIADLHAGEAKTDARDAAIIAETARTLPHALRTLKLADEQIAELSMLCGFDDDLAAQTTQASNRIRGLLTQIHPALERVLGPRLDHPAVLDLLQRYPSPEKLASLGEKKLAAQLCKLAPRLGKRLAADIAQALAEQTVVVPGTNAAAVVLPRLALQLITLRKQRDEVALAVEQRVLAHPLYPVLTSMPGVGVRTAARLLTEVACRAFASVAHLAAYAGLAPVTRRSGSSIRGEHPSRRGNKALKRALFLSAFAALRDPLSRAYYTRKMSQGKRHNQALIALARRRCDVLFAMMRDGTFYTPQAS

SEQ ID NO: 139131 - protein, 359 aa, unidentified
MLNDSTTFLGLDLGDKHSHLAILDQHGDLIEETRIPTSKASFQRKFSGLPPARVAMEVGTHSPWASHLLSELGHDVLVANARKLRAIYSNPRKTDQVDAETLARLARLDPNLLSPIHHRSPKAQADLTVIRSRDALVRSRTLLINHVRGIVKSCGDRLPSCSAHSFSKKVEPSIPNPLRPALLPLLEMISALTQQIRAYDRQIETLCQAQYPETRSLQQVSGVGALTALAFVLTLEDPSRFAKSREVGPALGLVPRRDQSGDRDPQLPITKTGNAFLRRLLVGSAHYVLGPFGPDCDLRRWGLKLAERGGKNAKNRAVVSVARKLAVLLHCLWKTGEIYDPFYLARQHDQASEAIPAAA

SEQ ID NO: 139132 - protein, 323 aa, unidentified
MIKKDFNIVIGADIAKKKFDVACLLEGKFKHKVFTNDAVGFAGFVAWFLSLCGDANPLICMEATGSYSGSLADYLANHGFSVSLVNPAKIHAFAKSELSRAKTDKADAKLIARYAFMTQPPLWIPPPANIRELQSLVRRVEHLLEMIQMEQNRLETADASTHLSITNVLNTLQTELKSTRKAINDHIDNNPDLKQRSDLLETIPGIGEACIAHLLLALSEHHGFTHAKQVVAFAGLAPVLRESGQWRGNTHISKTGDSALRKVLYMPALCAKRYNPVIQVFWNRLQNNGKNGKAITCAAMRKLIHIAFGVIKSGKPFDPSYAI

SEQ ID NO: 139133 - protein, 351 aa, unidentified
MPRRSTVRAVTTIGIDMGKNTLHMVGLDSLGAIVLRERVSRGRITSRLANVPPCLIGIEAGMATHYVARELAALGHDVKQVPPAYAKPFRQGHKNDFRDAHAVAEAVQRPTTRFVPAKTNEQLDLQALHRVRSRLVSERTAVINQIRGFLLERGIIVRQGLRFLRHLLPDILAKRTDVLSPRMVRVVSDLVGDWRQLDERIETVTDEIETLAKSDDSCRRVMTVPGIGPLISSAMVAAIGNGTAFAKGRDYSAWLGLVPRQMSTGDRTILGRLSKRGNGYLRMLFMQAARVILLRPANWPKHGFGAWLVRAAQRLHPNVLAAALANKLARIAWTVLAQERSYEARVTRAAA

SEQ ID NO: 139134 - protein, 403 aa, unidentified
MRHVIAFDISMGKSYMVIYNAQKQCIFEKEIKHSKSEFEELQKKIHELTNETGKSPEIVFEATGIYSRQLERFMQDNQYTYCLLNPLEAKLQCDSLRIHKTDRSDAHRLAITHFTVTRRVSHGTDHLFHQLKSLSRFYSELDGELSMIRSRMHKVIQLTFPELEKMFTSKSDLFLNFVQLFPHPDCVLNLSKTIIKNRIRANTNKKISTIMAEKKAIQILEIAKNSYPAVSQNDVLCDQLKVYARRYQELLHQKERCINNMVHLAEQRAEYSIILSLPGIGPNTAVRLMAEIGDITRFANNKQLNAYAGIDIRRFQSGKTFYKDKINKRGNKHLRKLLFLIIQNMIKQRRYGRNHIIEYYDKLKTQPYNKCHKVASIACVNKLLKLLFHLITHDIHYDYRLTA

SEQ ID NO: 139135 - protein, 422 aa, unidentified
MSYCPVAGIDVSKRFSDMCILSPDNKIFAQEKIYHDETSINRANALLQKAERLFFRKPVIVMESTSHYHLILFQFFSEHGYDVIVVNPLQSNSMKDFSIRKRKTDRVDAFKLAMMYRTKTLRPSQIPQTATRALRQLCRHRAELLNDVSSYKNRLTALLDQTFPGYDKVFSDVGGVTSCAVLVRFPTPTILLVEEESELVEVIASASKSGYSFAKKKAGLLISAAQKAQAWGIHSCADETLIVCTIQMLRTLSESVLQIETAIDNLLAQIKEMRNNVSLLQSIPGIGSHSAALLLGEIGDISLFKKPKQLAAYWVLDPTERQSGSFRGTKNKLSKRGSPYARAALHMGVVNSICKRGKDSAANPVLLSYYEKKCKNKPAKVAQAASMHKLVFIIFAVLRDQKPFELKTPEQHAVEQGFVKAA

SEQ ID NO: 139136 - protein, 371 aa, unidentified
MKKSIMFIGMDVHKNSIQIAIAEDGRDGEVRNWGKIDNTLQALDKVVRKFVSKGGCLYFVYEAGPCGYQIHRHLTAQGFDCAVVAPSRIPKASGDRIKNDRRDACMLARLHRAGELTAVYVPLAEDEAIRDLTRAREDAKGDEKKAKQRILAFLLRSGFKYSGSKAWSLAHMRWLSDIKMAHPSQQIVLQEYIDTLTESRLRVQRLTEHLQQLLPKWRLFPVVKAFQTLRGVSLIVSSTTVAEIGDLRRFENPAELMGFLGLVPSEHSSGEKNRRGSITKTGNVHVRRVLVEAAWAYRLPARVSRVLLKRQEGASKQVCDISWKAQLRLCSRYRKLWARGKAKQVVVTAIARELCGFMWAIAQHIQIPAQT

SEQ ID NO: 139137 - protein, 364 aa, unidentified
MNSVQYVGMDVDKEKIILARLGPGNAKEVQEHVIANTPSAVKKYFSALLAGAEVHASYEAGCFGFGLYRQLSAMGVAVLVAAPGLIPRKPSDRIKTDRRDARSIALALRAGQLTGIHVPTVQDESVRDYLRMYEDLRGDLRICKQRVLHFLLRRGIRYENGGPWTVRHKNWLASLEFADSRDRKTLDMYLATMQELEGKCSEAAEEVEQIAAQERYREPTKTLCAFKGVKTLIALSFVAEIGDFRRFPNARQFMAFLGLVPSEHSSGNKRRQGGITKAGNSHLRRLLVEAAWHYRSYHPSSRVLIERRRGVDPQILGYANRAGRRLSRKYMHMVLRGKRSQVAVTAVSRELAGFLWGAMTGQVA

SEQ ID NO: 139138 - protein, 345 aa, unidentified
MERVSTIGLDLVKQAFQVHGMNKDGEKVFSHKLARAELPGFFKKQRGCVVAMEATGGAHYWAREIESLGHTPLLIPAQYVKPFVKREKSDALDAEAIANAATQPGMRFVAIKSSEQQAITTLMKTRTLFIRQRTSAINALRGLLAEFGLVVPSRSVNVVKLKQILSSDKSHLPEPARTVLRSVYQHIDAINEHMSGIEESIDDQVKKDDATQRLMTIPGVGKITAATVRAVVPDATLFKTARHFASWLGITPRSFSSGGKLSYGRISKRGNGELRKLLVIGAFPIVARARGRQSTNEWLYSLVKRKPYKVAAVAIANRTARIVWALVTNGGVYSSTKGFPQPELA

SEQ ID NO: 139139 - protein, 407 aa, unidentified
MAAVMIGVDPHKGSHTAVVIDQAEMVLGEVRVRASAAQVQRLLAWAAAWPERTWAVEGAGGLGHLLAQQLVASGERVLDVQPKLAARVRLLDAGATGKNDPNDARSVAVAALRSAACPQVRAEDHAAVLKVRARRHRDLSRSRNQVTCRLHAVLCELVPGGVSQQIHAAAAARLLEQIEPAGAVQAARRELAGEFLADLRRIDAQRGDTRRTLAAAVRASGTTVTEVFGVGPAVAAAVIGDVRDISRFPGPDCFAAYNGTAPVEVSSGGRVIYRLSLRGNRRLNHAIHMAAVTQIRYRHTKGRAYYDKKIAEGKTSKEALRALKRQVSNAIYQRMKADARRAGAGPGGHPGNGSVASAAGSHPEHRLFGPATPGPEPTLRPRPGPSKATRPGSSRRTGRSVPAHTSA

SEQ ID NO: 139140 - protein, 358 aa, unidentified
MQKYNISFKGQRIFIGIDAHKKNWDVAITPEIGIIKRHSQKASAKELFDFLKKHYPDGDYLAVYESGFSGFSTYYALKEVGVNCIVIHAADVPTTQYEEVMKTDRLDSIKLVKSLKAGLLKGIYIREKENIDDRSVIRIRKTIQKELSRYKIRVRHMLHSNGVPLPDRFEKPGSLWSRAFIKWLKEDVKLLSTSRKSLDLLIRQVETIRITLLEATNMMRNMSQTERYKRKFDLLTTIPGIGVTVAMCILTEVYDVRRFHNEREFAAYLGLIPTCHSSGDKVVHGEMTFRGNKQMGPMIIEAAWTTIYRDPGLGSLYLRYKERMKPQEAIVRIARKLSNVIFAILKNETEYIPYQTGK

SEQ ID NO: 139141 - protein, 409 aa, unidentified
MNKVDIAPFEVFCGIDVGKSLNHIVALDRYDDKPLINRKVPQEEAEIRAALEEAGDFGLALVIVDQFGAFGRLVVGVAKSMDIPVAHMSPRRFRQVAETYGEDKFDEKDAFILADASRTTPRNIEFVGNRAESMAEIKVLSSRRDDIVEERTRCYNRLHDFIHQVSPPLEELFSKRKLHNDLEIRLIARYGGPIGFRRAGRVRASTWAAELKYHCVDGPKKVEQVFDVLDRQTVMLPGAAVIEEQIRSIASRIIELLAEEKRLNLMIEQRAKMIPEVDLLQSIPGVGPVYAALIAVEIGDIGRFRNSNHLASYAGVAPRKEESGTSVHKRRKRKGGNRRLKNALMQSSQRSVQCDPVARAYYERKRAEGKKHLQALRALARHRVTVIFAMLNEGTFYEPPVEVDENGRG

SEQ ID NO: 139142 - protein, 313 aa, unidentified
MAEVTFPQLIQRACGIDVHLKVVVATIDGAGIQRETRSFKTFTSSLNELKEWLLSNGVTHVGMESTGVYWKPVYKVLEDSIPNVWIVNARHIKNVPGHKTDKMDSEWICKLLLAGLLKPSYIPPKEQRQLRDLTCYRNKLIQQIASEKNRMMHILEDCNIKLSSVVSNTSGTTIDMLCEGKVLTLDDINSVYHGKLSASPEELLEACTGFVEEHHIYLLQMIRKDIDQTQTLVDDLSERIKRLLSKYENVLELLREIPGFSTKVVEDLVSEIGLDMSHFPSEKHLSSWAGLSPGNNESAGKKKAHESLTETNR

SEQ ID NO: 139143 - protein, 647 aa, unidentified
MATWAVGVDLGRKGAHVAVLADDKGQQSGPAVSFSTSIEELDRVRSELCARAPKGTELVFVMEPTPTWRPVAKYLKACGHRVFLANQSQASSLRNLIKRHAKTDRLDALTLAKLPSVCPEAVRPAPLPDDPRWEMLRWGVKREYKLSRRIANLLKSIKEAAEECIPGVADLFPEPERPLDNLVYREYCALGRHRGMTVKRLLEEIRARLGHPLKPEEALRVKKLFSLAQHALKLHGRLAPATSAIADAIGEDLCFLDRLNAEQERVKRENYVLYRELDEKGCVMSLPGVGKTLAPVFLAVAPAVAYMTSNKQLRKFSGYVPRVDNSGLKEGKGQSMTKAGPAWFKRGLYLASDAGRKRDPQLARVYRRAMVEKGFPHKKALCEVAVRLSDRLFRVLKDNRLYELRDAEGNPVSAREAREIIRAKYAVPEEVRARLRRRKKHKRGSSDERDAALRHLPAMLTPSGQKGSIKAAPRSTGPKRVGEILAEHLGPEFFARLAASAEHSQFTIAQAHPATLSVAATGEIPEDGQGTRSSLAESTSAPIKLQREPASAAFKPQATEELQPTVPVEDTTAPDGFQHGARASKTSGEAYDSPGPYGHRPSFPPSAGPDAISAQPSWLDPVVAFGSAREATAPPGPDLPRGRDRPQ

SEQ ID NO: 139144 - protein, 393 aa, unidentified
MFIVGVDIAKRSHEAIVIDDSGALVHKAFNFKNDADGFRKFTAILNAISPNPSDFTIGMESTSHYWLALYSNLKKHGYTVHVLNPIQSNALRGMYIRQIKNDEHDSFIIAEVIRFGRYTEGGMPPSDLYELRELCRARLFIVDMTADLKHKVIALLDQSFPEYERLFTDIFGLTSSEILRNYSTPEEILSLDTEKLTQLVAQASRNRFGEEKAKQIRNLAENSFGIVLEYNTMGLLIKHHMEHIRFAEQQIAELEARIAELFSKFDDCITTIPGIGPALGATIFSEIGDIHRFSSAAKLAAFAGLDPTVKQSGEFTGTRNHMSKRGSPYLRRAIWMASISAVMHDPYMKAFLQKKLAEGKPYMNVIGHATRKMTNIIFAVLRDNKPYYVQPFD

SEQ ID NO: 139145 - protein, 423 aa, unidentified
MMKLKYSICCGLDVHKNVIVATIVTTNKDGISDYKQKSFSTINSDIQKFHNWLIENNCYHVCMESTGKYWIPIFNYLENDIDVCLTHPKYVKAIKGKKTDKKDSKWIADLYKFDLVRCSFIPPKDFRQLRELSRYRFKLVCMKSSEKNRIQNCMTISNVGIASVLSDPFGKTATEIISYLLEHTADSMDEKAVRKLIKKGAKSKSDEIIEAIKGYTIETDQAKKLELARGHLEYLDDMITQTEVELYVRIKPYYEFVEFVSTMPGMTELSSTIVLAETGVDMDIFDDAKHLCSWCGLSPANNESAGKKKSVRIAKAGDYLKPMMVQCALAAIKSKKQPYFAIKYGRIKKRRGHKKAIIAIARMMMVCIYHMVSEKKPFIPTDYEELMNPQNHVERVVLNENNVFAYLESLGYDSSKLVKRNDN

SEQ ID NO: 139146 - protein, 367 aa, unidentified
MKERRLVGIDLGIASAHTVRVLDGNGTTVAKRKAWPTVQSLSELESAALANAPQDTRLEVVIEPTGPAWLPIAVFFSSRGHTVYRVSSAKAADLRRFLSRHAKSNGIDADTLARLPLVDPLGLRPLELPCAERAALDRRVRATDRLTQLSSIHKRRIKDLVRQLMPMTPLQGDLSMSDLAVLERYADPTQLIKAGKTRLTTLISRTSRNQLGAERAEQWLAAARASIELYGGHPGMSFTDLAAEVASEVRLLQATQQELATHAEQREQCYRWVDPLGLARSLPGLGVIGGPALVACMGEPGRFANGRKFRSFTGLAPKASETGESDRKGQPISKARLFAAAQHLVSGCRHRPQTGPPTCPDLLPSDG

SEQ ID NO: 139147 - protein, 334 aa, unidentified
MENIALIGIDLGKNSFHIHCQDRRGKAVYRKKFTRPKLIEFLATCPATTIAMEACGGSHFMARKLEELGHSPKLISPQFVRPFVKSNKNDFVDAEAICEAASRPSMRFVQPRTESQQAMRALHRVRESLVQDKVKTTNQMHAFLLEFGISVPRGAAVISRLSTILEDNSLPLYLSQLLLKLQQHYHYLVEQIKDLESQLKRKLDEDEVGQRLLSIPCVGTLTASTISTKIGDGKQYASSRDFAAATGLVPRQYSTGGRTTLLGISKRGNKKIRTLLVQCARVFIQKLEHQSGKLADWVRDLLCRKSNFVVTCALANKLARIAWALTARQQTYVA

SEQ ID NO: 139148 - protein, 360 aa, unidentified
MRYSTIVGIDTHSKKNAVCAIVPATGEMREAVLSEDPGQLLSWISGQGFPEPVGCVYESGPTGFGLARALEAGGVACTVAATSKLSYRVDRQKNDRADAKWLARQMLAGGVRAVRVPTPEEESLCHLSRLRGEVAADLRKAKQRVSSFLLLTGTEYTLTKKKWSKTFRKWAESHEFDQPADTFTFRCKMSAVLRLEERLAEVEAEILRTIASSPKLSERMSRFTCIHGIGKVSAFSLVCEVHDFDRFNNGASFASHLGLVPSESSSGKKVSRGAIAKQGNSHLRRILVEAASCYSKQFKAVRSEDAAVPEAVRAKAEKCAARLRKRRAALKMRGVSANKAKVAVARELAEWIYHIAVMPA

SEQ ID NO: 139149 - protein, 424 aa, unidentified
MQNTLARKLKQVPEGYLVVGVDPHKKKHAAVMITQDFTAQAKFKFDNTREGLEVMLDRAKAEMVKSGCRGVIFAIETGGHYWRNIAYYLDERGIPFRFINQYTLKRRREGKDLNRRKNDYRDSEVAAQLLCTGEFVESVIPQGVYAELRTSHNAYQRLVKERTRVTNLVKGLLDALFPEFTQVFKDPCGLTSLSALSTCPIPRVIAGMTEDEFVATIEARHKGRRLMRKKLRALHYSAKTSIGIDAGARSVSSELAFLVDKLELIRQQIRIMEGTLVRLVDETEEGKYLLSIRGLNYIAVAGLLAELGCFKAYRSAKQMIKMAGSNPTESESAGKKRAKTPMSKQGRPLLRYCAWTSVIPMLRFNTDFRAWAKQRRERPAHANPLSGREIVGAALNRLLRLAFALVKNQTYYQNVKPARTPVAV

SEQ ID NO: 139150 - protein, 343 aa, unidentified
MKITTVGLDLAKSVFQVHGADARGHAVVRKQLRREQLIGYFAALPPCLVGMEACSGAHHWARRLREFGHTVRLIPPQFVKPYVKSNKNDAADAEAICEAVGRPNMRFVAIKTVEQQSVLSIHRVRQGFVKARTAQANQIRGLLAEFGLIVPQGIGNIAQRVPSLIDDSGPLPVPMQQLLNGLLENMKALSGKIKELDVQIKSWHQSSDLSRKLEAIPGIGPLTASALVASIADARSFKNGRQVAAWLGLVPRQDSSGGKTKLLGMSKRGDTYLRTLLIHGARSAITAAQRCNKPNAWLAGLLARRNPNVAAVALANKNARTVWALLAHDREFQLNYVSLPVIG

SEQ ID NO: 139151 - protein, 353 aa, unidentified
MKSDKYMGMDVHQAMTVVVVLDAEGKVVLETMVPTEAAAIIRLVQSLSGPLRVTFEETTQAAWLHEVIRAYLTEVIVCDPRRNKLLEDGSKADKVDARKLAELLRAGLLRSVYHGHEATRQLKELVRAYETLSIDTLRTMARIKAIYRGRGIRTPGRGVYQPKQREQWLQTLTEPGIRQRAAWLYEQLDHLQPLRRKAKQTMLIESRAHRAVSLLRTIPQLGPIRAAFIVATVDTPHRFRTKRQFWSYVGLAVVTHMSSEYEMKAGRVVRCRKPISTRGLNQNCNRRLKEVFIGAATSASNRKAYGSFLNERQKKGMRPEMARLTLARKIAATALAVWKKGEAFDPKKLNVMT

SEQ ID NO: 139152 - protein, 432 aa, unidentified
MKAIIERCAGIDVGKKFITACTLIGASDAEPTIEKRLFGTFNEDLKTLRCWLLERGCTHVVMESTGPYWKPIFNILEGALVVILANGEQVKARRGHKTDWKDCAGLADLLRHGMVRPSFIPPRPVRELRDLTRRRGRILGDASSERNRVQKILEDANVKLGSVLTDVFGASGQLMLEALLQGSSTAAEIAELARGTARKKIPAITDALRSHRMSDHHRMMIRLSLEHMAFLEQQLQQIDRDILCKISESGFEHAFQLLQSIPGVQQDSAAVILAEIGPDVQAFPSAAHLSSWTGVCPGNHRSAGKEMNPHIGYGNRWLRPTLVECAWAASVKKGCFLKDRFWRLAAGNRKRALVAIAHALVILIYNALSSGEPYREQGVIEIDEAKRQRLIRHHIRRLGRLGVCFSSRMQDYVTVDLRRKRKSSLDLPTAQT

SEQ ID NO: 139153 - protein, 408 aa, unidentified
MNSLFVGIDVGSKNNVAYLMKPDGSKHSGFSVQNNLGGAKLLSEGIVSALKSMQLSDVVIGLEATSIYGDSLVYALREDGSLGRFQRKIHVLNPKQVRKFKEAYPDLPKNDWVDAFVIADHLRFGRIAKEVYVDDYRYQALRTLTRSRFDVIQNLTREKQRFANYLFLKCSGIAQAKDIQNTSATTIALMEHFESVDDLANADLNELTAFISEAGRGRFADPDATAKTVQAAAKGSYRLPRTVNDTVNQAMAVSIASMRAMKEQVKVLDKAIEQQFEIIPNTLTSIPGIGKVYSAGIIAEIGDVHRFDSQASVAKFAGLVWTQHQSSEFEAETTHLIKSGNRYLRYYLLEAANSVRRCDSEFQRYYDLKFHEVNRFQHKRALALTARKLVRLVFRLLKDNRLYIPLEG

SEQ ID NO: 139154 - protein, 313 aa, unidentified
MKELLERCCGIDIHKKTAVACIMLGSGKKIKKEIRTFGTMTSDIKDLKLWLKKNKIKDVAIESTGIYWKPIFNVLEDDFEIVLANAKHIKNVPGRKTDVKDSEWLCKLLKNGLIAKSFIPPEDIRHLRELTRYRKSLLSGLTAAKNRVVKTLESANVKLASVLSNVHGATGWKIIKELANGEQSVKKLISNLSPRVKASKEQFEKALENTLKTHNRELLKVKIRHIENLQKLISEVEEQIKTLLKKYSSEILLLRTIPGMGETIAAITLAEIGADMNQFPSDMHIASWAGLAPGNNESAGKKKVLESLKEIKT

SEQ ID NO: 139155 - protein, 377 aa, unidentified
MASARLPTTYIGGTDVADGIRWVGLDVHARESTVAVFDQRSGELTTRRVVGRPHELIERLMEIPVPARMVYEAGPTGYGLARRARAHGIEMLVCAPGRTDRAPTDRIKTDKRDAIRLARRLAAGELTFVTVPSVEHEQLRDLVRCRDDIRADLMRARHRLGKFLLRREIYYDRPGEPWGRKHRIWLASLCFSDQASRLTMADYMHAHDVLLARRDRIEAELEQLASESIFAKPIARLRCLRGINTLSALGICAEVGQFERFDHPDSLAAYLGIVPSENTTGQQRRQGSITKAGSTHARRLLIEAAYHYQRYAANGEKIQRRQDGQPAHIINIAWRAQRRLNARWRVLKHQRHKPNGVVAVAIARELAAFCWEIALAD

SEQ ID NO: 139156 - protein, 391 aa, unidentified
MPEDAPRLTRAAIRTDLGAIFVSLELSRRAWLITSLSPGGGEKMSKHSVPGSDVSGLLRRFAELRRKAAARTGQDFPIIVIQETGLDGFWIHRVLQSEGIESHVVDAASILTSRRRRRAKTDRIDGETLVRTLMAFKRGEPRVCSMARAPTPDEEDRRRVSRERRTLVGERVRHANRIKGLLFAQGVFGYEPLRKGRRERLEALRTGDGRPLPVHLKAQIIRELDRLEVVLVQLKTVGAERDALLKQVTDAGSSPPAMLMQLKGIGPETAAVLWSEGLFRQFDNRRQLAAYAGLAPTPWQSGSIDHEQGVSKAGNPRLRTTMVELAWLWLQNQPASALSLWFHERVRRLGGRMRKTTIVALARKLLIALWRYTIAGVVIEGAVMKPATTTI

SEQ ID NO: 139157 - protein, 318 aa, unidentified
MDEDVYVGIDVSKTELVVAVRPSGESFTLAYHRAGLKQLVGRLGELKPKLVVVEATGGLQRQVVAALWTGGIAVAAVNPSWVRSYARGGGLLAKTDRIDARLLALFAQREQPVPRPPLDAETQALQELATRRDQLLEMRVAEQQRLKRSSAQVRKELRQHIAYLEGRITQIDDDIDKTVRRSEAWRRKSEVLRSFPGVGKVFCTTVLSKLPELGTLSGKAAAALVGIAPFPDDSGARRGRRVIRGGRYPVRSKLYMCALSAIRFNPLLKQFYERLLARGKLEKVALVAVMRRIIVILNAMLKSNTTWSQPCAAAVEQN

SEQ ID NO: 139158 - protein, 425 aa, unidentified
MNPQLSDCAAFVGIDWADDHHDYCMFDPTTGERQQGRFDQTPDALNEWINRLRERFGGRSVVVCLEQSRGPLIYALMAHALFVLYPINPKTLAKYREAFTPSRAKDDPTDADLLCELVTQHSDRLTAWKPDDTQTRQLAALCEQRRHVVDVRTQLIQQVTAALKSYFPQALAWSGSELHTLMAAEFLLKWPTLESVQRAKAQTLRTFYYVHNCRSETLIQERLEQIRTARPLTTDPAIVEPLALTVQTLARLLRDLYTAIAQYDRQIRALFRQHPDAFLFDRLPGAGAQLSPRLLVAFGTDRNRYQKAAELQAYSGIAPVLERSGKQTWVHWRWQRPVFLSQTFYEFAQKSIEFSAWAAAYYRLQQARGKSRHASIRALAFKWIRVLFRCWQERRPYDESVYLAVLKQHASPLMAYMAETAPAAL

SEQ ID NO: 139159 - protein, 344 aa, unidentified
MNYYAGIDVSLESSSLCIVDATGEIVKEVKVESHPDALVKFFKAFGLPLAVIGLEAGPLSQWLYAGLTKAGFVTSLMETRHVNAALSATTVKTDRRDARGISQLLRMGWFRPVHAKSAGSQEMRALLVARKQLQHKLRDIELSLRGILRGFGLKVGKVTDKTFEARIRELVAGHPMLGQIAEAMLAARAMLLEQFNKLHKAVLKIARRDEACRRFMTTPSVGAIVAITYKSALDDPGRIKKSRNAGPLFGLTPKRHQSGETDITGGISRVGDEMVRTALYEAANVLLSRVTRFSALKRWGLEIAKRRGLKRAKVAVARKLAVILHRMWINGSTFRWTKTEAAHA

SEQ ID NO: 139160 - protein, 341 aa, unidentified
MNVKTIGIDLAKNVFQIHGVDEHGKRLFNKQLRRAQMASFFANIPPCLIGMEACASAHFWANKLISMGHNVKLMAPQFVKPYVKTNKHDAADAEAICEAVTRPNMRFVPVKTAEQQAVLALHRSRQSFIKQRTAQANQIRGLLAEFGIVVPRGIQQLQRRLPELVEDADNPLPVLFRTQLSLLQHHMAYLFDVIATLDKQIEQCYRQNALCQRIGKIPGIGPVTASELIATIGKANNFENGRQLAAWLGLVPRQHSSGGKQVLLGISKRGDTYLRTLLIHGARAVLQSAKHKQDAVSSWANQLMARRNNNIASVALANKNARTVWALLAKEREYCAPIISA

SEQ ID NO: 139161 - protein, 425 aa, unidentified
MNYKQNEKINQVKESTLVVGIDIGSTTQYARAFDRRGIELGKVFTFSNSREGFETFKAWMQYLQDKYRKSDVIVGIEPTGHYWFDLGAYLEDEGILLVMVNPYAVKQTKELDDNSQSKNDRKDPKVIAKLVTEGRYSAPYTPDGVYADLRIMVANRKRLIREMTQIKNRFARWFAIYFPEYTDVFGDYEAQSSMLLLKKVCTPEAIVELGAEKINQIWRDAKLRAVGMKRATTLCETAKRSIGLKKGSSAARYEMKLLLEDYEYKKAQLDAVMEEIEKLCRKIPESEQMLAIKGIGVITVAGFLAEVGDVRRFESPRQIQKLAGLSLRENSSGKHKGQTTISKSGRSKLRAVLFNAAIPLIAKNPEFKSLHEYYTTRANNPLKKKQSVIAISCKLIRVFYAILAKGVTYDAQKLISDIHRQPQVA

SEQ ID NO: 139162 - protein, 420 aa, unidentified
MVDVLIERCAGIDIGKDEVVACVRTPAPSGRGRRKQTRTFSSFTGSLEAMADWFTAEGVTDIAMEATGSYWKPVWYVLEERSFALKLVNAHHVKILPGRKSDVLDAEWLAELLEHGLLRGSFVPPPAVRELRDLTRYRKRLIQAHTSECQRIQKALEDAGIKLDSVASDVLGVSGRAMLAALVAGERDPKVLAELAKGVLRRKIPALRQALRGRFTDHHALLIGLSLDHTAHLEAAIARLDERIDTVFTTHTSEASIPFARARDRLDTITGVGKRAAETIIAEIGVDMSRFPTAAHLASWAGVAPGNNITGGKRGSGKTTKGDVWLLDILVQCAWAAARTRDTYLSAQFWKLARRIGKKKAAVAVAHSILVICWHLLTHDCDYDDLGGDYFTRRNTDRQRDRLIQQLAGLGYYVTLDKIA

SEQ ID NO: 139163 - protein, 346 aa, unidentified
MLADEVAFVLGVDTHADSHALSLVERETQRTNRCLTIPASRRGYRQALRLARRHAPGRRVWALEGSGSYGAGLARFLSAQGELVLEVERPTREGRRGRLKSDSLDAERAAWQVLSGKAGAKRRSASETQALRALLTTREGAVRACTAALNELRALALTSPPELGERLQGRSEAVLIGACARLRPGRGDSERAACALALRSLALRVRQLRAESETLERELGRRVQALAPELLSRRGVGPISAAALLVAWSEPGRVRSEAAFARLAGVAPIPASSGKVVRHRLDRGGDRRLNRALHTIVLCLRRVDPETKSYIARRVSEGKSEREAVRCLKRYQARSLFRLLEAMPKG

SEQ ID NO: 139164 - protein, 386 aa, unidentified
METQGKVTRIGMDIHRTFSRVSARDDAQRIVWRRRLEHCDRLPLRAELARWPAGTPVVLEGSFGWSWLADELAEAHLQPHLASSRKVARWRDLHGLAKSNRTDADLLSLLGFEPPRLWEVWLPPPEVRQQRETLRYRMTLVQTQTAFKNRIHAILHRHGLFPEMRKLFTAQGRRWLQQLVPAQAKGLPASARGALKGYLQVLDHLRLQIARVTRTFRRQLQADPTAQRLCTLPGVKWILAYTLRAEIGRIERFRSARHLVSYSLLAPRANDSGEEDDAPPQGRHVGHYGRRTLKWAYLEAAHTAIYKDTGLRAWFDQYTHGGRDNRNRGYIGVARRLCQRSYVIWKKEIDYQSEPPPRPGTRPRRSQVVRPVQGQPAAPLVPAACG

SEQ ID NO: 139165 - protein, 323 aa, unidentified
MAKRITICAGIDTGKHRLDVALDGSSERLQVENTAEDHQALVEWLRSHKVKRVGIEASGGYEQAVVAELRRKRFVVVLFQPKQVRAYGTFHQLLAKNDKIDAKLIAMCTAAVRTIHSAPDPRLQPLAEHLTMIDQITEDIARLKNRLESCRDKRIQGIWKAQIALLAKSKRAEIKALLAAIRKHPDLAARLDLINSVAGCGLPTAVAVLIRMPEIGNVTREQAAALSGLAPYDDDSGNRVGDRHIEGGRQRLRRALYTAALPASFRWNPQLMALYGRLIAAGKCHKSALIACARKLLVIINAVVARGTPWVAEVPQLAKLPAL

SEQ ID NO: 139166 - protein, 397 aa, unidentified
MIAVGIDVSKSKSTVAILNGDGSIRAKPFDVHHVADELQALVDYIKRTSEPPTILMEPTSHYHYPLLKAFTEAELPVCLINPYQMKKYGDTDLRKAKTDKRDSLRIAQYALEKSYSLIPYTPQDQKYEDLRFLSRQYSQRISTLTVAKVQLLSLLDETMPGITTILPLKSRDPDNCVLLRFIKRFKSFDVIRKMGKTRFLDSYQVLVKKTKDRFAGSKGLAIYELVLNSVTTRGENPLSAMTQDQCVDLVSTSQKAADEINLQMRIIAETMPEYKVLRSMAGVWDRLGPIILGEIGDIRRFHSGKALNAYAGNDAPPYQSGQFESRNRHISKRGNPALRKACFEVMQALKLTKPQDDPVYLFLLKKEQEGKPYNVAKMAAVNKFLRIYYARAMELYK

SEQ ID NO: 139167 - protein, 415 aa, unidentified
MQVFYERCCGLDIHKKSVTACLSISSAKGKINKQTRSFGTTTPELLQLLDWLVTAQCTHVAMESTGSYWKPIYNLLEGALELLVVNAHHIKNVPGRKTDVQDAEWIADLLRHGLLRSSFIPSRSMPELRELVRYRISLVQQRAAEVNRLQKVLEGANIKLSSVATDIMGVSGRAILGQIVAGNCDPQAMAELAKGRLRLKLPQLKQALAGRVQPHQRFMLAQLLAHIDFLDEALQQCICEIEARMYTSEEDLERLCTIPGIKRRTAELLLAEIGADMSRFPTHKHLASWAGLCPGNHESAGKRYSGKTRKGSRWLRAGLVEAAKAAGRTRTTYLGTHYRRLVARKGSKKASVAVAHTILVIAYHLLKHKTTYQELGANYFDQQDKERISRRLTKRLEQLGYQVFLEPQSTSLTPA

SEQ ID NO: 139168 - protein, 414 aa, unidentified
MTEEEIISWFAGVDWGSERHQVCLLDARGTTVGEREFPHSGEGLAELGDWLLSMASAASTVAVAIEVPHGPVVDALIDRGFVVYAINPKQLDRLRDRFSVAGAKDDRRDAYVQADGLRTDRRLFRRLQVADPRLIELRAWSRLAEELRAERVRLSNRVRHQLWRYYPQMLKLTDDLAAPWFLELWAIASTPAKAGRLRKSTVERLLKQHRIRRMDAETVLRILREPAIKVAQGVAEAASIHIRSLVARLRIVNRELREAERKLDELCTTIGEIEQTSGEGLQRRDVAILRSMPGIGRINLGTLLSEASGPLSRRDYEGLRTLSGAAPVTKRSGKSLIVVRRYAAHVRLRDTVYHWARVATQRDPKCRARYTALRKRGHSHGRALRGVADRLLALVCVLLQRQTLFDPYFGRSTA

SEQ ID NO: 139169 - protein, 341 aa, unidentified
MYYIGLDVHKKTISYCVKDASGHVQQRGTMTATRTDLDNWMKTLPQPWTVALEASIFTGWVYDQLLPHAAQVKVAHPLMLHAIAVAKKKNDRIDASKIADCLRCDFLPECHMACTSIRDRRRTLRYRRLLVRQMVQMKNRVSGLLLETGVSHNKERLHQVKYFQELLTDKEVTESIRPLLRLSHETIRRLDKTETALIRSLERDPVLAERIKNLKTIPGIGVITALTWALEMDDVSRFRSVKQAISYCGLCGDERSSADKVLRTPISKQRNKHIQSVLIEAAKFAPQQSHELALVYEKEKQKGNSNRATLAVARKLVAYLLAVDRSRRPFIPAENFSSAVA

SEQ ID NO: 139170 - protein, 320 aa, unidentified
MTKKKGRSFIGIDVSKQLLEVAVHESSYHFSCPNTVAAFAELIAELVHLQPKLIVLEATGGLETAVVNALRGVGLPVVIINPRRVRDFAKALGQFAKTDRLDARVLAHFAAAVQPPLRPHKSQDEQELDALRKRREQLVDMLADEKNRRASARSAKWRDQIEKHIEWLEQDLAELDAQLKALLKASNQWQVKDRILQSTPGIGAVVSSALIADLPELGTLSRQAISKLVGVAPLNNDSGPKRGTRHIYGGRAPVRRLLYMAAFNAIRCNPVIKEFFARLTAHHKPYKVALTACMRKLLAILNFMVRTNTQWTYKAAPISA

SEQ ID NO: 139171 - protein, 413 aa, unidentified
MSLAASGVGEAQTRFVGLDVHRKYATVAAVDSKQQVVLTARRIDFNDFDAWVRKHVRKTDIVTLEATSNAWHLYDMLVPLVASVTVANPMQVALIAKTRVKTDPRDALTLARLLAAGMLPSVWVPPVSVRELRALGNHRSRLIKQRTQARNRLRAVLFTHNLFPPAGEAFGPANRGWWEGLDLPASEKLRVRQDLSILDSLEPLVNEVEAELVRQSSLEPWAEQAAFLVQLPGIGVHNAMLLLAAIGDIGRFEAPHKLVGYAGLGARVHSSGEEHYGGRITKQGRRDIRSTMVEAAWVAVAGHAYWKESFERLAFRVGKPKAIVAIARKLLVVVWHVLTKQVADREAVAEKVASKLLEWSWKLGRANRAGLTSGAFIRRELRRLQLGENITAISRGKRKFPIPVSEEANQAVG

SEQ ID NO: 139172 - protein, 342 aa, unidentified
MPHHKSIHPSQTQTPVFAPGAPPVLGIDVSKLTLDTCLLHNGQTRHQRFANSSEGITKLLAMLQNTGSTQSIVAKEATGPYSLAAALASEAAGHQVAVVNPRRVRDYAKACERRNKTDRVDAGLIARFASKEPLPLWRPLPADQDLLREFLRRQHALERQLLAEQRRLEMMTTSAKPLQASLKRSIAWLRAELERLEKSLSQHLDNHGNLAADIDNVQTVPGFGEKSARLFVGEAPRHFANARATAAWMRVVPQQCKSGMSVRNPSKIGHDAPSLRSRLYFSAVTAMRCSPRFQALAERLRAKGHCKMSIIMAVLHKLVRTAFAVLKSGQPYNPDHVVQLHA

SEQ ID NO: 139173 - protein, 404 aa, unidentified
MIFVGIDWSERHHDVCVLDVDGDPLAQARVPDGIEGVAELHRLLATHAEEPEEAIVGIETDRGLLVGALVAAGYRVYAINPLSVDRYRDRHRTSGAKSDPGDAKVLADIVRTDRHNHRPVAGDSSLAEGVKLLARTHQSFIWERQRHANRLRSALREFYPAALEAFGTELASADAVAILTHAPTPEFGRRLSRSKIAAALRRAGRKRSVETRAEEIQAGLRSEQLRTSASLEQTYGVITSSLVGLIAGLNTQIAGLERDLHGAFEQHPDAKIILSLPGLGSTLGARVLGEFGDDPTRYADARARRNYAGTSPITKASGTHRVVLARFARNERLYDACHRWAFSSLTRSPGARRYYDVQRARGKTHHQALRTLGNRLVGILHGCLSRGELYREDLAWQVPEADAA

SEQ ID NO: 139174 - protein, 480 aa, unidentified
MNVKTRRTKKQVNVENQAINLLSKEELNKKIEVVEKELRSYTWRELETNGKFAKNDKLSFITDDMLIVGCDIGSENHYIRAIDVRGRELSRGAFEFSNTSEGFENAKAWVLALAAKHDKKQMVLGLEPTDHYWFALAAWMISNGISVVQVNPYAVKQSKEIEDNSQLKDDRKDPKLIANLVKDGNYGMPYLPEKVYADMRRLSMFRDQLTEDRIRNINRLHRELKIYFPEYMDAFGKIDGAFTLEVLKVSAIPTDITALGAEGMKNIWHNAKLRGRGYSRANEIVSYAEKSVGLTDGTDVGREAVKWYAEQILRLDEQLAEMESALHEKCREIPYAENILAINGVGENILAGILAEMGDISRFDDVKEIQKLSGMGLVACSSGKHKGQTKISHRGRKRLRYWLFQAAKSAVSHADEFKQLHEYYTTRSKNPLKKMQSLVVIACKILRVIYTILKTGTTYDPEKMLKDIKRPAASQAPMAA

SEQ ID NO: 139175 - protein, 430 aa, unidentified
MDEVDGNRLEEFRQLRKEIRQSGEHLIVGIDIAKDGHHAFFGTATGKTLLKRIVFSNDHEGFRKLLDQTEALRVQHGLKKVVYGMEPTANYHKPLGEYLIKLGKTVVLVCGVTVARNRESLDGRWDKHDGKDSANVADLISQGKCLYYEHPSAELRGLRGLLSLKRRLKKQEHGYRVRIRNHLIAQYYPEMDRDYERLGAEGLSIVRWCLAASDIAQLDVDPFMERVTSRRITREKRRRLEEIWEKAAGSIGCDGVPGVGHEAKMMVEGLRQIREMIKETEQKIEELCEAFPEYQYLLTIPGFGPDVSSKVLGAIGDPDRFQNGKQVLKMGGLDLSADRSGKDSGRAIPEISKRGKADLRYALYQAALVASFKNRDMMIYYTNKIRGREREKGIHVKMRVKLAAKLLVIAWTLMKKREPFNPVYLKAELN

SEQ ID NO: 139176 - protein, 458 aa, unidentified
MYLGIDVSKGYADFLLMDENKQSMERSFQLDDNYKGHQELVMYLKNHSSEGKTIICGLESTGGYEQNWLTVLKRISKQLPVEVYKLNPKGVKHQIESTLKRTITDSVSAEGIANYVANNYQQKKQDWHKSTHQDEQVTDAQHCFNLINGFIKQQTARNNQIEKLLYQNFPELLTFCKQGIPNWMIRLLVKYPGLMSIKRAHVESIDGIKGISRAKAERIKELAKTSVALSSHPVKEVMIKALAEDIQYHQTRIEEVKTYLCGIYTNGDLEILSSIKGIGEWTATALSVLIGSVDRFEGTSEIAAFYGVNPKFKQSGDGKWGIHMSKQGSSSMRSLLYVAANNVVLHEPYFKKLYHHYISKGMKPKVVRGIMMHKLLRVVYGMLKNRTRFDKSIDEKNQQKNQNHNEQPITKTSRRYQKLNTDAPISRSNYKKRRAVLECQISETDMITASSSTTQLQI

SEQ ID NO: 139177 - protein, 477 aa, unidentified
MAKQKVETAACAELASLAVQHSQAAGIDVGDATHWVCLDADGGDEAVREFPAHSPGLRQLVAWLRAHGVTTVALEATGAYGHVLFLTLLEAGFHVITTSPTFTRQIKGRPKTDRRDCQWIQRLHRHGLLPSVFQPDEATQTLRDLVRQRANHVRLSGQHIQRMQKALELMNLKLTKVLGDVTGVTGLKIIHAIVAGERDPAVLAKLRDRRCQHSLAALATALDGRYRLEHVTELKLNLAMWEHYQTVIAELDEVIAKQLHQMRKQTVLPPLPPKPRVRGRKPHDPRFNVRTALYYLVGIDLTAIEGIDDVHALTLISELGTDFAKWPSVKQFTSWLGLCPNWKKTGGKVQSSQTRKGKNRAASALRLAAWSLMRSHSYLGGYLRRQRARLGAPKAITATAHKLARILYNLMRHGIAYMKKEEAAYAEQVRDRLEKQLRRRAKELGYELQKTEPARQIVTMPDGEVLTVMPDGEIVPA

SEQ ID NO: 139178 - protein, 398 aa, unidentified
MDLPVYYELETNNGNRDYRIQIGGHYMNYNTVYVGMDVHKESFTLCSCKYEDEKASHYQRTPASYKNVLRYLAFLRTIYGEYTRFVCGYEAGCLGYSLYHQLENFNVECVILAPTTMLEQRSKRRIKTDKRDAEIIARSLAQHNYSPVHIPTETDNQTKEFIRMRDDHKAELKKIKQQILSFCLRQGYQYDGSGNWTAKHVKWLRSLKPAGLYKEILDEYLLTYTILIDKLNRLDQRIEELASKEEYKESVSKLTCFLGIKTHTALSVIVEVGDFQRFVSARKFAGYLGLVPGQHSSGDDRNGLGITKAGNTHVRRLLVESAQSYTRGKIGYKSRVLRSRQAGNSPQVINYADRANERLRRRYYKMVLKDGKKYNIAKTAIARELACFIWGMMTDNIY

SEQ ID NO: 139179 - protein, 405 aa, unidentified
MSNDVFVGLDWAVHTHAVCIIDVAGTVLDRFEVAHDGGGLAELMRRLAHHGRRLRIAIERPSGLIVDALVEAGHGVFPIHPNAVKASRPRYRSHGAKSDASDAYLLADLLRTDGHRWRALAPQSDDIRALRALVRSRDDLVAARVAAANQLSSTLQLFWPGAAAIFADIASPIGLAFLRRYPSPRSAKRLTEAQLLRFCQRQHYSGRRSPAELLNRLRAAASGHVGERTEQALAEVVCAQVKVLEPIVAQIAELTRRIEHFMHSLPDGLLMMSFPRAGQVCAAQILAELGDVRERFPSADQLAAEAGTVPVTYQSGKTRSVAFRWACNHRLRQAITCLADNSRHANDWARSVYRAARTRGCDHTHAIRILARAWLRVIWRAWTDRQHYNPALHGSAIALASAQKG

SEQ ID NO: 139180 - protein, 393 aa, unidentified
MAALTIVAQTRPFVIGVDCHARTHTYAIIEASTKRQVACEQFPTTPAGIARALAWVGRRSDGDMSCLWAVEGIGSYGARLARAVTDAGYDVAEAPRMNARGRRAVGKSDPLDAAAIGTAVLALEESQLRAPRRDEGTRAGLRILSTARDQLTRDRTMNVNALIALLRAHDLGIDARKPLVPAQIATITRWRERQEQIELSIAREEAVRLARRVLEVTTQLTANQKRMTELIQQSPAAPLLEMVGAGAVTVATVLTAWSHPGRVRSEAAFASLAGVNPLPASSGNTVRHRLNRGGDRRLNRALHTITMTRMVHDPGTRDYVTKRTEEGRSYREIRRSLKRYIARTLYRQLNTLYAIAEPTRPHPEGADLRTDVCRGVNVSSPTKIRSVELGGVG

SEQ ID NO: 139181 - protein, 350 aa, unidentified
MRYAQINSKYVCGIDLHAREMYACVMNEKGEILFHCNMRTDFDQFKKKMTPFLSNMAVGVESTYMYYWLADACREENIPFFLGHAFYMKTIHGGKTKTDRLDCRKIADLMRTNYYPLAYAYPKEMRGTRDLLRRRHRHSRLRAECYRHIQSLFHQQGLSVNPKDIKNLNSRRQLVKSNLDQDILSNAQADLDMIDFLNPVIKQLEQQIRTQAKCHDRASLNILLSVPGIGDIFSLIILYEIHDINRFEWHQKFCSYARLVKCERSSAGKHTKGGNQKIGNPYLKWAIADIIIHASHKSQMIGDYYQKLQSCFGKRKAKSIISHKFGIAIYYMLKNKEVFDENRFVQTNMK

SEQ ID NO: 139182 - protein, 416 aa, unidentified
MDTMYERCCGLDIHKKTIEACFRSGKKKTHMSFGTTSAELRKLTMWLVENDCQSVAMESTGSYWKPIFNILELSGTDMKIIVVNARHMKNVPGRKTDVNDAEWIAELLQYGLLRPSFIPDREQRELRELSRYRKSLVEERAREINRLQKMLEGGNIKLTSVVSEVTGYSSRRLLDRLLRSDEPMTEDVISGLVHTSLAGKSKELETALDGLLSELQKELLIKVLDHIDDMSRRIADLDDFCRKQMKKYEDALDKLDEIPGIARRTAETILIETGLDMSRFPTAKHFARWAGLAPGNNESAGKRSSGRTTKGNPTLKSTLIQSAKVAARKKDSFFKARYQKIAARRGANRASVAVAHSMLIAIYHILKSGERFKDLGEDYYNQFNKEKKKKYYLKKLTKLGVNLKEATLSISIQATT

SEQ ID NO: 139183 - protein, 424 aa, unidentified
MKVTYQTCCGVDVHKSFLVATIVKTTGGIEPSYQKKRFSTFNNSILEFKQWLLDNHCHDVCMESTGKYWVPVFNLLEDKINVVIANPKWVKAVKGNKDDTKDSKWIGDLFRLGLVKGSYIPCKKVRILREYTRYRYKLVSCRSSEKNRYQNALTVCNVALDSIVSDIFGKSSTSIIDYLLEQSGTSINHEEIASKLLRNLKSKEDAVIESVEGYQMTDAQKYRMRLVRAHMDYITAEINDVDKMIENMISSNPDFENAVQFLCTIPGVKRDSAITIISETGTDMSQFSSSKRLCCWAGLTPGSNESAGKKKSVRITRAGVYLKPALVQCAHAAVKSDKSPYYKKKYESLVKRRGKKRAIIAIARMILTAIYQMLSTGEQWNPSDLYKIDMPVALVEKQKAKAIKQAKKLLQREGLLPPDEPLAS

SEQ ID NO: 139184 - protein, 348 aa, unidentified
MQIATIGLDIAKNVFQVHGVDASERVVVRRQLRRGQVLGFFKALPPCLVGMEACATAHYWARELTELGHQVRLMPAKDVKAYVKRNKNDAADAEAICEAVRRPTMRFVWVKTAEQQSRLMLHRARDLLMRQRTQLINALRAHLAELGIVAAQGREGVRELLRIIASERDARLPIDAHASLVVLAAGVQAVQTMIGSIEKRIVAQHRSDEASKRLRSVPGIGIVGATAIAATIPDPKIFRSGRDFAAWIGLVPRQDSTGGKQKLGPISKQGDQYLRRILVVGAHAMLKRARHQPEKYPWITRLLGRKPFGVVAVALANKMARVAWALLARGGTYRAPALAVAAQGSSQN

SEQ ID NO: 139185 - protein, 357 aa, unidentified
METAYDGRQVVGMDLHRRRSVLVRMTEDGRRLGTARITNSPQELRREMAWAGKSPRVVLEATYGWYWAADTLAAAGAEVHLAHPLGVKAFTYRRVKNDVRDSADLADLLRMGRLPEAWIAPAEVRELRELTRYRQKLVSLRTSCKDQVHGVLAKLGVPVTCSDIFGVAGSVWLDGLGLPQPYAGKVLSLRQLTGELTTEITMLSEVIADLLAGDRGYQVIQQLPGIGPVLAAVITAEIGEVTRFRNAGQLCSWAGLTPRHRESDTKVTRGRVTKQGSRLLRWALIEAVQHVPADTVTGALKQRIIARRGTKAKNIAKVAAARHLLTLVFYGMRDGQIRCLSETPDDSPPVTRQAQAA

SEQ ID NO: 139186 - protein, 337 aa, unidentified
MKKAPRVDVFKDALGIGIDVSKAELAIVGLYAKEPLLKIIKNNMKAIEVFLRTLKQAGYVGKIICESTGHYHLQLALVCQELGMEIIVLNPLQSSKHSQSRVRKIKTDPEDALTLATMCITELHLPKPMVLTASKALIRLKMGQLASLEKQLQGFRRSYGQYTETYAALGLEESELQLELGDQLQSLKRLQGRLGKELESLLIEIAPDDGSHDRLNMIPGYSSMVAGLVAQFDREVKGERSWVAYVGMDISVRQSGTWKGTGRLTKRGNAYLRKRLIQAAWGACMNYDYVRAYYDDLKLQGRKHKEAHCIIARKLLRIAYQVAVNGKEYDPEIAFSH

SEQ ID NO: 139187 - protein, 345 aa, unidentified
MLYVGLDLSRKRLDWQALLADGERAAIGAVPPDRDGLAKLVRRLGDGEGVLAVIESMSGARFVHDELELHGWDVRIADAVKARGIAPLACKTDTIDTWVLAELARLELVPEIWLPDPEVRAERERARFRLHLVKHRSSLKNRIHAILFQHGVPNPGSDLFGVGGRELLAGLQLPDPWASTVAASLELIDLLDERIAACEQELRRLGAEHRYIPLLMSCPGIGWVLAFTIASEIGDIARFGSPRKLVGYTGLCPRVEQSGERDRRGRLRKNGPSYLRWALVEAAHTANRHPCYRPVHERFLARHGRKRGTKLAAVEIGRRLAEAIWHMLTTNQPFAPAGAPASLAA

SEQ ID NO: 139188 - protein, 455 aa, unidentified
MAKTGKTHQTSQGLSLIHDRAAGIDIGSTFHVVAIPPELDAEPVRTFGTFTQELHRLAEWLVRHGITTVAMESTGVYWVAVFEILEDHGIDAQLVNARETKAVPGRKTDVNDAQWLQKLHACGLLRASFRPGRHIAALRTYLRQRERLLDYAAAHIQPMQKALTSMNLQLHQVVTDITGATGMKILRAIIAGERDAEVLAALRDVRCKASVETIREALSGNYQPEHLFSLTQAVALYDFYQQQVAACDVEIERTLAQLCATVSVPEAPLPKARHRTRQPNALAFNVRQALYDLLGMDLTQIHGCGPYLSLKLISECGTDLSRWPSAKHFTSWLGLSPGCKISGGQVLSSHSRKNANRLSVQLRLSATTIGRTNTALGAFYRRLGVRIGKAKAVTATARKLAVLLYNALRFGLHYRDPGADYYEQRYQDRMLKNLRRRAAELGYELTETVPVAGVS

SEQ ID NO: 139189 - protein, 312 aa, unidentified
MPENSQPDYVGLDIAAARLDYCLNETEEGSCANDSEGRRGLIARLKKLPHPRVICEATGGYEKVVVAELLAEGIEVCVVQPGRVRAFAYAEGLLAKTDRIDARLLRRFGQKVELRLAMPAIPSLVTLRELLEHRRALTLQCSEVEGRLPLAGATLTKLLNKQRTFLEKQIEEVEKMIEQHIASDPDLRSNSERLQQIKGVGPVLASTLLAYVPELGNIESAQLSALIGVAPHPKDSAKTKAPRHVRGGRSQVRHVLYMAAVCAARCNPILKAFYQRLKSHGKPSMVCLVAVMRKMVCLMNRLIQDPNFILAR

SEQ ID NO: 139190 - protein, 386 aa, unidentified
MSQRNDLSRSLIPFDQHNTLIAVIEMSQSSWLVAGIVPGVERHPLKKLEPDEKALLQLLQRWREEAVKAGHTITRISVAFEAGRDGFWLARWLRARDIDAHVIHPTSVAVSREHRRAKTDRLDTELLKRVFIGWLRGEPEHCHMAAVPTIEEEDARRPNRERESLVGERSRIVNRMKSCLARLGIRNFRATLRKAPERLAALHTPEGALLPPNTQAELRRDMARLRFVMNQIKEIEEARLERLEQATEKGPNAMVRLLARVIGVGVETADMLVHEILSRNLRDRKAVARYAGLTGSPDESGSRRRQKGLARTGNARVRRGMIQLAWRFLMFQKDSALAQWYRARTDNARGMRKTMIVALARKLLIALWRFVTIGEVPAGVTLRPIP

SEQ ID NO: 139191 - protein, 441 aa, unidentified
MAMRAADEEIVFPKAAGIDVGASSHWVAVPRHAADDPVREFGAMTGDLNAMADWLIACGVDTVALESTGVYWIPVHEVLEQRGLRVWLVDARQMKYVPGRKSDVQDCQWLQKLMSLGLLRAAWRPDGEVCVVRAVARQREVLITEQASWVQRMQRALVQMNIQLTEVLTDVMGVTGQAIIRDIVAGERDPKALARHRDGRVKAKTEEIIKALTGNWRDEHLFVLRQALAMYDDIGRHVAECDAKLQALLTDLGQSKVDLGKAPRTGSKLRQEFDARQILANWAGVDLTRINGLGLAAVMKILCEIGPDLSRFETVKHFCSWLGLCPGTKISGGKVLSAKTKRSANRVRQALKLAAMSLWHSDSALGAFYRRMCSRMDKPSANTAVAHKLARMVYFMLTRGEAFVDKGQQHYEEQQRQRSVAALKRRAAALGFEISPVAMPA

SEQ ID NO: 139192 - protein, 345 aa, unidentified
MELHTIGIDLGKTVFHLVGLDLHGEVVVRKKFSRTQLLRFTANVHVELIGMEACGGAHFLGRALREQGHEVRLIPAQYVKPYVKTNKSDYIDAEAIAEAVSRPTMRFVPIKTDDQLDLQSLHRVRERWVMRRTAVINQIRGLLLERGITLRKGRCHVGAALPGILEDADAKLSGALRMLLAQLKLELDHLDLRIDEADALIKKTAGENEACQRLVAIPGIGPVTATAVIAAIGNGGAFRKGREFAAWMGVVPREHSTGGKQKLLGISKRGNSYLRRLFVQGARAVLQQRTKQSSGLSAWLAQLISRSHRNVAAVALANKLARMAWAVLAKNEPYRPPVLADVAAA

SEQ ID NO: 139193 - protein, 316 aa, unidentified
MSGKRVIGIDVGKSWLDVAAEDCERVRRCGNDAVAIAALIEQLDPAEDVVVFERTGGWERNLEAALADKMIPWAVVHSQRVKAFRQVRGIKAKTDRIDARLLRDYGRDRLNADELRLGRREDVTLDCLMARQRQLKAMRHAEACRLATASLDAVRRSIEDMIAHLDKALAAIAVELARHEDEHPDLAFKEEVLCHQIGVAEQTARGVLAVLPELGGLGCKEITALGGLAPRVHESGSIRKRRGLAPGRTSIKVILFNPARTAMRFDPQIKEFCDRLRARGKPGKVIMVAVMRKMLVRLNAQLRDAMAKAPAAAAAR

SEQ ID NO: 139194 - protein, 314 aa, unidentified
MIGIDVAKKTLAVCCWEVGQAQPSWEASYPNTAAGLQELLAAAPATLPWVVEPTGSYSESVVRAGQAAGRKVLMAPPLAAKRFLQSLTPRAKTDKADARGLACYGQQARLRPFRLKEAPLQRLWAVLQGRSKLARVLASLRQQQRAFPELAFLSAPVVGVMEAQLQAYDRELERAGRQLELFRRLLKVPGIGAMNAAGLTVRLSSIDFPSYDAFIAYVGLDLRVRESGAFRGRRRLSKHGDATLRWLLFMAARATLVAAQGTDFQALYERKLAQGFSKTAAACILARKLAKVAWAMARSGEDYDPTRVFSARRP

SEQ ID NO: 139195 - protein, 327 aa, unidentified
MIRFVGVTPMTVQTEQWVGIDVSKADLDVFVYPQGKQWRSSNSDSGIIETVETLALFNVALVVIEATGGLEQGVTNALSQAGVAVVVSNPCRIRDVAKALGKLAKTDRIDAQVLARYGEAVRPEVRAIASEAAKELQELVVRRQQVVEMVSAERNRKSSARSERSKAQIDRHIEWLTEEVKHLDKQIQAQLHQSDSWQQQQAILQSVPGVGVVTASTLIALLPELGVLTRQQIAALVGVAPINCDSGKMRGKRFVAGGRSSVRSVLYMATLVATQFNPVIRAFYQHLLAQGKAKKLALVACMRKLLVTLNAMLKNHQPWQPQLTTIP

SEQ ID NO: 139196 - protein, 348 aa, unidentified
MTTMTERKRRVTGGVDTHRDVNVVAALDERGSELGVQSFATTPAGYRAALRWLRRFGTLEKVGVEGTGSYGAGLTRYLHSEGIEVIEISCPNRQRRRSHGKSDPVDAIAAAKAVLSGEAVIEPKTRTGEVEAIRALRTSDRSARHARVKALNQMRALLLTGPEELREQFRGTTPWRMVRIAARLRPGDPTTAVGATKYSLRLLARRVLELEAEMAELKSILRPLVASTAPELVSRHGVGTDTAGALLVAAGDNPERLSDERSFAHYCGVSPVDASSGTIVRKRLNRGGNRFANEALWRIVMVRMVSDPATRLYMERRVKEGKSKREAMRCLKRYVARELYPLVASIGP

SEQ ID NO: 139197 - protein, 405 aa, unidentified
MEVFLGVDWAEDHHDLHLQDADGKQVAARRIEDGLAGVQELHALVAEHASSPEEVMVGIETDHSLLATALIGAGYRVYAVNPLAVSRYRDRHHVSRAKSDKSDAKLLADLVRTDRHNHRLAVADSELLEAIKVLARGHQNLIWTRQRLTNQLRSALRDYFPGALAAFDDLDHPDTLAVLAIAPTPIQARRLSRSQIAAALKRGGRRRYLQTRATEIQTALREPQLAAAPLVEDAYGATVAAQARLIAGLNDQITAVEASLSERFNQHPDAELLLRLPGLGVVLAARVLAEFGDAPNRYADAKARRNYAGTAPITRASGTSEVVVARLIRNRRLFDACYQWAFCALNASPGARAYYDAHDPGPKSGKTARRKLANKLVGILHGTLTHQQPYNPDLAWAHWPTADAA

SEQ ID NO: 139198 - protein, 454 aa, unidentified
MPRRQRRTTRAVTTPVLHPHAAGIDIGATELYVCVPLDRDPQPIRRFGTFTEDLRAVATWLTQCGVTTVAMESTGVYWIPLYQILETRGVAVCLVNARHVKNVPGRKTDVQDCQWLQYLHAVGLLRASFRPPETVCAVRSLLRHRDSLVQLAATHTQHLQKALTQMNLQIHHVLSDITGVTGLAILDAILAGERDPQVLAGHRDRRIKASSETIAKALVGDYRSEHLFTLRQSLVSYRHYQQLIGACDAEVRTHLGTFASQIDPAVSPLPPSTGSRRTPRSTPSTPRFDLRTELYRILGTDLTQVPGLQTPTVHAIFSELGADLSAFPSGAHFASWLGLCPDNRISGGKVLSVKTRHVKHRVAYALRLAAQSLSRSQSVLGGFFRRMRAKLGAPKAITATAHKLARIVYHLLTTRQPYEESRLAAAEADHRRRTESRLRAQARVLGFQLVPVIE

SEQ ID NO: 139199 - protein, 419 aa, unidentified
MSFKILKNNCCGLDVHKTWIYACIGITDSNGRTEYKQARFSSFTKGLQELCDWLVKYNCNDVCMESTGKYWIPVFNILEKNNLWVTLSHPKYTKPQKGNKTDRKDAKWICDLYMCGMVKPSFIPPADIRQLRDLVRYRFKLTCMITGEKNRAQNCLTVSNFKLDDVFSDVFGKSSRSITEQILQHPGETFDVAPFVDGRCKTPIEEIQAAVDGAISMEQAVKLRQCLNHIDELEKHQAEIEREIFRLSDKYESILNLIRTVPGFDKNPLTAIQVLSEIGGDMSVFPTAKHLVSWAGCCPRNDQSNQKIKSTRISRAGSYFKPVLVQVANALIKSKKHPEFTTRYRRIKARRGHKKAIIAICRMILTAIWHILTDLKPYTPEGFLDSRPVNKEKVLTTSQALNLLKQRGYFIKDDPLSVS

SEQ ID NO: 139200 - protein, 342 aa, unidentified
MNRSIGVDLHKSAFTVCYYESDEKHEFKTYQVNMKSLEYFKKTLKKTDELAVESTGNTAFFVREIRNKVKRVRIVNPFQFKVISSSVKKTDEKDALTIARFLSKDMIPEVRQRTEEESQVASLIGTRDKFVKLRTSMKNKIHNILNAQGIVTRLEMLSSEKGLKRVLKLDVGASYRFEIELIVSQIRNLNDAIGKIAEELKTRSEKLPGHKNLTSIKGIGDAAATIFLNTIGNINDFKDEKALASYFGIVPRVWVSNQTVHHGRITKLGNKIARTALVQSTFVAIRYSPYLRAFYDKLKAKKGSGKAIIATSRKMLGIIYNTLKNNWVFEDFTRFKLAPCAG

SEQ ID NO: 139201 - protein, 428 aa, unidentified
MAYAIAGIDVHKRMLAVVVSDLAADGEDAFERRQFGSTPAQLRLLADWLSEHPVNEVVMESTAQYWKPVWAALERHWTPRARARAGAGPMAGTLHLAHARSNRARRGRKRDFTDAERLVKRLVAQELTLSFVPAPEQRLWRTVTRTKVQLTRNRVQLQNRLEALLEQAHLKLSSLVSDLLGVSARRMLQALADGATDPGALAALADHRLRATPEQLRDALEACQELSPVYRRLLKMVLEELQLLDSQISRLDQEMAELLCPYQDQVQRLAEVPGLGVDSAQQILAEVGPTAATFPSAGQLASWVGACPGENESAEVNYSHRSPKGNRQMRRLLNQAANAAVKSKGTIFEILYRRYVPRLGHPQTIGVIAHRLCRLIWKILHQGVRYEERGPALSQKSKRHRTARMIRALRSFGYRVELASAQSTVVPA

SEQ ID NO: 139202 - protein, 389 aa, unidentified
MYTDPTRTSQAPTSPTIVPTLYVAFELGGSSWKLAATTGLGQPPRLRTLPARALPRALDELARAKARFHLDPAAPVVSCYEAGRDGFWLHHALPAHAVRNHVVDSSSIEVNRRQRRAKTDRLDARKLVSMLLRYAEGDRHTWHVVRAPSSEAEDQRQLHRELKTAQRERLAAVTRVESLLVTQGLTLRLSGRETVAEVRAAVAALRRWDATPVPPALQTRLVREWGQVVALTAQLRALARERAELLRTGDAPALAAVRQLMRLKGVGVATAWIYVMELFAWRTFRNRRELGALTGLAPTPDQSGTGRQRELGMGKAGNRWVRAVAVEGAWCWLRHQPQSELSQWFERRFARGGSRQRRIGIVAVARKLLTALEHYLRTGTPPAGAAVRA

SEQ ID NO: 139203 - protein, 317 aa, unidentified
METTACFVGIDVAKARLDIAVRPSAEQWTARNDEAGIEPLVARLKELAPTLVVLEATGGLEIPLAAALTAAGVPLAVINPRQARDFAKAVGQLAKTDALDAQLLARFAEAVRPVPRPVPDAEAQALAALLARRRQLIGMLVAEQQRLGTALPTVRRRVEAHIAWLRQELSELDAELHEMIRQSPVWREKEQLLRTVPGVGPVLAMTLVADLPELGQLGRKQIAALVGLAPLNCESGLLRGRRIVWGGRGRVRAALYMSTLVAIKHNPALRPFYERLLAAGKPKKVALTACMHKLLLALNALLRKGVAWQQPAPAAAS

SEQ ID NO: 139204 - protein, 372 aa, unidentified
MKKRNSPQRSSTRGAKCKRAQEFVTIGMDLGDKASRYCALSGEGEILREGETKTTKTGIMETFGALGRARIAIEVGTHSPWVSRLLQSLGHEVIVANPRQVKLITESSRKDDRLDAQTLARLARVDPQLLRPIRHRSEKAQGELMIIRVRAALIAARTSLVNTARGLAKASGERLPTCDADQMGIPRSLSLSPKLRQVLEPLLKEVESLTEKIKDSDREIEQIARKDYPETALLQQVGGVGPLIALTFVLTVEDKDRFQKSRDIGCYVGLRPRRSDSGQNQPQLRITKEGDPYLRTMLVQGAHYILSRRGPDTDLKRWGTRLAERGGKRGKKKAVVAVARKLGVLLHRLWVTGEVYEPLRNQQARQQQKKAA

SEQ ID NO: 139205 - protein, 337 aa, unidentified
MTRYVGVDLHRRRSVIVVLDSDGTELWTKRIDNDPVTLGLEIENAGPAPEVVWEATWGWYWAADVIAQAGGSVHLAHPLGIKGFENRRVKNDRIDARLLADLLRMGRLPESWIAPEGIRYQRELVRYRRKLSQLRAGLKAQVHAVLGKEGLRPPITHLWGPGGSVWLDNTDMAEAYETRVRSLRRLIKIYDTEITKLDARISDVFEGHEGYEVIQQLNGVGPVLAAIFCAELGDVTRFGSAKQVTSWAGLTPRHRESDTTVHRGSITKQGPPLVRWAAIEAISKNHGDDPIKEHYRRVSERRGRNKGRVAAARKLLTMVYYGLRDGEIRSLVPPEAT

SEQ ID NO: 139206 - protein, 321 aa, unidentified
MAIPVQPLLIGVDVSKATLAICLGPDQPVQSLDNDRKSITRWLATLPAGPACIAAEATNTFHLDLVDLAHHAGHAVYLVDGYRLSRYRDSIGTRAKTDASDAQLLQRYLAHERDSLRPWSPPPQGYRTLQQLLQRRATLVRARVALQQSLADLPGLKQAAATLFRQLKRIDQKIQQGLIDTLAQLDWDTDFKRCQGIEGVGPLTAAALTMSFHRGAFRSSDAFVAFLGLDVRVRDSGQLRGRRRLTKKGNPELRRLLFLAAMQAARSRSWKDFYQRHLDRGFSRIQALVVLARKLARVAFALLKNQTDYHPRYLKEACMET

SEQ ID NO: 139207 - protein, 347 aa, unidentified
MNFYNNIHPYYCGIDLHARSLYVCIIDQAGNTCLHKEISADPDKLQQLLEPYIGNIVVGVECMHCWYWVADFCDDAGVDFILGHALYMKAIHGGKAKNDRIDSFKIANLIRGGNFPLAYVYPKAMRATRDLLRRRMKIVRHGADLKAHVVNTTSQYNLPPNKVNLKNKVAREQLRSTFPDLSVQKSIDLDMVILDCYAEQLSKVEWYIQQQAKQHKPNHFHLLKSVWGIGPILALTIIYEIGDIERFDSVQKFASYARLVKCKAESAGKTYGTQGNKIGNAHLKWAFSEAAVLHLRGNEKAQNYLVKLQKRMSKAKALSALAHKLGRCVYFMLKNESVFDERRFLKG

SEQ ID NO: 139208 - protein, 342 aa, unidentified
MQQSIYVGLDLGSSRCHQTVINADGSLQMSRSIPTSEQRLRSAFTALGGNVCVHLESGELADWVYSVIKPLVAEVVVSHSRTLAWIGKDSQKNDSIDARKLAELLRLNRVHPVYCEQSDNRRAFKQLVTHYEQMSREQARLKSKIKARLRTLGIIRFDARLFSKSGQAVLLDELKEPAIRQMLAQTFAVLNQMLDVLEQAKTAMIAASNRFPEVRLLQTAPGVGIITACRFVAYIQTPARFSNKRKLWRYCRLGITRRESNGKRLAHPRLDSAGVGSLKDCSRKIFEAARRTKKDNSFKRAYEQSLLNTKNAVHARLSVQRKILSTLRAMWLTMQPYHDTGT

SEQ ID NO: 139209 - protein, 374 aa, unidentified
MSDHSEAYVAFDTSKLRNAVAIADAGRAGEIRFLGEIENTAAAVAKLVRKLAAKYGRLTFCYEAGPTGYGLYRQIKGLGHACMVVAPSLIPRKPGERVKTNRRDALSLVKQLRAGDLTAVWVPDARHEAMRDLTRARETAVEDLRRKRQQVSAFLLRQGRHYPSERTWTKTHRNWLASQKLEHAEQRLAFEEMLLAMRQAQERIERLEQAIRAAVPDWSLAEVVTALMAMRGIEFISATAFLAEIGDLARFATPRELMAYLGLVPSEASTGDTVRRGPITKAGNRRARRILVECSWSYQHPPRVGKEKQQRVAAAPPAVREIAWKAQCRLTARYRALIRKGKLKTVAVTAVARELSAFIWAINRQIANPGAAAK

SEQ ID NO: 139210 - protein, 378 aa, unidentified
MKRILKIGMDVHTTNYTLCAMEPIIGEDDRVFATIKVTPDYKNILMFIENLKLKLGLNDEYDIQCGYEAGCLGYSLYNQLTAAGIKCVILAPTTMLTPQGVRIKTDMRDAYMIAQCLSYGGYHAVYIPTEDDDSVKEYLRMRNDHKLALKKIKQQINAFCIRHGFCYDGTKWTLSHLKWLKKLEITNGLYRETLDEYMASYEEQEAKIERYDKRIGEIAEQTRYHDKVKKLGCFLGIKTHTALSLIVETGDFERFAKGNQYASYLGLAPGENYQSDNIHRLGITKAGNSHLRQLLIEASGGICKGAVGHKSKELRARQNGNTAEVIAYADKANTRLRSRYYKFIRHGKKRNVAVAAIARELACFVWGMMTDNIEMKAA

SEQ ID NO: 139211 - protein, 440 aa, unidentified
MKNPLELPVINPMAAGIDVGSEKFFASIGGGEPKVFLTVTEQMKELCQHFKAEGVSTVAMEATGVYWINLYGALEEAGMKVVVVDGRQCRNFPGRKSDMKDCQWLAVLHAHGLLTSGFIPPADIRRLRDYMRLRGDLVSMAAQHVQHMQKAMDRLNVKIHVVISDITGVSGMRIIEAILAGERDAEKLVKLCDEQILKSKRGAVVQALRGLWREEHLFALRLALESYQSYQRQIAQCDQKIAQALKEMSADRATPELGRPKELRHNAIVLEDLQKQMAQIYGKDLTKLPCINQSTAAMLLAEIGNDMSRWKDWRHFGSWLALAPCCAQSGRSRRRVKRYLTPAGRLLCRAVQCMAVGKHTWLANFYRRIRAKRGSKVAIKATAYKVAKLIYLVLTQGWDYVEQGMAKYEQRVREMQFRALQKLAKNLDFVLVPRAFVSAR

SEQ ID NO: 139212 - protein, 345 aa, unidentified
MPIVGGLDIHRKQITFDYLDTATGEVRRGQIAPADRAHLRAWLARFAGRDDVAFALEGCTGWRYVAEELAAAGVTAHVAEPADTAFARGRKRHAKTDKTDSRHLRVLLEQGRLPECWIPPAQILECRALLEAYHDLRREHTAWIERIHAVFFHQGAPRLGEGALRTEHGLAALRQAAAIHLSPAGQLQVATALDMLAATEARMDTLRQQLLHAARHLAGARALQARLYGVGPLAGLAMTCWLGGAGRFSPARKAVRFAGLDVTVYSSDGKRSPGHLSRQGPEILRWVAYEAGKTHGRASAPGHDYYAQVKDRQDGKIAALSQARKLIRQACHILAELGDDALTAA

SEQ ID NO: 139213 - protein, 394 aa, unidentified
MQRDTKEVLAELVGKLREKLDPKVGAASAGEKNQRGELRPNLDRLTVGVDLGDQWSHYCILGLEGETLAEGQLRTTQQDVAEFFRALNAARVAMEVGTHSAWVREVICSYGHEVLVANPRLMEGSKRRKRKNDRIEANKLARLGRVDPESLHPIEHRSAEVRQDLVMLRARDALVAARTELINATRGLVKSMGARLPKCSSPSFAQKVEEAVPAQVREALLPLVRMTAALSDCINGYDEKIEKLASEKYGHTALLRQVKGVGPITALAYVLTLENPERFVKSRDVGPYLGLVPKQEDSGESQPQLGISKSGDTMLRKLLVGSAHYILGPFGPDTDLRRYGLRLCERGGKNAKKRAAVAVARKLAVLLHCLWVSGEVYEPLRQGMSARIAPAVAA

SEQ ID NO: 139214 - protein, 392 aa, unidentified
MEVMIETCCGIDVHQKTIVCCILDGPLDTNKPKKSYKIFGTRTSELRKALEWLEENEVTDIFMESTGQYWVPVFNIFSEGNFNMVLANPEHIKNVPGRKTDMKDAEWIAQLGRVGLIQNSYIPAPEVMELRLMTRRRQSYTQKRTQSKNELHNILQRSNIKLTGYLSNIFGKTGQALLQLFIDGEVLTLESVEACLHGRVNASPKDILQAMDGKISLTDRRLLDDSLDEYQFYTRKIKKIEHDIEQYILSHFPLEYELLQSIPGVKQHSAAIILAEIGPSIEAFRTVSYLASWAGLSPGSYESAGKKKSSRVTRGNKYLKTALITSGGMAGRSRDPAFGSLYHRVSNRGTKMKAVVACGHKLLRMIYKILDDKAPYDEKRALGLRQQKLVLN

SEQ ID NO: 139215 - protein, 414 aa, unidentified
MRTIGLDLAVQAAHKAVVLDERGHFCTPIITVHTQPSELSHLLIRAREGAPSDEVQIVMEPTGMAWFPIAVYYARQGVAIYLVNSQEVADLRRYYKRHAKSDRIDARVLARLPLVNPDKLHRLVLPAATTLACQRACKQLDHLATQITALKNRLQAIDRFAWPGLEELVFADPFAPAARFFREHWYDPRQVVLLGANAMRQQWEASALDASDGGAWVEPLLTLAQQVLTLYGPDGQFLDFGQLQAEVQRDQVWLTGLEQQHHTLRLRTVRPLYRSVHPSRNLETLKGVGQDSAAVYASFIGDPRRFSSTRLFRGWTGMVPNSEQSAENEAKGLHLSQAGPDLIKKYAYLDAEIARRYDPQIAAIYYDQMMRKGKHHKQAVCACATHLLDRVLAVLRADSVLTNRIRCATAMGQR

SEQ ID NO: 139216 - protein, 338 aa, unidentified
MQTYAAVDLHSNNGFLAIIDETDRVLKQRKLANRLELFVNELEPYRSTLQGVAVESTFNWYWLVDGLQKKDFPVVLVNTSEIQQYSGLKHSDDQYDAWWLAHMMRLGILPTGYIYPREQRAVRDLLRKRTTLVRQRTANILSVQNLEQRNRGTKISSNEVKRLTSASIAAVYDNEDLALALTTTIKVIEALTEQTNVLERAVLKKARLRDEFEPLLSVWGIGKILALTIMYEAGDMNRFASPGNFASYCRCVDAQRFSNGKKKADNNAKNGNAFLAWAFIEAAHFAIRFYPEAKRYHDRKAAKVNAVVAIKSVAHKLARAVFHVLREQEPFDPKKVFV

SEQ ID NO: 139217 - protein, 339 aa, unidentified
MNSMAVGVDIAKQVFQVHYVDRETGEIVNRQIKRAKFLEHFANRAPCLIGMEACGGAHHWARELTKLGHEVRLMPAEFVKAFNIRNKNDAADARAIWLAVQQPGKPVAVKTEMQQAMLALHRMREQLVKFRTMQVNGLRGLLTEYGEVMSKGRAALDKEIPAALGRIAARLPAALIDTLREQWNGLARLDEQIAEIERRMREWKQQDRAVKAISEIPGVGLLTATAAVAMMGDPKAFRSGREFAAWAGLVPKQTGSGGKVNLHGISRRGDTYLRTLLIHGARSVLTHTKEPGRWVEQMKQRRPMNVVIVALANKMARMIWAVLAHERPYRNDYVSVKPA

SEQ ID NO: 139218 - protein, 423 aa, unidentified
MAYRIAGIDVHKKKLAVVVADVEVDDAYQFERRWFASNPEQLQRLAEWLLEQQVEEVVMESTAQYWKPLWSALERYWKPGCQNREGAGKMSGTLHLAQALSNRGRRGRKKDFPDAERLVKRLISQELTLSFVPDTEQRLWRTLTRTRYQRTRDKVRLQNQLEALLEEAHIKLSSLVSDLLGVSARRMLHGLAEGETDPASLAALAHQGLRATPAELRDALGACTELNPVYRRLVRLALDDLQLIEQQIGKLDQETASLLQQHQDAVQRLAEVPGLGVDSAQQIIAEVGAKAATFPSAKNLVSWVGACPGEDESAGVNRSKRSPKGNRQMRRILNQAANAAVKHKGSIFEIVYRRFVPRLGHNKTIGVIAHRLCQLIWIILHKGVRYEERGPAVSEKSQRLRTTRMIRTLRNLGYRVEPPVIPA

SEQ ID NO: 139219 - protein, 358 aa, unidentified
MNYIGCDCHISSMDCAVVNERGQETKKQRVNTGVKGLMEFVRSIPKPRSIIIEEGSLASWLLEMCTAYGEKLVITDPKTNRWIGRAGQKNDEIDATKLAQLARGGYIKEIHHPIGHRRRFRELVMSYHDTVKSQTRIKNKLKAKFRQNGIKCSGETVYSNKYRKKWQKRLPQDKVVQVMAEVLWRQLDQVHEVQKELLGHIRKQSRQYLEMKRFKNIPGIGTVHAATISAIVENPHRFANKKKLWMYAGLALAEKASGGKVYSRSLTRNYNRLLKNALKQATEAAISARDNQFRRQYLRLTIEKGILSHRAKLTVARSILATIYGIWKSGENYDDNIDKRRIESDKTQVRAYHLVRNG

SEQ ID NO: 139220 - protein, 340 aa, unidentified
MFIKKDGFITVRTYDLELKTFSMIPSAEELERFLVENYEGAIFYIVYECCFSGFWIYDYFHQRGYNIIVTPTNRVYRDGSIVKTDKIDSRKLAFQHSRDLLREVKVPDMKIREYRSLFRIYDKEKMRQGQILRQIRSILEVRNHPLKWERFNKEMIRRLKEVKFQGEIFNKKFSCLLKEYEYVQEQIKDTEERIKEIALASQSEEDKELSEEIRRIEKINGIGIVSAVRLVVYLFDQKDRFESGEKLVHYLGLTPGEHSTGEQIIRSRTGLIGNKQLRSIIIQLARVAVRKDGNLLNKFERVYKSSGCKQKAIVAVARKLMMKVHSITEKQEEYEVNIAA

SEQ ID NO: 139221 - protein, 433 aa, unidentified
MSFLPIIFHRTFLVQKGVRVALKIVYKVCCGIDVHKTFVVACIASTNRQGITTYKSHRFSTFTSGLKMLLQWLLDNNCQDVCMESSGKYWIPVYNVLENDCTIVLAHPKYVKAIRGKKTDKKDAKWIADLFKHDLVAGSFMPPADIRQLRDLMRYRFKLTCFMSSEKNRLQNCLTVSNIQLASVVSDTFGKSSLKILDKLLENPLDTSFDIEPLIHGSMKTKLPELQLAIDGYITPEQVGKLKIIKAHFKDLETRKAELEELILALATPYQQELDIILTAPSFKNRFSAITIISEIGTNMEAFPSAKHLCSWAGLTPTNNESAGKKKSVRVSKAGCYIKPLLVQCANSVVKSEKHPEIRSRYLRLRKRRGHKKAIIAIARMLLTALYRMLKDKEPYNADLYRKSDLIPVEREITVEQAILMAQFHGYRIKAAV

SEQ ID NO: 139222 - protein, 420 aa, unidentified
MNDSPQWQQHRALGALDWASEKHSVIVVEQTGKVIEDFEIEHSALGWKKFREKLQPYGSIPFAIETSQGTAVEQLLEAGMMVYPLNPKSAQAYRERKAPSGAKDDWLDAWSFADALRVDGQGWKALQPEGPLIKELRLLCRDEVTLIEQRTAFIQQLRHALAEYYPAALEAFEDWTSVSAWMFLQRFATPDALAQAGKRQWQKFLHSRRLWGSDEGLRRMEIFAHASEFAGTPPTVKARSLLALSLVQMLFAIEKQLALYRQQIEALFARHPDHDLFGSLPGAGPKIAPRLLSEIGDDRQRFGADPQALQCLAGSAPVTKRSGKRRKFWHVHQRRACDKHLRHALHLFADQSLSRCVWAELYYQHHRQKNQSHANALRRLAHRWLKIIYKMWIDRTPYNAELHHRNQLQHGSWIFQLNQS

SEQ ID NO: 139223 - protein, 325 aa, unidentified
MAVIGIDVSKQKLDCAWLRDVATGKVKTRVFGNRRQDFPRLLEWLEHQTGEPLDQLHVLMEATSIYHETLAYWLHAAGIQVYVLNPAQVRDFSRSQGVRGKTDKKDSVVLARYGATQRPEAWQPEPEEVRKLKALAARLDALDKDIQRERNRREKAEFAMATDILRSIDDILSALTRERDRLQQEVDDHLDQHPGLKQDRALLQTIPGVGPAVSLRLLAMLRSRVFESARQAAAFAGLVPVSWESGSSVRGRPRLSKAGNPKLRQSLYMAAVVGLRRNPDISALYQRLTGNGKSKMAALGAAMRKLIHIAYGVLKTQTEYRPQIA

SEQ ID NO: 139224 - protein, 408 aa, unidentified
MNPLFVGIDVSSKNNVAYLMKPDGSKHSSFSVQNNLGGAKLLSEKIVSALHSMQLNDVVIGLEATSIYGDSLVYALREDGSLGRFQRKIHVLNPKQVRKFKEAYPDLPKNDWVDAFVIADHLRFGRIAKEVYMDDYRYQALRTLTRARFDIIQNLTREKQRFANYLFLKCSGIAQDKDIQNTSATTIALMEHFETVDDLANADLDELTAFISEAGRGRFVDPDATAKAVQAAARGSYRLPKTVNDTVNQAMSVSIASMRALKEQVKVLDKAIEQHLEIIPNTLTSIPGIGKVYSAGIIAEIGDIHRFNAQASVAKFAGLVWHRNQSGDFEAEHSQMIKSGNRYLRYYLLEAANSVRRCDSEFRRYYDLKLKEVNKYQHKRALALTARKLVRLVFRLLKDNRLYIPPEG

SEQ ID NO: 139225 - protein, 320 aa, unidentified
MSKPSTNVAGIDTGKQHLDIAGYPTKERVRLPNTPQGHQALRAWLKERKIKRVGIEASGGYEMAVVDHLRQHGLEVALLQPRQVRAFAVYKLQRAKNDRIDAALIAECTASLGCPRQPPDPRLAPFAQHLLFIEQLDADIARLKTRRERFPGTRFLKQLERDIKVLERRSKAEFDRLLAEVRKHEDLAQRLELIASVDGIGIPTALTLVILLPELGSVSREQISALVGGAPYDDDSGERSGERHIAGGRSRVRRALFNAALPAAFRWNHALIAQYERLSRKGKDHKVTLIACARKLLIFANAVVQRSSPWTKLPPHAQPA

SEQ ID NO: 139226 - protein, 405 aa, unidentified
MNQNATANPRVIGLDSHPDTFTAALLSGPTPAAAVTEKVFNQVPLAQLASWAKKYTTAQDILVLEASGNSFQAVRTLRAIGRKALVLESCQMGKLKEAHANNDRISAVRIGKAYLAGTAREVWVPDAKTQERRDWFHAHRKAVKRTTQMRNRLLSYLSDNGVRLKRGTPLAAGKAAVELLGKTRVWSPRQWQVIEGLLMELRHADEQRAHWRSLIAQEVLADPQLLSIVRLCGVREMVAFALSALVGDIQRFSEPRKLVKYIGLNPAFDDSGEGTWSGGIRGHGRKDLRSLLIESAQAIMRSKHPLAKWGQKLLRRKGALNLAVGAVARKLAVAVWYLMMGRWTPLDEIDERLALKVGKLISSVGTKGLKQLGKTRKAFREEIYASLKAGRVYQLDPHKKFVPAN

SEQ ID NO: 139227 - protein, 361 aa, unidentified
MQSTPLIAFDQHAATTVAAVLLPGQQTPALHTLASDSPTILRFVRRLQRHGPVACCYEAGPCGFELQRALVGHGIPCAVIAPALIPRRPGDRIKTDRRDAAQLAVLFRAGALTAIHIPTAQEEAARDLLRCREDIRADLLRARHRLSKFLLRHGRRFTATKKAWSKRHEEWLRAQSWPLPALEQTHRAYLRTVDEAVARLRAVEEDLRALLDLEPLRPRIQRLRCFRGMDDLTALTIAAELGDARRFTTAPSLMAFVGLIPSEHSSGTKQARGAITKTGNAHLRRVLVEAAWHYRHHPFVGDALRARQRGAPPSVIAHAWAAQQRLHRRYARLAARGKPTQHVVTAVARELTGFVWAALTQ

SEQ ID NO: 139228 - protein, 338 aa, unidentified
MKTFTPAVPNMVWAGVDLAKLTFLAALWGHQAFPEMQRRSFDRKRKAMKSFLTWLRAQAPVGARIGLVMEATGAYAEEVASWLLDLDPTLWVAIVNPGQTSAFIKSLGFRNKTDDLDAQGLAKYGQERRPAPWERPTPELAALKDLVRIRMDLINARTAMHLRLKDHQRTGKKASEALRKVILSLKTQIQRLEDAIKDQVAAFPELAHQVELYTSICGVAQVTATTVMVELGDLRRFPRSRQLTAFAGLSPKKTQSGTSVHGKTRLCKQGSGRVRAALYMAAGSAVRFNPDMKATYEGLLAKGKEKRSALGAVMRKLLVLMRAILIADRGWQPMKKAA

SEQ ID NO: 139229 - protein, 366 aa, unidentified
MTRKVYVGMDVHKETIQIAYLTSNSKEILKEQQIKHNEVQIKKFIKKLKTEWNEIYCCYEAGVTGYPLYRYLKSLGVNCILVAPGKIPRQNTDKIKTDKRDAIKLARLMRSGELESIHVPSEEDEAVRDYLRSRDSLRLDLGRNRQRLMKFLLRKDIKYSTTKYWTVSHYKWLNNLHFNNEILQETFNDYYSRVRVQEENLKSMDKKIQEIAESEPYREKVGILRCFRGVDYLTAMFLLCEVNDFKRFKTAGSFMSFLGLVPGEYSSGSKRKQTGITKTGSPRLRRILTEAAWQHRFPGTGSKIITARRSGQPALVVALAEKASLRLHKKFRNLQRKNSSSDDNGSFKRVIRISLGGNESCSLKLE

SEQ ID NO: 139230 - protein, 359 aa, unidentified
MNFKMQDKQNQLIERISDKHLIVGVDISQQFHVARAINYRGIIVGDPLTFENSEVGFKSLLNWIQSLQEMKDLNAIIVGMELTGHYWKNISKWLIDLKIEVVTVNPHLVKRNKENRDYTQSKSDKKDALVIADMVKNGYYSFISPSSESFEKLRVLISNRDVIVKRLVSSANQIHRWVDIVFPEFRQVFKDITYKGANATLRLFPTPTEIATMEPLDVMRGWKSLMQRQPGPKKAQLLIQLAKSSIGTNQALDAYKFHLEQLLEEYDLTIKQLDIVEQQIKEELYKIPFAQKLLMIKGISEISLAGILGEAGDLSGFSHGNSLLRHSGLHLAEASSGKWKGQIVISKRGRSRLRRFLYP

SEQ ID NO: 139231 - protein, 363 aa, unidentified
MTMAMLRVGLDVHSRETAAAVLDPVSGEVTVRTLTGRPSSVLEWLAALPQPFQAVYEAGPTGYGLARAAKGRGLDVVVCAPGHVVRSTLDRVKTDKRDAIRLARLLLAGELRQVRVPEPAEEQLRDLVRAREDVRVDLMRCRARIAKFLLRRELYYPLPGNTWTKRHRNWLRSLRFGDRASELAFADALHAHDSMLARRGELESALEEIALSSWCAETVARLRCLRGISSLSAIGLACEVCDFGRFTHPRFLASYLGVVPSEDSSGEQRRQGAITKAGSKHARRLLVEAAWHYRRPPRVSHELTVRQRGQHPRVIEIAWRAQRRLYQRWQSLEHSRGKRNTIVAVAVARELSAFCWEIATLDT

SEQ ID NO: 139232 - protein, 317 aa, unidentified
MDAIVVGIDVSKDRLDVAIRPSGESFAVSRDAGGLRDLNERLKPLAPSVVGLEATGGYETVVAASLGAAGLPVVVVNPAQVRAFAQALGKRAKTDPLDASVIAHFVEATKPAVRPLLDADTQRLADLVARRGQIIDMMVAERQRQKRMTAKRLQKSIVRLLAALQKELSALETDIDDAVRGSPAWREKEDLLASVPGVGKVVARTLIAELPEIGTLDRRRISALAGLAPWTRQSGQWKGKSFIGGGRARVRSALFMAAMVGTRFNPVLKAFRDRLVAAGKPKLVAIVAAARKLLTILNAMVRDGRTWKDAEHGCASN

SEQ ID NO: 139233 - protein, 338 aa, unidentified
MNITTVGIDLAKNVFHLHGVDARGKVVLQKRLARRRVSEFMFNLPPCRVGIESCSGAHHWYRVFRSCGHDVGIMSSQFVKPYVKSNKNDWNDAEAICEAVSRPNMRFVTPKAVEQQDIQCVHRIRQRLVGQRTSLVNQARGLLAEYGIVLPRGIRQLRRRLPELLEDAGNEFTALGRELFAELHEEFRYLDERIAGLEVRIRRIFNQSERCRQVGRVEGIGPITATALVAAVGDAHEFHDGREMAAWLGLVPRQRSTGGHAQLLGISKRGDRYLRTLLIHGARAVVRVADRKEDARSRWISRLKARRGKNIASVALANKNARVVWALLRRAESYQPTA

SEQ ID NO: 139234 - protein, 424 aa, unidentified
MVVLREDDQAEEIIARVAALDIGKAEVMCCVRVPHEDRPGRRLQEVRPYSTMTRSLLVMADRLAELGVSRVVMEATSEYWKPVYYLLEGCGFETWLVNARDVKHLPGRPKTDKLDSVWLCKVAERQMLRPSFVPPPQIRRLRDVTRYRTDLVEARAAEKQRVEKLLEDAQIKLSVVASDIFGVSGREMMAALISGQTDPKVLAAMARGRMRAKTAQLEEAFTGYFTDHHRLLLTKMLARIDALSADIAELETVIGEMIGPFADAVARLDEIPGIGPTAAAVVIAEIGLDMSRFPTAGHLGSWAKFTPAVKESAGKRKGKGATGHGNRYLAKVLGEAAVTAGRTDTFLGERYRRIARRRGKKTAIVAVGRSMLVIIWHLLSDPETHFIDLGSDFYDKRIDTERKKRTHIRQLEALGYRVTIEPAA

SEQ ID NO: 139235 - protein, 349 aa, unidentified
MSNPTRWVGVDLHRRRSQIAIIDEQGELTLQRRVPTGRETILELLGDPDGTHVALEATYGWEWLAELLEEAGFDVHLAHPLRTRAIAAARVKTDAVDARTLAHLLRTGLLPEAYIAPPELRDLRDLLRHRATLVHLRTSIKNRVHALLARQGILPEHADLFGKTGREFLASVQLPDGPRRRLDSLLGLICDFDREITDTTSEIDARARTDARVKLLCQIRGIGRYTAMLIIAEIGEVKRFPTAKHLCQWAGLTPTIRSSDGKARLGHISRQGSTILRWALTEAAQHTPTGGGPLRAQYERIAKRRGSKIAKVAVARQILTLCYYGLRDEEIRCLTRQSTDIDNELAEVA

SEQ ID NO: 139236 - protein, 348 aa, unidentified
MSIAMIGLDTAKSVFQVHAVDESGKAEVRRKLRRSELRAFFEKQEACTVVMEACGAAHHWARVLIGLGHDVKLLAPEAVRPFVKKGKKNDAADAAALCGAASRPGTRFVPVKSLGQQGVLALHSARALLVKQRTMLANAMRGLATEFGLVVPKGMGRLEELVTLVEEDGTFPEQARWVFAGLLGQCRATAERIEALEAEIVAHARGDDTARRLATVPGIGPITASLIAATVGGNIQAFRSARHFAAWLGPVPRQRSTGGKTRLGRITKAGDREIRTLPVLGATSMVYRAAQWDSAAGAWTRGLLARRPVRLATVALANKMARIARALMTREEIYRATGHAAAASAATA

SEQ ID NO: 139237 - protein, 395 aa, unidentified
MFYIGIDVAKNKHDCCILKHNLEEVSLFTFTNDKAGFDKLMLEISRFSKETHFSDIKIGLESTGHYSTNLTNYLLQKRLSVKIYNPLLVSLKVKADSLRKTKTDKSDCRFLARLTMTEESKPYIQPVSSVSELKILTRNRHRLVAQRSKLKLSLSRLVTIVFPELPELVYSVNQKSSYALLLEYPTASAIANAHLTKLTNVLHSNSKGKYTRDKALEIRKVAENSIGFNSFATGFELQQTIRLIQNVSLEISLLDNKIKEIMSEIDSPILSIPGIGYVLGAIILSEIGDVRNFQNPAKLLKFAGLEPSVYESGKFKASSTSIVKRGSKYLRWALLQATRLVAIRDETFKAYMAKKISEGKHFFVAQGHVSKKLVRVIFSLLKNSTPFQPSSILAT

SEQ ID NO: 139238 - protein, 408 aa, unidentified
MDIHRVFAEAVALLDGKTTRPGRADMRRDRLEAFARSTLTHDDHVVVEATGNAAAVAEVLAPHVGRVVIANPKQVRLIAHAKIKTDAIDAAVLAKLHASGFLPEVWVPDPRTQALRRQVSRREQLVRQRTRLKNIVQSILHAHLVPPCPHADLFGASGRTWLASQALPQDERLAVERHVRTLDRLLEDLRLVERDIARHALEDQGVRRLMTIPGIDMVVAVGLAAAIGDVARFASAERLVAYLGLNPSVRQSGQGPARHGRIAKQGRGHARGMLVEAAWAAARSPGPLRAFFQRVSARRGQHVAAVATARKLAVLAWRLLTRGEDYAWARPALQARKLRRLELRAGSPALRGLRGVAYDYNIRGARERERRPAEQAEAAYRRLTDRWAPQGPRRRQARTSAAGEERPS

SEQ ID NO: 139239 - protein, 370 aa, unidentified
MLDTTTFIGLDVHARSIKAVSLDVMTGEVRAATFGYDAGAVAEWVRSVDPRARCVYESGVTGFDLQKRLSGLGVDCVVGAVSKMIKPSADRRRKNDRNDAEFLARMLSVGNVVEVWVPDDECEAARDLTRALEDARDDLSRSKQRLSKFLLRHGLVFDERTPTGRRKGNWTRAHWSWIESIRFAEGADNDVLAYYVDAVRRAAEEKARLEGLVEAEARKPRWRRRVDSLRCLKGVDTASAADLVFEAGEFSRFRNARSFAAWVGLTPSEHSSGESDRRGAITKAGNKHLRKTLVEAAWHYLTCSGRPKDLAKGQAPDRGARRHAAKGVRRLVERREALLARGVHGNKANVATARELACWVWAVGLMAEEA

SEQ ID NO: 139240 - protein, 347 aa, unidentified
MVIVDSAGLVVGGVDTHRDVNVAAVVDMNGGLLGIESFPTTADGHRCLESWMSGFGTIERVGIEGTGAYGAGLARHFGVAGVIVIEVDRPDRQKRRMHGKSDRLDAVDAARGALSGRCQGRAKSGDGHAEALRALLIAKRSARSTRIRTVVQLRHLMFTAPDELRARLGRLSATQLVNEAVKLRPRGGGDVALHGVKTTAVILARRVQALDGELAVLDEQIGLLVAAAAPALLRVYGVGADTAAVLYVTAGDNPERITSEAKWAMLCGIAPIPATTGLIDKRFRLNNAGDRHANNAIWRIVITRLGQHEPRTVAYMQRRLAEGKSKRYIIRCLKRYVARETFRALPR

SEQ ID NO: 139241 - protein, 342 aa, unidentified
MQYYVGLDVSLKQTSICVVDQTGSVVREAVVDSDPEAISVFLRSKAPDAVRIGLETGPTSTWLWTELKRLGLPVICIDARHAKAVLKMQINKSDRNDAIGIARIMQTGWFKEVHVKDIDSHSVRALLASRALLVKIKRDLENHVRGLLKNLGLVIGRAKFNVFTVRAEELIEGRPELIAAIRPLLEARDAVGQQVSELDRKVMKLARHDAQVRRFMTVPGIGPITALAFKATIDDPARFARSRSVGAYIGLTSRRHASGEVDWTGRISKCGDAMLRSYLFEAAGVLLTRVPKWSAVKAWGVRLAKRNGLRKAKVAVARKLAVILHRMWIDGTEFNWSKEIAA

SEQ ID NO: 139242 - protein, 422 aa, unidentified
MLEETHDNQEIIGRVAALDIGKAELVCCIRVPSSSKSGKRLQEVATYQTMTRSLLAMADRLRELGVTRVVMEATSDYWKAPFYLLEAEGFEVWLVNAKDVKHLPGRPKTDKLDAVWLCKVAERQMLRPSFVPPPEIRRLRDLTRYRVDLVVARTAEKQRVEKLLEDAQIKLSVVASDIFGVSGRDMMAALIAGQRDPKALAQLARRRMRAKLGLLEEAFVGHFTDHHAFLLAKMLGRVDQLSADIAELEAKIEAEIAPFAAAADQLDEITGVGHTAAQVIIAEIGTDMGRFPTPAHLTSWARYAPGVKQSAGRTKGKNATGHGNPYLARVLGEAALAAGRTDTFLGERYRRIARRRGKKKAIVAVGRSILIIVWHLLADPDARFHDLGADFYDTRINPERRKRNHIRQLEALGYKVTLQPAA

SEQ ID NO: 139243 - protein, 358 aa, unidentified
MNTQVRKIDFTGQNIYAGFDVHLKSWKVTVMVEDVEHKTFSQPPLPEVLFSYLKTHFPGGNYHTAYEAGYCGYWIHDKLVSFGVKSIVVNPAYIQTTDKERVQKEDKRDSRKIARSLSNGNLTPIYVPSIKTQRDRSLLRTRAMLVKDLARYKNRIKSFLHFYGISIDKSFKSPQQHWSNRFMNWLESIDMELEEGKETLHVLILECKNLRNSILKITNQIRLLSNTESYSNKVMLLRSIPGIGLLTAMTILTELDTINRFRNIDKLCGYIGLVPSTRSSGEKERAGDITPRGHSVLRSAIIESSWIAVRKDPSLLRSFLSFNQRMNKNKAIVKIAKKLLNRIRYVLINNTPYHYSVN

SEQ ID NO: 139244 - protein, 427 aa, unidentified
MSYRIAGIDVHKRMLHVVVSDVQVDGEYDFTRRIFGSLPEALRSLAAWLLEQQVQEVVMESTAQYWKPVWGTLERYWKQICQTREGALATSGTLHLAQAQSNRGRRGRKKDFRDAERLVKRLVAHELVLSFVPDVEQRLWRTVVRTKYQLTRNRVQLQNRLEALLEEAHIKLSSLVSDLLGASARRMLGAIADGETNRETLAALADRGLRATQEQLQDALGVCQELNPVYRRLIRMVLDEVASIDKRIEQLNQEMANLLRPHEDQVKRLAEVPGLGVDSAQQVIAEVGATAATFPSEKHLSSWVGACPGDEESAEVNYSRRSPQGNRHMRRILNQAANAAVKHKGSIFEILYRRYVPRLGHNQTIGIIAHKLCRLVWKILHRGIRYEERGPEVSKASKQKRTRKMIQALRRLGYRIEPSPSPSAIPA

SEQ ID NO: 139245 - protein, 341 aa, unidentified
MLYVGLDVHSKQSSLCILNSGGGTVKQIQLKGPRSAVVDHLRQLEGPFAICYEASCGYGHLYEQLRPLAHHVAVAHPGKLRLIYGSKRKNDRIDAQKLAKLLLLDMVPPVHVPSINVRAWRSLIVLRQRVLAQVVRAKNQIRGVLRENDIAGAKWLWSKKQLAWLESLELHPVAKLRLELAIEEFKTLDARIKRIEKELEKYADAHPAVKLLMTIPGVGIRTAETFVAWVDDITRFRNNRQIGSYFGLVPCQDASADKNRLGHITRDGPPVMRKLICEATWTAIKKCPRFKEFFEQVMGGKSERKKIALVATMHRMIKVMGAMLRSGEAYCASPLRKTPDA

SEQ ID NO: 139246 - protein, 348 aa, unidentified
MKYYIGLDAHSSTSTFAVVDENGQCVLRETVKTSEQSLVHVINRVHGERHMTFEESSISQWLYVQLKDKVDHLLICNPSYVAKKQGAKTDFRDALHLAQELRTNHLQPVFHDTSHWMEIRTTVSGYLDIVEEIVRFKNRLKAVFRAEAIQTDENSFYNNKVRIKELKNPSAKFVADKLFDQIEYLEKEKEKYREVFEKNRKKYRPIRNLMTIPGISIIRANIIAAIVCQPARFANKHKFWGYCMLVRHIQVSGGKIYGNKRFFGRRELRNVFVGAAENVIRLDGELRDRYDALRVKGADHKDAKLNLARQIASIALCLLKNNDKYNENYNEYLKERQKLRKEFFDQTL

SEQ ID NO: 139247 - protein, 346 aa, unidentified
MEAQVSVVGLDIAKSVFQVHGADAAGKAVIRRRLKREEVETFFRKLPPSLVALEACPGSHFWARLLRDIGHDVRLLPAQYVRPYVKTNKSDAADAEAICEAVTRPTMRFVPIKEEMQQEILVLHRVREMLIRQRTQLINSIRGHLAEFGIVAPNRAHNIGLLTKLIEDEEFDELPSVARHALRYLVEQLREVKTKLFRIDRDLMRVVKGSDACRRLMTIPGVGVVTATALVSSMREPSDFKSGRHFAAWLGLVPKQHSTGGKENLRGISKRGDGYLRRLLIHGSRSIMRWRGRSWTWLSKLRDRRPANVAAVAVANKTARIVWALLMFGGTYGHPGEGTTMRSAQT

SEQ ID NO: 139248 - protein, 376 aa, unidentified
MYYIGLDVHKKTISYCVKDASGQVHREGTIGATRNELDCWVRTLPQPRIMAMEATIFTGWIYDHLLPHAEQLKVAHPLMLRAIAAAKKKNDRIDAGKIADCLRCDFLPECHMASTEIRDRRRTLRYRHLLVRQMVQMKNRISGLLMETGVSHNKQRLHKVGYFGELLSSNEEVHENIRPLLRLSRETIVRCQRTEYALVSSLQRDPLLAEGLKRLRTVPGVGPITALTWALEVGDVARFRSVKQAISYCGLCGEEKSSADKVLRMPLSKQRNKHIQRVLVEAAKLAPRQNHELALIHEREKQKGNRNRATLAVARKMVAYFACRGLRDYTARRLPGPAVCRLSEGDQTPEAPFELFRDWQRTQTQSSVTALRGPRQ

SEQ ID NO: 139249 - protein, 347 aa, unidentified
MRFYTQQHGYYCGIDLHARTMYICIIGQDGTVLVEKNIRARPGPFLDLIAPYRDDLVVAVECIFTWYWLADLCHDEGIHFVVGHALYMKAIHGGKAKNDRIDAAKIATLLRGGNIPKAYVYPRPMRSTRDLLRRRLHLVRHRGRLLSHIQNTNHQCNHDDFRKKLTYKANREGVAEQFDDPSTRKSVEVDLALIAHYDGIIRDLELFILRMAKQHDADMFYRLRTITGVGKILALTILYEVHDVTRFDTVQRFASYSRLVKCSRESGGKRMGTGGAKIGNVHLKWAFSEAAVLYLRNNPEGQKYLGRLTRKHGKGKALSILAHKLGRATYFVMTRSRNFDEKKFLAA

SEQ ID NO: 139250 - protein, 359 aa, unidentified
MMNVGIDVHKKRCQVCLKDDRGRMVEELTIPNSTEGAFQLAKLLEGYEEARIVLESTGNLWVRIYDTLNQQPGFKVVLANPNKTRIIAEAKIKNDRMDARVLADLVRADLVAESYVPSKEIREQRALLRQRRALVEDTVTIKNRIHNLLDKYDLRSDLTDIFGKQGREWLRSLQLPSIERTILDVNLKQLESLEALIETLTVKIAKEAINQPDVKLLMGFTGIDYYSAMLLVNEIGPIDRFPSAKKLVSYAGLAPGIRQSASHTVHGRITRDGNKYIRWILIEAAQNAYRFDPKLRGFYLRVAAKRGHQKAIAAVARKMLVSIYHVLKRQEVYHGQRDDLLERKIRRLQRIVDSSLQAR

SEQ ID NO: 139251 - protein, 342 aa, unidentified
MEINTIGLDLAKSIFQVHAIDAAGTAVVRKALRRAQVVPFFAKLPRCLIGMEACGTSHHWARELARLGHEVRLMPPAYVKPYVKRGKTDAADAEAICEAVTRPSMRFVPVKSAEQQAALALHRTRDLLVKQRTQLVNMVRALLAEFGIEMARGLHHALSLAARLSAGDAPEVPALAQRVVKGLADQIGALQVQLDLLEKDLLAWHRSNELSQRLATIPGVGVISATALAASVTEPERFRSGRQFAASLGLTPLQNCSGGKERMGRISRMGDRYLRRLLVLGMTSLVRRARSTPDSVDPRFVAMLQRKPVRVVTVAAANRTARVAWAIMTHGGTYRTPPAAAA

SEQ ID NO: 139252 - protein, 359 aa, unidentified
MKDALAKRYHKQTTIGIDLGDRHSRVCVLDHETGEIEEFSISMCPNAFRERMARVRRARVVIECGTQSLWVGHTLMDLGFDLIVANPRNLALIAKSHLKTDRVDARMLAELGGSSLRLLQPVTLRSMATQRDLALMRVRDALVKDRTEQVNRLRMILKPFGIRIKTGTGRGMIEDVRCKSPDELVEVTAPLIRTIEHLNQEIRGLDRKIATLIEERYPQARLLMTVDGIGPITALSTVLTIDDPKRFKGSRSAGAYAGLAPGKFESGRIRRDMGITKTGSLLWRCHLINSAQYILSSRGKDCDLRRIGLEIASRGGPKGKRRAVVAVARRLAVMMHRMLIEHREFERLRFPERRMAFAA

SEQ ID NO: 139253 - protein, 349 aa, unidentified
MNVIHYIGFDAHKKSINHCVKLADGQIVEEERLPARRETLIRWAKRRPVPWYGAMEATLFSGWIYDTLKPYAVELQMGHPAMMKAIAASKKKNDRLDARKIADLVRCQLLPVCYVAPAEIRELRRMLRYRNLIVRQAVQMKNRMSGMLMEVGAPYNKQKLHGKQYFHELLEQLEEVPETVKDLLRLSRGALDSFEATQEQLLARLQKEPLLKARVERLRKIRGVGEVTALTWVLEVGEPQRFSSIAHAVSYCGLTSALVSSADKQQRGPISKQRNGHLQTVLVEAAKLAPRWNPQLAAVHEREVAGGHRNRATLAVARKLVAYLLAVDRSGQPFEVGRAATGKECPSVA

SEQ ID NO: 139254 - protein, 366 aa, unidentified
MIVIGTDTHKQSHTAAALDGATGGVIAEQTARAKRRSFEDLLLWARQLGPERVWAIEDCRHVSGALERFLLAHGEQVVRVPPKLTAGARSSARERGKSDSIDAVSIARAAIREGLDTLPVAQLAGPELDVRLLVDHRERLIAQRTQLSNDLRWSMHDMWPEFDVPARALTASGWQERVASRLARAEQSARVRIARDELRRIRELTRTINALEGELATLIATLAPRLLAEPGCGVLTAAKLIGEIAGIHRFATDAQFARITGTAPIAASSGRTERHRLDRGGNRQLNCALHRLAVTRGRMDPDTSGYLARKQAEGKSRREALRSLKRHLARRIWLILQPPGRDTPPTRHRPAVTIHCNTPYGSFSLT

SEQ ID NO: 139255 - protein, 350 aa, unidentified
MGNINLLAIDLAKNIFQLHGVDKQGNCVLKQRLTRDKLVEVISTLPSCRIVMEACGSANYWTRVFKRLGHEVDLISPQYVKPFVKGNKTDRNDSEAIAEAASRPSMRYVEPKTIEQQDIQCLLRIREQLIAERIALSNQTRGFLAEYGITINQGVAAFRQRIPIILENKQNELTDLMRHHVQRLYNRFCALETEIHVYDKAIQSACKLSESAQKIMQIDGVGPMIAASILSLGDLKRFKNGRHFSAFLGLVPREKSSGNKQIRLGMSRRGDSYVRQLLMHGARSVLIRVNKKDTAQSQWLKNLVARKGVNKATGALANKIARHIWAVITQEGCYDRNKGYGNAKAITIAA

SEQ ID NO: 139256 - protein, 421 aa, unidentified
MLYKIAAIDIHKKVLMVVVSSMAAEVEDTTGAAVEFEYRKFGTGASERNHLVSWLQQHQVREVVMEWTAQYWKPVWLDLEPHFPKLHLAQAQSNRAPKGRKNDFQDAKRLGRRLLAGELMLSFVPEPEQRAWRLMTRGRLQLVRERVRLQSQVECLLEEARIKLSSVISDLFGVSGRRILEALSKGETDAVKLAELGDDRLQCTKEQLADALAGPPEPGHLQLLKLHMERLKLLDEQIDQLSQMSATALKKHEDAVVRLAKVPGFGVESSQQMIAEVGVDAEAFSSAGEFASWVGACPGSDVSAEENHSSRCPKGNRYARRLLAEAAHAAVKKKGSHFQNLFRRFLPKLGYKGAIWVVAHRLARLAWKILHDGVNYIEQGQDTNPRAKKRRAQKLTQALRKLGYSVTLTEVNAGPVPEATA

SEQ ID NO: 139257 - protein, 400 aa, unidentified
MLSIGIDVSKGKSTVCGMKPGGEIVYTPFEIQHTREGMSELVSLLRGSGEEVRAVLESTGSYHCPVVTALLENGIFVSVINSLRMKRFCSQSIRKVKTDRIDAMQIALYGLAYWQELQPTKLPEDTYRELQLLARQYYQMTSMLIKAKVDFNAICDQVLPGMQELMNDHAGRHKLSDFVLRYRHTTHILEMGETRFRKDYCKWAEKKGYRNCERMAALIFATAQNGIPVLPNAPSTQIVITEAIRVLHTVEASRDAILTQMQALAKTLPEYSLVREMPCIGDTLAPRLIAEIGDVRRFHSKRALITYAGIDAPPYQSGKFCANNRHISKRGNRYLRKTGYEVMQSYVMHKPANDPIFTFIEKKRGEGKSGKLAMVAGLNKFLRVYYGKVTELYRSLPAIE

SEQ ID NO: 139258 - protein, 321 aa, unidentified
MTYVGIDVSKATFVVAYSSAKSSETKTFKNTTKGIREFIRTISPEENHCVLEATGNYSMLLVYLLSKAGFTVCMENPLKIKNFARVMLSVVKTDEIDARLIALYGERMQPAPFKLRSDSLLLLKQKRTVLRQLKKQLTANRNLEGSLKVLPFIDSKCKKVLEKTIKFLEKQIEEMEEELTSLAEIEYKKQMDLLTSIKGIGATLAAALIIVTGGFTYFDNAKQLTRYLGLSPTYQQSGTSVNVKGHINRNGDAYLRSQLYIGAMASLRCNTECKACFDRLRSNGKPGKLAIVAVANKLIRQAFAVVAHEKKYIDGYKSVKP

SEQ ID NO: 139259 - protein, 325 aa, unidentified
MQNQTIVGIDVSNATLDICVNSSHGERSFVIDNDVKAICKFFNAYKECLVIGMENTGRYNWALYEALNNTMHRVFVISPLHLKKSLGLVRGKNDKIDAVRIAAFIKKNHAELPKWKPSSPNIQKLKILLTERSSRIKTKRQLLKQQYDYVKMKHLKLDKYLSDLNKQQLLLINTQIARIEKDIELLIRADEHMRKQATLIRSVPGAGKVLCWMMLAKTEGFTTITEPRKMACYSGVVPFSNQSGTSVRGKERVSSYADKAIKAVLHLAAMSAIRLNNDLSEYYHRKVLEGKNKMSALNAVRNKIVHRIFAVIKNQQPYQKHLLLS

SEQ ID NO: 139260 - protein, 336 aa, unidentified
MSRYVGIDLHRRRSVVVIMDPDGTTVSLRRIENSPLALAEAVAEAGPDPEVVLEATWGWYWAADVLREAGARVHLAHPLAIGGYRNRRVKNDEKDAALLADLLRMGSLPEGWIAPPQLRELRELVRYRHKLSQLRAGLKSQIHAVLGKEGVIPELTELWGPAGAAWLDEQQLAEAYQTRITSLRDLIGRYNTEVTRLDRVIHGWLRDDTGYQTIQQLQGVGPVIAAVFVAEIGDVSRFDTAKRLSSWAGLTPRHRESDTKVIRGSITKQGSPLVRWAAIEAVARYRGGAPIRDTYRRIAERKGNKVARVAAARKLLTLVFYGMRDGEIRCLKEQAA

SEQ ID NO: 139261 - protein, 402 aa, unidentified
MNSVGIDISKGRSTIAVMRPFGEVVISPFEVRHTDSELSELARRLKSLNGETRVVMEATGNYHAPVAKLLHDAGLYVSVVNAKLVHGYGNNDLRRVKTDRKDAIKLANYGLDRWLTLPRYIPEENTRLLLKNCYRQYRQYSKVQTVLKNNLISLLDMTFPNANRLFNSPARADGSEKWVDFVAEFWHCECVSERPLKSFVNKYWRWCRKHGYNFSEEKAHAIYDEASGHIGVMPKSETTKLLVEQAVSQLSATSAALAALKQEMQSLSSQLPEYPVVMDMFGVGPTLGPQLIAEIGDVRRFYSKKALVAYAGIDAPPNDSGDVIGRHKSMSKVGASSLRRTLFLVMSVYLQNSPPNEPIYQFMNRKRAEGKPYRVYMMASANKFLRIYYATVKAYLETLEQS

SEQ ID NO: 139262 - protein, 325 aa, unidentified
MEKVFIGIDISKLTLDVFVNSCSKTQHYQIENSSKAIKKFLKNFSNDANTVVGMENTGRYNFELYEVLSGFKMLVFVINPLHLKKSIGLLRGKNDKLDSQRICMFLEKNYMDLQFWIPKSCDIQKISLLNSERRHRVKIRAGLSSQMKDLSFLKNHTDKEIIKLNKQLILLLDKQIKTIEKKIVEIIESNIELKDQYTRIQTVPGVGKILATMLIVKTNGFTEIQSARKMACYSGVVPFDHRSGSSIYYKPRVSTMADKELKKILHLAALSSIRLKNDLALYFQRKVLEGKNKMSVLNAIRNKIIHRVYALIKNNSVYENSLHTS

SEQ ID NO: 139263 - protein, 409 aa, unidentified
MRVMNCACAGLDVHQKTVVACTLVGAAGTDPQMEKRTFGTSTRELLSLGDWLRHRGITHVAMESTGTYWKPVWAILDGQFDLTLCNAAHIKQVPGRKTDQKDAEWIADLLRHGLLKKSFVPPQPQQDLRELTRYRAQVSADRSAVSNRIRKLLEGANIKLGSVASDVLGVSGRRMLEAIIEGETDPTKLADLALGQLKEKRSQLIEALSGRIRDHHRRMLRLELAQWKFLNTLIGELEAAIEEALGPFLTAVALIKTIPGFSEVSAAAVMAEVGPNMGQFADAGHLASWSGLCPGNNESAGKQYTGRTRSGNVWLKRILCQVAWASAHTRNTYFSALFRRIAAKRGKKRAVLAVGHAVLVTIHAMLTKQQTYQELGADYFDHLHAEGLKRYCLKKLEAMGHRVILEPVA

SEQ ID NO: 139264 - protein, 403 aa, unidentified
MYNAVGIDVSKGKSTVAVLQPGGTIVKKTFEVEHSISGLKELRDYILSLDGDTKAVLECTGRYHEPILHSLSDAGIFVSAVNPHLIKNFGNNSIRKVKSDPADAKKIARYTLDNWAELQEYSSMDTTRTQLKTLNAQLDFFTKQKASAKTNLISLLDMTYPGVNELFSSPARSDGSEKWVDYAASFWHVDCVRKIGLKSFAERYKAFCKREGYNYSEARAKELFEGSKELVAVFPKERSYKDLIEMSIKQLRTITESTVCIKNEMNELAATLPEYSTVMAMCGVGKTLGPQLIAEIGDVSRFSHREAITAYAGVDPGVDASGKRVNRSNRASKCGSSRLRKTLFLVMSVLLKTKPDDAVYRFLAKKRSEGKPYNVYMTAGANKFLRIYYGKVKVALAAQAKSE

SEQ ID NO: 139265 - protein, 371 aa, unidentified
MAKRLKYIGLDVHKETIAVAVAEGERGGEVRFHGTIPNEDDAVRGMVKRLAGPGITLDFCYEAGPCGYGLQRLLTRQGQPCIVISPSMMPRRPGDQIKTDRRDAMTLARLLRAGELAPIWVPDEAHEAIRDLIRARRSAQEDTSAAKQSVRSFLLRHDRRFSGKSAWTKTYWRWLSEQRFDFAHQQLAFEEAKRRVLEAQARTARLEAALVEAVDGWRFAPLVRSLQALRGVRLIVAATLVAEVGDLTRFQNPKQLMAYLGLVPSEYSSGARVQRGRITRTGNAHARTMLVEAGWTYRLPAREERRYRDRVADLPEDIQAIGWKAQVRLCQRFRRLSATGKPQPKVNTAIARELVGFAWDIARRVQPVVAV

SEQ ID NO: 139266 - protein, 457 aa, unidentified
MSQRKRDRKSRELPLVHPAAAAIDIGATMHVAAVGPDRDQEPVRTFRTFTDDLHRLADWFAGRGVKTVVMESTGVYWIPVFEILEQRGFEVMVVNARDAKHVPGRKTDVSDAEWLQRLHEYGLLRPSFRPQAEIAGLRAYLRQRERLQDYAAGHIQHMQKALMQMNLQLHHVVSDITGVTGMAIVRAIVAGERDPTVLASHRDRRCHASVETVCQALIGNYREEHVFALTQALELYDVYQTKVMACDKQIEAILTRLRKAAPRPVHKLPPARRRGDQKNAPTFDARAALHAILGVDLTQINGLGPYLALKLVGECGTNLAAWPTAKHFTSWLGLAPHNKISGGKVLSSKTRRTDNRAASLLRLAAGTLGRTDTALGAFYRRLSARIGKAKAITATARKIATLFYNTLRHGMAYTDPGAGYYEDRYRERVLRNLRRRAKSLGFVLVEPDPHAAQVVVS

SEQ ID NO: 139267 - protein, 353 aa, unidentified
MTDTPSIAWLGLDAHSRNCVLAHLDDQGHEINHWRFPTDPQQLLKHIQAIPATVKHLMLEESNLARWLAQLLQPHVQQLVVCDARRNRLISHDANKHDRRDAFALARLLRLNEYKPVWQPTDDQRVLFKRAAQAYEKSVLRQTRLKLQIKSLFQHWGLFPTGASVFSKPGRSAWLQKLPYDPLRSQALLLYELLDQALAGQAQARRLMCQAGRRFPEVQRLRTAPGVGLVGAHLFVAYVQDPHRFAKFSRLSKYCRLSIRDRTSDNKPLGFKQLDRQGNGVLKAISYRAFLQATKRRSGPLWDFYQASLRQTKSPTHARLNTQRKILLVLWTLWLKGQDFDPNQFSRPQPIDV

SEQ ID NO: 139268 - protein, 309 aa, unidentified
MEIVVGIDVSKERLDVAILPQEEVFAVGNDHAGIDELAERLKGIGVDAIALEATGGFEMLAVAGLSAAGLTVLVVNPAQVRAYAHAIGRRAKTDPIDAAVIAAFVLATKPEIRPLRDAETQALSELVARRRQIVQMVVAEENRLRMALAKQAQKSIKRLLKALRRELESLDADLDSHIRKSPVWRVREALLTSVPGVGATTARTLLAELPELGSLDRRQIASLAGLAPWTRQSGKWKGKSFIGGGRGKVRAVLFMAALVASRYNPDLKAFRDRLVAAGKPKIVATVATMRKLLTILNAIIRDGRPWQNA

SEQ ID NO: 139269 - protein, 346 aa, unidentified
MIAIGSDVHKGRCVFAMMGEEGKVKMLEPIECTREAWRKRLAELPPEAEVALEVSTSGYFVMSVLEEAGWRKRAHWVHTAGIDSLRKQKSDRLDARRLARKLAANTADPLPEAWFPPAPIRQLRMLARQRCRIARLRVLTKNRINSLLQMHGLRPEKSPISAAGRDWIRQQALPAPVEQCFEQLFRLYDFLHSERETSEQNLAAHAALFPEVKLLRTIPGIGHILAAIIWGEVGTLERFPCAASLVNTTGMVSSLYESGEVSIQGPITRQGSAWLRWALITAANCVTRSKSPLGQRYWSLRRAHKKPNVAKTAVACSLARCVYGVLKHGEPFQAERWGRRSGKLEP

SEQ ID NO: 139270 - protein, 316 aa, unidentified
MTNQLNIVCGADIHQRFLVATILCRDGRAWTSRFLMNLNGLLDFKSWLISLGCQKVAVESTGRFWIPVHMILEGTIDLIVANAYKIKHTPKKKTDLKDSEWLAELCLNDMIEPSRIFPKEDRELRNLTRTREAYVRDLSKEKNRIHHVLESCSIKLASVISDIFGKSGMHILNGLLSGINIEDVLKGIPDKRVRERKAEELRDALMGKLEVSDIFLIRQSLRIINQLKICIEELDREIRSRIASRPMDIKILRSIPGIGMVSAYTILAEIGNYLDFKKPEQLAMWSGLVPSVYQSADKLITGCIIPFSEHSFFKYH

SEQ ID NO: 139271 - protein, 424 aa, unidentified
MGKFTKTLCISERKEYSIMEGPIITVDVSKGSCHYQPFIENGHPMRKPKQLSATIDGFQKLGQTIKDLEAKTEREDIPVIFEATGVYHRPLQKYLEDHKIRYYIISPLLSATYRKTDLHSNKTDALDCAHIAKAYYCEKELRQYQAQPQEYKRLYQLSRIYESELVHLRKRKVSLRSMLDIIYPRIDKTFKGNQNLYDPIPMEILKRYPHPSLLLSHREDTIVKNVGHRTGHLKGYTERIVHKIYEKAKECYSGCEINDIEVLKLPSLIENVQEQKKKCDSLLKEMIEIARTCPYFASVVSIVGIGENLAARIIAELRDVNRFDNRAAIVAYAGLNPKIQQSGDIDGLHLKISKKGNKHLRCLLYLGAQCNYRLRKEDPLYEFTKKKRQQTQCPLSSKAAYTASAHKLLVIIYSLCKNGTLYHS

SEQ ID NO: 139272 - protein, 535 aa, unidentified
MSAAAAWGVKRSSRRSGQRGLIHKPRGVIGPRVQKVGPEHFGIVSVDCAKARSKWLLADFYGNVHVPPTVVEHHREGFAGAIAQLRRAILEHGIGDLVVAVEQTGRYHHAVQRAFAAAGFEARTVHPFTSKQFRLPADPGIKTDDKDLAAIHRAAINGFALSDAPWDPFWRELQLLTRHRRDLVQKASLLCCQIKEHLEAALPGYAACLPRLWEHPAALRLALELGGAQGMLQAGIKGMGELLDKLQIRFQGRTLKRVIAWAQSAAVPDVAADHHRTIAQSLERDRAQKEQEIQALERQIAQSLVCTPYVLLLSIVGINVVSAGEYAGEMGPISNYANSRCITGRAGLYPARYQSDQVDLAGGLVRSANKRLRFALMLVADNLLKCNHYFQGLAGRWAARGKDRRDQHVRAAQRFSRISFHMVAGGQVFNHPAVQSRDYILRKLVLFYSQHNTPADQMLGGLRAAALQLPHCEHAAEARSLRDNWPATAPRRGRRNRQDRKPSGPERLGAILAPLLVELAGRVVQSGPSGAGDPA

SEQ ID NO: 139273 - protein, 351 aa, unidentified
MQIVGALDVHRRQITFKTLEPASGECSRGRISPAAREPLRQWLERFDGLEGEFVLEGTTGWRFVVEEIERAGHVARLADPAETAARRGRKRRAKTDDADCDLQLRLLLAGELPEAWIPPAGILELRTRVRLRKTLIDQRTAWLQRLQAQLFHQGVPPGLKPGTVAGRDALARVELSPAGREAVELYLRMLDQLDRELVPIDRALRAFARRQPGCRALTEQLYGVGAVTATAILAELGDARRFRSSDDAVRHSGLDVTVWQSDRKRAAGHLSHQGPSVLRWALFEAAQCAARRSSPDHPYYLDVAKRIDHNRACLSVARKLCRRAHHLLRELGDDALAPSDPPRAELVDAAA

SEQ ID NO: 139274 - protein, 304 aa, unidentified
MNGIGIDVSKRRLDIGTTDGETVQVSNSPSGYAELSTWLSTRPAIQIVLEATGGYEQTVLDFLHKAGHPVIRANALRARRLAQGLGKVAKTDRLDALVLAQMAALVELPSYQPLEPWQRKLREFVRARRQTMQALTVARQQQEMVTDRELRRQMQGNIIRLQTLVERLGKQISEQVAQQPQLAVLKSMKGVGPALQAVLASYLPELGQISGKAIASLVGVAPISHDSGAMRGRRSIHGGRAEIRQVLYMSAMSAMRHEPRLRDFYRSLRARGKEGKVAIVAVMRKMLVILNARVRDAQGGSIPA

SEQ ID NO: 139275 - protein, 367 aa, unidentified
MTLYIGLDVHGKQTVYVAQDESGKVTAQGKVSTSAEGFCELAEKLEVPEGTKVGLETGVQAMWVSRLLSGLGMHPVVVDAREVRQKARRIGQKCDRRDAFEICDGLRRDFYTSVVYVPPLEVQRLRQILSRRRHFVKVCTMEINGAKFVLRSVGLGQEARSLTTLEAWRKLLRRPGVQSVREDLVMHMDVWRAAHEKVVALEERLRGALEPFKTTARRLETVPGVGRITAATYIAVLATPHRFPDSGRVVSYTGLVPSSFDTGPMERHGHITKRGSAELRAMLCEAAHHAAKTTHPLNPYWVRVCSKQGYKRAVIAVAQRVARILYAMWRKGEDFDATKLNVIQDRRIHTRTYYWRIKKPHEELVRA

SEQ ID NO: 139276 - protein, 402 aa, unidentified
MRFSVGIDWATQAHAVCIIDQTGRVHWQGSVPHTAEGLADLLTRLRRFCRWGSVRLALERPSGLLVDTLVEAGLEVVPIHPNALKASRPRYSAAGAKSDPGDAFILADLLRTDGHRFPSLRPPSDDTRALRALVRGRDDLVGQRVALANQLRALLERFWPGAAAIFADVDSPIALAFLTRYPTPHSAARLGDKRLAQFLGQHAYCGRRPVAELLGRLRRAPASQVGETEAEASGEVVRALVAVLSPLVLHLQQLSAAIEAALPQHPDGRLVQSLPRSGTVNAAQILAELGDDRARFPTDEQFAAEAGLAPVTHASGQHRAVVFRWACNKRLRRAFTTFADNSRHASRWAAHVYERARARGCRHQHAIRILARAWARILWRCWQDRAPYDVTRHRAAQALAAA

SEQ ID NO: 139277 - protein, 353 aa, unidentified
MNQELRRVIGGVDSHADNHQAAALDERGRLLGSKSFAVSAAGYRELLAWLASFGLIERVGVESTGSYAAGLTRHLLAEGVRVFEVNQPHAHTRRRRGKTDAIDAELAARHALSRASAVTPKQTSGIVESIRQLRVARNSAVKSRSAAIVQLGELVRTAPSELREQLAIRSTVKGKAALCRRLRPDTDRLGEPANGAKLALRSLAGRIARLDDEIAQLDGQLAPLVATAAPRTTALLGISTGHAGQLLITAGQNIDRLHSEAAFAALCGASPIPIASGKRGRYRLNPGGDRQANRALHMIAVCRLRHCAKTRAYAHRRSSEGKTKKEIIRCLKRYIARQTYATLRDDLRSLPIG

SEQ ID NO: 139278 - protein, 349 aa, unidentified
MTLVGCDLHTRKQQVAVLHTDTGEVVEQELLHAGDAVEQFYRTLPRPVIVGIESTGYALWFHELMQRLGHTLLVGEAAKIRAMVVRKTKTDRRDAQHLLDLLKHDRFPAVWIPDPATRDLRALVTHRVRLVRIRTMVKNSLQAIALNRRLALGSKLWSQRGRAQLVALALPPHTAQRREDSLDLLAWLEAHIAGLDARIAAAADAHPGARLLLTHPGVGALTALTTVLVLGPTARFPGSKHVVSYVGLAPAVSASADTCHLGQITKQGSTLLRWVLGQAAPLAARADADLHRVYRTLIHRRGRPKARVAVARKLLVRLFIMVRDQIDYAEFRRRGCLSPPRETLLPRRA

SEQ ID NO: 139279 - protein, 357 aa, unidentified
MLSSNVKYIGLDVHKEAVAIAVLNGAGKLVMESIVETKASTLLDFLHGLRGELHVTLEEGTWAAWLYDVLKPHVADIVVCNPRRNALLKEGSKSDKIDARRLAELLRSGMLCAVYHGENGLGTLRELARGYLTISKDQARVMSRLKALYRSWGIPCSGRQVYTPRHREQWLSKILQPGVRRRAELLYQQMDGLLLVRHTVRGELLAESRKHPAVKILRQIPLIGPLRATLLLALMQTPYRFRSKRQLWTYSGLGVETHDSAQHRYVDGQLQRSKKPQQIRGLNQNHNHEMKKLFKSTAMSASRCAGPLQDFYAGLLAKGMKPDMARLTLARKIAAITLTLWKKGERFDAEHLKSQAA

SEQ ID NO: 139280 - protein, 410 aa, unidentified
MISVGIDVSKGKSTVCILKPYGEIMCSPFEMLHGEKELNALDDLLNKLDGEIRIVMEATGIYHLPILTFFHEKGYFVSVINPFAMKKYAKDSSIRGAKTDKLDSIMIANYGIEKWFKLQRYKGDEEIYAELKLLGRRYRHYMELHVKALQELTHILDYVMPGIKKMFNSWNEANGKDKLSDFVEQFWHFDLITAMSLEKFTEEYLDWAKEKKYHRSRSKAEAVYELASNGISTLSSGTPSTKMLVQEAISVLRTVDSSLFLILTRMQELAKTLPEYSTVREMGGVGDVLAVKLIAEIGDIRRLHSAKALIAWAGIDPPPYESGQFIGSKRKITKRGSSTLRKVGYEVMRVLKSHPAPKDDAVYNYILKKESEGKSKKHAKIAGLNKFLRIYYARVMACLLYTSPSPRDCS

SEQ ID NO: 139281 - protein, 400 aa, unidentified
MTYDYVIGMDVGKYFHHACILDSGGNQVLSKRVNQHEQSLRKLFNCYATNEAKTLVVVDQPNNIGRLTVAVAQDIGVDVRYLPGLAMRQLSRIHAGNSKTDVRDAYIIAYAGKYLPESLRQVDRVEEAFIQIKVLNGIDEDLTRSYTRLINQIRSALVGTYPEFEHVLRGQIIHRKWILHLLAKYGGPSKIKRLGKARVNAFARKHRARNPEPVTDAIFAAIAGQSVQIAGAKYAELGVAMSAKDALLKLEHRKEIEAEVTELIDEIPQTQLLLSMPGIGPRSAAQILMTVGDMSDFPTAGHLASYAGLSPKTNQSGTSIMSNSLNRAGNKKLKNALWQSSFASIRFHERSRQFYERKRNEGKRHNAAVVALARRRLNVLFAMMKNHEFYREPQAEVAAA

SEQ ID NO: 139282 - protein, 339 aa, unidentified
MQVTTIGLDLAKNVFQVHGITDDGSVAFNRALRRAQVLSFFEKLEPCLVGIEACGTSHHWARKLIKLGHNVKLISPAYVKPYVKRGKSDAADAEAICEAVTRPTMRFVEVKTPEQQAILAVHRTRDLIVRQRTQTINMLRAQLAEFGIVMPQGIYHALQFAKDYLNGEQADLPEVAGDVIFELCDQLLFLHSKILRCSRQMNQIAKLEERVALLRTIPGVGQITASAIVATVGSGKQFNNGREFAAWLGLTPLNKSSGGKERLGHISKMGDQYIRRLLVLGMTSRIRSIRIKPEKFDPWFADILSRKPSRVATVAMANKTARIIWAVLTRNEPYKVRTV

SEQ ID NO: 139283 - protein, 361 aa, unidentified
MTDQIQVREVIGGVDTHGATHHAAVIDPIGRHIADREFPADTTGHQALTRWLASHGEVIAIGVEGTGSYGAGLARHLTGTGWVVIEVDRPDRKTRRTAGKSDPIDAYAAAQAVASGRATGTPKARDGLVEAIRALHVARRGAVKARTATINRIKSLLTSAPTRLREQLTPLGTAGLIQACARLRPGTDLTDPTAAHKKALRAEARRWQALNADAAELEADITTLVRQAAPALLNLPGCGPITAAQLLICAGDNPERMHSEGAFAHLTGAAPIPASSGQTRRHRLSRGGDRQANNALHMIAVTRLGHDQRTREYAARRTTEGLSKKDIIRCLKRYIAREAFKALTCPNTPTPPTKPQVTTTP

SEQ ID NO: 139284 - protein, 344 aa, unidentified
MQVITFGIDLAKNVFQIHGVDALGHTVVKKQLRRDQLAPYFANVASATIGMEACSSAHYWARKLQDMGHSVKLMAPQFVKPYVKGNKNDANDAEAICEAVARKSMRFVPIKNMEQQALLSLHCVRQGFVAERTAYANRIRGLMGEFGCVIPQGIHHIGERVHDLIEDASNELPGLFRVTIERLLEHFKELHRQVRELELQIQTWHRNNEASRKLEAIPGIGPITASALIASIGDAKNFKSGRELSAWLGLVPRQHSSGGKQNLLGISKRGDMYLRMLLVQGAHAVINACCRKGKETGWLPGLLRRRNHNVAAVAVANKNARIVWALLARERQYETGYSRDTALV

SEQ ID NO: 139285 - protein, 368 aa, unidentified
MRIIGCDLHARQQTLAMLDTTTGEVVKITLKHEGDSMREFYSRLPRPVRVGIEATGSMQWFLNLMEELEIECLVGHPAEIRAAEPRKQKHDRRDADLILKLLTENRFPAIWLPSKELQDLRSLLRHRHQWVRMRTRIQNALQSIALANGLRRGPSLWSRDGQSRIASLPLAPHTAYRRSELQAMYEKFEAEIEKLNQRVQEQACGRPGARLLMTHPGVGPVTALATDVFLGDPARFADSKALASYAGMIPREYSSGGRQRLGGLSKQGNPLLRFLWGEAGAHAVRRDPELQRFYRRKLVQKGLGKASVAVARKLGIRLWIMLRDQIEYHEFCRRGQKQQKSSGACAGMPETRYGAKSHRPVDKATRLP

SEQ ID NO: 139286 - protein, 332 aa, unidentified
MKYVGIDVSQDHLDFALLNSEGDHVESARVRNDERAITKLVNAWIRKWKLDLPQSLFCLEPTGHYSHLLLTVLVDLQVPVWLAHPMNIKQGMGIARGKNDEIDAVRIAQYARRFRDQARMFTADHLRMSKLKQLLMKRRQLVESKVKLKIQLGNVNRHMHKDLRKTFNQLDQAQIRTIDRLLKKVEFMIAEEINADPQVKHQYDLISSVPGVGPVLASNLLALTDAFSRFSTPRQLACHAGAAPFESTSGSSVRGRTRTSRKANAGLKSLLHMAALVAIRNDAELGTYYKRKVAEGKPKLCVINAVRGKIVHRVCAVLRKDHLYEKRPLLLS

SEQ ID NO: 139287 - protein, 340 aa, unidentified
MTITTIGIDIAKSVFQLHGVDEAGTVVLRKKLRRSAVLDTLRDLAPCLVGMEACATAHYWAREISALGHEVKLMPPAYVKPYVKRGKNDKADAEAICEAVTRPTMRFVPVKSAERQGVLVLHRTRDLLMRQRTMLLNAVRGHLVEFGIIAPQGPCKVMEMITNLREIEAPGLPEITRSVVLSLGLQRDALAREIHAQERQLLAWHRQDTASQRLETRPGVGIITGTALAASVPDPSMFRSGRQFAAFLGLMPRQNSSGGKDRLGHISKMGDGYLRRLLVVGATSVIRRAETNPSATGVLVRSLLTRKPVRVTTVAIANKTARIAWAVLARGETYRAPAMA

SEQ ID NO: 139288 - protein, 411 aa, unidentified
MDVLHDRVAGLDVHKKTVVACVRTPSDGKARRSETREFETFIGDLERLRDWLAGEGVTHVAMEATGVFWKPVWFVLEEGAFELLLVNARNMRMVPGRKTDVGDAGWIAQLLEVGLLRGSLVPPRVIRELRDLTRYRKRLIQDRTREGQRVEKVLEDAGIKLASVASQTMSVSGRAMIEALIAGERDPAVLADLAKTRMRSKIPELKRALHGRFGDHHGAMLRLHLAHIDHLDATITSIDEQIDRKVVPFDEARRRLMTITGVGKTTAEVLIAEIGVDMSAFPTAAHLASWAGVCPGNNESAGKRRSGRTNPASPWLTNALIQASWAAARSKDTWLSARFWRLARRIGKQKALIAVAHSIVIAIWHMHTDQCDYNDLGPDWWNKRTDPTRETERLRRRLEALGHHVTLEPAA

SEQ ID NO: 139289 - protein, 408 aa, unidentified
MLLVGIDWAEAEHAACLLDGGGRVVRRLRVAHTRAGLGTLHAAIAAAEPDAGAVLVALERAHGLLVGSLLEAGYAVYALNPKSVERYRDRGRTSGAKSDPADAELLARVLLTDRERHRPLLADSAAAQEVRSLARDDERAARDQRRLLNRLRQDLLEVFPQALDALPELDAPTTLAFLARWPSVADARRASAQEVGAFFRAQHHGWPDRAAGRVRAALDALALAAPAHLARAKAGTVRLLAEQLLLLHRQRAAWEKRLRELLAGPEAHPDGEVLLSLPGLDARLAARVLGEVGDRRERFPTPSALQCYAGTAPVTRASGKARVVSSRLACNRALRQACLQWAFCSLGRSAWARAFYDAQRRAGKRHDAALRALANRWLEVLHALLRTGRRYDEAVHRANRTKPARPAA

SEQ ID NO: 139290 - protein, 351 aa, unidentified
MMIIGVDYHPSFQTIAFLITETGECGEQELNHSDGQAEKFYRDLQQQGICVRVGMEATGYSRWFERLLAELGYEVWIGDPAEIKTKRVKKQKTDREDARLLLRLMWENNFPRVWVPSPENRDLRQLLWHRHRLVQMRTRIMNQLQALAMNEGYRWKKKLFSEQGRAQLEKLRLAPWASRRRQELLELLDRMNPTVEELTAAVEQEARKRPAVQRLMTHPGVGPLTALAFVLIIGTWERFPRGKQIGNYVGMIPSEDSSGGKQRLGHISKQGNSLLRFLLVEAAQAAARVHPDWRRRYIHLAMRRHKNIAKVAMGRRLAVRLYWMWRNGCEYSQSLEFGSYAGQLGTGHGVK

SEQ ID NO: 139291 - protein, 341 aa, unidentified
MEEYIGLDVSMKETAVSIRRAGERIWRGKCASDPSIVAELIRKRAPSVKRVVFETGPLSVWFYHSLRTEGLPAICIDARHAKAALDMATNKTDANDADGLAQLAEVGFFREVRVKGFDSMLTRTLVAARTRLVRITTELSNQIRGVMKTFGLLVPAGKGSIFEKNVRSLLADQDGLASIVLPMLEAWRSIRIRAAELGRQLVRDARQNQACRILMSIPGIGAITATAFTTAIERPDNFKKSRSVGAWIGLTTRRYQSGEVDYDGHISRRGDAHLRGLLYEAAAVILTRSSTDSTLRTWGLKLRERIGFKRAAVAMARKLAVIMHTMLKTGELFNPNAGAIA

SEQ ID NO: 139292 - protein, 342 aa, unidentified
MQITTIGLDLAKSIFQVHGIDASGQTAVRKKLRRAEVLRFFQALPPCLVGMEACATAHYWAREIGACGHDVRLMAPSYVKAYLRRQKNDAADAEAICEAVQRPTMRFVPVKSAERQGVLVLHRTRELLVRHRTMLINAIRGHCAEFGIVAPQGARRAVELIEHIRQTEAGDISQLVRASLLTLADQLDAIAVQIHALERRLLVWHRQDQDSQRLATIPGVGIISATALAASVPDPKLFRSGREFAAFLGLVPRQNSSGGKARLGRISKMGDRYLRKLLVVGATSVIRRARTGALAAAPWIRSLLERRPARVVTVAMANKTARIVWAVLARGEVYRAPASGYP

SEQ ID NO: 139293 - protein, 433 aa, unidentified
MSNLEKIKLNAAGIDLGSEDFFVSVDGETVRSFKTYTSSLMSLVDYLMSHSIQTVAMESTGVLWLPLYDMLEKEGIEVFLVNAAHAKNIPAQKSDPADCRWLQRLHSYGLLRASFVPTDEIRKIRTYVRLREDHQEMASSHIQHMQKGMELMNIKLHNVISQIHGVSGQRIVQAIIAGQTDAVKLAELCEPIILKSKRVKVIESLKGNYKEEYIFMLKQAYTAWQFYQQQIKDCDHQIEQILTVLTKDTAIVNTGQASPSRHNRPDITDLHEKMVKLHGGKNPTILPGITDTTMLKLTAELGCDLTRWPTEKHFTSWMGLSPRKHQSGKSNKKRKGKINTRTGQIFKESAMSIANSKYLALKGFYYRIKSKHGARAANKATARKLAVLYYRFMTKGMDYVEIGLNEYEKRYQEIVYKNLSKKANSLGYQLISI

SEQ ID NO: 139294 - protein, 426 aa, unidentified
MNCTQNYKIDQVTEQTLVVGIDIAKRTHYACFVDDRGRVLRKSFPIFQSKEGFQQLYKAIQEAMQAFGKSEVIVAVEPTGHYWLNLAYFLEEHGIPLVMVNPAHVCRSKELDDNLPTKHDAKDALVIARLAKDGRFLVPRLLHEIEADLRVGSTLKEKLRKEQTAVKNAIVRWTDRYFPEFWTVFRDLGKTALSVLEWTPLPADMAGRTVEELLEVYRQSEGMKCPQKAKIQALINTAKDSIGVTEGTAMARFEIAALVRRYRQLEAEIAALDAELKALVQTTMEYQWLKTVDGLGDATIIDLLAEIGSFAHYRDPRQLVKLAGLTLKENSSGQRKGQKHISKRGRKRLRSVLFRAVIPLIRHNEAFRELHEYYTTRSVNPLTGKQSIVALCRKLLNVLFAICTKKQAFDAERMKQDVLSQVQRAA

SEQ ID NO: 139295 - protein, 371 aa, unidentified
MNSIHYIGMDIHKESYTLCCYSFEKDEILYKQTVSPDYKMILRYLEQIRLRHGENIEFVCGYEAGCLGYMLYHQLMNHGVKCVILAPTTMGITNTNRIKTDKRDAGNIARCLAFRTYSEVFVPTAEDETVKDFIRMRDDQKKALKVIKQQILAFVLRHGYRFDGGKNYWTGKHISWLKSLNFGGTLQEALDEYLITFEYLSDKIGRLDKRIEELAGDERYQESVKKLSCLIGVKTHTALATIVEIGDFKRFPKAEQFAAFLGLVPGEDSSGGKYSRGSITKAGNSHIRRLLVEAAQSYTRGTVGHKSVDLKRRQDGNAPQVIAYADKANERLRRKFYRMTLKNGSKRNVAATAIARELACFMWGLMTDNVA

SEQ ID NO: 139296 - protein, 338 aa, unidentified
MSNKFWIGCDIAKRTFWIALAKVGDPAMDWTKLSHKEFEHTEQGVKAFIEWLENLGIGKQDVAGICLESTGRLSYKWAMLLDECLGCVSIVNPAAPKAFGTSLGIRDKSDRVDACVCALFGRMRSPEPTTFRSSKCQELCEQFRCYLALNEQCIANKQRLNDDPSSKLVCNILVKTIKALEHQIKDLEDAMDKTIKDDPELNKDAKKAQTVKGIGKKATYAILGEFGDLRQYKRNELIALAGLFPKEFTSGTSVHKKPRLAKGGGGRVRQVLYMCAMSALKHNPHMKLFGERLKKNGKAPMQILAAIMRKLLLVVRAVVISGKDYDPEYGFEVKSVST

SEQ ID NO: 139297 - protein, 416 aa, unidentified
MMEDVHWFVGIDWATQSHSVCLLDAEGRRIAQHEFAHGGAGLTELRDWLLEKTRAAPGQIAVAIEMPHGPVVEMLLEHGFAVFAINPKQLDRFRDRFTVAGAKDDRRDAHVLGGSLRTDRAAFRQLAADDPVIIELREWSRMADELTQERTRLANRLRQQLWRYYPQAAKLTDDVADAWFLALWQKVPTPARAAKASEKAIARVLTAYRIRRLDAATVLRTLREAPLFVAPGTTEAACAHIRSLAARLHLVNQQIKEAHQSLDRLCAELEGKENPSGQSSEQCDVTILRSWPGIGRVNLATLLAEAAEPLRRRNYHALRALAGAAPVTRQSGKQRFVVRRLACNRRLQSALHHWSRVAIQHDAATRRRYDALRQRGHGHARALRSVGDRLLFALCTTLERQTPYDADYNTKTSEKA

SEQ ID NO: 139298 - protein, 363 aa, unidentified
MKQLSKKQPCSIVSDKPERIVGLDLGDRYSFYCMLTGGGELVEEGRLQSTEAALRKQFGDQPRLRIALEAGTHSPWVSRLLEGLGHEVLIANPRKIRAITASESKNDRNDAEKLARFAAFDPKLLSPLRHRRLDRQQDLNLIRTRASMVRARTMLVNVLRGLVKSAGGRLGACSTEAFPNKMRSSIPPALAPACGPLVEQIAHLNLAIRELDRQIEALQRKYQEIALLRTVPGIGPLVAACYVLTLDRPDAIQDNRQAGAYLGLRPRQSQSGDSNPQRGISKTGDTYLRSLLVQSAQYILGRFGPDSALRRWGLRLAASGGKRGKKRAIVAVARKLAVMLHSMWRNRKPFQPFPQPVQTAQAA

SEQ ID NO: 139299 - protein, 342 aa, unidentified
MSDTIIGVDLAKRVFQVHGATVTGHVIFRKKLSREQFRIFMAAQPACVIVFEARGSASYWAREMEALGHEARLIAPQYVRPFVKRQKNDATDAEAIVTAARQPEMRFVTPKTQEQQAKAVLFRGRERLVHQRTELVNALRAVLYECGHVFPIGLSHLKRIDALVKDPACDLPALIIAECQDLLLQIAAKTERIDVKTKTLKALAAKADTSRHLQTMPGVGPLTALAVEAFAPDMAQFKCGRDFAAWLGLVPRQRSSGGKERLGRISKAGQADIRWLLIIGAMTRIMGPARHKISANSWIGRMLARKPKMLVGIALANKMARQIWAMLSKKEDYRDPALATTA

SEQ ID NO: 139300 - protein, 365 aa, unidentified
MSRMTVTTSPVTGGVDTHSQTHHAAVIDQLGRPLSDREFPATPAGYRGLLGWLREHGELERVGVEGTGAYGAALARHLRAEGVTVMEVDRPNRQTRAAVGKSDPLDAHAAARAALAGTACGVPKTRDGAVEAIRALRVARRGAVKARTQVTNQLKALLLTGPAELREKLRPLSTAALIDTCARLHPTGPLSDPEQATKLALRRLARRHQHLTEEITAADAELKGLVTATAPGLLTLLGVGVEVAGQLLTSAGDNPERLHSEGAFAHLCGVAPIPASSGKTHRHRLNRGGDRAANNALYTVALSRLRCDPRTRRYVERRTKEGLSKPEIIRCLKRYLAREIYHALLTRPPSSSSRPPHRPQQAGQP

SEQ ID NO: 139301 - protein, 360 aa, unidentified
MKYFAGLDVALEETTICVVDQDGQIVKEARADSEPEALLAVLSGFELCFERIGLEACSLTAWMHEGLRSAGLPAICIESRHAKAAMGAMPNKTDRNDARALAQIMRTGWFRKVHVKSASCRAWRSLLVTRRTVLNEMRTIENVVRAVLREAGLKLGTPSRKDFVAHARDLIASEEGLTRTIEPLLEILVTMLREFAKLTKRAFDIVRNEPVCRLMMSAPGVGPLTALAFRATIDAPERFDRSRAVGAHLGLTPRRYQSGETDIQGRISRCGDELARTALYEAAHSLLIRSQKWSALRAWGMKIAKRRGMAKARIAVARKLATILHRMWIDATGFRFGREQPIAPVAGGRSGLRRKATVIK

SEQ ID NO: 139302 - protein, 432 aa, unidentified
MKNTKDNQERYDTQFVALIGLDWGDQSHAVALEPAGGPIETSTLVHSSESLHQWLDQLQARFAGRPVAVAIETDRGAVVYALLERPWITIYPIHPATSTRHRTMFRPSGAADDLPDALVLLSLLQHHRDRLRPLQPDDELTRTLAGLVQARRKAVDRRTLLGNQLLSTLKDYFPQATALLGENLTSAMALDFLDKWPRLTDVKAAKSSTVKNFYHRHNVRRAELIESRLEQIRSARLLTADAAVIEVAVRVVRLLVAELRVLGEHIAEFDAVIAQTFAQHPEKAFYKELPGAGAALAPRLLAAFGTARDQYPEPASMQRYFGVAPVTEKSGSRAWVHWRWNAPKFLRQTLVEWAGQTVIYCPWAKAYYEKQKARRATHHAILRALAFKWLRILWCCWQKHEAYNQEQYLKQLEKRRSPIAARARQLALEMAA

SEQ ID NO: 139303 - protein, 362 aa, unidentified
MRIIGCDLHARQQTLAMLDTTTGEVVEVTLKHEGDNVREFYSSLPRPVRVGIEATGSMQWFLNLMEELGIECLVGHPAQIRAAAPRKQKNDRRDAELILKMLVEGRFPAIWLPSKELQDLRALLRHRHQWVRMRTRIQNALQSIALANGLRRGTALWSHDGQSRIASLPLAPHTAYRRSELQAMYEKFEAEIEKLNQRVEEQACKRPGARLLMSHPGVGPITALATEVFLGDPTRFADSKALASYVGMIPREYSSGGRQRLGGLSKQGNPLLRFLWGEAGAHAARKDPELQRFYRRKLVQKGLGKASVAVARKLGIRLWIMLRDQIEYNEFCRRGQKQQKSSDACVGMPETRYGAKSHRPID

SEQ ID NO: 139304 - protein, 426 aa, unidentified
MLVRAIGMDVHRDFCEVAIAGGGEVRSVGRVEATPAALEVFAASLGPADIVALEVTGNSGEIARIIGRHVGRVVVVSPHDTGIGRARAKTDRLDARTLARLLAAGELDAVWMPDEWSRAMRRRLSRRGQLVRARTRSKNEIHAVLMRRLAGRPPVSDVFGVRGRRWLAELELPEDERETIAGCLRHIDFLDGEIGVLERAIAREALTSAEVRRLMTVPGVSAITATTFVAAIGDIHRFPSARHLVGYLGLDPRVRQSGVGPTRHGRISKQGSAAVRHVLVEAVWSAVRTPGPLRAFYERVRARRGAQVAALASARKLATLCWCLLTREQDYAFAQPTLTRKKIRRLELAAGAPSRKGQVPAGQGLRNKQIRDAERALAIQAENAYRRTIADWKAAGPATRAGASVTPGRASQRPSKGKAARQTTSP

SEQ ID NO: 139305 - protein, 355 aa, unidentified
MNSEKYIGLDVHQATISVAVLDSAGKLVMESILETKAATILEFFAGLRGTLSVTFEEGTWAAWLYDLLKPHVAKLVVCNPRKNALLKDGNKSDRIDAHKLAELLYLNKLSSVYHGETGVRMLRELARSYLTIVKDLTRVMCRLKAVYRSWAIPCAGRDVYYTRHRDQWLGKIKEAGVRRQAERLYQQLDMLQQLRQQARRELLAESRRHSITARLRQIPSLGPIRSALAVALIQTPNRFRTKRQLWAYSGLALETRTSGEHCFVQGQLRRSKKQISIRGLNKDHNHDLKGLFKGAATTASVRPGPFLDFYQRSLAKGIQPTMARLTLARKIAAITLTLWKKGENFDAEKLKSQAA

SEQ ID NO: 139306 - protein, 338 aa, unidentified
MEQVITIGLDLAKNVFQVHGIDAAGKVLVRRQLRRGDVLRFFGGLPRCLVGMEACATAHYWARELTKLGHTVRLMPPAYVKPYVKRGKTDVADAEAIAEAVTRPTMRFVAVKTADQQAALMLHKVRDLLVRQRTMLINALRGHLAEFGIIAARGPGGVTAAIISLHEAQDSLPELARVALHGLIDQLRIVRGEIARVEKRIVAWHRASNASRRLATIPGIGPITASAIAAAVPDATLFQSGRQFAAWLGLTPRAHSSGGKERRVGISKQGDGYIRRLLVTGAIAVIRLARQGNASKTWAAKLLERKSARLVSVALANKTARIAWAVLARNQSYVAPAM

SEQ ID NO: 139307 - protein, 356 aa, unidentified
MIVIGIDPHMRTHTAVALERVTGEIVAERTVKARARGHGELVLWARALDAERVFALEDCRHVSGSLERFLIARGERVVRVPPKLMAGARAGGRERGKSDAIDALAVARAFLREPELPVATLAGFEREVRLLADHREDLVGERTRIGNRLRWHLHDLDPSLEIPAGALDRYRWLDRLQAWLKGRDEGSAQVRIARELVVRCRELTRRIKELERELEALLESEAEELLELCGCGTLTAAKLVGEVAAVDRFAGESKLAKYTGTAPLPASSGERQRHRLNRSGNRQLNCALHRIAVTQARVYPPARAYLERRQAEGKTRREALRCLKRHLARTVYRALRAMDERKTTSTVEVAALADLT

SEQ ID NO: 139308 - protein, 354 aa, unidentified
MITIGVDAHKRVHVAVAVDEAGCEIARWHGPNSVAGWQGLAAWAATLGPDCRWGIEGAWNYGRGLAQQLVAAGAAVYEVNPRWTAEGRRHARRSDKNDQLDARAIALYLRREAAALTALVAEDDTTVLALLVTERDDLVAETTRLRNQLHQLLLHLDPEYTAHLPSPRTQAGVRDLEGYTSASPCPLRQQRAAGIRRLAQRLRLVAEQAKALAAQIRALAAQRFTRLTAICGVSLLTAGALAGLLGPGRRFASDAQLAAFAGVAPLEISSAGRVRHRLNRGGNRRLNAILYRIALTQLRHSAQAQAYVARRVTEGKTKREALRALKRFIVRAIWRQWQQCQDTQTVAMVPAAVA

SEQ ID NO: 139309 - protein, 416 aa, unidentified
MNAVGIDVSSRKSTVAVLRPLGEVVCLPFDVTHDIAGLASLVEKLKALDGETRVVMEHTGRYYEAVEKALHEAGLFVCAVNPLLIKEYGANSLRRVKTDKADAVKIARHALDNWADLRDFTPMDAIRYDLKTLNRQFQLASKQRTASANNLIALLEQSFPGIRKCFDSPVRSDGTQKWVDFAHSFWHVDCVRKQPFAAFCERYRKWCKRHAYFFKLSNAEEVYALAKRAVVLTPKSKVVKVLVQEAANQLSSISRSVEVYRAEMDRLAAMLPEYPVVMAMYGVGKSYGPQLMAEIGDVRRFERKQALVAFAGIDPMPNQSGDKNVRSNKSSKRGSPYLRKTLFNVIRTYLQCAPQDEPVFQFLNRKRAEGKPFYVYMLAAANKFLRRYYAKLRDYFASLDTLQPVAPIPTILKATL

SEQ ID NO: 139310 - protein, 344 aa, unidentified
MKITTIGLDLSKSVFQVHGVDENGALVLTKRLHRKQMEPFFAKLPSCLIGIEACGTAHHWARVLVRFGHEVKLMPPAYVKAYVKRGKTDAADAEAICEAVRRPTMRFVPIKSPEQQSILMVHRARSLVVRQRTMAANALRAHLAEFGRVANPGVRNLLKLVRSVFDETEENRMLPDLARAALAVLVRRLVELEEELQTLDRTLLAWHKENEASRRLATVPGIGIVTATAIAATIDDPQRFRSGRQFAAWLGLVPKPHSSGNKVHLGGISKQGDRYLRRLLVVGATAVIRHCRDKDTPMAAWLRELLANKPMRVVSVALANKLARIAWALLSRQDVYRPYRRAQA

SEQ ID NO: 139311 - protein, 395 aa, unidentified
MSNRGVPPDRVIIAIDPHKASWTAAAVGTSLQPLATIRVPVSPRGYRDLRRFAARWPGAEWAIEGACGLGAPLATRLFADGIGAVDVPAKLATRVRMLSTGHGRKNDAADAVSVAVAALTAAGLRAVAVDEAITALRALVEHRDDVVKIRTQTANRLHVLLTQLLPAGAPRQLSAEIAAQLLRSVRPRTPGPRMLRRLAAELIVEIRHLDRRIAAATGDITAAVAASNSTLTELCGIGDLTAGKILARVGDITRFPSAAAFASYTGTAPIEVSSGDVVRHRLSRAGDRQLNFCLHIMAITQIRRDTPGRAYYQRKRAAGKSHKEALRCLKRRLSDTVYRHLHREARARSATGPGGHTGASTESSATGSTPTAGSSDKSQPGPAGTEPTTHQPRST

SEQ ID NO: 139312 - protein, 410 aa, unidentified
MDVLYTRCAGLDIHRDSIVACVRLAEAGGVTRLVETFATTTTDLERLSEWLRGHGVTAVAMEATGVYWKPVWAVLAGHFELVLANAHHVKAVPGRKTDVNDATWLADLLAHGLIRPSFVPSLSEQALRDLTRARKQLTREKASHVQRIDKTLQAANIKLGSVLSNIMGQSGRALLEALAAGESNPEQLAGLVRTKIRASHAQVVEAVRGRLAAHQRLLLRLYLTQVDALDAAIAAIDHELGERLKPVQETVQRLTTMPGLSPLSAAVVISEIGLDMSRFPSAAHLISWAGLCPKNDESAGKRRSTRLRPGAPWLKAVLVQSAWCAVRVKASYLHALFQRLKARRGPRKAIVAVAAAMLTAIYHMLKRGAAYHDLGPDHFQRTERSRLAARLARKLGELGFDVTLTQRAAA

SEQ ID NO: 139313 - protein, 378 aa, unidentified
MSRTPTAGDNTINPALFVAFELGWKTWKLASTVGLGQKPRVSTIPAGDLEAVVKEISKALERFDLAPDTRVVSCYEAGRDGFWIHRFLTHVGVENIVIDSASIEVSRRSRRRKTDRLDAIKLVTMLVRWDLGEKPWSVVRVPSVEGEDSRQLHRGLKTLKKDSTRYINRIKGLLANHGIRINTIPKNLKPWLKEQRLWDGSLLPHGVAVRILLEHDRLRFIRSQILAVEKERRRLLVDPKTKAAQVAHKLHRLGGIGVNGAWTFSTELFATREFKNRKQVGSLVGLTPTPFDSGESYREQGIDKAGNKWVRSMAVEIAWGWLRFQPRSALSLWYQRRFGAGSKRLRKIGIVALARKLLIALWHWTEHDVLPKGATLKA

SEQ ID NO: 139314 - protein, 346 aa, unidentified
MEINRVGVDLAKNVFQLHGADRRGKAVWKRRLSRGKWLAVLCDAIEPGTEIGMEACAGAHHWARQLLRRGYPVKIIPPQFVKPFIKGNKNDANDAQAICEAMGRPNMHPVKVKTVEQQDLQAMHRIRDEIKSHRIAKANQIRGLVAEYGLVAPQQLPALRSAIPDWMEDADNGLTFFFRQLLQGLWGDLCALDRRMAELDRQIAMIAEEDPTTRRLQQLRGVGPLIATALVATIGDARQYRKGRDMAAAIGLTPRQHSSGGKDKLLGISKRGDAYLRCLLVHGARSAMRTAKGKEDRLSRWIIDLQARRHSNVVAVALVNKMARMAWAIMTRGVDYDPDLAAVSAS

SEQ ID NO: 139315 - protein, 381 aa, unidentified
MEKACGLDVHKDSVFACILDEQGKKLLEKRYGTLTPDLTALRDALIENGCGRIAMESTSIYWMPLWHVLESDFSLKLANPYFIKQLPGRKSDVKDAQWIAECLQKDLIKGSFVPEGVLQQMRQLSRQCYRVNKSQVRLEQQMDNQLQRCNIRLSNYVSKQGNNVSLRKVIGAIIQGERDPCKLVRLVHGRTKNKHGHQVIADSLDGVLNQTDIEMLKQCMEQLDLLEKQQAACLNHLEELADKYFAREISLLCTIPGIQKYSAMCILSEIGNDMSAFGKASHLVGWAGLRPRNDESAGKIQSRKTLHGNKYLRKMLVEISWSASRSNKTFLGKKFNHLSMRMKSQKALLAITRKILVIIFNVLLTGEPFDVNKNLQAVKPD

SEQ ID NO: 139316 - protein, 330 aa, unidentified
MSFKILKFNCCGLDIHKTWIYACIGITDSNNRTEYKQARFSSFTKGLNELCNWLAKYNCMDVCMESTGKYWIPVFNILEQHNLWVTLSHPKYTKPMKGNKTDRKDAKWICDLYMCGMVKPSFIPPADIRELRDLVRYRYKLTCMITGEKNRAQNCLTVSNLKLDDVFSDVFGKSSRSITEQILQHPGKNFDVAPFLDGRCKTPVEEIQAAVDGAISKEQAVKLRQCLDHIDELNQHISEVEQEILRLSDKYEAALNLIRTVPGFDKNPLTSIQVLSEIGGDMSVFPTAKHLVSWAGCCPRNDKSDRKIKSTRISRAGFYFNQFWCRLQML

SEQ ID NO: 139317 - protein, 429 aa, unidentified
MNSTQNKKIEQVKETTMIVGIDVGSEKHYFRAFNWRGIELTRKPVTFSNSMEGFNSFYNTIVELMQKSELEEALVGIEPTGHYWFDLGQFMGEKNIKFVMVNPHHVHKTKELDDNSPSKNDRKDPRVIAGLVRDGRYFYSYMPTGAYAELRNASNRRFVLVEEQTRAKNRLQKWIAVYFPEYKGIYTHIDAKGGMLVLKKAPTPEEIVRLGVEGIIKIWKDAKLRGNGHKKAMLILAAAMRSIGLKAGLTEARMEIQDLIEDYELQTKRLERVNDLIKGLCQQVRYADKLLEIKGIGITTVAGFIAEVGDITRFDSTKELQKLAGLELVADSSGKHNGKTKISKRGRKRLRYLLFEAAISVVGKNEEFKEIHRYYTTREKNPLKKMQSLIVVACKLIRVFHAILTKGIRYDASKMLKDIRHPGEQLKAA

SEQ ID NO: 139318 - protein, 310 aa, unidentified
MNTLTEKHPPVYVGLDIAKATLQLHLQDRQHVLPNTTTGHRQLVKLLRAVPGAHVVCEATGGYERAVLAALHAADLPVSLLNPAQVRHFALAQGQRAKNDPLDAKVLTAYGAALRPAATPPSDEALGELRALVQWRQHLQEQKNAARNHAEHATLAFVKKRLGKLTAHLEKQMEAAEEELALALARSPHWQGQVDKLAALDGVRMLTAVSVLSQMPELGRLNRGEAAALAGLAPWTRQSGPWEGQRHIGGGRAAVRRALYMSAVALARLKESTLGKFYARLRAAGKPAKVALTAVMRKLLLQMNHELKPA

SEQ ID NO: 139319 - protein, 416 aa, unidentified
MLFIGDDWAEDHHDLEIEDEDGRRLARARLPEGLAGITRLHALIAEHAPASWSNLPPDQRVGQVIVGIETDRGPWVTALRAAGYQVFAINPLSAARYRQRHSTSGAKSDAGDAHVLAEIVRLDRDHHRPVAGDSDLADAIKLLARAHQNAIWDRTRQVLRLRSALREFFPAAVEAFDDLSATDSLALLARAPDPVRAAKLTRGQLVAALRAARRHHVEAKADALLTVLRTPALRQPATLQGAYAAIVTGQVNIITALNKQIAGLQEVMAEHFGRHPAADIYLSQPGFAVVLAARTLGEFGDDQHRFASSRARKNYSGQSPITRASGKKTIVLARYATNRRLGAALHAQAFAALGASPGARSYYDTLRSRNIGHHAALRQLANRLVGILHGCLKTGTSYDENTAWKHHRTDDQHTAA

SEQ ID NO: 139320 - protein, 347 aa, unidentified
MRFYTTQHPFYCGIDLHARMMYVCLLDQSGEILVHRNMKTDPDTFLKAIAPYRQGIVVAVECMFTWYWLADLCADEGIPFVLGHALYMKAIHGGKAKNDKIDSQKIAALLRGGMLPQAYVYPAKMRATRDLLRRRMHLAHKRAELLAHVQNTNSQYNLPAIGKKIAYKANREGVAERFADAAVQKSIEVDLALITYYDALLRDVELPIVKTAKHHDPNTLYLLHTVPGLGQILSLVLLYEIHDVNRFPRVQDFVSSCRLVKCARESAGKRYGTSGAKIGNAHLQWAFSEAAVLFLRDHPAAQKHLARLEKKHDKGKALTILAQKLARAVYYMLKRQGAFDKDKFFQR

SEQ ID NO: 139321 - protein, 424 aa, unidentified
MNLTQNDRLKQVTSDTLIIGVDVGSQTHFCRAFDWRGFELSRRVFKFSNTGIGFLTFLRWTEELMNKTEMKKVIVGCEPTGCYWLTFQKFLQDHEIQLVTVNPFTVNRSMELDDNSPEKSDLKDPKTIALLVKDGRYSTSYLPSGLYAEIREASVCRDQIMKQHVRLSNQIQGWLQKFFPEYFECYADWDSTSGLMLLKEAPLPQDILKIGAGGINQIWRDAKVRAAGIKRAQTLVEAAQNSVGLEAGEAARLEIWILVNDYILKAEQLRRLDEYLEEKIKEVPNVEKLLAIKGVGKSTVIGFIAEVGDLGRFTDPKQIQKLAGLEIVKKSSGKKKGQPRISKRGRRKLRRTMYESARALINWNPAFQDVFLYYRNRAKNPLGGMQAKIAVACKAIRIFHVVLQTGCDFDEEKFRKDIIRPEAA

SEQ ID NO: 139322 - protein, 345 aa, unidentified
MNIIRVGVDIAKSVFHVHGVDRHSQIRWQGKYARNKWLDALSKKVPAGAEIGMEACASSHYWARELQKRGYCVRLIAAQFVKPYVKSNKNDRVDAEAICEAMSRPNMRYVAPKTVAQQDVQAAHRIREELVGQRTAKANQIRGLVGEYGIVAPVGIQQLRRALPEWLEDAENELSDSFRVLLHGLADDLRYLDDRVTALDERINDSVRRDPVARRLMTLRGVGPLTASALSGALGDGKAFRRGRDFAASLGLTPRQHSTGGRDRLLGISKRGDSYLRKLLVHGARAVLRHVDGKDDGLSHWLKALTSRKHVNVATVALANKTARIAWALVHNEATYDEELAAAGV

SEQ ID NO: 139323 - protein, 412 aa, unidentified
MEVVYPCCCGLDVHKKSITACVLWAEAKGKSRKEKKRFGTFTHDLLQLADWLAERGVTHLAMESTGVYWKPVWNILAEQFEVLLVNAQHIKAVPGRKTDQKDSEWIADLLQHGLLRGSFVPPQPIRELRDLTRYRVSLVQEINRIANRIQKVLEDANIKLASVATDALGASGRAILEAMLAGEQDAARLAEMSKGLLRNKIPELKLALEGRMTEHHRFLLRQLFEHLRFTESKRSEIEQEIDKRMRPFEDKVTRLCTIPGVDRVTAWGMLAEMGMNMNQFPSSGHLASWACLCPGSFESAGKRLSGKMRKGNVSLRRCLSQAAWAISMMKNNYLSALYRRLAARRGAKRAIMAVAHALLEIAYHMLKRKEDYRELGADHFDRIDVNRIRRSLVRRLERLGHKVTLEPLAQTA

SEQ ID NO: 139324 - protein, 351 aa, unidentified
MSHQSTTTTVATIGIDAGKNTFHLVGLDRRGNIVLQLKTSRAQLERRLANIPSCLVGMEACSGTHHIARQLEALGHDVRLIPAQYVKPFLKGHKNDYRDAEAIAEAVQRPTMHFVSIKTPDQMDLLALHRVRSRLVSRRTGVINQIRGFLIERGITVRQGPAPLRKALSDILSSNSPTLSPRLVRLISDLGEDWRRVDDRIAKVSAEIEALAEQDGPCRRLMTVPGIGPIISSAVVAAIGNGTGFRQGRDFGAWLGLVPKQESTGDRTILGKISKRGNKYLRTLFVQAAHVILARRPSAAMRGLWPWIEQASKRLHRNMLAIALANKLARIAWAVLARGHEYQSRIMVHAA

SEQ ID NO: 139325 - protein, 374 aa, unidentified
MLLPRQRFMLARGAKDKEHAMSQKFNTAIAVIGIDIGKNSFHAVGQDERGAIVLRQKWSRGQVAARFANMPPCLIGMEACVGAHHLSRRLKALGHDARLMPAKYVRPYSKGQKNDFRDAEAIAEAVQRPTMKFVATKTAEQLDLQALHRVRERLVSQRTGIINQIRAFLLERGVPVRQGLRFLRAELPGILATPPDVLSPRMVRVIEDLAGDWRRLDERIDSLSGEIEAIARQDAGCERLMSVPGIGPIISSAMVAAIGNGEAFSKGRDFAAWLGLVPRQMSTGGRTILGRISKRGNRYLRVLFVQAAWVVLIRPKSWERYGLKSWIEAAKKRLHPNVRAIALANKLARIAWGVLAHGRDFEVRKISEAVAQSA

SEQ ID NO: 139326 - protein, 385 aa, unidentified
MSELNDLSRSLTSLEQDNAIIAVIEMSQSSWLVAGIVPGIERHPLKKLEPNEGELLRLLMRWRAEATKMGCTITRIAVAYEAGRDGFWLARWLRAHDIETYVIHPTSVAVSREHRRAKTDRLDTGLLKRVFIGWLRGEPDHCHMVTIPTLAEEDAKRPNREREGLVRERTRIVNRMKSCLARFGVRSFKPTLRKAPERLATLVTPEGVPLPANTLLELRRDMARLRFIMDQIKEVEEARGQRLEQAPQEKSHAMVRLLARVIGVGIETADMLVHEILSRSLRDRRAVARYAGLTGAPDESGSRRQEKGLAKAGNARVRRGMIQLAWRFLLFQKDSALAQWYRTRTESAGKKRKTMIVALARKLLIALWRLVTIGEVPAGVVLRAA

SEQ ID NO: 139327 - protein, 355 aa, unidentified
MNDAKYIGLDVHQATISAAVLDSTGKLVMESILETKAATILQFVHGLRGSLHLAFEEGTCAAWLHDLLKPHVTKVLVCDPRKNSLLKAGNKNDRIDARKLADLLRTGLLSPVYHGENGLRTVRELARSYLAITRDLTRVMNRLKALYRSWAIPCAGQQVYAPRYRSEWLGKIREAGVRRRAELYYQQLDALAILRQEVRRELLAESRKHAAMKWLRQIPSIGPIRAALLIALIQTPHRFRTKRQLWAYSGLALQTYSSGEYRFVQGQLQRSKRLLAIRGLNTNHNHDLKNIFKGAAIRAAVVPGPFQEFYAALIARGMKPSMARLTLARKIAAITLLVWKKRVRFDAEHLKPQAA

SEQ ID NO: 139328 - protein, 409 aa, unidentified
MTTNSQSQLIKLTVALHMALELSSTKWKLGFADQLGRNPRVRSIRAGDFEALSVEIEAARNAFKLDSDAPVVSCYEAGRDGFWIHRCLVAMDIESHVVEPASIQVNRKKRRAKTDRIDAQMIVLALVRFKAGDRFACRMIRIPDAESEDSRQLNREMRTIKNERTAHTNRIKGLLATQGPKKIAIDRHFLTQLESYRTAEGKTLGAKFEARLTREFERLALATEQIRSLQMQQAAMIRQVAKEGEHCSRTAIVAEHLCSLSGIGPVTAWTLSTEIFSWRDIANRRQLAALVGLVPTPHASGDEEREQGISKSGRGELRVLMIEIAWGWLMFQPDSELSKWYQRRFNDGTKRNRKIGIVALARKLLVALGKYVRGGEIPEGAKMIDNRKFSYMPSLKAPSQASGVTSSAA

SEQ ID NO: 139329 - protein, 341 aa, unidentified
MRYIGADLHKKSITFCVVETDRQTISVVKRQRIMCCEVHRIQEFLKSHAPYELTVESTIGYEWFASLAAETAAKVVLAHAGKLRIIAESTRKTDKIDAYVLAEFLARNMIPAAWQPTPRVRQHRALVRRRCKVQSRITSIKNTLRGILTRYNKDLSHLFSKVGREHYETIKASLLAEDSWVLDDLFEELKQQTTRLKKVDDHLVEFAASAPVKEREARAVLDSMPGVGAVTIDTILAELGDWTRFHNADAVVSYAGLDPGVRESDGHRKDLKISKAGSPLLRWIMIQLAHRMKRTTVRWARAFEQISRRAGKKKATVAIARRLLLVVFAMLRDGRAYQMAA

SEQ ID NO: 139330 - protein, 386 aa, unidentified
MGVIIGIDPHKRSATIEVIDSTGRVLETGRYSTDTAGYGEMLRAGRKFDTRIWAVEGCNGVGRHLAHRLVHDGETVIDVPSKLSAQVRVFGTGNGRKTDLVDAYSVALAALHAPNLRRVTADPELIALGMLADRRDGLGHARTDTLNRIHRLLLELIPGGAKQFLSAPQARELIAPIHPTDTAIAIQLRLVTEQIEDLETIDRRIKTADKELRQLVTARGSTLMQLHGIGPSSEARLLDDAGDIHRFHNRDRFASWNGTAPLDASSGQQQRHRLSRAGNRKINRVLHIMAVVQLRHHTAGRIYYDTRKAGGKTSMEALRALKRRLSNVVYARMLADQRRREWADPGGQTGTTTDSSATELQPEPGPSDKPQPGPTTQANPRPPLRT

SEQ ID NO: 139331 - protein, 345 aa, unidentified
MEQISRIGMDTSKHVFQLHGVNASEEVVLRRKLRRKEMVAFFEKLAPTVIAIEACGASHHWARLLRSFGHEVKLIAPQLVKPYVKRGKNDAADAEALCEAMSRPTMRFVPVKTAEQQAALMLMGLREQLVASRTQLSNAIRGYAMEFGLTAAKGKAHLEPLLERIQADDSLPILARELFAVQAEGYRRLQAQIDDVDAKLAAWQKSDECSQRLVKIPGVGPIGAALLRMKTPAPELFKSGRQYAAWIGLTPKDHSTGGKVRLGVITRAGDETLRSVLVVGATAAIQQAQRRGKASPWLAALLKRKPPKLVAVALANKMARIAWKLMVTGQSYAAKSAPATLAAAA

SEQ ID NO: 139332 - protein, 412 aa, unidentified
MEPIYTSCCGLDVHKKSIQACVRRIGKDGKVQQEIRPFGTMTRDIAALADWLSDEEVTHVAMESTGIYWKPVYNILEGRFTILLVNARHVKNVPGRKTDVKDCQWIAQLLQCGLLKGSFVPDRSQRELRDLTRHRSKLVDQRSSVVNRVHKVLEDANIKLGAVASDVVGKSGMDMIRALVEGWQDSSDMADLARGKLRGKIPQLRLGLEGHVTNHHRFMLGQLLDQLDYLDRQIDQFSQRIEEVSRPFVEAIKEVARLPGLQKLASENVIAEIGCNMDQFPSADHLCSWAGICSGNNESAGKRKSGKTTKGSKWLRAALVQAAWAASRKKDSYFHAQYGRLAGRRGKKRAAIAVAHSLLVVIYHVLKNHTEYKDLGRDYFDKLNSRRLVPYLVKRLKNIGYEVNLVPIESAG

SEQ ID NO: 139333 - protein, 367 aa, unidentified
MPMLAEVVDAVVGIDTHRDTHQVEIALPTGAPIATTTITNDTRGYTGLLAWIAEHTPGPRLAVSIEGTRSYGTGVARAVGAAGLAVIEAEQPTRTTRRGRGKSDPIDAHLAVTFALQLQVDRLPTPRADGDRDALRILLGARHDLTLISTAQVNRLRALLRDGDNTGNNTGNSTADSTGDADGQLARGALTTATLTTLARRRLPLHATRAQAVRHDEIRRLALAVRDARRALAANQAQLQAIVDELAPGLTDRRGIGPIVAAQALVSFSHPGRIRGEAAFAALAGASPLEASSGRTVRHRLNRGGDRALNRALHTIALTRMASCPRTRAYVARRRAEGKTPREIRRCLKRYIARELYRTLTTTMINN

SEQ ID NO: 139334 - protein, 341 aa, unidentified
MYRTKVGVDLAKNIIQVCTLHGKKVTSNVEMSTDEFSLWLAQTKPVTVAFEACSTSNYWYQQAIKAGHDARLISAKLVKAVRQNQKTDKNDALAIAQTLFLPEVSFINGKSIEQQQLQSIQRLRELAIKSQNASQKQIVSLLLELNIRLPNTQAGLLNGLEGVLEDGENNLSDTFRATLLVAKVQLENMISAIREYDKYLEQSIQSLPDCKKLLKLEGVGPVNAVNLYIALGANQSQPFKSGKNASACIGLTPIQHSSGGKEVMGTIGKYCKNGSLRSQLITGAMSVVIKVIKYGAKTKKELWLQGLMQRRGNRCAAVALANKTVRTAYSMLQNNTEYHAA

SEQ ID NO: 139335 - protein, 418 aa, unidentified
MNKHNNSGKKSEPTTKRAKPRDPMRRDTKEVLAELVGKLTEKLDPKKPAATSVGEKPKRGELRPNLDRLTVGVDLGDQWSNYCILDLEGETLAEGQLRTTQEDLAEFFQALNAARVVFEVGTHSPWVQEVIGGCGHEVLVANPRMMDGSKRRKRKNDRIDANKLARLGRVDPQSLHPIQHRSREVRQDLVVLRAREALVAARTELINATRGLVKSMGTRLPKCSSPSFAEKVEGTVPAELRDALLPLVRMAAALSDGIREYDKKIEKLGQEKYGHTALLRQVKGVGPITALAYVLTLENPGRFVKSRDVGPYLGLVPKQEDSGEIQPQLGISKTGDMMVRKLLVSAAQYILGQFGPDTDLRRYGLRLCERGGKNAKKRAAVAVARKLAVLLHCLWVSGAVYEPLRQGMSATTAPAVAA

SEQ ID NO: 139336 - protein, 357 aa, unidentified
MRIIGCDLHTRQETMAMLDTETGEVLEKTLQHEGEKVREFYSALPRPVQVGIEATGSMLWFLNLMEELGIDSQVGHPAKIRAAEPRKQKHDRRDADLLLKLLMENRFPSIWMPSKELRDLRALLCHRHQWVRTRTRVQNALQAMALTNGLRRGKSLWSQEGQHAIASLPLGPHAAHRRTALQALYRELDADINALDKRVLEQALERPEARRLMTHPGVGPVTALATDVFLGDPVRFENAKALASYVGMIPSEYSSAGRQRLGGLSKQGNPLLRFLWCEAAIHAVRRDPLLQRFYRRKLVQKGMGKARVAVARKLGIRLYIMLRDQIDYEEFCRRGQMRQKNGAARAGIPEVGYGPSL

SEQ ID NO: 139337 - protein, 359 aa, unidentified
MQSEHQGLDFNGQDIYAGIDAHLKSWRVSILTNGIICKTFSQNAKAEDLKKYLENNYPNGTYYSAYEAGFCGFGPHRKLREMGITNIVVNPADIPTTDKEKKQKEDSRDCKKIVRSLYNRELEAIYVPNMEMEGLRSLVRYRRTLVKEISRYKNRTKSFLYYHNIEIPTELAKGSTHWSKRYSNWLDSLELGTIHGRETLTHIKHTVEHLRAKLLEINRSLRGLEQDSEYSAMIALLRTVPGIGLITAMTILTELDNIGRFKSIDGLCSYVGLVPRTNSSGEDEKTGRITPRSNRQLRSMLIESAWIAIRHDPALMMKYGELVKRMDAPKAIVSIAKKLLNRIKHVLVNKTPYVKGVVK

SEQ ID NO: 139338 - protein, 332 aa, unidentified
MWVGIDVGAKTVEVVWRSEGKNSKPQRFDQSAAGHQQLIQKLKRLKQLAGVVLEATGIYHFDLAVALDEAGLPVSVINPKSTKHFAQVLLKHTKTDGVDAALLAEYGQRITPQRWRAPEPSLLTLRDLGRQINRLTAARTRAKNRLHALQAKRATLKLLIDDEREDIARLDQRIEKLEKAALALIAASPELIRQMECLTAATGVGKATAISVLAEFCILPKHLKAPQISRHAGLDVRLHDSGTSVKRPGRLGKAGNAYIRAAMYMPAMSAIQHDERAKAFYDSLLSRGKKKMQALCAVMRKYLTGLWFCYVHSVPFNSAELFHDCHLANAKA

SEQ ID NO: 139339 - protein, 460 aa, unidentified
MNRKQRREMMRKIQSDDLRLEVVHPDAAGIDIGNESHYVAVPPTRDSESVRRFGCTTAELKEMADWLKQCGIRTVAMQSTGVYWIAVYDILEEAGLEVYLVNARETKNLPGRKSDVQESQWLMKLHTYGLLRNSFRPSQEIRTLRTYWRQRNDLVRAAGRHIQRIQKAMTQMNLQLANVLSDVSGMTGQAIIKAILGGERDPQKLAEFRDSRVKASKEEIARSLEGHWQEDLLFVLQQEQSGYEFCQKQMAECDQRIEQYLKQREDRSAGDNLPEEKRKERLRKKKKGNAPQFDLRAELFRMTGADLTQIDGVDVMTAMTILSEVGWDMTKWKTEHHFVSWLRLCPDNKISGDKIIGKGRLPTNNRATSALRMAASTLRLSNTYLGAQFRRLRTRLGAPIAIKAMAAKLARLVYRVLRYGMQFVDKGAEFYEAQHRTLQINYLKWRAAKMGLQIIEAPAA

SEQ ID NO: 139340 - protein, 419 aa, unidentified
MDETPGWFAGVDWASQKHDVWLADASGKRLGKKTFEHSGEGLAQMCSWLMATSGGRPEDIHVAIEVPHGAVVETLLDRGFKVYAINPKQLDRFRDRFSPAGAKDDSRDAETLSSSLRTDRRAFHQVALADPAIIELREWSRMADDLSADKIRHTNRLREQFRRYYPQMLQLGSDLAEEWIFALWERAPAPAKAARLRQAEVEKLLKRHRIRRIGAAEVLAILKQPALVVAPGVTEAAVAHIRVLIESIRLFTQQLKEMHRQLDRLRNLLAEPIPGRNEKAGPEPGQTLVAILQSLPGAGRIVLAVLLAEAFETLKRADYAILRMLCGVAPVTRRSGKGWAVTRRLACNPRLRNAIHYLADAARRSDEKCKAKYLALKARGCSHARALRTIGDRLLYVACTMLKNRTLFDPCFESQKPAC

SEQ ID NO: 139341 - protein, 412 aa, unidentified
MNVRVEKACGIDVHKSFLVATILNWEGIKETKEFNTGLEDLINLREWIMARHCQRVAMESTGIYWTPLYTCLEGKVETIVANPRHIKNIPGRKTDYLDSEWIAELCLNGQIKPSFIPSKGIRELRDLTRTRTKTIQTMTAFKNRVHKVLEKANIRISGVLSEIFGIAGLQILNGILNKKNIDDVLKDVKRIGKKKAAIKEAVRGELSQTDIWLIRECLEIIDFLKKKINLLDSIINQQIKKEQKQNQLQILMTIPGISYTSASAILAEIGDINVFSCPKNLVGWSGLAPSLNESAGKSSNGHITKKGSKYLRRMLVQCAHVIARCRPNKLRFFFQRILMRKGKKIAIVALARKLLSIIHHLLKNNENYIEDELKPKKIGLQKFQSISELSLNEMIDIISKAGFTVEEISLNG

SEQ ID NO: 139342 - protein, 363 aa, unidentified
MHESTTVAVGLDVHARSIRLAAVRADELLEEQTLPYDEEAVERALRRWPGVRCCYEAGPTGFGLHRYLVARGIDCAVVAPGLVPQRPGDRVKTDPRDARKLARLLAGGLLEPIHVPSRELEAARDLVRAREDARLDRMRDRHRLSKFCLRHGRGLPGLSWGVVRRTWLGEQRFEFAAQQQTFDTYVHALDLVDRRIEALERAIRETAEQGPWRALVARLRCLRGIDTLSALALAAEIDDFSRFQRAEELMAFVGLVPSEHSSGERRRQGSITKVGNSHVRRLLVESAWHARRRPKVGYELARRQRGQDALVVERAWRCQQRLYSRWQRMAARGKPPQKIVVACARELAGFVCAIATEQPLRSA

SEQ ID NO: 139343 - protein, 371 aa, unidentified
MPDVSSIAPADVRLWVALDVHKLSIVAAVLPPAGGTPEVSRIETTTAAIRRLIARLGGPQGLAVCYEAGPGGYALWRQLTAMGVACDIVAPSLVPVRAGDRVKTDRRDAKKLALLHRGGLLRYVQPPTPETEGLRDVLRCREDLRCARTAARHRVGKALLRHGRVYREGKKGWTMRHRAWIARQRLDDPLAQLALEQQLVHLDGIDRQLAALDTRLHEIAGDERWAWQVERLLAFRGISTLTALALIAEIGDFARFSHPRELASWLGITASEYSSGDQQHRGHITKAGNRHARRLLIEAAWHYRHRPRLPEKDPQPSQRAWQAQVRLHQRYRHLTERGKRSTVTNVAIARELAGFLWAELTDQPARETLAA

SEQ ID NO: 139344 - protein, 365 aa, unidentified
METVSQTVGVDLAKNVFSICELDDGGRVRQRRDLQRAAFTAWLAQLSAGTVVAMEACSGAHHWARRCLSHGLVPKLMAAQFVKPFRKSQANKNDRNDAEAIATAARQGNMRFVSVKTVEQQARLSWHRVREGYKTEALSIGNRLRGLLSEFGVVVAQSDTALRQALGDAAIRSGLPAMLGDLLNALSGHWQQVHARLAECDARIAAHAKADVRSLRAQQILGVGPLTADAVVASVGDGQDFRNGRQLSAWLGLTPVQRSSGGKDRLGSISCRGDSYLRTLLIQGARSSVQRAKAVVPEKATPEQIWIKDLSSRMPFGKLLVAIANKHARQLWAMLARQEEYDAEAWLRHPMVQRPASRKGAVMPA

SEQ ID NO: 139345 - protein, 359 aa, unidentified
MAFPSIAHEPAAGITVGVDTHGEVHVAAAFTSDLGRPLGHLEIPTTPAGYGRLLRWAQAFGDETPRFGVEGTGAYGAGLARHLRGAGCTVIEINRPNRQTRHAHGKSDPIDAEAAARAVLSGEASSVPKNNEDRVGMIRTLRVARRSAIQSTTQISNQIKGLIVTAPGELREQLRSLGSHALIETLAAFRPGSITTPMAATKMTLRSLARRHQYLGGEIATLNAELERLTREAAPELCAIKGIGPDVAGALLVAVGDNPDRLRSEASFAHLCGVAPLPASSGKTTGRHRLNRGGNRQANNALWRIVIGRLRWHQPTKDYVARRTAEGLSKKEIIRCLKRYVAREVFRLIVAKPELARAA

SEQ ID NO: 139346 - protein, 379 aa, unidentified
MSAMYNVQDVCCVSLELSKSTWVCAFQAPGEDKASVHNLPARDMAGLEKLLRRLLHSTEQRLARPLQMVVCHEAGYDGFWISRSLVARDFNVIVFDPASFLRPRRGRVAKTDRLDATGMCRTLRCWLGGDRSVASSVRIQSVEEEDAKRIGRERKYLIQQRGRVVSRIKGLLALHGIYVDVKGIGKRLTSVLTSLKTAEGLELPKFIRRDIERMVQHWKLLAEQIAAVDKERADAIRSEATFPHADKVSRLSKMGGVGEISATVLVAEVYHRKFGSRRHLASFIGLAPSPYSSGETSRDRGINKAGTKLARCTLVELAWFWLRYQPQSELSQWWHQRFGKAGMRGRKVGIVALARKIAIALWRYVEFGVIPAGATLKAE

SEQ ID NO: 139347 - protein, 467 aa, unidentified
MKADRKPWQSLNRKERKQWARRMQTQDPGLDVVHAQAAGIDVGNEAHYVAVRPDRDSEPVRRFECFTADLYRLADWLQSCGVKTVAMQSTGVYWIPLYDILEERGFEVYLVNARHTKNLPGRKSDVQECQWLLKLHTYGLLNNSFQPASEIRALRTYWRQRAEHVQGAATCIQRMQKALTQMNVQLANVISDLSGFTGQTIVRAIVAGERDPQKLAELRDPRVQATPKEIAKSLEGNWRPELLFLLQQEIEMYDAYQHRVAECDQQLQRQLTRFPGSVAPRQPEGDGKRKRSKPAKNAPGFDLGAELQRITGVDLTRIDGIDVMVAQTVLAEVGLDMSRWKTEAHFSSWLGLCPDNRITGDNVLTRGTRRVVNRAATALRMAANALLRSQTYLGAQYRRLRSKLGAPKAITAMAHRLARLVYRMLKYGQRYVDKGAEYYEQKYRNQQIHFLQKKAAQLGLRITEAQP

SEQ ID NO: 139348 - protein, 414 aa, unidentified
MVEIVNKACGLDIHKRFSIATILSRSGGKKQQRFSRDEEGILALKNWVISEQCDVVACESTSDFWVPIYDSLIRHLPVIVGNARDMKAFTHKKTDKIDSEFIAQLALNNMIQPSRVFAKNQREFRSCIRLRIKLVEKRTDIKNEAHAILASEMLHLKGVLTDIFGKSGIVILSGISSGKTIDQIMESLAPNVRKKSIQIRDILDREISPSAAFRLQICLKLIKHLDDEIEVLEKEIFNYAYSNYSHEMGILMSVPGIGELSASILIGEIGNFKDFSSGNKLASWLGIVPNVYQSADKFYNGRITKRGSKVARWILTQIANAAARKKNSKLKEFFKRKKKSIGHAKAIIALARKIATIIWHLIINDEMYEDGTGYEKGETQKRKIVETEIFSVDERIRILSGIIAIMGKEEGEST

SEQ ID NO: 139349 - protein, 341 aa, unidentified
MYRTKVGVDLAKNIIQVCTLHGKKVTSNVEMSTDEFSLWLAQSKPVTVAFEACSTSNYWYQQAIKAGHDARLISAKLVKAVRQNQKTDKNDALAIAQTLFLPEVSFINGKSIEQQQLQSIQRLRELAIKSQNASQKQIVSLLLELNIRLPNTQGGILRGLEGVLEDGEINLSDTFRATLSVAKVQLENMISAIGEYDKYLEQSIQSLPDCKKLLKLEGVGPVNAVNLYIALGANQSQPFKSGKNASACIGLTPIQHSSGGKEVMGTIGKYCKNGSLRSQLITGAMSVVIKVIKYGAKTKKELWLQGLMQRRGNRCAAVALANKTVRTAYSMLQNNTEYYAA

SEQ ID NO: 139350 - protein, 415 aa, unidentified
MALKIVYKICCGIDVHKTFVVACIASTNDKGITSYERHRFSTYTSGLKTLLQWLLDRNCKDVCMESTGKYWIPVYNILEKDCSIVLAHPKYVKAIRGKKTDKKDAKWIADLFKHDLVAGSFMPPADIRQLRDLMRYRFKLTCFKSSEKNRLQNCLTVSNIQLGNVVSDTFGKSAQAILDKILENPADTSFDLEPLVFKSLKKKLPELRDAIDGYITPEQAGKLKVIKAHYENLESRKAELEELILALAVPYQQELAILQTAPGISSDFTAIGIISEIGTNMEAFPSAKHLCSWAGLTPTNNESAGKKKSVRVSKAGCYIKPLLVQCTNAVIKSTKHPEMRNRYLRIKKRRGHKKAIIAIARMLLTALYHMLKNGENYNAELYQKSDLPPVDREITVEQALMIARNQGYKIKSATA

SEQ ID NO: 139351 - protein, 423 aa, unidentified
MCYRIAGIDVHKRMLAIVVADVATEGDYEFERRQFGANPDELRRLADWLIAQNVQEVVMESTAQYWRPVWNTLERYWSAQCREAEGAGPMSGSLLLALAQSNRGPRGRKRDFVDAERLLKRLVAQELVLSFVPDAEQRVWRTVVRRKYQLTRDRVRLQNQLESLLEEAQIKLSSLVSDLFGLSARRMLRALADGETDPAAVAALGDRRLHASQEQLCDALGAATDLKSTYRRLVGMALDELQLLERHMSKLDQEMADLLSSHQDAVQRLAEVPGLGVESAHQIIAEVGPAARTFPSEKHLASWIGVCPGEQESAGVSASNRSPKGNRLMRRLLNQCAHAAVKVKGSIFEIVFRRLLPRLGFKQAIWAIAHRLSRLIWKILHQGVRYEERGPAVNQKSRCARTAKMIKELKNLGYRVELMQDPA

SEQ ID NO: 139352 - protein, 325 aa, unidentified
MQGKEASEQETLKCTAGIDVSKDWLDAHVLPASQSLRVANSTAGIRQLKRWLLRHKVEVVTLEATGRWHREAARSLSASPIAVAIIDPYRVRMFAKAKGILAKTDRLDAKVLAMFAAMMSPACRPPAPKALEAMQELVTARASAVDEQVALKNQLAAAKEAFLKRQLTRRIGQLDSHIKAIQEECLRQIKADEVLARRFAILTSVPSFGQIVAITLIACLPELGTLTGKQIAALGGLAPVADDSGKRAGIRVIWGGRRAIRRILFLAALSARSHYSDMKIFFQRLAANGKEPKRALIAVARKLLILANTLVAQDRLWLPLAPQNA

SEQ ID NO: 139353 - protein, 347 aa, unidentified
MLYAGLDLSRQRLDVHLLDEDGRTVEVTAVRPDADALQSLVAAVARHGQPVSAAIESMNGARFVHDTLELAGWEVEIADALKVKGLAPLAAKTDKIDAWVLAELGRRELVPAIWLPDPANRAERERARFRLHLVRHRTALKNRIHATLIAFGHPVPVSDLFGVSGRELLAGLAIPEPWTTTLATSLRFVDELDTEIDACERELRAMGAGHPYLPLLRTVPGIAWVLGYTIAAEIGDIGRFSSAKKLTGYTGLCPIVRQSGGRDDRGPLAKNGPKYLRWALIEAATHAARHPAYKERYERTKKRLGRQRGSKVARVDIARELATAIWHMLSKNEPFAPGRSPATPLVA

SEQ ID NO: 139354 - protein, 343 aa, unidentified
MNEVTTIGLDLAKNVFQIHGVDASGRIVVRRQLRRSQVLPFFEKQAPCLVGIEACATSHHWARQIAKFGHEVRLMPARYVKPYVKRNKNDAAEAEAICEAVTRPTMRFVEVKTEEQQSVLMLHRTRQLFVRQRTTLINAIRAHMAEFGIVAGIGRNGVERLLRLIDEGSDGRVPAVARECLQALRAQLVLVKRQILEADRRILAWHRSNELSRRLETIPGVGPLIATALVASIPDPHAFGSARDVPAWIGLVPKQNSTGGKARLGSISKAGNRYLRSMLVVGALSVIRRAKQVGYTRRAWLAELMARRPTKIAAIALANKIARIAWALMVSGTRYREPAPQAI

SEQ ID NO: 139355 - protein, 344 aa, unidentified
MEYYAGLDVSLRSCALCIVDSKGTVLFERELPCEVSDIAECLVEFPHPIERVGFEAGSMSQHLFFGLTAEGFDVVCMEARQVSAALSAMRNKTDKTDARGIAQILRTGWFSPVHMKSREAHGLRALLSTRKALLKKTMDLANEVRGLLKIFGVRLPKTVKHGSFDSVVRPMIEIDDVLAHALVPLLDARVVLYQHYLELDRRVKRAASHDDVCMKLMTIPGVGPIAALSFKSAVDDPTRFRRSRTVGAYFGLTPRRYQSGEHDNPGRISKAGDRDVRAVLYAAANALLMRTMASSQVKSWGMRLMRTKGRRRAVVAVARKLAILMHRMWIDGSEFRQDQVGGMA

SEQ ID NO: 139356 - protein, 397 aa, unidentified
MYIVGIDIAKRKHEAAVIDGEGAVIIKPFSFTNNCSGYNRLLAMLAKAKLPLDEVSFAMEATGHYWLALFTRLQKEGFRVQVINPVQTNSIRSFYIRQAKTDPRDALLIAEVIRFGHFSESTLHPENIYELRELCRGRHAIVSMQADVKRKVVALLDQVFPEYETAFTNLFGDTSMAILQACPTPKELSEMPLEELCHLIEVSSHKRFRMAKAQELQELARNSFGFAMAGDVFSTMIRLYAKHLDFLKQQVREMDRKIAEIMETLDTPITTITGIGPTLGAYILSEIGDISRFSSAAKLAAYAGIDPTMRQSGEYNGVRNRMSKRGSPYLRHAIWLATSSAVLHDPALKLYFKKKRDEGKPYMASVGHACRKMVSIIYAVMRDNKAYTPCIPNEISA

SEQ ID NO: 139357 - protein, 318 aa, unidentified
MNTNTLQNINVGVDTGKAQLDIYIRPLDIYFNVTNDEKGIKQAIRTIAKFHPERIVIEATGRLEMPFILACENANLPYVIANPLHIKKFSGALGNKAKNDRLDAALIAHYAEAIKPKLTQLKSENIRLMSDLVTRRNQLLSMQTMEKNRLQILPRTLASSIKPILTALKNQITKVENRIEKLIGTCPDYQAKNEILQSVPGIGKIAAASLISNVPELGYITNKQAASLIGVAPITRESGSFKGKRMINGGRMQVRTVLYMAMMSAMQCNPVFKETYQRLLAAGKPKKVALIACVRKMVVILNSMLRDGCMWNADSAKN

SEQ ID NO: 139358 - protein, 360 aa, unidentified
MKVQRTSVGLDVHARSVVACGLDGDTGEVFERRLTPDHGEIVAWLSGLPGPVAATYEAGPTGFVLARSVNAAGIRCSVAAPSKLQRPVGDRIKTDTRDARHLARLLHLGEIVEVEIPSVEREAARDLFRAREDCRRDLMTARNRLSKLLLRQGIVYYGGTAWSRNHERWLQAQRFDHPALAMTYDTAFDTVLAITARRDRLDTAISEMAADSPFTAVVTRLGCLRGISTLTAFGLAVEIGDWQRLSGRTIGAYLGLVPCEYSSGATRAQGGLTRTGNTHARRLLIEAAWHHRKPYRPGEVMRRRWNAAAPAPRARGQAANRRLHERWLRFDERRKRPVVANAAIARELAGWCWSLAVMDD

SEQ ID NO: 139359 - protein, 267 aa, unidentified
MKIVGCDLHARQQSIALLDTETGELVERSLEHGTEQPRGFYSSLSGPVVVGIEASGAMQWFLQLMEELEIECRVGHPAKIRAAEARKQKHDRRDALLLLQLLLENRFPTIWMPTTEQRDLRTLLRDRHQWVRMRTRVQSTYTAQRRNELQRLYAQLQKRIEELNQQADKVIVGHPQAQRLLTHPGAGPVTALATEVFLGDPRRFENGKAVASYIGMIPCEDSSGPQQRFGQLSKQGNALLRYLWCEAAMHAVSKDGDLKRFYRRKLV

SEQ ID NO: 139360 - protein, 408 aa, unidentified
MEIIRKVCGGLDVHKKSVLACIRRLGSEGKIDKEVRTFGTTTKELLVLADWCVSAGVEEIAMESTGVYWKPVWNILSGAGLKLMLVNPEHLKHFPQRKTDVKDCEWIAELLQYGLLKGSFVPSEDLRQLRDLTRQRAKLTQQKAAVANRIQKVLEDTNIKIASLLSDLLGVSGRRILKSLIEGQSDNSQLVLLVHPTVRAKKDDLALALQGRVTEHHRFMLRELLDELEFLEHKIENFEARIDQVSAPFEPAVQLIDEIPGIGRCIAIAIIAEIGANMKQYPTQRHLSSWAGVCPGNNESAGKRKSGRTPMGNCWLRRALAEAGWAASHTKGSYFSVLFRRICRRRGKKRAIVATGHAILVAIYQMLKNNCAYKDLGVDHFDKIKGDQMQRYYLRRLAQLGVKVQIVA

SEQ ID NO: 139361 - protein, 318 aa, unidentified
MSDQSFVGIDVSKDKLDVHVRPSDHSRSFVYNEEGLEQLISALQIVQPRIETIIVEATGGYERRLVAVLVAEQLPVVVVNPQRVRYFAKATGQLAKTDAIDAAVLSMFGLTLRPQARELPDQSLEDLRDLLARRRQIVAMITAEKNRLTTAVRKSIRREIQDHIHWLTKRLKSTDDELNRNIQASSVWKAKDDLLQGVPGIGPVSATSLLIQLPELGTLNRHQIAALVGIAPINQDSGRFKGHRITQGGRASVRSVLYMCTLVATKHNPAIRDFYRRLVQSGKPKMLALVASMRKLLTILNTMLKHNRAWDASYAKTS

SEQ ID NO: 139362 - protein, 379 aa, unidentified
MKKIYYIGLDVHKESIAIAWTVGGTRNAPTYWGECGGSNLAAERTLRKVAKKLEVKLQDLKVCYEAGPTGFVLARRLLQLGVDCVVMSPSKTERKPNEKIKTDKRDAVNIAKLFRNGDITEVRVPPALDEAVRDVCRARTDASDDLARAKQRLNSFLLRNGIHYSGKARWTPAHLRYLRHLTLPDPVQNLVLEEYLQAIDMGYERVERLADRMKELLVDWEWEPVVRALMGCKGFQEAAAMGLISELGDLRRFQHPRKLMAFLGLVPGEYTSGDKRRQNSITKCGNSHARWMLVECRQHYRKAPKVSAALSKRQDGQSKEVNELSWRMQNRRHKRYVKLKARGKRENKAIVAIARELSAFLWELQNKLDLPMPEQAEVR

SEQ ID NO: 139363 - protein, 401 aa, unidentified
MRVWVGIDVGKEVHWAWVVDDEGTCMLSRRVANDETDLLTLIAEVTELGANEITWAVDLTTAESALLLAILWSHGQKVRYLPGKAVNRAAAGYRSEGKTDAKDARIIADQARMRRDLIELRAPEELVVELRMLSTRRADVVADRTRTINRLRQQLTAICPALERAADLTGQRGWIRLLARYQRPKALRRAGVARLRRLLVGMGGLRESTAAAIAEAAVQAAKSQTTRLPGEDVTAELIAGLAEEVMRLDEHIAELDAAIEARFRRHRLAEVITSLPGMGFRLGAEFLAATGDMTWFASADHLAAYAGLAPVPHDSGKRTGRLHRPTRYNRALRRVFYISALTSIRCDPTSRAYYDKKRAEGKRAKGAILALARRRVDVLWALIRDHRTWQPTMPSIAAQAA

SEQ ID NO: 139364 - protein, 373 aa, unidentified
MKENNLKDCTLEATPVASAKQLKGQKTPKAKRIAVGADVHLRGYQAARKVDNAAIGAVANLRSEAELLLYVEKQCEQAEEVVVVYEAGPLGYGLYRKLTARGVKCFVCAPDSTQQQRKRRKNNQIDARTLTSNLFNYLNGNEAALQLVRVPTEEQEQARLASRQHDQLVEERKRLGAKGNALLLSQGFGSCKNWWRPKAFSRLEQLLPAWLLEMLRTWVDLLRALDEKIQAAKAALAKRCNGPRPKGAGANSLVQLQSEVLDWELYANRRKVACLAGMVPSEWSTGDDQRRGSITKVGVSAIRRIITEMVWRIIQFQPQYPPVQKWQDVLAGSNRTLKKKAVVAIGRQLMVDLWRMQTGRVTAKELNLVMVGA

SEQ ID NO: 139365 - protein, 371 aa, unidentified
MKISVGVDLHKTQFTVCVLSEDRSVDESGIYPTSKKGYEAFCRKMTMLMENGYEVTAAVESTGNTRYFCNQLLRAGINVKVVNTMKFKVVTESVKKTDKRDARTLAEFLEKDMLPESVLCSQESEEIRRVIKSRSILVKALVSLKNQVHGLLMGYGIESKRGQLQSKKERQQILCGLEDHRSYGNAALAVKPLLDSIDQVASEVKRLEKILAELVAEDEDVTLLQTIPGVGLITAATIRAYTDDINRYKSAKKYASHAGLVPWVQNSNETIRHGHITKRGPVELRTAFVQVVMGINRYRKVTGNYRIMSRYQDMKKHKGTGKSIIATARKISTIIYAILKSQEPFDPTKMAPTGKKLERVTPVNRPLALAG

SEQ ID NO: 139366 - protein, 380 aa, unidentified
MPDVSSTAPAQARMWVAIDQHKLSLVAAALPASGGQPEVMRVENTERAIRRFVQRLGGAEGLAVAYEAGPGGYELHRLLSSMGVACDVIAPSLIPVRAGDRVKTARRDAKKLVRLFRAGELSFVAPPSPMQEGLRDMVRCRDDLRCARTAARHRVAKALMRHGHIYRQGKAWTLRHRAWVESQRLADPLAHTALEHMLTHLGGLDTQIAAIDQQLEQIATREPWADPVAWLCSFRGISTHTALGLLSEIGDFRRFAHPRELMSYLGLTPSEYSSGQQQHRGHITKTGNRHARRLLVEAAWHYRHRPRQSTRAARLSEHVPTEVTIRAWQAQIRLHHRHRVLAEHGKRSTVANVAVARELTGFIWAAMTKAPLREQEAAAA

SEQ ID NO: 139367 - protein, 332 aa, unidentified
MLAGVDAGTGQVFGGRQIAASDDGHRDAVRWARDLDSQRVWAIEDCRHVSRRLEQALLAAGERVVRVPPKMMGQSRRGERQAGKSDEIDALAVARAVVKDGVERFPAAYLDERAMEIRLLSDHRDQLVGERTRIQNRLRWHLLQLCPELEAQLPQGGLTRRLPQEQIARRLRTFGGDARARVAREQLSAIRTLTREINELERELHTLIKAHRPALLAEQGCGVLTAATLIGRTAGAERFPTDAHFARQAGVAPIPASSGRVDRHRHHRGGDRQLNRALHMIAITRGADRSTDQGLPGAQACRGQDQARSPTLPQAPPRTEDSPSALNASCRL

SEQ ID NO: 139368 - protein, 360 aa, unidentified
MAYYVGLDISQKQTSICVVNGQGKVIAEGKTLTQADAIYSWLGDRVKIAEITKAGLEAGSLSNWLYTGLSKLGLPVVCLETFQAHQFLATQRNKTDKNDARGLAQLVRMGEDFLKLVSVRSRHNQEVRALLSTREHLVHEKVRLENHICGILKPFGLIVARGCLSTDTFCARVAEVIVNAEKSGIGLESMLMPVLELYRNVRKQLDALTKQTRTLAQSIPVCKRFMTVPGVGPIVALSFFCAVDRPERFKKSEDVGAYFGRTPKQYQSGESDFKLGVSKRGDSMVRRHLMAAAIVLLCSTKSWCSLKAWGIQLAKRQGLGKARVAVARKLAIILHRMWINDQDFRWTATAATELGSPMLS

SEQ ID NO: 139369 - protein, 412 aa, unidentified
MVKKECFIYVGIDLHKETHTAVILNCWNEKLGEITFDNKPSEFSKLTRKVNKYCNDGMEVVYGLENAYGYGRALAVWLIEKGYQVKDVNPALSYAQRKSVAMYQKSDSYDAGAVALALIVHLNKLPDAVLDDAYWTLKQLVNRRDNIKTHQTRLKNQLHEQLCVSYPSYKKFFRDISRQTALHFWETYPSADYLKGKTPEDLAKELRVVSHNNCSINKAKIILDSVRADGSIKRDYQEARDALTRSIVGDLKHYNNQLEDVEKAIENLYPVFGCTLMTMPGIDITTATNILAEIGDINRFSNADKLAKFAGVAPVKFSSAGKGEDRASKQGNRRLQSIFYFLAIQMIQVTKNGTPRNAVFREYFIRRTQNGKNKQQVLICIARRLVNIIYGMLKTKTEYREPMLDESFLKNQ

SEQ ID NO: 139370 - protein, 375 aa, unidentified
MENFSTFIGMDVHKETIAVAIAEKHGTPRYYGEIGNTAEAITKLVKKVVPNGGRAAFCYEAGPCGYGVYRQITEMGYRCDVVAPSLIPKKAGDRVKTDRRDAVTLTRLYRAEELTAVWVPDQEQEAIRDLTRIREDMKSMERHARQRLSGFLLRNKKIYTGKNKWTQAHFRWLEKIRFESPIQQIVFQEYVDTVKQLQGRVASLEEEMWKALSGWSLGVVVEALMSLRGVNLVTAMTIVAEIGDMSRFESPRQLMAYLGLVPSENSSGKRQRRGEITKTGNSHVRRVLVEASWSYRLPARKTAHLQRKAEKTTEAVQAIAWKAQKRLCRRYWHLTLKGKLKVQACTAVARELAGFVWAIAREIREKNNTPAVIAA

SEQ ID NO: 139371 - protein, 321 aa, unidentified
MIIIGCDYHPGFEQIAYVDTETGELQERRLKHPEDAEKFYRALWEQSVKVRVGMEASGHARWFERLLEELHFELLTGDAAKIRAKRVRKKKTDREDARHILELLLENRFPKIWVPTWQNRDLRQLLWHRHRMVQTRTRIMNQLQAVAINEGVRYKKRLWREAGRKQLESLSLAPWASRRRQDLLEVLDRINPTIAELTQAIEEEAEKCPQAGRLMTHPGVGALTAVAFVLIIGEAHRFGCGKQIAAYLGLVPEEDSSGERRRLGHISKQGNSLLRFLLVEAAQATARCDRRWRNQFFHLAQRRGRKIAKVAMARRLAVRLY

SEQ ID NO: 139372 - protein, 409 aa, unidentified
MRAFCGIDWAEDHHDVALVDEAGQLLAKRRISDTVEGFEELLQLLADAGDDPDDPFPVAIETPRGLLVAALRATGRQVFAINPMAVARYRERHSVARKKSGHVDAMTLAGILRTDAHAHRPLPADTDLARAIAVLARAHQDAIWRRTRASNALRSLLREYFPVFLAAFADRTTNLAGRDARAVLAIALTPTAAVKLPRTRIAAALRRAGRQRGIDQLARRIHQALRQPQLHQPPLVERAMGEQARALLAVLDAECDNVDRLGLAVAEAFAQHPDYEIITSFPGLGDELGARLPAEIGDDRTWFADARALKAYAGSAPITRASGRSVSITRRSIKNNRLAATGFRWAFCAASKTGPARDHYQQRRDQGDRHPAALRHLFNRMLGQLHHCLQTRQTYDPLKAFPPPLSAAA

SEQ ID NO: 139373 - protein, 507 aa, unidentified
METRTNLNEVGKKKLVLGIDVALKNHWAAIGDNKGQEMVKPFQFSNNAEGMSLLEGMIKQTGRAEDKGDVIIGMEPTGIYWKPMGHYLREAGYRVVLINPSHTHKTKELEDNSQTKNDRKDSRVIQTLTREGKYLEPIILCGIYGELRRLGQAHKSVLKRGNVISNKVKMIADEYFPEMRGIIKSINGKTAKGLLAEIPFPDDIIRLGKTKFYKKLKKWSNKRFGKKKSLKLWEAAKKSIGVKVGQEAAKIELRQLVEEMELVKRHREELVKEIEEKAKETEEGKSLIKLPGLGYLSIGKLIGETGSIKSYKGARSLEKLAGLNLIESSSGERHSGKKISKRGRKLMRTTLYQMALASIKNNRAIKYEYQYRIKTKKQKKMKALTAVACKMLRVIYALVSANKEYDERKISRHYYESEIKREENICEWVTPIIPPSGPGYNSGDTVMKNTGHPLPMTLNEVMSGAPVQYRDDTGRNDRVRHRKSGGTNPLVNIEKSWAEENQEVVCK

SEQ ID NO: 139374 - protein, 348 aa, unidentified
MTMTIVEAARSVTGGVDTHLDVHVAAALDPLGALLGTERFDTDPAGYKALLTWLEGFGSLTKVGVEGTGSYGAGLARFLRRADIEVIEVDRPNRAERRRSGKSDPLDAVEAARAALGGRARSISKSKDGAIEAIRVLVVAKRSARGARIKALTQMRHLVITAPDKLRCRLRGLSVIALVNEAARLRPSRSGDAVMVAHRAALCSLARRIQGLEDELAELGRRIEAIVASTAPELLARFGVGPDTAAALLVSAGDNPERLHSEAAWAHLCGVAPIPASSGKSNRHRLDRGGDRHANSALWRIVMVRIAHDPTTTAYFERKVKEGRSKRDVIRLLKRYVARELYRYLPRG

SEQ ID NO: 139375 - protein, 456 aa, unidentified
MGKSNRKARPGQWDDGLTQIRANAAGIDIGATEIWVDVGKKAAEPVRRFQTFTADLNEMAEWLKACGIETAAMESTGVYWIPAFQILESKGIEVVLVNARHAKNVTGRKTDMLDCQWLRLLHSYGLLQASFRPAADIAVLRCYLRHRQMLIQYAAGHIQHMQKALTQMNLQLHHVISDITGLTGMRIIRAIAAGERDRKRLAAMRDVRTKATEETIAKALEGDYRTEHVFALKQSLELFDSYQHQIQACDKQIADHLSRLESKANPAEGLKPARREKKKRRNQSSLNIRQEALRISGVDLTQIGGISESAALALIAEIGVDMSPWKTEKHFASWLALSPNNKISGGKILKRSTRKTANRARDILRLCSQSLMGSRSALGAFCRRMCTRLGKPKGIVATAHKLALLIYRAIKFGKAYVDIGQDRYEQQYKERTLKRLARKAKELGMQLIPSLENQVP

SEQ ID NO: 139376 - protein, 327 aa, unidentified
MFPVGIDVSKNTLDLCMLYDGIKGRIKTRNIQNNRHSVENILRWLRLQHCSPEDVHVVMEATGVYHERLATELHDAGFRVSLANPHRSREFARGIKTDKVDAYMLACYAFLKKPHRWEPPAPEIRYLGALLRRRDVLLGDALREENRLEKYLSTDTPADIISSCRRMAQLLREEVSNIERQIKAHIKASPALRRDYTLLTSIKSVGPQLGMHMLVVLRSHNFVSAEQAAAFLGVVPIEKRSGTSVRRRPRMSKIGPPQLRAKLYMSALCGKIYNKRMRNIYDEMCLRGKPKMVAIGALMRKLVHWCYGVLKTGTVFNDEDLKPVLST

SEQ ID NO: 139377 - protein, 314 aa, unidentified
MSNRFVGIDVSKDQLDVHIRPENERRRYPNDESGILNLIGFLQPLQPDLIVIEATGGYQHQSVAMLVDQQFRVAVVNPRWIRDFARAIGQLAKTDQIDASTLSFYAEAIKPEPRGLPDKSREELRAILNRRRLIVDMITAEKNRQALASQKIRRQIQTHIDWLEKRLKESDDDLHTHIENSPVWKAKDEILKSTPSVGPITSMTLLAALPELGTLNRREITALVGLAPLNRDSGNYRGHRSIQGGRADVRQVLYMCVLSAIRFNPIIRTFYQRLVLAGKQRKVAIVACMRKMLTILNAMLKSNTKWSAEYAKIS

SEQ ID NO: 139378 - protein, 482 aa, unidentified
MKKRNIYQNQSQELLSLFEEAGSSAKVMCVPMDYAKKDHLVMFCNGHGDILRKPFSVKNSPEGIEYLLDQMTRSCRRRGIKREHVFLGGEDANSFAENFVSTLRFKGWLVAGVNAHDAKKQRVNLQASTDRIDLMGISTMLLNCRANCCPAATGIYRNLRTLVRHRRKLVVMLTEVKNRAHGIVDRLFPGFLNENKSGIVPFTQSSLYLMENRFSPKQIRRRRRQPLIEILKRFGTSKAQETAFKLQQYAAKVLHTPDEYIDTLQISLAQHVKHIRCLKESIVQLEKEIAVNLAQTQGAFLTSVRGIGIVLAAGVSAEIGDPYEQKPLNNVISYSGIIPRVKQTGGVDGKTYTGHVAKRCNRILKDYVVKSAYHLGLYGPEDLMADYKRRDASGQHADFGIGRRYLRMAMSLMRTSQVYLSPRLRKADTALEERAGHYLTSWPFLRDKWKKAGALEAAFSKDRPLGLWRQIVQKLYDIKLKL

SEQ ID NO: 139379 - protein, 370 aa, unidentified
MLDTTTFVGLDVHARSIKAVSLDVMTGEVRCATFGYDAGAVAEWVRSVDPKAKCVYESGVTGFDLQKRLSGLGVDCVVGAVSKMIKPSADRRRKNDRNDAEFLARMLSVGNVVEVWVPDDECEAARDLTRALEDARDDLSRAKQRLSKFLLRHGLAFDERTPTGRRKGNWTRAHWSWIESIRFAEGADNDVLAYYVDAVRRAAEEKARLEGLVEAEARKPRWRRRVDSLRCLKGVDTATAADLVFEAGEFSRFRNARSFAAWVGLTPSEHSSGESDRRGAITKAGNKHLRKALVEAAWHYLTCSGRPKDLAKGQAPDRVARRHAAKGVRRLVERREALLARGVHNNKANVATARELACWVWAVGLMAEEA

SEQ ID NO: 139380 - protein, 360 aa, unidentified
MGMRRIIALDLGKFKTVACVMDALDRSHVFETIEMSPASVHDLLARHATTPDPADTLVVCETCDCCGWVYDACVALDLPAKVVAANTEAWHWRRVKRKTDRDDALKLAKLALLEQLTVVHMPSPAQRQRRRLVLHRRSVVSRRTMSRNAIRSIFSQQGIALARGGKQWTRAGVAQLKSYARPLADCADDLDLWRGRLHAELQLMADADAQLKVFDAKLDALSAGDARVALLQTVKGVGPRTAEAVVMHLDDPHRFATADHVAGFAGLVPKQLESGQTSRFGHITRRGPGLLRSMLVESAWSVYRHNDWARALVQKVSRGSRARRKIAIVALARRLLTILWAMLRDNQPFRAPRAMSPTSG

SEQ ID NO: 139381 - protein, 343 aa, unidentified
MGEVSTVGLDIAKSVFQVHGVDADGAVVMRKRIGRAKLLEFFAALPPCVVGIEACPSAHHWSRKLRALGHTVRLMPPSYVKAYLKRSKNDANDAAAICEAVTRPSMRFVPIKTQEQQTGLMLHRTRQLLVRQRTMLSNAIRGHMAELGIISAKGRNGTAELLQIVGDVADDRIPPVARFCLDLLARQYLTLNAEVYAVDKRIHAWHRSCEESRRLEEIPGIGPIVATALVAEIGDWRAFRSGRNLAAWIGLVPKQHSTGGKERLGSITKQGNRYLRWLLVTGAMAVIRYARAHGTKRPWLTRIMDRRPAKVAAVALANKIARMAWAIMVRAERYKEPKLLLAA

SEQ ID NO: 139382 - protein, 354 aa, unidentified
MNTIKYIGIDVHQATSVFAIRDSRGNIIGESILKTEPTAIVDFLKGQRGRVRVTFEEGTYANWLYDVIKPYVSKIIVCDPRKNKLDENKTDRIDARKLAELLRLNALSAVYHGEQSNQTLKEYARSYLSLQQDSTRIINRLKAIYRGRGIGCRGTAIYRPKNRKEWLDKLEDKGAQCRAERLLEQLESLGKLRLEAQKDLVSESRKQKDYKILKGIPGLGLIRIALIMAFVMTPHRFRNKRQFWTYIGFSVVRRGSSEYEIIEGDLKRKKRKPLPRGLNHNYNHVLKDVFKGAALTAAYRGQFKKLFDQRVANGAAENLALLTMARKIASITLAIWKKGERFDITRHQLSEQKT

SEQ ID NO: 139383 - protein, 343 aa, unidentified
MEYYVGLDVSLKQTSICVVDQSGSVVREGVVDSDPEAISVYVRSKAPGAVRIGLETGPTSTWLWTELKRFGLPVICIDARHAKAVLKMQINKSDRNDAIGIARIMQTGWFKEVHVKDIDSHSVRALLASRALLVKIKRDLENHVRGLLKNLGLVIGRAKFNVFAVRAEELIEGRPELIAAIRPLLEARKAVEQQVSELDRKVVKLVRRDAQVRRFMTVPGVGPITALAFKATIDDPARFARSRSVGAYVGLTSRRHASGEVDWTGRISKCGDAMLRSYLFEAAGVLLTRVPKWSAVKAWGVKLAKRNGLRKAKVAVARKLAVILHRMWIDGTEFNWSKKEIAA

SEQ ID NO: 139384 - protein, 406 aa, unidentified
MEIIIDRACGLDVHKETAVGCVIGDGIGKEIRTFGTMTEDLLQLAEWLKGKGVTHVAMESTGVYWRPIYNVLESDFEVMLVNARHVKHVPGRKTDVSDCEWLCKLLRCGLLKESFVPEADMRELRDLSRYRKKLVHAQAAEKNRVQKVLEDAGIKLSSVVSDTFGVSASAIVEELMKGELTVEEMSALARGRLKAKREQLKKALVGHFKEHHKFMLTASLKHIREIEKIVADIDARIDQKMKPYQAEYELLQTIPGVKEVAAASIIAEIGTDMSRFPDEEHLSSWAGMSPGLNESAGKKKACKVTHGNKALKVVLVECAWAASKTKDTYLKGKYNSLVGRRGKKKALLAVGHKILIACYHILKKKEAYRELGASYLDKRKAEKIVRSHVKRLSSLGYEVTLKAKTA

SEQ ID NO: 139385 - protein, 384 aa, unidentified
MLDREQIQTNLPEVAVFVTLELSKSAWLLAAQAVPSGKTSAHRVSGGDVEGLLALLRRLQAREQRSSGREVAIILGYEAGYDGFWLQRRLAAEAITCFVMDPGSLQVDRRARRAKTDRLDAAMLLRALMAWCRGDHAACRMVQVPSVEREDARRTHRERQRLIAERVQHVNRIKGLLATQGVYTFQPLRRDRWERLKEVRTGDGRDLPQRLRGEIEREFRRLELVLEQVAAAEAERDAAVADPAVTDADAEKVARLARLGGIGTELATVLVREALYQPFANRKQMTAYSGLTPNPYASGDRQRDQGISKAGNPLLRKSMVELAWLWLRYQPGSGLARWFVERFGTGRGRIRKITAVALARKLLVALWRYLATGLVPEGARLKAA

SEQ ID NO: 139386 - protein, 317 aa, unidentified
MITLGIDAHKRTHTVVAVDELGRQLGCRTTGGTTTADHRALIGWAQGFAAERTWAVEDCRQLSRRLEADMLAAGERIVRVPPKLMAHARDAARTYGKSDPIDALAVARAAQREPDLPAAHLDAASREIRLLVDHRDDLVAERTRCISRLRWHLHDIDPAFDPPAGALTTRKHLDAAHKRVQGHDTVVVRIAAELIERIRSLNATIAELGDELDARTARAAPNLRSVHGVGPLTAAKIIGETAGIGRFRSRHAYARHNGTAPLPVWSANTHRHRLSRAGNRQLNAAIHRIALTQASNHPQHAACWTGEPPAATPPKKP

SEQ ID NO: 139387 - protein, 364 aa, unidentified
MIVIGADPHKATHTLAAVDAAIGELRGTKTAAARPAGHAQLLAWARALDAERVWAIEDCRHVSGALERFLTAHGERVLRVPPKLMGQSRRAERSAGKSDPIDALAVAGAALRHGLESFPLAVLDAEAEEIRLLTDHRDDLVGERTRIQNRLRWHLHELWPELAIPARSLDRPKWLDSIAGRLRRSEQSARVRVCRDELRRIRELTRAVDALERELGVLIAARAPQLLELPGCGSLTAARLVADTAGATFASDAKLARLAGVAPIPASSGNSRRHRLDRGGNRRLNCAIHVIALTQARCHGPARAYLERKQGEGKSRKEALRCLKRQLVRTLWRQLRTPGPDQEGDCLKDRLPTVNAPAPALVLT

SEQ ID NO: 139388 - protein, 493 aa, unidentified
MQRLLGISCGLDVHKDIIAACILMVNGTDVPEAVHETFTTMRGDLFRLREWLASHQCLNVAMESTGVYWKPIYEILEEVDGINLCLTNSHHMRNVPGRKNDKNDAEWIASLFMCGLLDKSFIPEKGIRDLREHTRFHVKLTQSRVRLVNRIEKLLQTHGFKLSSVLSSIVGVSGLRILEKLGMYGEVSVSDVRMALERGVKSTAEEIAYAINGKLPESSQLLLQLMLEGLRSYDKQLDIAYVAMMSIAQPYVQYIDLLATIPGIDRLSGTYIIAEIGVDMTRFLKGSGSLTSWAGLSPRDDKSAGKIISNKVMKGNSHIKSILCQCAWAATHTRNTRLSNWYWRNVNRLGQKTAIIAVARKLLVYAYHIIATASPYDHELDTANTEEIEALKLASAMRKVSASAAKAAASITAVSRDDTYADAVSKQNTRREDYGTLDEGQKSPVSDPIDSCCADASITQTPPDGLSHDSHVSFTESFVPKKRGRPKKNPTLG

SEQ ID NO: 139389 - protein, 385 aa, unidentified
MEKFSTLYVGLDVHKESIDIAVAEAARDAEVRHLGSVAGGLDAVSKSMRKLVSTGHRLHIVYEAGPCGFVLQRHFSALGWHCDVVAPSSIPRPSGERIKTDRRDAMKLARLARSNDLAVVRVPGPADEAVRDLVRARDDGVREQRNGRHRLKALLLRNGIPYAGKSSWTAAHLRWLATLKMEHSAQQIGFQEYLHSITESAARIARLEQAMRDALADWTLKPLVQALMSMRGVQLIAAMTLVAELQDFLRFESPRQLMGYVGLVPSEHSTGPKRRQGSITKAGNSAARRMLVEIAWHYQHSPRVSAGIATRQDQLPKAITDIAWAAQLRLNAKFKRLMARRLMKNKAVVAVARELAGFVWAIGREVQTSGWQGIAVEPTTAAAAG

SEQ ID NO: 139390 - protein, 338 aa, unidentified
MKITTIGLDIAKTVFHLFAVSKTGRLVKKKQLKRNQVLPFMANLEPCLIAMEACGGAHYWAREFEALGHQVKLIAPQYVKPFVKGNKNDYNDAEAIAEAAQRPTMRFVPNKSVEQQDVQNFHRQRERIKKERTALANQVRGLLAEYGIVIHKGIRTVSKSLPNILEDAENGLTPLTRELFAELYDELQALNERFAQCEQRINVINQSHEVCQRLDEILGIGPITATAIYAAAGDGKDFSNGRHFSAWIGLVPGQHSTGGRTTLLGISKRGNAYLRTLLIHGARAVLQQCGKKTDRFSLWAQALLVRRGHNKACVAVANKMARMAWVIMAKGETYRVPA

SEQ ID NO: 139391 - protein, 395 aa, unidentified
MFIVGIDIAKRSHEAIIIAEDGQVVRKAFSFRNNCTGYNLLLEQVRRLTLVKSQIVFAMESTAHYWLALYARLLKDGYAVMVLNPIQSHSLRELYIRKAKTDARDSLIIADLVRFGRCKASNVPQDKILALRELCRSRAYLVDMAADLKRKLIALLDRIFPEYESLFESVFSKASIAVLRKYSTPQKVKNAHLGKLTDILMESSNGHFGEWKAHQLKEAACSSFGIDDSGGVYSTLLGMFLEQILSLTAQADSLEKQISVFFQEFNNPLTSIPGVGTVLAATILSEIGDITRFSSADKLLAYAGLDPSVKQSGEFKSNQNRMSKRGSPYLRRAIWLASTVAVHRDPMFQTYYEKKISEGLHYMNVIGHVSRKMTAVIFAVLRDGQPYQPVLQTAD

SEQ ID NO: 139392 - protein, 534 aa, unidentified
MARRRRRHGTGGRVRLRKPSRRVAERVREVGARRFGILAVDSAKRRFAVLLTDFLGNVFWGVHEVENTGPALAAFVEALKQVVRAHKLKDLVVGLERTGRYHVPMGQVLKPHWSVEIVDPFATKQLRQAANPGEKTEETDLFAIVAAIQVGLGTTEADLPPAWVDWRLESRSREDHVGIRALVRQHIQEKLEALLPGFAGLFRDVWQAPTALRVAEHYGSAAALVAAGVDGVLAWLSGEGHRARRQTVERIVAWARTASPADPGASVRHALLCRDLEHERFLESAILASEGKLAGYLVDTPFVLLLSAQGINVVNSASYGAELGPIEHYINPQKISGRAGLYPSRYQSDEVDYPNGPLVGHRNARLRDAIHEVAYCLLTCNPYFKAWGEARRKRGWPEKKIHIAVGKTFIRISYRMLAGRQVFDHPCTAARNPILRKLYEFAQGHALTPETTRDLLVRAAAQIPQHVLPEEARELEAKLPRTARRRRTRGPEHISTILPDVLRHLACGLPLREERTERNTLEVTGGLLTGRSGH

SEQ ID NO: 139393 - protein, 367 aa, unidentified
MTYERSTLVNSEKYIGLDVHQATISVAVMDSRGKLVMESILETQAATILEFFAGLRGTLSVTFEEGTWAAWLYDLLKPHVAKLVVCNPRKNALLKHGNKSDRIDARKLADLLRLNDLQPVYHGETGVRMLRELARSYLTIVKDLSRVMNRLKALYRSWAIPCAGRDVYYTRHRSEWLGKIPEAGARRRAEQLYQQLDMLQHLRQQARRELLTESRKHAITAKLRKIPSLGPIRSALAVALIQTPHRFRTKRQLWAYSGLALETRTSGEHCYVRGQLRRSKKQISIRGLNKDHNHDLKGLFKAAATRASVQPGPFQDFYQRSLAKGIKPTMVRLTLARKIAAITLTLWKKGEDFDAEKLKSKPLERLG

SEQ ID NO: 139394 - protein, 429 aa, unidentified
MNNTKDGKGTEEYAALIGIDWASEKHDIALWDTATGKTSHRVIEHTPEALAQWLGELQSQYPEQRVAVCLEQSRGALIYALMGHAFLVLYPINPATLSRYREAFSPSRAKDDPGDAQLLAEVLRLHRDKLTVWKPDDEQTRTLAFLTEERRKAVDLRTKLVLRLQAALSLYFPQAIAWTGTYLYTPLACDWLVKWPTLDTIQKAKPQAIRAFYYGHNCRRPEQIEGYIKAIATAQPLTKDVAVITAQRLTVQMLAKQLRPLHDSIAEYDSQIKQLFAQHPDAFIFDSLPGAGSALGPRLLCAYGMDRERYPTAKDMQTYAGIAPVIERSGKQLWTHWRWNCPKFLRQTFHEFAKNSIPYSTWAKAYYELQKKRGKGHNAAVRSLAFKWARVIHRCWKDRKAYDEGLYLQALSLHGSELASLIAQQQQKA

SEQ ID NO: 139395 - protein, 418 aa, unidentified
MNYNVLSTLFVGIDVSSLTNTVCAIDFQNNKLLDFDTKNNRIGAEYIAEAISNCLVSNNFEFVVIALEATSFYSTHIANFLSTNKKLLPFKPLVYQLNPKTTANYKKTFVDIDKTDHLDAYVIADFARCGKISSSPWRGSQFLALQRLTRHRFHLVQTLVSEKNWMLSNIYLKFSELAVNNRDKPFSDIYGATSCAVLTEFYSLDEIVYKSIDDLTQFVIKKSKNRFKDPVKVATLLKQAAKNSYRLDKMAYEPLNIAISSSLNVIKALEDEIKTVDKAIEKTVKGLNPTEYQSLISVNGIGPVISSGIISEIGTIASFQSHDKLAKFAGLTWRKRQSGNYSSDETEMTKTGNPYLRYYFIEAANSVKNYIPEFEKYYWKKYYEVTTHQHKRALALTARKLVRMIFALLSKNRIYSNY

SEQ ID NO: 139396 - protein, 407 aa, unidentified
MELMGLYKRVIGLDIHQAQITACALIEESDGNSRIEQRQFGGFKRDRRELADWVASLRPDEVVMESTGIYWKSPYAALEAVGIRAKVVNARHVKNVPGRKTDVGDAHWLASLARAGLLRGSFVPPAKLRELRLIARQRQKLVGQLASEKNRLHKVLTDSGVRLGVVVSDLHGRSARAMVKAIIAGQPPREVLKLASARLKASREEIFDALQGELTASHCFVLDELMRHIEETDARIARFDARLLAELESERNTLALLQTIPGVDLIGAAMLLIEIGTDMDAFGSADRLASWIGICPGNNESAGKRKSGQLRKGNLYVRRLLCEFAHAASRTTSVFKSKFQSLVVRRGYKRAIIAIGHKILRTIFFMLKRREHYRDSTTDYEALSVQRNAPRWIKALTKFGFIKPTCA

SEQ ID NO: 139397 - protein, 349 aa, unidentified
MLHVGLDLSRKRVDVCVISSEGELVEHFRAPCDRDGLYGLTRRVAVYEEPIRGVVESMNGARYVHDELVRYGWEVLVADAVRVKGLAPLACKTDKVDARVLAELSFRDLVPAIWLPTPELRAERERSRWRLHLVKHRAILKNRVHSSLIAYGHQVPMADLFGVAGRRLLASLDFPEPWLGHVKASLELIDDLDRRIGEIEEWLRRSGADHRYLPLLLTCPGIGWITGYTIAAEIGDINRFASPVKLTGYTGLCPRVSQSGEIDCRGPISKHGPRYLRWGLMEAAIAASSHPLYRERYQRTRRRLGRQRGPKIAQIELARKLSEAIWYMLTRNQPFKPFVPAGAVLPLTA

SEQ ID NO: 139398 - protein, 331 aa, unidentified
MTNVIGIDVSKATLDCAYLRNKEQKKAKRKSCINQGRGFNSVAIWSKKITGLAIQELSFVIEPTGIYHESLVNYLYELGATVLLVNPGKVRKFAEGIGFLSKNDIIDAEVLTRYGYMATKLAVWKPAPKEVRELQSLLKRLNTLEKELRREQNRQEKMQECLEAHPLEKRSIKKSIKRLGEEIKQFKEHIRHHIKETKSLRKGYDLLLTIPGIGEKTAWVVLVILRAKDFSSAPEVASYIGLNPIEKRSGKSEYRKPRLSKAGNSDLRKSLYFPAIVAIRKNPDVKALHDRLRGSGKTEMCAIGAAMRKLIHICFGVLKHQQPYQVQSQSS

SEQ ID NO: 139399 - protein, 407 aa, unidentified
MWFAGIDWADTHHDAVVIDAAGQRVGSIRVSHNAAGLAKLVVFLRGIGDGDSVTDPDRLACIVETSHGLLITALLEAGLPVYPVNPTTVDRHRKPAGAKTDAIDAYLLARTGRSDLADLRRLTPDSPLIAELKALTRDQDTLIQSQTRLVNQLTACLKAYYPVALELCGKLQQPTTLAFLRAFPTPEQAQAATAKQIARTLRAAGYAPADTKAAEIRQTLREPQLHAAPPLVRAKARLMLALVAQLRPVIDDIAAYDTEIDRLFRQHPDSTAFMSLPRAGARLAPRLLAEWGDDRGRYADARSVQALAGTAPVAVQSGNYARVRKRSACIKPLRNVLYQFAWQSTLAEEWAAEYYQRKRQAGKSHPMAVRALANQWVRIIYALWTTRTAYDQEVFHAAQQAHAPHAA

SEQ ID NO: 139400 - protein, 345 aa, unidentified
MEITTVGLDIAKRVFQLHGVDAAGEAVLRRKLQRSEVLAFFKALPPCLVGIEACGTAHYWAREIRGLGHEVRLMPPSYVAPYVKRGKTDAADAAAICEAVTRPTMRFVPIKTAEQQAVLMLHRARDLLVRQRTMLVNALPGHMAELGVIAPQGIARVADLLAVLLGEDTTNVPALAREALRGLVAELEALDRRVKEIEVAIVTWHKDNEASRRLATIPGVGPITASAIVATITDPFQFHSARHLAAWIGLVPRQHSSGGKQRQAGISKQGDRYLRRLLVLGATAVIRHSRSKSTAEAGWLKSLLERRPTRLVSVAQANKTARIVWALLVHGEAYRRPAAVPGGAA

SEQ ID NO: 139401 - protein, 419 aa, unidentified
MNDQIAWNVITHYAGFDWAKDHHDVVVVDAQGKIVRDLTFAHSAAGWAQWQAMVAAYPRLAVAIETNQGAAIEQLLASGVAVYPVNPKSAERYRDRKAPSGTKTDYLDAWSLGDALRVDGHGWRALKPLDPLIQELRLLCRDEVELISKRTELVNQLQAALQEYYPAALAAFDDWTAPSAWSFVQQFPTPELLQQAGRRQWEKFLHAHRLYRPELNEKRRQIFERAQAFCGSPAVTRSKRRLALALIKLLQTLESQLQAYRQEIQRLFNEHPDHDLFGSLPGAGGKLAPRLLSELGSDRSLFANAQALQCYAGTAPVSFQSGQTHQVYVRFMCNKSFRHAVHLWADLSRRSCAWAQVYYQQLRDRGQSHAAALRCLGQRWLKILWKMWQTNTCYDAELHTANQLKHGSWVLAIKPAATK

SEQ ID NO: 139402 - protein, 345 aa, unidentified
MTEILKQVVGIDVAQDELVVSIGTLDQAVQANIYAFKQFANKPSGFKALETWVSKHANKQVPVRYVMEATGVYHEKLAYYLSGQGAEVSIVLPNKISNYMRTLDTKTVTDKTASQAICRFGLERKQEVWQQPKKIFRDLKQLTRERDQIIAERTVSKNQLHAEQAEAFPNEKSINRINTRIGLCNIQEREIKEDIATLIKQDKELLARINNAITIPGVGALTVVITIAETNGFDLVEKKSQLTSYSGLDVEEKESGTSVKKKPKISKKGNRYLRKAMHMPALTAIRVDDRFKAIYARLISRHGIKMKATVAIQRRLLELIYTLWTTNKPYDKNHVHQSIENTKAI

SEQ ID NO: 139403 - protein, 303 aa, unidentified
MQTIGIDMAKDTFHAAFDDRKVLKFENTPAGIEEFMTTLEDDDFPITDTRIGVEATGVYHLLFAVTLREHSWDVVVINPLESHRMITQGLRTVKTDRLDALKIRTMTSMGKGYLFTDTKDVLALKALVVERQALVEMPKMTKQRMGVHRLKETATGFAFYDSFTTVLEALSKEIKHIERSMRGYETETQKLLRSIPGLGSTTAAALVAFIGDINRFATPEKLVAYIGLDCRVYQSGTSVQGKGYISKHGNGYLRQMLFNAAFVARQHNPDLKSYHEQKLREGKHYFSALCAVERKLVHLIYAV

SEQ ID NO: 139404 - protein, 325 aa, unidentified
MQGKEPSDQETQYCTVGIDVSQSWLDVYIHPSETRLRVANDRSGIAKLKRRLLPMAADFVAVEATGRWHLQLCRSLSASGIAIRVVDPYRVRMFARASGIVAKTDLLDAKVLALYAALMQPSARELSPEVLEKLKELVTARASAVDERTAVENQLHAATDRFLKSQLTRRIDQLDSHVTALEKECLKRIKADATLARRYEILISVPGIGMLNAINLIVRLPELGSLTDKQIAALAGLAPVADDSGQRRGTRVIWGGRGPVRWMLYMAAMNASQHNPDLKAYYQRLKATGKEAKHAYIAVARKLIVLANLLLAQDRLWQPVAPKIA

SEQ ID NO: 139405 - protein, 320 aa, unidentified
MSEDPRYIGIDVSKTQLDVAVRPGNQRWQVSCTDEGTGKLISQLTHLRPTLVVMEASGGLEIPLVASLAAASLPVVIVNPRQVRDFARATGILAKTDAIDAQVLAHFAEAVQPAQRPLPSAEAKALSALVSRRRQLVSILVAEKNRLGTALPSVRPRIQAHIAWLEHDLKELDDDLDDTLRGSPIWREKEDLLRSVPGVGRNLAFTLLAYLPELGTLDRRQIAALVGVAPFNRDSGTLRGRRTVWGGRSCIRAALYMSALVASRHNPVIQAFYARLLAAGKPKKVALTACMRKLLIILNAMLKHHVPWHSPVTQLIGPCS

SEQ ID NO: 139406 - protein, 428 aa, unidentified
MRRKNYNKQIAKRRRIKRTTLVVGMDIGNGFNAMCLMNKEGEVLGKYPWIYNTRKGFDFFTKVIEAMKAKKGFKDVLIGMEPTGHYWRKIAYFAKGKGYEVRFVRTTALRHQRELDESSSAKSDVRDAVTIANITREGKYIDTVIEDGVLRQLRTLAHVRERIQRYNTGSKHALRAVLDDYFPELKDIFWSMKSRGLWAVLEDSPFPEDVMKIGLRRLTELLAKSSRRKGAAAKKAAELYQAARETVGLKEIGLADRYRVKMYLEEVQRSEERLKEIEKQMKKLLEEVPSAKQILSIPGVGVLSCAVFLGELGNPSNFQHAKQIIKYAGYDPQENDSGQRIGRKIISKKGRWLLRKYLYFMSMRAIHRSEFFREYYQRKLKRGNRFGQPLKKKEALCAVAIKLIKVIFALLRDKRAFTAKAPELALAA

SEQ ID NO: 139407 - protein, 351 aa, unidentified
MDIIGLDLHQRESQLCLCDEDGTITERRIVTSRERFTAVLGSRPRTKILLEASTESEWVARHLESLGHEVLVADPNYAPMYATRSRRTKTDRRDARTLMDACQTGAYRLAHRLSDPRRHVRAELAVRDALVRTRTRYVALAKTLVRRDGLRVASSESHLVAQRIGALSLSPALEAELQPLFTVLAPLNEQIAAADGRIATLAATDPLVARLATAPAIGPVTASAVVATVDDITRFRSAHQFEAYLGLVPGERSSGEKRHVGPITKAGNSRVRWLLVEAAWRLLRTKSAEAAALRAWAHGVAGRRGKKIAVVALARRLAGILYAMWRDGVPFDASRIRNPRIAAAEVTARAG

SEQ ID NO: 139408 - protein, 402 aa, unidentified
MYNAVGIDVSKGKSTVAVLQPAGVIIRKPFNVNHTSSELDELAKYIGSLEGETRVVLECTGRYHEPVVKTLSEAGLFVSAVNPHLIKNFGNNSIRKVKSDPADAKKIARYTLDNWIELRQYSSMDNTRTQLKTLNSQFSFFMKQKVAAKANLIALLDNTYPGVNKLFNSPVRDDGSEKWVDYAYSFWHVDCVRKIGLKTFTERYQAFCKKHHYNFQPAKPAELFLASKDLIAVFPKEASYKLLIQQSIQQLNLASSHVEELRSKMNELASTLPEYATVMGMYGVGKTFGPQLIAEIGDISNFSHREALTAFAGVDPGVDQSGTHNSKSNKASKCGSNHLRKTLFQIMSTLLQTAPEDDKVYQFLVKKRAEGKPYYVYMTAGANKFLRIYYGKVKECIRNLEQ

SEQ ID NO: 139409 - protein, 413 aa, unidentified
MLLFIGDDWAEDHHDLELEDETGRRLAKARLPEGLEGITRLHALVAQHAPADWAALPSEEVASRVVVGIETDRGPWVSALRAAGYQVFAINPLSSARYRERHSTSGAKSDAGDAHVLAEIVRLDREHHRPIAGDTDLVDAVKLVARAHQTAIWERTRQVLRLRSALLEYFPAAVEAFDDLSAKDALILLGRAPSPTRAAKLTRSQVVSALRAARRHHVEAKADALLAVLRSPGLRQPATTEAAYAAVVIGQVGIITALNEQITQLQEVVEEHFGRHPATDIYLSQPGLGVVLAARVLGEFGDDKNRFHDARARKNYSGQSPITRASGKKTIVLARYATNRRLGDALHQQAFSALRASPGARAYYDALRARKIGHHAALRQLANRLVGILHGCLKTGTKYNENTAWQHQNIAAA

SEQ ID NO: 139410 - protein, 317 aa, unidentified
MTKHSTVCAGIDIGKLKLDVALTGCKARLEADNTPAGHDRIVAWLKHHKVDRIGVEATGGYEKSVVRVLRGAGFVVVVLQPLQVRAYAQFRLKLAKNDTIDATMIAACVASVEELRDPPDPRFEAFAAAQTLIDQLNEDVVLYKTRLEMAQDETSRTFWKQQIVSRTAQARAARKTLRDAMRAHADLAAKLDLIASVQGVAEKTAIAILIRMPEIGMLSREGVAALAGLAPYDDDSGTRSGPRHIKGGRTRLRTSLYAAAFAATFHWNPLLKTFYERLRRNGKTHKMALVACARKLLIFVNTVVARRTPWQPIAATS

SEQ ID NO: 139411 - protein, 312 aa, unidentified
MKIICGVDVSKARLDACIEPGGLFASFDNDAAGIAELAAFCRQHQAGLAVMEATGGYERRAFLLLWEAGMPCALTNPRSVRRYAEAMGTLEKTDRLDAGVIARFAHAKNLQPTPAPTPAQQRLKALVARLRQVTDDLTVQKQRRASLADNAEMLASIGEVITLLKRQSRTLEGEIASMIDDDPLWAQLAEAWRPVKGVAGRTVARLMADVPEIGTYSNKAIAKLVGLAPLADDSGKRQGKRSIRGGRAAVRSILFLVAAIAAKYDKTLAAFRDRLLAAGKPKMVVRIALAHKLLVRLNAKARDARAQYANAT

SEQ ID NO: 139412 - protein, 472 aa, unidentified
MKSKSSRKRNPVDPVAEEIPDAEHELAIERVAAIDVAKASGKVCVRLPGQTGRRFSRVWDVPARTGAVSELAEQLIESGVEKVTVESTSDYWRIWYYLLEAAGLDVQLVNARDVKNVPGRPKTDKLDAVWLAKLTEKGLLRPSFVPPAEIRQLRDYTRLRVDLTRERTRYWQRLEKLLEDALIKISAVASTLDTLSTRDMIEALIAGERDPGRLADLARGKMKAKRSELIAALDGRFDDHHRELARMLLDQIDTLTAQIATLTSRIEQLLAAMPDTRSRGDGGTGGDPDRPSTGHGVEPETAARFTDATLLTPVERLDEITGIGELNAQVVLAEVGLDMTRFPTPAHLVSWAKLCPRTIQSGPVTRGGKTGRGNPYLKGALGEAAAAAARTDTFLGERYRRIVKRRGKLKALVAVARAILVVIWHLLANPEARFRDLGPDYHTQRIHTERKLRNHIAQLTAMGYRVTLEPAA

SEQ ID NO: 139413 - protein, 425 aa, unidentified
MNFTQNEKISQVTNETLVVGIDISSENHYVRAFDWRGIELSKTFKFESTSYGFKRLMEWLDETCKSNSKTKVIMGAEPTGHYWFTLAEYLKENNIKFVFVNPMHVKRTKELDDNHPSKNDRKDTKVIAKLVIEGRYLIPYIPEDIYAELRVANERRMRITREIVAIKNRIQRWFAIYFPEYTHVFGSWECDSSIEVLRNCPLPADVMSLGAEDINQLWREKKIRAVGIKRANALIETAKTSVGVKNGANAARFEMSMLIEDYLIKKEQEARIIEILKTLCIQVPNSEKLLSIKGIGILTVASFFGEVGDIRRFESPKQIQKLAGLAIANDDSGKHRGKAGISKRGRKLLRYTLFQAVISLLMHSPEFRYLHHYYTTRSNNPLKGKQSKIALCCKLIRVFYAILTKGVEYDSEKLLYDIVRPELAA

SEQ ID NO: 139414 - protein, 342 aa, unidentified
MNEVKGVVAVLGIDLAKRVFALHGVDRDGKVVLKQVVSRSTLPRLIAQLPPCLIGMEACSGAHEWARQFAQHGHTVKLMAPVFVTAYRKAGKNDDNDADAICEAVGRPNMRFVPVKTRAQQALLSLHRVRQGFVEERTGLINRLRGLLAEFGFVFAQRHGGLRAVPSALEGLPALAKRAVDDLLEHLRTLNERIAAYDLEFKHLAAQDDAAKRIMTIPGVGPITALALVATLGNARDFKNGRQLAAWLGLTPKQHSSGGKIRLGPVTKHGDGYLRTLLVQGARAAMQHASRAQPTRLSRWATNLVTRRGYHKANIALAAKNARIIWAILARGGEFQPHAAAA

SEQ ID NO: 139415 - protein, 343 aa, unidentified
MELFVGLDVSLNSIAICVLSSRGKVHKETTSACEPDDLIAFLRTLQGDVACIGLEAGPLSHWLYRHLVEARFETVLMETRQVKGALKAMPIKTDRRDAEGIARLLHMGWFRPVHCKSISAQEMRALLSARKTIVQAITNLELSIRGILRNFGLKLGRVSKGGFAERVIELAEDNLKLYAAAKPILDARRALRHELASLEKLLGDLARTDRLCHLFMTMPGVGPIVALTVKAAIDDPNRFHSSKDVGPWAGLTPRREQSGERDIIGSISRAGDAGLRTVLYQAAMVMLHKGRPSWLTAWALNVAKRRGKRRAMVALARRIGVILHRMWRDETPFRFTRAEPISS

SEQ ID NO: 139416 - protein, 338 aa, unidentified
MSLYAAIDLHSSNSVLAVMDGDGKPVLRCRRPNDLPRLLSDLAPYRDELVGVAVESTYNWYWLVDGLMDHGYAVHLVNTTAIPQYDGLKHGDDDSDALHLAQLMRLGLLPEGYIYPREQRGTRDLLRRRFSLVRQAVRLMLSIQSSFSRSTGKQLSANKLRQLSPSQLVDLFPELSIRYGVLIQFKLWMTVQDQIKALETWIRKDLARSDLLARLQSVPGIGPILGMTILLESGAIERFESVGNYASYCRMVESVRLSNGKRKGHGNRKCGNRYLCWAFMEAANYAVRYEPLIRRWYERKRARKHRVVAIKAVAHKLARACYHMLHEGTTFDLTRAFG

SEQ ID NO: 139417 - protein, 393 aa, unidentified
MLYLGIDIGKNTHVASLIDETAKPLFKAFSLSNTTEGANSLIEKLSVHINNQSEVEIGMEATGHYWLSIYSFLVENGFVVHVVNPIQTDGWRKGTEIRKRKTDFIDSVLIADLIRYGDFVETSLSDEDTMSLRNLSRFRTYLVSSISDLKRKVICVLDQVFPEYHTAFSDVFGETSKELLSHFQTADDFENISSEQLENVLKKVSFKGFAKNKITQISELAASSFGLKFCQDSFSLQLRLLIEQIKFIDAQVCDVEAEIKVILDKINSPIMTVPGVGNINAAVILGEIGDISRFSNASKLAAYAGIDASVSQSGEYQSTNNKMSKRGSPYLRKALFQAALIAAFHDPVFSAFYQKKRSEGKHHLTAVGAVARKLCNTIFAVLKYNTAYVPQFK

SEQ ID NO: 139418 - protein, 346 aa, unidentified
MLHAGLDLSRKRLDFHLLDERGETVEVGAAPPDADGLRSLAARLQRHGQPLRAAIESMTGARFVHDQLEHHGWEVEIADAVRVKGLAPLACKTDRIDAWVLAELSRRELVPAIWLPDPSVRAERERARFRLHLVRHRTSLKQRVHATLLTHGRPCPVADLFGVRGRALLAALELPEPWAGDVEASLRLIDELGREITACERELQAAGAEHRYVPLLITVPGIAWVLAYTIAAEIGDIARFPAPAKLCGYTGLCPRVYQSGESDRRGPLSKKGPRYLRWALIEASTHASRHPAYRDRYQRTKLRLGKQRGPRVAQVDLARKLTEAIWHMLTRNRPFAPAGATPPMTA

SEQ ID NO: 139419 - protein, 350 aa, unidentified
MVVVGADVHKRTHTFVAVDEVGKELGHKTVDATTAGHQAAVRWAWDRFGRQLRWAIEDCRHLSARLERDLLTAGQSVVRVPPKMMAEQRRIARTRGKSDPIDALAVARAALRDPDLPVATHDEASRELKLLVDRRDDLVKYRTATINRLLWRVHELDPAWAPPARSLDVAKQQQILAERLAGIDGIVAELARDELADIIDLTDRVNRLERRISALSAAAAPTLLAMPGVGVLTAAKLVGETAGVARFKSEAAFARHAGIAPIPVWSGNTAGRVRLTRSGNRQLNAAIHRIAITQIRMDSLGKTYYDKKKAQGMSTPEALRCLKRRLARIVFHHLTTDQTTAPANRLAHAA

SEQ ID NO: 139420 - protein, 330 aa, unidentified
MTQYIGIDISKAKLDLAWLKDIEKPKVKTKVFKNDSTDFLKLIDWLKSNVTEDLSDIHIILEATGVYHENIAYYLYDQGLSVSIVNPAFVRSYADSLGSRHKTDKQDSILLARYAHSAKPNLWTPPPAEARHLKSLLSRLDALQQDLMREQNRQEKADATDTAVIVKTSIEQMISALKEAIANLNDDIDTHIEDHPNLKQDQVLLQTIKGVGPATSRQMLSLMHNKSFTKASQAAAFLGLIPKQVQSGQFRGKTRLAKNGSSAIRAKLYMAAVVSTRWNPDIKAQYERLLANGKCKMQAICAAMRKLVHICFGVLKHQMPYQPQIAKTAA

SEQ ID NO: 139421 - protein, 380 aa, unidentified
MPDVISNQPADVRLWVSLDVHKLSIVAATLPPAGGQPEVSQIETTRAAVRRFIDRLGGPEGLAVCYEAGPGGFELLRVLRSLGVACDVVAPSLIPVRAGDRVKTDRRDAKKLVRLYRGGQLSYVCPPSPETEGLRDLMRCRDDLRCARTAARHRVSKQLLRHGRIYRDGKSQWTKMHRTWIARQRLDDELAHKALSEMLTHLDGLDRQLDALDRDLEQIARSERWAETVQILTRFKGVSTRTALGLIAEIGDFTRFGHPRELCAWLGIVPSEYSSGQQRHRGHITKTGNHHARRLLIETAWSYHHPPRVRERGPQTDERAWQAQIRLHRRYKHLTEHSKRSTVATVAVARELAGFLWAAATHQPLAQAAANDQPILEAAA

SEQ ID NO: 139422 - protein, 427 aa, unidentified
MGRFGKGPTVEIIYERVAGIDVGKKIIAVAVRTPGERPGKRRQQLRKFNTYYQTLTEMVAWLIAEGVTHVSMEATGVYWRPVFHALCEAERALEVLLVNARHVKNVPGRKSDALDAVWLAELTECGLLRGSFIPPREIAAIRELTRYRKKLIEQRTSELQRLAKVLEDAGIKIDSVASALTTLSARDMIEALINGERDPGVLAEFARGKMRRKISDLRLACAGRFGAQHALMCTLHLEHIDHLADMIARLDTRIDEASLPFVRQTTSLATIPGISERAAQVIISEIGIDMARFPTAAHLASWAGLCPGNNESAGKHRSGRTRKGSKELRALLTECAWSAGRTSTYVGAQFRRFHRRFGSKGGKKAATATAHTLIVIIWHVLAEATAYRDLGSDYFTRRLDSPEARKRRLIHELEALGHKVTIEPAAA

SEQ ID NO: 139423 - protein, 428 aa, unidentified
MNAPLNNDNRQNDYAAFIAIDWADRQHVFSLQVAGQSTKETGTLEQKPEVIGPWVAKLRERFGGRLVAIAVEQSRGALIHALLSYDFIVIYPLHPSTVAKFREAFKSSGAKNDPLDTDQILQILTKHRDLLKALNPDTEETRLLARLVEDRRQAVDLRTGHIQALSAALKEYFPQLLELLNGNLASRLACDFLIKWPTFEAFQQAKPSTIKRFYYGHNIRSPRLIEKVLGLASTAQALTTDGAIVESGRRLSQMYAQLIQTLNPVIEAYDQRIEEVFHDHPEAHLFNQLPGAGAALAPRLLSFFGTDRSRYEAAGNVQSFCGIAPVTKSSGKTRVVYFRHACPKFARQTFHEFARLSVAKCQWARNYVDYYRGKGKKFHTIIRGLAFKWIRILFRCWKNQTPYNDTNYMEVLKKRGSIFATLHLEQNA

SEQ ID NO: 139424 - protein, 353 aa, unidentified
MQQFIGCDAHKKFSVFASINEAGEYGRTIRVGHDREVFRRFLKELPPGSEIALETSGCYYWIVDEMEKCGHVVLLAHALTAKRRMEGRHKTNERDAKGLAMLNRNGTLPKVWIPPAKLRDEREMLRWRMWLSHTRSRVKNRIHGVLQRYNLEVEYTDLFGDGGRAELLERLGELPVYSQQSVLSQVETVDQLDQQVKESEEVVERILENSAERDLLDSLPCVGKVVSAVLALEIGRVERFESAEDLASYAGLVPRAVESAEWRRRGGCPRDRNQYLNWAYVEAANLISIQRRRWPQRHTTQLYERVKQHSRMHGKAAVAVGRHLAEASYWMLKKQEVYREPKGKRSVLSSTHG

SEQ ID NO: 139425 - protein, 482 aa, unidentified
MKKNNIYQNQSQQLLSLFEQAANNAKVMCVPIDYAKKDHVVMFCNGYGDILRKPFSVKNSPEGVDYLTDQVIRSCHQRSISEKHVFFGGEQVGSFADNFVSTLRSQGWLVAGVNAHEAKKQRENLQASTDRLDLMGIAKSLLNRRANCSPAQSGIYLNMRTVVRHRRKLVGITTEVKNRIHAVVDRLFPGFLNESKSGITPFSNSSLWLMKERFSAPQIRRRRRSTLIESLRRLGTKKSECTADTLQQYAAQVLKPPQDYVHMLQLSLAQHVKHFCCLQESIGQLEKEIALNLAQTQGAFLTSVRGVGIVLAAGVSAEIGNPFEQKTINNLVSYCGIIPRVKQTGGPQGETRTGKVAKRCNRILKDYAVQSASHLGLHGPADLMSDYKRRDAAGQHADFGMARRYLRMAMCLMRTSQIYLPSRLRKAQAQVKQRADYYLMTWPYLRDKWQKLGTLETAFKADHPLGQWRTIVQQFYGIKLTL

SEQ ID NO: 139426 - protein, 343 aa, unidentified
MQTVTTIGLDIAKSVFQVHGVDAAGQVVIRRKLKRRYVLAFFQKLPPCLVGIEACASGHYWARELQALGHTVRLMPPAYVKPYVKRQKNDMADAEAICEAVTRANMRFVPIKTPQQQSGLVLHRTRHLCIRQQTAVINAIRAHLAEFGIVAPVGRKGVEELLRVVADETDQRVPDVVRACVAALGTQLLSLKKQILEFDRMIMAWYRSNETSKRLHYIPGVGPLLATALVANVADPGAFRSGRNFSAWIGLVPKQHSSGGKDRLGSISKQGDRYLRSLFVAGALSVIRYAKAHGSKHRPWLTALLARRPAKVAAIALANKLARMAWAMMARGERYRNPVALAA

SEQ ID NO: 139427 - protein, 371 aa, unidentified
MKDNSHSGRILLVAMELSNSKWRLAFSAGEKIRQKVIEARNGAHFLKEVKRAKEKLELSEDASVVCCYEAGRDGFWIERWLRSNGFECLVVDPASIEVNRRKRRAKTDRLDAQGLVRLLRRYQDGDRYVWSVVHVPSEEQEDELRLHRELSRLKKERTAHLNRMKSLLILHGIKMTGNLSKLDQELDQLTGWNKKPLPKALLAELHRECLRMGQINEQIKMLEKQKLERIKKPQTNADHQAADMMRLKGVGEVSAWLLAKEFFGWRNFKNRREVGSLAGLTPTPYDSGDSRREQGISKAGSPRVRSIMIELAWSWVRFQPDSELTKWFEKRYAHGSKRMRRVGIVAVARKLLVALWKYVEFGTVPEGALVN

SEQ ID NO: 139428 - protein, 349 aa, unidentified
MSEPYAGRQIVGIDLHRRRSVPVRMTEAGERLETVRILNDPEYLREVMTRAGEAPEVVLEACYGWYWAADTLADLGATVHLAHPLGVKMFSYRRLKNDERDAADLADLLRMGRLPEAWIAPPATRELRGWVRHRAKLVGLRSNLKCQVHGILANAGITVPMSDLFGASGQRLLATADLATASRSRIDSLQRMITALDFEVELFAKLVAGRLRTHPGYQAIQLIPGVGPILAAVFVAEIGDITRFRRPEQLASWAGLTPKHHESDTTVHRGRITKQGSRLVRWAAIEAVQRLPGHTRIGQVRDRVAARRGRNIGVVAAARELTELVFYGLRDHRVHALAVHSPARTPLPA

SEQ ID NO: 139429 - protein, 386 aa, unidentified
MILLGLDPHKSTHTATAVEPATNRPIATIQIEATLPQYRRLLTWARRWPERRWAVEGASGLGRHLAQWLVARGESVVDVHASATARVRQLSRGGGRKNDVIDAAAVATIAALQGEVRPVAAEDHATVLALLDERRVNLAQARVRAANQLHAVLRDLLPGGAPLQLSATVAAALLGRIRPTGPVEQVRKQLARDLVVELRALDAQLAANAEQLRRHVEASGSTLMSTPGIGPVMAARLIARTGSIDRFPTAVAYATYCGTAPIEIASADKARHRLSRKGDRQLNSALHTIAVIQIRMPDSPGRTYYDRKIAEGKSVKEAKRCLKRRLADHIWRVMTLDERRRARAADPGGHTEATSKSSAAGSTPTASSSDKSLPGPATAKTTTRAA

SEQ ID NO: 139430 - protein, 342 aa, unidentified
MKYVGIDLHKQTISGCVIVKERGRKKVLARKRLQCRDEAGIVAWLKELGAFEVVVEATASYQWFVKLAEPLARRVLLAHPKKLRIIAESQRKSDKLDAQVLAEFLADDAIPLAYQPTPRVREHRVLVRYRHYTQRRITSVKNKLRHILAAYNADVRHLFTAAGREHLAAVKLSAADRFAADQLRSELDQHRQRLAAANRELKQFAKQAPLAEREARAVLASIPNVGPVTCDVILAELGEWRRFSSQKRVVSYGGLAPGFRESAGKAKQLGITKEGSRLLRWVLIELAWRMVGKSRRWERHYQRLAARIGAKKAIVAIARRLLGVVYSLLRNNQKYSLALEAA

SEQ ID NO: 139431 - protein, 455 aa, unidentified
MLKRTTGDRPELKLVNVGAAAIDIGSKMHMAAVDPACTDVPVRSFGTFTQDLHELADWFRACGVTSVAMESTGVYWIPVYEILEQRGFEVILVNARYAKNVPGRKTDVSDAAWLRQLHSYGLLRGSFRPDAEIATLRAYLRQRERLVEYAAAHIQHMQKALMEMNLQLHHVVSDITGATGMRIIRAIVAGERNPDVLATYRNVRCHSSIATIRAALVGNDRHEHVFALTQSLELYDVYQAKMLDCDRKLEVLIAALNNKGAKPVGKLSKPRIKTKQVNAPTFDVRTALYGVLGVDLTEIHGLGPSLALKLIGECGTDLRAWPSDKHFTSWLCLAPGNKISGGKVLSSRTRRSSSRAAALLRLAATTVGRSDTALGAFYRRLASRAGKSKAVTATARKIAVLFYNTLRHGMSYKDPGAAHYEQQYRSRVLANLQRRAKSLGFVLQAIPEDANPAVS

SEQ ID NO: 139432 - protein, 375 aa, unidentified
MSKFARKKQSRKKEQKNQESQLTIINPNTAGIDLGSREHHLCVPPSATELNIRCFGCTTPELLVLADWLSDCGVTSVAMESTGVEWIPLFQILSQRNFQVFLVNAKSVKTVPGRKSDVLDCQWLQQLHSYGLLAPSFVPEGEIAVLRSYLRQRENLIHSSTSHVQRMQKALTQMNLQLHKVISDITGVTGLNILRAIIAGERNPQKLAQLADKRIKSSPEQIESALTGNYREEMVFILHQELSFYEFSQQQIVILDREIEKCLSKFATVTDEPAPDSKKKKRRRPTHPAFDLHSHLYRITGVDFTTIDGLDVVTVQTIISEVGLDPSKFKSIKHFTSWLGLCPGCRITGGKVKTSQTRPVVNRAATAFRHFGTSS

SEQ ID NO: 139433 - protein, 343 aa, unidentified
MQAVTTIGLDIAKSVFQVHGIDAAGKVLIRRQLKRRYVLAFFQKLPPCLVGIEACATSHHWSRELQALGHRVRLMPPAYVKPYVKRQKNDAADAEAICEAVTRANMRFVETKTPEQQSCLMLHRTRQLFIRQQTSVINAIRAHMAELGIVAPVGRKGVEQLLVAAGDASDPRVPEVARACLAALGAQLRRLKAQILEFDRRIMAWHRSNETSRRLDAIPGIGPALATALVASVANPKAFRSGRNFSAWIGLVPKQHSSGGRDRLGSISKQGDRYLRSLFTAGALAVIRYAKIHGTQHRPWLTALLARRPTKVAAIALANKIARMAWAMMAKGERYKEPVALAA

SEQ ID NO: 139434 - protein, 410 aa, unidentified
MDAFCGIDWAEDHHDIALADRDGGLLARLRVSDDAAGLARLMELLAEHGDSAEDPIPVAIETPRGLLAACLRATRRVYPVNPMAVARYRDRHSVAGRKSDHGDAVVLANILRTDLHAHRPLPADSELAQAIAVLARAQQDAVWDRVAAHNKLRSHLREYYPGFLAAFASAKGGIMRPEARAVLAAAPTPADAAKLTLAQLRGLLKKAGRSRGIDAEAQRLRDALRQKQMRQLPLVEQAMGRQSRALLRQLDAACQNADDLEGAAIESFSQHPDAGIITSFPGIGALTGARVLAEIGDDRSRFNDARGLKAYAGAAPITRASGKTRSVTRRHVKNNRLAAAGYIWAFSALTASPGARAHYDRRRDAGDRHAAAERNLFGRLLGCLHHCLATSQHYDEATAFSSHPAIPAAA

SEQ ID NO: 139435 - protein, 331 aa, unidentified
MSFSHYIGVDISKSSLDAAIYPAMDKKSDFIHIENSPKGLREMMSWLKHRGIKSKELVICAEHTGAYTNQLIDFTHKKGIALSLNSPLDIKRSMGIVRGKNDVVDAARIAEYAYTKREKLQLYEKPGESIMTLQYLLTERRQYMRQRTALLNFKSALVEYETSAARSRNETAINSLSKLIKKTEEQMLSIVYEDPELKRSYELVSSVMGIGLINALNTIVYTNNFHSFDSPRKYACYIGVAPFDHTSGTSVRGKTQVSKICRTQQKSELSMAARSAIIHDPGLRKYYQRKMKEKGGGREMHGVVLNAVKFKLILRMFAVVKSGVPYKVLNY

SEQ ID NO: 139436 - protein, 370 aa, unidentified
MDHTSTLFVGLDVHKDTITVAYIASEPGAEAVSYGTIGTRHSDLDRLIRKLQSKGKRLVFVYEAGPCGYWLYRYLRRKKLRCFVVAPSLIPKRPGDRVKTDRRDAIALARLMRSGDLTAVYVPEVEDEAIRDLARAREDALKDLKAAKCRLKAFLLRQDIGYTGRANWGPAHLRWLAEVVCPTPAQQIVFQEYVRAVDEHHERLDRLEVELQDHAKAWRLYPVVEAIQAMRGVAFTVAITVIAELGDLTRFEHPRQLMSYLGLTPSESSSGPRRHQGAITKAGNTHARRALIEGAWSYRYPAKVSRHLQLRLETLPKAAQDIGWKAQVRLCKRYRRLTARGKNPNQAVVAVAREMAAFIWAIARDIPIAA

SEQ ID NO: 139437 - protein, 344 aa, unidentified
MDHFAGLDVSVKETSVCIVDETGNIVREVKLASEPDALVAVLKNAAYHFKRIGLEAGPLSQWLFSALAEAGLPVICVETRHMRAVLKAQINKTDRNDARGMAQMMRVGLYRPVHVKTLRSQKLRMLLTHRQLLLSKAIALENDLRGTLRNFGLKVGVVGKVNFEARIRELVESLPDLAVLVEPMLIVRRVLREQIVILHRRLLAIVRDDEVCRRLMTTPGVGPVVSLTYRATVDIPARFRKSKSVGAVFGLTCAKYQSGEVDWDGRISRCGDQMMRTMLYEAAQAMMRSKKWSWLKAWAMQIARRRGMKKAIVALARRLAVIMHRIWVDGTEFRWTREQAAVAA

SEQ ID NO: 139438 - protein, 343 aa, unidentified
MFVGMDSHKDTLAVSGVDAAGRQQQTQVFPNTDHGHRRLVAWLQAQPGVVRVGIEGAGGYGRAVAIHLVQAGLVVVEVTPSLTVRERRRLRQRGKADPTDALAIARVTAREPDLPAVRGQDLTEDLRLLVDYREQLLGERTRIANRVHADLVALRPGYQQRLPELRSQRAAGLVRRLLAGQLGVRAELVGRRLDQLDRLDAEIRALKRRIGKLVEATGTSLVQVHGVGPLVAARILGEVGDVRRFGDRHKFAAANGTAPIPASSGRVQRHRLNRGGNRRLNRALYVVAITQARSDHPGRAYVARKQRQGKTRREALRCLKRRISDAIYRQLQTDLGPDPNPAP

SEQ ID NO: 139439 - protein, 362 aa, unidentified
MKKGIKRASQMEAKHNINAAMTVGLDLGDRFSRYCLVNALGEVVEEGRIQSSLEAMRRHFEGELRLRVALECGTHSPWVSRLLSELGHQVVVANARKIAMITASTSKNDRNDAAQLARLAAYDPRLLSPLRHRSQQRQQDLNLIQVRATLVRAQTMLINALRGLVKSAGSRLPSCSTESLAVRAPAHIPSALAAAGRPLLEQIVALNGQIAGLDREIEKLREKYAEIGILRTVPGVGPVVAAAYVLTLDSCDRASNRAAGAWLGLRPRQKQSGDSDPQMRISKEGDRYLRSLLVQSAQYILGRFGPDSALRRWGMKLAQNGGKRGKKRALVAVARKLAVLLHSMWRSGKRFEPFPQPAAAAA

SEQ ID NO: 139440 - protein, 462 aa, unidentified
MAKKAKKASKAKKVKTSKGVRLEIVNPMAAGIDVSSTEMQVCVPEHCDGDNNRRFGTFTEDLRYISEWLKSCGITTVAMEATGVYWVQLFMTLQSAGFDVIMVNAKAIKNIGEEKTDEVDAEWIMLLHSYGLLKASFQPDNQARRIRNLSRHRDNLLRSSSREVLHMQKAMELMNIKLANVISDILGKSGMEIINAIIDGERNPETLSLLADPRCKASKEIIQKSLEANWDEDLVFMLKQSYDLYLFYQQQMSDCDKQIAQIAKEYLAEIDVAGVAGLKKLIRSNKKKSKKNAVTIDVEQIAFQMWGVNLMLIPGISDAAMLRLIGELGHDFTEKFESYKQFSRWCNLCPNNKISGGKLLSSKIPKRKNPVGLILRQAANSLKSSKTPLGFYFRRMQAKDGYLGAIVATANKLARIIYTLVKTKTEYNDSYNKITEEEILKKKLIIAQRALERIQNQLMKTA

SEQ ID NO: 139441 - protein, 376 aa, unidentified
MGTPSAQTLDDVGVREIFQELEEVPLMTMVGGLDVHRAQITFDYVDDDGLVHWGQIRAATRKTLRGWLAEHCPDGDAEFALEGCTGWRYVSEELAGAGVGVHLGDPAEIAVLRGPKKRAKTDRADARLLRTLLLQGRFPESWIAPAHVLEIRTLGRLYCTLMDERRAWQQRIHAQLFHQGCPPVRALLSVTGRAALAGAELSAVGGQYVDTALGRIDELSTEIEPLRAQLVNFARHQTGCQALPRHYGIGWLCAAIIWAEIGDARRFSSSDQLVRFAGLDVTVYSSDGKRSPGHLSRQGSPELRWAAFEAAKCAARRGSPDYGYYRKLAAKRDGHNGKNPTLAVERKIVRRCHHTLRELGDAAVALPVAEPQEVAA

SEQ ID NO: 139442 - protein, 418 aa, unidentified
MNTLSDYAAIIGLDWADKKHDICLKLPDCDSLEFSTLSHKAEAIDAWAAGLQARFPGKQVAVCLESRKVPILYALLKYPFIVLYPVNPQTLARYRRALSPSRAKDDPTDALLLLELVQRHEEKFKPWVPDRPEVRALAQLVEIRRTLVADKVRCTNRVIAALKNYYPQLLDWFEDKDTAVFCHFLQRWPTLPSAQRAHKDTLRKFFTSHNVRYPKVIERRIDTIKCATVFVTDEGVIDPNRELAIALSAQIALLLEQIAQFDRQIEERFKQLDDAPLFAALPGAGKQLAPRLLVAFGEDRTRFDGADAVSQYVGVAPVTERSGNKHWVHWRYSCSTFLRQTFIEWASASIRFSFWAQAYYQQQREKGKTHQMAVRALAFKWIRIIYRCWVDRKPYDEATYLLALKEKGSPLVAELGKS

SEQ ID NO: 139443 - protein, 350 aa, unidentified
MSQNLNSAVAVIGIDIGKNSFHVVGLDDRGAIVLRQKWSRGQIEARLANMPPCLIGMEACVGAHHLSRKLKALGHDARLMPAKYVRPYSKGQKNDFRDAEAIAEAVQRPTMKFVATKTADQLDLQALHRVRERLVSQRTGIINQIRAFLLERGIAVRQGQRFLRAELPRILAAPPEVLSARMVRVISDLAEDWRRLDQRIDHLSSEIAVLARQDAGCERLMSVPGIGPIISSAMVAAIGTGDAFAKGRDFAAWLGLVPKQISTGDRTILGKISKRGNRYLRVLFVQAAWVVLIKPMSWERHGLKHWIEAARKRLHRNVLAIALANKLARIAWGVLAGSGRTFEASKLQAA

SEQ ID NO: 139444 - protein, 311 aa, unidentified
MTIKPTIGVDVSKDHLDAHRWPDGETCRVANDAAGHRQLLRWIGAGVACVAFEATGAYHAAFERALHRAEVPCSKLNPARVRRFAEALGAQAKTDRVDARLIARMAAMAEPRLDQPKPAILAGLHELQLARTALLRERTAAKNRAGRLRLALLRRQHATRLRQIERALAEVDAEVAALIASDEGLARKAEILCSIPGVSMVTAAAILAELPELGSLEAAAAASIAGLAPFTRESGTWKGKAKIGGGRGDLRRALYFPALSAARFNPDLKTVYDRLRARGKSAKLALVAVMRKLVILANVLVRDDRIWQMRA

SEQ ID NO: 139445 - protein, 344 aa, unidentified
MDHFAGLDVSVKATSVCIVDDAGKVVREVKVTSEPEALLAVLKNPAYHFKRVGLEAGPLSQWLFSGLAEAELPVVCVETRHMQAVLKAQINKTDRNDARGIAQMMRVGLYRPVHVKTLRSQKLRMLLTHRKLLQSKAIAIENDLRGTLRNFGLKVGMVGNVKFEARIKELVENFPDLAELVEPLLIVRRVLREQIVILHRRLLAIVRDDEVCRRLMTTPGVGPVVALTYRATVDVPARFRKSKSVGAVFGLTCAKYQSGEVDWDGRISRCGDEMMRTMLYEAAQSMLRSKKWSWLKAWAMQIARRRGMKKAIVALARRLAVIMHRIWVDGTEFRWTREQAAAAA

SEQ ID NO: 139446 - protein, 380 aa, unidentified
MKYVGVDLHKHVIVLCVAVLVAGRPKVVRRARFRCDQSEAVRAFFEALGPFQVVVEATAAYEWFFVLIEDLADRLVLAHPKKLRVIAESTRKSDKIDAEVLAVFLALDMIPQAYRPTPRVRQHRVLVRHRCWLQRRITSLKCKVRNVLGHYNADIAGLFTRQGEQYLEAVPLSPADRFAVQALREQLRLFQRQLREADRQLEQFGQTAPCAEQEARALLDTIPRIGPVTIDVVLSELGDWRRFRSQNAAVAFAGLDPGFRKSAGKCLELHISKEGSRLLRWALIQAAWRLTVHSPRWRQMLERLHANTGSKKKAIVGVARHLLCVMFAMLQSSRPYELLGVPNGNERPPKCQKAAKASARARQKGSAPSRLRRRLVPATG

SEQ ID NO: 139447 - protein, 343 aa, unidentified
MDHFAGLDVSVKDTSICIVDDTGRITREVKVASEPGALLAVLMNASHRFKRIGLEAGPLSQWLFRALAEAGLPAICVETRHMRAVLKAQINKTDRNDARGIAQMMRVGLYRPVHVKTLRSQKLRMLLTHRKLLQSKAIAVENDLRATLRNFGLKVGMVGTARFEARIKELVENVADLVVLVEPLLVVRRVVREQIGILHRRLLAIVRDDEVCRRLMTVPGVGPVVALTYRATVDVPARFRKSKSVGAVFGLTCSRDQSGERDRPGAISRCGDEMMRAMLYEAAQAMLLRSAKWSWLKAWAMQIVRRRGMKRAIVALARRLAVIMHRIWVDGTEFRWTRETALA

SEQ ID NO: 139448 - protein, 394 aa, unidentified
MRFVGIDIAAETHVVAVVDESSALVVKPTPFGEDAAGYATLRALLGAPEDVLVAMEATGHYWQNLFAVLVAEGFAVALLNPMRTRRFAGEDLARAKTDAIDAVGIARFAAQKRPAVTRLPEAATQELRELVRLRDRLRQEFGDRTRQLHRLVDLGFPEFTRVIPDLKGRLATGLLAAYPTAAAFRGVSVLRLAALRADGTHRVGAALARALLEAARESVGQHHGPAYQLQVRYLCEDLELLRRRIDALEEDVATTLQTHEVGMLLTTITGIGVQTAARLVGELGDPARFRSAAALAAYVGVVPGTRESGKRRLTHARLAPTGHARLRAALWMPTLVAVRTNPWLRAYYARLRARGKLPKVALIAALHKLLLAIYSVAKHRRPFVPHLTVQGVEA

SEQ ID NO: 139449 - protein, 458 aa, unidentified
MSKRKRKNRGWCGSERPVLEVNAAGIDVGARAMYVAVPPDRDPEPVRVFGTFTSELQALVKWLQQCRISTVAMESTGVYWIALFQMLEDAGIQPCLVNARGLKNVPGRRTDWHDCQWLQYLHAVGLLHAAFRPAQEICAVRSIWRQRSELVAMAAQHVQHMQKALTQMNLQIHHVISDITGVTGLAILDAILAGERDPDQLARLREPSIQASPETIRESLRGDWRREHLFVLEQSRSLYRTYREQILACDREIEALLGPLPPRADPNQLPPDKSARKNKRAAGAISFDYRAEAYCLFGVDLTRIPGLQGNVMALFSEIGNDLSRFPSAAHFASWLGLCPDNDKSGGQVLWRGVRKIQQRAGQLFRLSAHSLHRSPTYLGQFLRRMKAKLGPKAATTATAHKLAVIFYTLVTRQIEYDDSIWSLRQKENRKRMENKLKRQASLLGFQLVPTAIALGVPQ

SEQ ID NO: 139450 - protein, 369 aa, unidentified
MQRKEISFKGQKVFIGIDVHKDSWRVAIAPEVGVVKGHSQKPSARELLDFLKKYYPDGEYHAVYESGFSGFSTYYALQDVGIDCIVIHAADVPTTQYEETMKTDKVDAAKLVRSLKSGLLTGIYIHKRDDIDARSVVRLRKTIQKQLGSYKSRVKHLLHSNGVTFPERFSTPGSHWSKVFIRWLKEEVVLLSATRTSLDLLIAQVESIRKTLLMATRNVRELSRSERYRHDYELLTSIPGVGINVAMTLLTEIGDINRFHNEKEFASYLGLVPTSHSSGGKVAHGEKTFRGNKYLGPQIVEASWVSIYRDRGLGCAYINYKKRMKPQEAIVRVARKLSNIIFSVLKTGQKYKPYEWDEQQKHTDLQATS

SEQ ID NO: 139451 - protein, 340 aa, unidentified
MKRYLGVDLHRNCFTVCTLKEDGQSELRKWSIHSLCDFAQEVQATDEVAVEATGNARYFCQALKERGCRLVVVNPHQFQVVSRSVKKTDAHDAKTLAEFLAKDMLPEVRMKEALPAEIASVLQTRDKLVKLRTVLKNKINNLLAGRGILIRRESLSSDKGLEQVLQAPVSDLERVELEVLVGQIRHLNDSIRRLEAAIKEQGPKLPGYESLKSIKGIGDIGGSTMLSTIGDINDFASEGKLAAYFGIVPRVQNSNATERSGRITKRGSKLGRTALVQCALIAMRYSPYLAHYYARIKAARGTGKAIIALARKFLEIIYKTLKNGWVFEDFPAFVLAPAAG

SEQ ID NO: 139452 - protein, 385 aa, unidentified
MPSDLSKSLVVLNQDSTLIAVIELSLSNWLVVGLVPGLRRQPRKKLDPDPDALLALLWRWRDEAIKAGRTIERITVAYEAGRDGFWLARWLHAHGIEAHVIHPNSIPVPREHRRAKSDRLDTELLLRGFLGWLRGEEKHCSMAQIPSIEEEDLKRPNREHQRLVNERTSLINRLKACLIRFGIRNFNPKLKKAAEQLSRLLTPEGVALPANTLAELGRDLARLQLVKEQIKTIETERVKQLTQAAQGRHATTVRSLIRVVGLGVETADMLDSEMFCRHLRDRWAAARYGGLTGSPDESGAMRREQGLARAGNSRVRRGMIQFAWRFLRFQKDSPLAQWYWQKSQSARKDIRKLMIVALARKLLIALWRMATQGVIPEGIRLREAA

SEQ ID NO: 139453 - protein, 409 aa, unidentified
MEVLITHGAGVDVHQATVVATVRVSDDRGGRRSVTETFGTMTADLLAMREWLQAYGVTHVALESTGVYWKPVYYVLEDGFTLLLINMQDLKRVPGRKTDVKDSEWLAQLLECGLLKPSFVPPPPIRELRDLTRYRVQQVRDRTQEVNRLCKVLEDAGVKLTSVLTDVMGVSGRAMVRALVEGTTDPTVLADLARGKLRQKLPLLQRALQGRFGRHHAFMIEQIFAKIDFLDDTLGRLTAEIESRLAPFEAMLTHLDTIPGGDRIGAISIVAETGGDMSRFPSAGHLCSWGAMCPGQNESAGKRHSGKTRKGNRYLRRTLIQAALGATHKNGSALQSRYHRVKRHRGHKKAVVAVGHQILEIAFYVMRDGVSYDELGGDYFDRRHAERAVRRHVRQLEALGFQVTIEKAA

SEQ ID NO: 139454 - protein, 353 aa, unidentified
MASQQNSFANVATIGIDIGKTTFHLICQDRRGAIIMRAKLSRTQLMRRLVNVPQCVIGMEPCAGAHHIARRLSELGHDVRLVPAQYVKPFLKGHKNDYRDAEAIAEAVQRPTMDFVAIKTPEQCDLLSLHRVRSRLVRQRTGTINQIRGLLLERGITAPRGPAPLRKTLNGIFAEPPADLSSRMLCLIGDLALDWRTLDARVEAVSREIEMLAENDEACQRLMTIPGIGVIISSAVVGAIGNGGAFKQGRDFAAWLGLVPKQDSTGGKTKLGGLSKRGNKYLRTLFVQAAHIVLIRKPAAAQRALWSWIERASQRLPHRNLLAIALANKLARIAWAVLARDHDYHPTANTDAA

SEQ ID NO: 139455 - protein, 355 aa, unidentified
MKQSNYLNFVNQQIYVGIDVHAKRWVVSIIVADILLCTMSQDPDTNILVKYLRRNFPGGIYNCVYEAGFSGFWIYYELNEAGVNCIVINPADVPTTNKEKDRKTDRIDSKKLARCLSLGQLEGIHVFENERYEERSIIRVRESLVKEQTRCKNRIKGLMKFFKVEVTDKDIKSHWSNKYIEFLEKVDVLHEHGKLSLTTYLSQLRYLRKTVSDVTKQIRKLSKTERYKRGVELLCTVPGISILTAMIILTEIGDIGRFRTVDKLCGYIGLIPSEHSSGEKENRNHMTRRGKGILRRIIIEASWIAIRKDPGLLMNYTELTKRMKGNRAIKTISRKMIARIMFVLKNNEPYKFLAK

SEQ ID NO: 139456 - protein, 356 aa, unidentified
MRGEYQKEKVLARGKDVYIGIDVHKEKWHVTARVDGEEVFHGSMLSEYQSLRKFLQRFKVCKIKIAYEAGPCGFGLYDKLSADEIETIVVPPSLIPVESGNKVKTDKRDSRKLAKLLEGNMLKRVYVLTEEDRANRELVRTRRQVMEHRGDVMRQIKSKLLFHGIKSPFPSKQGWTKRYVKWLRALHLEHEVVKVSFNTLIDLYEYLGSQLMKISKKVIALSRSDKYSHKVKLLRSVPGIGILIAMELLVELANIERFKTADEIASYMGLTPSEYSTGQHVRQGRITRCGNTRARVCLVESSWHLIVKDLFWRGKYLKLKYRRGAKRAIIAIARNLIIRIRRMLLNNEPYVAAAAA

SEQ ID NO: 139457 - protein, 341 aa, unidentified
MGEVSTIGLDIAKSVFQVHGVDVAGSVVIRKRVSRAKLLEYFGGLPRCLVGIEACPSAHHWGRELQALGHRVRLIAPSYVKAYLKRSKNDANDAAAICEAVTRPSMRFVPIKTKEQQTVLMLHRTRQLLVRQRTMLSNALRGHLAELGIVSAKGRNGTAELLRIIADRRVSATVCGILEVLARQYGAIGTEIASIDKNIMVLHRACEASRRLAEIPGIGPIGATALVAEIGDWKAFGSGRSLAAWIGLVPKQYTTGGKDKLGRITKQGNRYLRWLLVVGAMAVIRYARKHGTEKRPWLGRLMERRPTKVAAVALANKIARMAWAIMVRNERYQEPKLLLAA

SEQ ID NO: 139458 - protein, 347 aa, unidentified
MLHAGLDLSRRKLDVCLLSEAGEHLDQLATPPDADALRTLARRIDEVYRQPVCAVIESMTGARLVHDTLEQEGWDVEIADAQKVKGLAPLACKTDKIDSQVLAVLSQRDPVPAIWLPDPRIREERELARFRLHLVKHKSALKNRVHSTLINFGKPCPVTDLFGVEGRKLLARLQVPEPWRGNITASVELIDDLEDQIAAINRKLREGHADHPYIPLLMSAPGIGWVLAFTIAAEIGEIERFPSPEKLAGYTGLCPRVNQSGDKDRRGPLTKHGPTYLRWAMLEATMHALKHPAYAERYQRNKRRLGKQRGAKVAQVDIARRLTHAIWHMLSRNQQFAPRGAAFRLAA

SEQ ID NO: 139459 - protein, 366 aa, unidentified
MSSVTQSAGLIHLGMDTSKNKIAVGILRWDEQVPDVEMLFNDEASVRRLIDRFPDRSHLRVCYEAGPTGFSLYRLLRSMGVACDVVAPALIPKAPADRVKTDKRDCRRLARLHRAGELVAIRVPTEAEEAVRDLCRARADLVGDRTRTRHRLSKFLLRHDRIWRAEAWTARHEQWLVGQRFDDPALRATYGHYRAVLAARDAELAAIEADLAHWYTHGPFAHAVSRLAAYRGVARLGALTIASEVGDWRRFPAARTFMGFTGLVPSEYSSGESVHRGRITKAGNAHLRTQLIESAWAYQHRPNLGVVLRRRQEGADPATTARSWGAQQRLCARFRRLSSRKTSRNIVTVAIARELAGFLWAEMTAA

SEQ ID NO: 139460 - protein, 369 aa, unidentified
MATKLRYVGLDVHKDSIVVAVADSGRQPAEVFKKLANDFHLLKKALTKLGPPERLRICYEAGPTGFDLARRLTEAGYHCEVIAPSLVPQHSGKKRIKTDRRDARNLAQFYRSGSLTPICIPERQTEAMRDLERARDDAKHAERAAKHQLDKFLLRHGRNYTDGKKWTKRHWEWIARQAFPEGAQQYVLEDYVAAVKAATQRVQQLTDEIGRQVETWTLLPLVQALTALRGFQQLSAVIVAAEIGDFARFAHPSSLMDFVGLVPSESSSGEKRWQGRITGAGNGHVRRILVEAAWAYQFAPRPGREIRQRREAVAPQFKVIAEKAEQRLCRRFRALRARGKPSQKVVTAIARELAGFVWAIAQEQRRLAS

SEQ ID NO: 139461 - protein, 419 aa, unidentified
MSFKILKFNCCGLDVHKTWIYACIGITDSNNRTEYKQARFSSFTKGLNELCDWLTKYNCTDVCMESTGKYWIPVFNILEQHNLWVTLSHPKYTKPMKGNKTDRKDAKWICDLYMCGMVKPSFIPPADIRELRDLVRYRYKLTCMITGEKNRAQNCLTVSNLKLDDVFSDVFGKSSRSITEQILQHPGEKFDVAPFVHRRCKTPIEEIQAAVDGAISKEQAVKLRQCLDHIDELNKHISEVEQEILRLSDKYEAALNLMRTVPGFNKNPMTAIQVLSEIGGDMSVFPTAKHLVSWAGCCPRNDQSNQKIKSTRISRAGSYFKPVLVQVANALIKSKKHPEFITRYKRIKVRRGHKKAIIAICRMILTAIWHILTDLKPYTPEGFLESRPVKEEKTLTTSQALNLLKLRGYVIKDDPLPTS

SEQ ID NO: 139462 - protein, 470 aa, unidentified
MKSTAKKNKSQLNSHLSSEEIAAMSKKAFEEATAITWRLAEVRRCLTQNDKISLVDDKTLVIGADIGSEKHDIRAFDNRGREFSRKAFEFTNDEAGFVLAKEWMVTIRKTYHLHKIMVGMEPTGHYWFNLAAWLIKEGITVVMVNPHHVKKSKELDDNLNRKTDKKDPKVIAGLVHEGRYSIPYLPEEVYAELRNLNTLRSMNTEEKTRFINRLDRWLSIYFPEFRTVFKDVTGTGSLFLLEKAPLPEDIVSLGADGINKLWREAKLRGVGYSRALKIISAAERSIGCREGLNTARQEIRWILDGLKRYLEYDRDYLAQIEALSKQIPYVDNMLEIKGLGIRTIVGIFAEIGDISRFASVKPIQKLAGLALVEDSSGKHNGQTIISRRGRKRLRYHLYQAALSLIGHNAEFKEVYKYYLTRKENPLKKMQALMVIACKLLRVLYTMVTKGIKYDPGKLLGDIHRTQETAA

SEQ ID NO: 139463 - protein, 404 aa, unidentified
MVPVRSMVWVGIDVGKTSHYACAVDESGKVAWSQKVANEQRAIEQLIARARKGAEQVRWAIDLTSPMALMLMTLLLGAGQSVVYVPGRVVNTMTSALRGEGKTDAKDARVIAETARMRSDLSQVSMPDELVVELTQLTGYRADLMADWVRGINRLRGLLGSIFPALEAAFDYSTRTPLILVAGLCTPAEIRAASVEGVTAHLVENQAWPAGVAKTAATAVAVATEQQLALPGESGTAALVKRLARKLLDLDREIKDIDKTITERFRDHPYARIIESLPGFGPNLGAEFLVATCGNLTSFATPGRLASYAGLVPVPRDSGRVSGNMHRPKRYNRRLRRVFYLAALSSIRTSGPSRQFYDRKRAERLIHSQALLALARRLVDVLWALLRDGREFSPHSPTAVPAKA

SEQ ID NO: 139464 - protein, 342 aa, unidentified
MITFGVDAHKRTHTMVAVDDRGQAVGQTTVGTTSKDHFGLLRWAGQFGLERRWAVEDCRHLSRRLERDLLAAGERIVRVPPKLMAHIRDSARTYGKSDPIDALAVARTAQREPDLPVARLDGPDRDLRLLVDHRESLVAERTRLICRLRWHLHDPGWEPKARSLDPKRTLIEVQVRLEDRSGLVARLARDLAERCVGLTISITRLAQEITQLAEQLAPTLLALPGCGPLTAAKIVGETAGVDRFKSRDACARYNGTAPLPVWSANKARHRLSRTGNRQINAALHRIALTQARWHPSAQAMIQRRRSNGDSGREAVRILKRRLSDAVFQALRTDQRELTTLAA

SEQ ID NO: 139465 - protein, 328 aa, unidentified
MWASSPNSKAEIAYLMEYKEINVGIDTSSNQLDIYVRPTGQFFSVNNDRDGIKQAVDKILALKPTRVLIESTGRLEMDFVCAADKRGLPIVVCNPSQIRNFAKSSGRIAKTDKLDAMDIAHFGEAMKPALTVIKPEKLREISDLLAVRSQCLEMSTMQKNRLKRMPKSVHDPIRKILTAIKSELLKIDKQLDKLISSVTEWKEKRDLLLSAKGVGNVLAYTLMTELPELGKLNRKEIAALVGIAPMNRDSGRFQGKRFIRGGRHRVRTVLFISMMSAIQCHPKLKPMYERMVAAGKPKKVAIVACMRKQLTILNTMVKNNTHWDEKMA

SEQ ID NO: 139466 - protein, 404 aa, unidentified
MIFVGIDWSERHHDVCVLDAEGTVLARGRVPEGIEGVAKLHETLAEHAEQPQEVIVGIETDRGLLVGALVAAGYQVFAINPLSVDRYRDRHSTSGAKSDPGDAKVLADTVRTDRHNHRPVAGDSELASSIKLLARTHQSFIWERQRHVNRLRSALREFYPQALQALGTELASRDAIAVLLIAPTPELGRRLSRSKIAAALRRAGRQRNVGPRAAQIQRALRSDQLGVSASLEETYGVIASSLVGLIAGLNDQIAGLEQGLHRAFEQHPDAEIILSLPGLGSTLGARVLGEFGDDRTRYADARARRNYAGTSPITKASGTHRVVLARFARNERLYDACHMWAFASLTASPGSRRYYDAQRERGKTHNQALRALGNRLVGILHGCLKRGELYREDIAWRVREAEAA

SEQ ID NO: 139467 - protein, 406 aa, unidentified
MGYHTEAFIGVDTAKLRNAVAVAESGLNGQVYFYGEIDNTEAAMRKLIRKLESKYKKLTFCYEAGPTGYGLFRLIKELGHNCSVVAPSLVPRKPGDRVKTNRRDALNLAKLLRAGQLIAVWVPDERHEAMRDLVRAREAAHIDYTRNRQQVSSFLLRLGRYYPGKKTWGKAHLKWLAAQKLDNYEQRIAFEELLLAVRQSRERIERLEQAIRDSLPEWSLAPVVEALQALRGIELISAVVFMSEIGDLSRFASPRQLMAFLGLVPSEWSTGESVIRGCITKAGNRRARRILVEAAWSYRHPPRVGKEKQKKVEAVPRTVREIAWKAQTRLCGRFRKLTRKGKLSTTVTTAVARELSAFIWAINRELATKACSEQKSQPRSHQACRRAQLNQGQALRVAAERAASLE

SEQ ID NO: 139468 - protein, 342 aa, unidentified
MDSMVAIGVDTHRDSHVAVALDQFGRDLGSIAVRADASGYADLWQWASELGEPRCFAVEGTGSYGAGLTAFLVAAAGVVFECERPRRRDRKQGKSDLIDATLAAKRLLTGERLPRPRGGGVRDDLRLLLMERQGAVRARTAALNGLQAAILTGPETSRRRFWGLDGKQAAKLALKTRQRSSEIAVADAVVRRIAVRVRQLSCEIDEIDAQLQTITSDLVPELLAECGVGPVCAAQLVVSSGDPSRMRNEASFAALAGTSPVQASSGQTQRHRLNRGGDRQLNRALHIIALNRTRRHPQTAAYYQRLLSEGKTPREARRCVKRQLARYFHHKLKTTPKLALTP

SEQ ID NO: 139469 - protein, 355 aa, unidentified
MQDFTAALGKVTIGLDLGDKYSHYHTVDAMGNSTERDRLVTTPEVFRAHFSGMKPARIVVEAGTHSPWVSRLLAQLGHEVLVANPRQLPLIYCNTKKSDQTDPENLARVGRLDPDLLKPLEHRSKRTQVDLATLRARDSLVAARTKLINHVRGSVKPLGARVPACSAPHFHQKAPEFIPSELQAVLAPVVKMIEELTHEIRKYDKLIARELCGKHPATTVLQQVNGVGPLTALAFVLILADPRRFKDSRTVGAYLGLTPRKDESGEQQPQLRVSSAQYILGPFGPDSDLKRFGQALSRRGGKNAKKRAVVAVARKLAVLLHRLWLTGEVFEPLRKRPAAKRNLQAPSSSAPVTTH

SEQ ID NO: 139470 - protein, 350 aa, unidentified
MRTAIFVLGIDIGKNVCSLVGLDVSGKVVLRRRVKRETLIAMAAKLPPCIVAMEACCGAHHLGRVFAARGHEVRLMSPEYVRPYVKAQKNDDRDAEGVAEAATRPTMRFVELKAQAQLDMQTLHRSRDRLVGERTALINQLRAILLERGIVVAKGKRNLEKFLAGLLEGPDNHGLSERMRALIADMGAQWLELDHRIRAFDAEFAAFLRQSAEARLLSTIPGVGPLIASALVAAIGAGETFEHGRDLAAWLGLTPRQATTGGKPKLLGISKRGNRYLRRMLIHGARAALPSVAEYDTSLGRWLKGLLARVHRNVAVVALANKLARIAWAVLRRKEAFMAKEQPSRAIAAA

SEQ ID NO: 139471 - protein, 339 aa, unidentified
MIAVGVDTHKESHCAAALDELGQVLGEFAFTATAAGYADLRRWAESHGNPDELVFGIEGAGSWGAGLCQHLQHAGHAVVEVERPRRAERRAGKSDRIDALAAAKHVLAGEKLSTPRRRGILSAVRALLNARRSTIAERTRLLNQLQALNVTAPVALRERIGDGTGKQLERRLLTMRSRAGSDIEERAIFGVMRDLASRSRALAADAKRYEHELAELVRSLDDTLLDEPGIGPISAAKLLACDPTRFKHEAAFARCNGTAPLPASSGKTVRHRLNRGGDRQINNAIHTIAVIRSKHHPETRAYLDRRISEGKTKREALRALKRHISRELFKRLATAPLTS

SEQ ID NO: 139472 - protein, 367 aa, unidentified
MTKSITVAGQQTRIFTQKKYIVGLDLGDRWSWYCVLDASGEVVFEQKLSTTAKALREAFGAMPQSGVAMETGTHSPWVSRLLKELGHEVIVAQARKVRLIGESRKKDDRLDARTLARLARIDPELLGPIQHRSAQAQADLIMIRARAGLVRSRTALVNAARGLTKSYGERLRGCNPRNMDAEKRKGLSAELQIALEPLLRAIESLSQQILDYNERIEQMARDSYPEVARLKQVKGVGTLIALAYVLTLEDPQRFSKSRDAGCYVGLQPGRRNSGSSTPQLHISKEGDPYLRTLLVQGAQHILGPFGTDSDLRRWGLKLAERGGKNGKKRAVIAVARKLAVLLHRLWVSGEAYEPLRNQRAAELPVAA

SEQ ID NO: 139473 - protein, 320 aa, unidentified
MMPQSDLVVVGIDVAKDRVDACIRTLSERKTCPTTAPGQRSLIAWLRKHRVAKAVMEASGGYERVWARALRQAGIEVRIVDPKRVRSFAESAGRLAKNDKIDAEMIAWFAETFNEAPSQVDDPAHEEMKALVKGLRSLIDVRARLEMQKEHEAPVLVRKARARLLKKLAGEIAMIDTAIGAKIKATPAFAERAEIIRSVPGFAEATAMTLLAGLPELGQVSNEIAAALLGVAPYDDDSGKRHGQRCIKGGRRWVRNALYMPCVGAATLNNPVFKAFYERLIAKGKAPKVALVACMRKLIVILNTMIARGEKWDPKRYQVV

SEQ ID NO: 139474 - protein, 369 aa, unidentified
MSNVTTIAVDLAKNVFQLYGIDANRKVVLKKRLKRKQLLEFMANLSPCDVYMEGCGSANYWGRKFKELGHKVKLINPKYVKPYVKRNKNDLNDAAGIMSAANDPSMKFSEVKNEEQQDVQSTHRIRSRLISQRTALTNQIRGLLAEYGIILPKGIGNISKHLPRIIGNNEGDFSGLMLGNLISLHEDFMYLNKKLAIYDEKIDIMFKSNEICQRLKKLPGVGRIGATILAAVLGNGAGFKNGRHFAAFLGLVPKQHSSGEQKVLLGISKGGDSYIRTVLIHGARAAMRCSKGKGDLHSKWINHLKMRAANNVTAVALANKMARIAWAIVHGNSEYNPNHKLPEFADLSINNANEFATVHNKVRAHSLAS

SEQ ID NO: 139475 - protein, 349 aa, unidentified
MRFYNQVHRFYCGIDLHARSMYLCILDQAGAILLHQNFAADPNALRQAIAPYRDGLVIAAECMFAWYWVADLCRDEGIPFVLGHALYMKAIHGGKTKNDKIDAHKIATLLRGGTLAQAYVYPKGMRETRDLLRRRSFLVRQRALLIAHIQNEASQYNLPAFAKKLSYAANREELQVAEHFADPSVKLSIQTDLALIDAYDQQLGTLELYLASHAKIDDGNTFHRLRSIPGVGKILALILLYEIHDIRRFAGVGQFLSYARLVRGCHESAGKKKGAPGKKIGNAHLKWAFGEAACLLVRHSARAKAWLARKEKKHCKAKALAILAAKLGRTVYHLWRKGEVFDENRVFGS

SEQ ID NO: 139476 - protein, 364 aa, unidentified
MTTQEKQSTMFIGVDVHKDTHTAVGLSPFGEKVFEMTIGNEVKDFISLVEKTEVEANKTGLIPSFGLEDVHSWGERLSSFLVEVGLPVRAVAPILVDHRRQKTTHPEKNDSLDAQGVAEVMIQKIDTLPIYILSQEGGKAKQIRELSLEREWLVKERARLKNQLHILLHRIHNTGYRVKFKDPFSKKALRYWMKSMPKSTDSILAGRMKRAIRRIRDLRSEILEIESELEILIKNSGHTITTANGCGVIIAAEIIGEIGDIVRFKTPGALAKYAGCAPRQHSSGKTIRFRKTRSGNRRLNRAFHRMALSQISRMGNDAGREYFKRKISEGKTKAQALVCLRRQMVNIIWMMMKHKTAYVYCSSY

SEQ ID NO: 139477 - protein, 341 aa, unidentified
MNQVSTVGLDLAKYIFQLHGADSAGAVVFRKRLRRGQLLAFLATLPPCTVAMEACGSAHYWGREIAKLGHTVKLIAPAYVKPFVKRQKNDMADAEAICEAAQRPTMRFVALKSANQQAAAVVFRTRDLLVRQRTQAINALRGHLAEFGVIASKGLVHTSKLIAALEDPASDLPQAARGILAVLVEELRSLDERVAVLDREIARHAKENAVARRLMTVPGIGAVTAAALTALAPPADTFRRGRDFAAWLGLTPVQRSSGGKERLGKTSKMGERALRRLLIIGASAVARWAARKGVPAGSWLGRMLARKPPMLVRVALANKMARIVWALLAKGGVYRAPGAAV

SEQ ID NO: 139478 - protein, 422 aa, unidentified
MLGVGLDWAEDCHDVALGLPGKGVIEQFRIEHGPAGVARLVARCLAVEPDPAEVRVVLETRHGLLVEALVDAGFTVLPVNPDLVARRRGPAKKKDDAEDARICCLLALDQFVELRRLIPHGELGAELRAIARDDDRAARDERRLGNRLRADLLAVFPAAVDIADGDLGSAVFLRLLQRWPSAEELAAAGRDAVEALARANKHGWPDRFAERVITALAVPRLPIRPELGRAKAGSIRLATAQLLLLREQRRAWHRRMGELLLGGPRHGRTNRPKDPQPGNAFPGGEIYLSMPGLGDRLAARVAGEIGEHIEQFTTPNALQCYAGAAPVTRRSGRSEHVVARRLAYNRYLGNAVRQWAFCSLQQSAWARTFYNAKIVAGKRHHTALRALANRWLEILWHCLHRGTLYDEAIHTANRAHTVTQAA

SEQ ID NO: 139479 - protein, 342 aa, unidentified
MKQYVALDISQRETSVCVVNEAGQVIFEGKAKSDPGALTTLLRKRAPHAERIGFETGAMASWLWHELRRVDLPVVCIDARHAHAALSVRMNKSDQNDARGLAELVRIGWYREVRVKSEQSQKVRAILVARSRLVSIRRDIENQVRSMIKEYGLLFRRAIGVQFRKQVIELLGEDHQLWSVVEPLLLIHDHVCRQQGSLDDEVRRLARADETTRRLMTVPGVGVITALTFRHTIDDPSRFRSASRVGAYLGLTPRRHQSGEIDTNGRISRWGDRLLRTYLFEAATVLLYRTKKWSRLKAWGMKLAKRVGMKKAKVAIARKIAVILHCVWVDGTSFEWGQPKAA

SEQ ID NO: 139480 - protein, 356 aa, unidentified
MTTKNTKPDFTGQDIFVGIDVSKNSWKACILTQHLEHKTFTQPPKPEVLVGYLHRHFPGAHYHCAYEAGYCGFWIHDQLKALGVDCIVVNPADVPTIHKERTFKTDRIDARKLARALRNGDLTPLYVPHRAALEDRSLVRTRYSLVRKQTRCKNQIKGLLSFYGVPLPLEPSTVNWSKRFILWLEQLTMQSPSGTQALKTLIQELKYLRQMIAETTKQIRTLANEPPYYSYTVHLITIPGISSLAAMIFLTELVTLSRFRTLDQLSSYVGLVPGEHSSGEREITTGISQRRNAFLRGLIIECAWVAVRKNPALVLAFNKLCTRMPKHQAIIRIAHKLLNRIRFVLKHQTSYVPAVV

SEQ ID NO: 139481 - protein, 310 aa, unidentified
MDIIAVGIDVSKDRLDVAVHPDGPAFVVERNGAGLERLVERLKQLAPTIVAIEATGGFETVAAAAVGGAGLPIAIVNPAQVRAFAKALGQRAKTDPIDAAVIAYFAAATRAEPRPLPDEATRLLSDLVTRRRQIVEMIGAERQREKRAMSKHLKKSIARLVKALEKELLSVDTDIDDAVRSSPAWRETEDLLASVPGVGPVIARTLMAELPELGRLTRKQIAALAGLAPYTRQSGQWRGKSFIGGGRKTVRTVLFMGAMTARLHNPVLRAFFERLVAAGKPKMVALVAVARKLLTILNAMIRTKTTWQTA

SEQ ID NO: 139482 - protein, 308 aa, unidentified
MNSVYHTELSSLEETRGQFNGGKADIKLGIDVHQDFYVVVMQEGGSNPKPPQRFQKQAFLLWAAKLKSRSAEVHAVYEACGFGFSLQRQLSQLSIHCYVSCPQKLDEHNKRVKTDSLDAKALCLRLDRFVRGNREALAMVRVPSEEEERSRAIHRQREQLIKVRKMLEAQGRSLMVNHGIEPVKNWWKRNNFAALPLPAWIKELLQNSQPILIALQQKISALTLQLQVAAAFNQPRGLGAMTSVMIDREIGDWHRFNNRRQIASYTGLCPGEYSSGQHSLTKLRDQTRQPAPACGPSGVGLATGPLPA

SEQ ID NO: 139483 - protein, 424 aa, unidentified
MKLFYVGIDFSKDTFDVCCCAGISERDVCDFNKFPNSAAGMTEMLKWLKPITKCRGEKFIKSVVFCGEHTGSYSIEVTEKLAKMGYNIWLADGMDIKYATSSRRRSKTDKSDAYMISQYLCRHLDQAVFYKPLSENEKSVKALFNRHIELVKNKTVWTNRKAAKSIMAKSIGIYKSLTKSDQELVSLLQKQIDSNDRLLIKIIRQDEALDRMFQILISFPGIGPITATAIMVYTDFGRRFGNNFRAFAAYCGVCPMQNTSGTSIAKPDRVGSFCNKKMKSLLSMASLTAMHHNPQIADYAHRLLSRGKHFGVVKNNVSYKIIKILFKMLSSGNLYDPNYESQHDDNKLNKNNESEKGDTTSEITATTSCFCNEIQKLAVASSNQTDPGSDLYNLNNLNFHSDNLKMPYREKPPITSKDRTVALA

SEQ ID NO: 139484 - protein, 416 aa, unidentified
MKQHSNSVKKSEPTSKRAKSRGSVQRDTKVVLAELVGKLKEKLHPKKVAATSAGEKHQRGELRPNLDRLTVGVDLGDQWSNYCILGLAGETLAEGQLRTTQEDIAEFFQALNVARVVIEVGTHSAWVQEVMGGYGHEVLVANPRLMDGSKRRKRKNDRIDANKLARLGRVDPESLYPIQHRSREVRQDLVMLRARDALVAARTEIINTTRGLVKSMGTRLPKCSSRSFAKKGEEAVAVEMQEALLPLVRLAATLSADIKEYDKKIEELGREKYGHTALLRQVKGVGPITALAYVLTLENPERFTKSRDVGPYLGLVPKQEDSGESQPQLGISKAGDTMVRKLLVGSAHYILGPFGPDTDLRRYGLRLCERGGKNAKKRAAVAVARKLAVLLHRLWVSGEVYEPLHNAMSAPIAAAA

SEQ ID NO: 139485 - protein, 387 aa, unidentified
MAQVNDLSRSLTTFDPISTLVVVVEMSKASWLVSGVVPGVERQPLKKLEPDATALLRLIERWRNEAVRAGRPISRIALAYEAGRDGFWLARWLIARGIEAHVIHSASVAVSRERKRAKTDRLDAAMLMRVFLGWLRGERGHCGMVAIPTIEEEDARRPSRERESLVDERSRITNRMKSALARLGIRGFKPHLRKAPERLAGLRTAEGTGLPANIIEEFRRDMARLALVREQISSIEKTRAERLERAPDTGPHAMVRLLARVIGIGIETADMLVREILSRKLRDRRAVARYAGLTGSPDESGLKRREKGLAKAGNARVRRGLIQLAWRFLMFQKDSALAQWYRTRTEGPSGARKTTMIVALARKLLIALWRLVTTGEVPDGVELRPAA

SEQ ID NO: 139486 - protein, 458 aa, unidentified
MEEPQEVPADEEHERVWERVAAIDIAKASGVVCTRVPDEDRPGRRKTHVWTVQASPKAVIELGDYLRARQVQVVTLESTSDYWRIWFVLLEAAGLKVQLVNARSVKNAPGRAKTDKKDAVWLAKLTEKGLLQPSFVPPYEIRRLRELTRLRASLGHDKSRYWARLEKLLERALIKISAVLSTLDTDTARAMIEALIAGERNPRVLADLAIGKARAKRAELAAALEGRREDHHSIQARILLDNIAALNRQIDQLAGTIGELISQIPAAWGIDADGTTGPHAGTSPDSPVLPAVAQLDAITGCGIIAAQAIIAEIGLDMAVFGTPGRLVSWAKRCPQTRQSGKKTSGGKAGKGNPWLNGILGEIAASASRTDTFLGERYRRLARRRGKRKAMVAIARSILVIIFHLLSDRSVRFCDLGPDFYDTQVNRDRKIRNHIRQLQALGIEPDDLAAFLTKNPPAA

SEQ ID NO: 139487 - protein, 392 aa, unidentified
MYYIGIDIGKNYHEASIVDSSGTQIGKSFRFSSNHKGADKLLSHIANLIPNNDFVFSMEATGHYWYTIYSFLTEHRFTVYVINPIQSDCFRNFYIRQTKNDSKDSFLIADVIRFGKFTTTKLADEDILSMRQLCRHRAVTMSERTEVKLHINTILEQIFPEYEKLFSEVWGSSSIAILDKYLLPENIANADTDELLTILKENSHNRFSFNKALELKEAAATTFGIRIAQNAFAFQLKQLLDKLKLLNEQIKQLDDEIIQYYEKFDCYLHTIPSITPISAACILSEIGDISRFGNSSALVAYAGIDPTVRQSGEFNSNHNHMSKRGSSYLRHTLFLAASCCVFHSSPFYEYYQKKRSQGKHHLVAVGAVSRKLTTVVYAILKSGKPYEPIKFV

SEQ ID NO: 139488 - protein, 342 aa, unidentified
MENIGLDLHQRESQLCILIDEGEVIERRIRTTPERLTAVLGPRAPARILLEASTESEWVARHLEALGHTVIVADPNYAPMYATRSARVKTDRRDARTLADALRLQAYRPAHRSADRHRHVRADLAVRDTLVRTRTRYVALTKALVRREGFRLASGAAEHTLAKLAALPLPPTLAAELAPLVALLPGLDQEIAAADARLAQYLAGDPVVRRLATAPGIGPVTATAFVATLDEITRFATAHQLEAYLGLVPSERSSGERQRRGRITKAGNTRMRWLLVEAAWRVLRSPRADAAPLRAWAERIALRRGKRIAVVALARRLAGVLYAMWRDGTSYAPRPAARSAAA

SEQ ID NO: 139489 - protein, 399 aa, unidentified
MFIGLDWAKESHDICAVDATGTVRDRATVAHSREGLDELAGHLGRWAEQGEILVGIERPEGRLVDRILEAGYPIVVIPTFAMKDLRRRYAVGGAKSDPGDAYVIADAARTDGHRLRRLEPLSEQTKALRSVVRARDDLVHQRVAIGNQLRSALEAYWPGAAVIFADVCSEIALAFVERYPTPESAARLGEVRLASFLKKAGYSGRRPAAELLERLRSAPAGVFGVEAEARADSARAMVRVVRSLNHSIKDLDRAVVAHLGEHRDAEVFTSLPRSGRINAAQMLAEWGDCREAYPEPDAVSMLGGLCPVTHASGKHRDVAFRWACNKRMREAITTFADNSRHASPWAADIYRRAIARGCDHPHAIRILARAWVRVIWRCWQDRRPYDPALHGAAVLLEAA

SEQ ID NO: 139490 - protein, 353 aa, unidentified
MEHKYVGLDVHQSSTVAVVQDEKGKSVMESILATEAEAIRDFLKGLRGTIHVTFEEGTQAAWLYEIVKPVVAEVIVCNPRRNKLLAVGNKADRVDANKLAELLRCGQLKPVYHGTPGVRLLKELVHSYDSLVSDTTRVMNRVKAIYRGRAISCAGRDVYYQRNREQWLEKLTEPGVRQRARLLYQQLDTLRGLRREARKAMLKESRRHLAFPILKEIPVLGPIRIAQILAKVASPHRFRTKRQFWAYCGLAVVTRSSADYQFREGKAEKRKRAPMTRGLNPNFNHRLKYVFKSAALDGIHQAPFEGYYARLLVKGIRPELARLTLARKIAAVTLTLWKRGERFDELKVSEQAA

SEQ ID NO: 139491 - protein, 345 aa, unidentified
MNYCGIDIGGTLSYIYLTDKEGRKKKAGYVDTSATALEEALKPFLRSGLSVAIEAGNQTAWIHDKLKGLGAKVWVVNPAKVRLIAESRQKTDKVDAKVLCELLRIKGLPRPVHMPGRETRSLRGLLAARRQLVRARVKLNNVVRGLLRQEGIRLQAGCLKSPVGWQRLMSRTLVGSHWEVVLEAYFQSFLHLTRAIRQLEKELAKAEKSDERARRLRTIPGVGWVSALTFLSAVDKIQRFPSSRKLVGYSGLAPTVRESSERTEYGPITREGRKEIRGTWVEAAHRVVTQRTTEAKPLQRWYWKVAKRRGNKTAIVALTRKLLTVAYQMLKSGTDYDPARIGRAA

SEQ ID NO: 139492 - protein, 423 aa, unidentified
MNSGQPELAAYIGLDWADEEHAVCLRVAKTNEIREFTIKQDSKKLHDWINNLRQEFGGQNIGIAIEKSRGGLVYALMEYDFIILYPINPKALAKYRESCCVSGAKDDPSDAALLMDLIHRHRDRYTPWHPDTVETRTIQLLCEHRRTLVDEQTSLTNRLEALLKGYFPQAIDWAGDLKTVQACDFLAKWPSLSSVQKAKPTQLREFYIDHSCRRSELIEKRVRDICDAKPLTKDNAIIQSSILMVRATVDAIRTILGAIKLFNQEIEDVFPKHPDSELFQSFPGAGEVMAPRLLAAMGSDRSRFDKAAEIQQFSGIAPVTKKSGKMHYVHRRYACPRFVRQSFHEWARLSIHYCEWAQSYYEYQRAKGKRHHAAIRSLAFKWIRIVFRCWKGRTPYDEDVYMDSLRRTKPDWAVQSGLLKKVA

SEQ ID NO: 139493 - protein, 423 aa, unidentified
MAGVIIGIDPHKGSHTAFAIDGCERQLGQVRVRASARQAEVLLQWAARWPTRSWAIEGARGLGLLLAQQLIAADQRVVDVPPKLAARVRLLNSGQINKNDENDARSVAIAALRAHELPVLCAEDQTMVMRVWSRRYHDLGRLRTQVICRLHTVLCELVPGGVRKELRTSRASEVVAGLVADSPVAQAKLELARDLVADLVRIDAQRRDARRRTARAVAVSGTSTTSIDGVGPIVAGIALGYVRDIRRFTSRDHFASYNGTAPIEVSSGNRVIFRLSRRGNRQLNHAIHMAAISQISRRGGQGRAYYEKKITEGMSRKAALRALKRKISDALYQRMLDDARRREDPGGQSGNDAASSVAGSHPGTPALRTSHSRASTNPRTSTRKQAMLAPRPAPARRRTSRSAAGVQVEPRTRPRSGHGQERP

SEQ ID NO: 139494 - protein, 341 aa, unidentified
MGSYLGIDAHSKTGLELATIDAAEGQLLWRDRCRLDQRQLQEVVERAPRPCTVVLEEGELATWLHMVLSGVCEEVLVADPRHNRLIATSPDKDDPFDAFMLADLGRGGYVREVFQPPQQFAHLRLRVRHHYRLSRHVTALKNQIKACYRQQGIGVSGKAVYSPRGRQAFLKCLPGPARLAAEDLYAVLDVAKQRNEASLQCLERAARRFAPAKRMLAVPEIGPVTAATFVGYVVTPQRFPSRSHLWSYCGFGLTRRRSGSQVEPVRLRPFYNRHLKRVIKSTAQRLVGRPGDPFNASYHARLHRGMLPSRAKLAIARKLIDVLCGLWTGKEHYDPERVSIS

SEQ ID NO: 139495 - protein, 353 aa, unidentified
MEYGAIDLHKKESQVRILTESGDVIDQRIRTTRDRLTALFWGRPHARIVIEASTESEWVAQHLERLGHEVIVADPNYSLMYGHRSRRVKTDRRDVAALAEACRHGIYRCAHRRSSRQRVVQWHLNVRRELLDARTRLISVVRAITRSQGYRIAGGATDTFLTRLAALDLPVSVSESLVPVRSVMELLNQELAAADQRFEALVAEDPIVKRLTTCPSVGPITATAFVAALDNVHRFAGRRGAAQVTSYLGLVPREYSSGEQQQRGRVMRSAHPYVRVLLVQAAWRIRRSTDARAGALRTWAQAIARRRGQNIAIVALARRLTRILYAMWRDEIDYQPDRIRSARRDTAAAKPAA

SEQ ID NO: 139496 - protein, 410 aa, unidentified
MDVVYSRCAGLDIHKKTIMACVVAPGPKGKPQKTIRAFGTMTDDISALGDWLAAEQVTHVAMESTGVYWQPLWNLLEQRFALLLVNAQHIKQVPGRKTDVGDCEWIADLLRHGLLRASFVPDRAQRELRELTRYRTALLQDRAAEVNRLQKTLEGANIKLAAVASDVLGKSGRQILDALVAGGTEAGDLAQFAKGRLREKIPQLERALVGSFRPHQQFMVARHLAFIDAIDETVAQVSAEVAERLRPIDADVELLDAITGIGRRTAEVWLAEVGTDLERFPTHSHLASWAGMCPGNNESAGKRKSGKTRKGNPHLRTALVEAAQAAARKRDSYLSAQYRRLAARRGKKKAIIALGHSLLIIAYHILKRRIDFQDLGPTYFDERNRTMVERRLVRRLERLGYKVALEPVAA

SEQ ID NO: 139497 - protein, 320 aa, unidentified
MGTDKVYVGIDVSKETLDLAVHASEQQWRFANIDKGITEALTCLEELSPELVVMEATGGFEYPLAAALAVAGMPMVVINPRRVRDFARATGRLAKTDAIDARVLAHFAAAMHPESRRLPDTQEQELKAILTRRRQLIEMLTAERNRLHSARSKAVKANIQSHIAWLEKEMTHIDDDLGHSIRQSPVWQEKDDLLKSVPGVGPVLSTTLLADLPELGTLNRRRIAALVGVAPFNRDSGNFRGQRTIWGGRAVVRSALYMATLVATRHNPVIRDFYRHLLSVGKPKKLALTACMRKLLTILNALVKHQIPWHYPITGPFQIP

SEQ ID NO: 139498 - protein, 440 aa, unidentified
MLDAIKPHAAAIDVGSESLYVAVPERPVRVFDTFTLSLHALRDYLRSEGVTSVAMEATGVYWLPVYEVLEAAGLEVCVVNGAHVKSLPGRKSDMQDCQWLAELHRHGLLRGGFVPPQDIRRLRDYQRLRQDHIRMASAHIQHMQKALDRMNVKIHEVLSDLTGVSGMRVMRALLDGVRDRHVLLELCDVQIVRKKRERMLQALQGNWQAEHLFALRQALEGWEFYQRQIAACDRESTAVLEKLAASGPPPPDPAGNATAPKRLHHHAPQIPDLHRLLQRLTGGQDLTVLPALTDYSLLQLLSEVGTDMSRWPTAKHFTAWLGLAPSSRCSGKRRRREKRHRNAAGQIFCVITRSLARSTTLALGGHYRRLRAVRGPQVANIATARKLAVLFYNTIRYGLDYVEQGLEKYEALYRQQCVRRLQRNARQLGLALVPATAAVG

SEQ ID NO: 139499 - protein, 364 aa, unidentified
MKKISTAKIKSQAANKKVTIGMDLGDRSSRYCLLDEEGVVIGEGSTPTTKAGIAKVFGAMARCRVALEVGGHSPWVSLQLEEFGHEVIVANPRNVRLIGESTRKDDRLDARTLARLARIDPNLLSPVRHRGAEAQADLAVIRARRVLVRARTMLVNAARGLTKSFGERLRKCGAGQAGPTLAAELSAEIRAAVSPLLAEVEALNQRITAYDRQLEQLAKEHYPEVDRLTQVKGVGTLIALTFVLTVDDPNRFPRSREVGCYMGLRPGRRNSGKSEPQLHISKEGDSYMRSLLVQGAHYILGPFGPDCDLRRWGLKMSERGGKNAKKRALVAVARKLAVLLHKLWMSGEVYDPLRNTRQVAARAA

SEQ ID NO: 139500 - protein, 392 aa, unidentified
MIYVGIDVAKDKHDCFITNSDGEVLFKSFTIPNNREGFETLFQRIESVSDDLTKVEVGLEATGHYSYNLLGFLLNKGLPTYVINPLHTNLYRKSLSLRKTKTDKVDSRTIATMMMSDMNLKSYSDTSYHNEELKSLTRYRFDKVKERAKLKSSVSRLVCILFPELEKLVPTLHMASIYALLSEFPSADAVANAHLTRLSNLLSESSKGRYGKDTAVMFRDAARSSIGSHMPAKSLELKHTIKLIRELTIEIDEIEAAIKRIMDEEIQSPILTIPGISYRMGAMIIAEIGDFSRFDSADKILAYAGMSPSTYQSGQLDNCYSHMEKRGSRYLRYALYNATKYVCHWDKSFGAYLEKKRSEGKHYNVAISHATKKLVRLIFAMEKSGKAYLPTS

SEQ ID NO: 139501 - protein, 350 aa, unidentified
MVVLGTDVHKRTHTFVAVDQRGRKIGEKVVSATTDGHLAALAWAKTTFGEDLLWGIEDCRNLSARLERDLLSAGQQVVRVAPKLMAVQRASARTRGKSDPIDALAVAQAVLRHPDLPVATHDEVTRELKLLVDRREDLVGQRTSTINRLLGRIHELDPAQAPKKASLDRAKTQIALAAWLATVDGLLAELATDELGDIIRLTDMINALTTRISDAVHAVAPTLLALPGCGELTAAKLVGETAGITRFKSDAAFACHTGTAPIPVWSGNTAGRVRLSRAGNRQLNAALHRIALTQIRLIDSPGHTYYRKRLAQGDSNTEALRCLKRRLARVVYHRLRTDEHARHQPQTAAA

SEQ ID NO: 139502 - protein, 363 aa, unidentified
MKIIGCDFHPSFQQIAMVDTDTGEEIQMRLSHGNGEAQRFYESLSGEIVVGVESTGNMRWFQRLLARLGHTLLIGDAAAIHASHTRKQQTDKRDATQILKLLMEKRFPSIWVPSMEELDLRQLLKHRHTLVQMRTRVKNQLQHIAMNEGFQKKRKLWTKEGLEFLRNLELGPWSQRRRDDLLKILEELNEQIRQLSQAAEAEAEKQPGAQLLMSHPGVGPILSLATVLTLGEVRRFQTSKQVASYIGLIPCEASSGVRRWLGSISKQGNSFMRFLLVQAGIVAARKDGTLGRFYQRLAHKKHHGVAKVAVARKLLVRLFWMLRTNTSYPAVVVRMQGSSSHPVVEVMAEPLSGRPASRKKNKK

SEQ ID NO: 139503 - protein, 366 aa, unidentified
MKKDSIRIRNGKGDWEGNKLTIGMDLGDRTSRYCVLGEEGEVLMEASVATTQKGLSEAFGVLPPCRMAIETGQHSPWVSRHLSGLGHEVIVAHARNVRLIGESTRKDDRLDAKTLARLARIDPALLSPVRHRSAEAQAHLTRIRARAVLVGARTALVNAIRGLTKAYGERLRKCHPEQIRKELAAELSSELRTALEPLFQEVQSLTERIQHYDHEIEKIAKQHYPEVAQLQQVNGVGTLIALTYVLTVDDPHRFGKSRDLGCYIGLRPGRRNSGNSQPQLHISKEGNRYLRTLMVQGAHYILGPFGKDSDLRRWGLKLAQRGGRNAKKRAVVAVARKLSVLLHKLWVSGEVYEPLRNHREEKRAAA

SEQ ID NO: 139504 - protein, 343 aa, unidentified
MTVTIGIDPHKSTHTAVAVDRDEHQLARLTLPADRHQTDRLLAWAEPLDIDRVWAIESAAGLGRLLAQQLIASGERVVDVPPTLTARVRLLGSSKGSKNDPNDAYATAVAGLRHCGLRAVTKDGRTAILRLLADRHHDLVGLRTQSACRLHVMLRELSAGGAPIRISAAHGTRFLDAVEVDDDPVAIERKRLAGEHLADMRRLDAELASIKKRIQTAVTASSTTLTELHGVGPVVAAVVLGHVHDVTRFRTRAQFASYNGTAPIEASSASRERHRLNPRGNRQLNHAIHMIAVTQVGHDTPGRVYYLRRQADGKTRKEALRALKRRISDAVWRQLQIDARLER

SEQ ID NO: 139505 - protein, 429 aa, unidentified
MMMKNNLTSTLFVGIDVSSKTNVVCALDFEGNKLLKLSAGNNLPGADLIAKGIISCVNDNKLLHVVVALESTSFYGLHIANFLSSHEELLFFSPLVYCLNPKSIANYRKSFVDIDKTDPLDAFIIADFARVGRIQSKPWRGSQHLALQRLSRHRLHLIEAMTREKTYMVSNIYLKFSELAVLDKSERPFSNTFGVTSAAILMEYMSLEEITYASIEELVEFISLKGKNRFNDPLATAKVLQKAARDSYRLDKSLYEPLSTSIASSFNVIEAYSKEIKVIDKAIVKAVKGLNTNEYQSLVSIPGIGPVLASGILAEIGSITVFSSQDALAKYAGLTWRQNQSGNFKSDTTRMTKTGNKYLRYYLIEAANSVRNHVPEYSAFYQKKYGEVTTHNHKRALALTSRKLVRLIFGLLTKNQLYSNNIVGVQKTE

SEQ ID NO: 139506 - protein, 372 aa, unidentified
MRKDITWVGLDAHKKAINVAVLVGHERPPQEWVVENKPAAIRRLVKKLVRDGEGGEVRCCYEAGPCGYALQRRIEAEGPVICEVIAPALIPRKPGERIKTDRRDARKLAELLRAGLLTEVQAPTPEQESVRDLCRAREDAKADLLRCRHRLDKMLLRRGLVYVSGKKAWTQTHRQWLRSLQFDHAADRTVLSDYLLAIEQVEQRIQTLEQQLTLAAQSERWRGPVGWLRCFRGIDTVTAVTLVAELHGIERFHSARELMAYVELVPSEYSSSERTRRGGITKAGNRHARRMLIEATWHYRHPPRVSSALKERREGQPAAVIAIADKAQQRLYRRTRHLAARGKKPTQTVVAGARELTGFLWAALLHQHQVAT

SEQ ID NO: 139507 - protein, 315 aa, unidentified
MRDVPCFVGIDVAKAPLDIALRPSGERWAVPNDASGVAMLVDRVQTLHPTLIVLEATGGLERAVTSALAAAGLPVVVVNPRQVRDCARATGQLAKTEALDARALAHCADVIRPTPRPLPDAQTQELRALLGRRQHLIVLRTAEQNRLAGASVRLAKDIAGHIPWLNADIATLDDDLETALRASPLWRENDDVLQRAKGIGPVCARTLLRELPALGTLTRQQIAALVGVAPLNNDSGTMRGRRTMWGGRAHVRTVLSMGTLVATRYNPQIAIFSQRLLAAGNVKKVALTACMHPLLPLLNAMLKQRTPWQPQEVQS

SEQ ID NO: 139508 - protein, 322 aa, unidentified
MEGPVSDANDRSIVGVDVSKARLDLAVRPSGKRWSVDNDEAGIKLLVRQLKPYPGALVVMEATGGFEHAVAAAVSAAGFEAAIVNPRQVRDFGRAVGQLAKTDTIDADLVALFGERVKPEPRPLPDEDLQVLQALIARRRQVIEMLTMEKNRASMARATAVQLSLKRNIEWLEKQLSDVDRELGDAIKQSPIWRAKENLLKSVPGVGRIASTTCLAHLPELGSLNRKQIAALVGVAPFAHDSGSYRGRRVIWGGRAVVRNALYMATLVATRHNPVIREFYLRLIQAGKPRKVALVACMRKLLTILNAMVRNNTHWENPQLAS

SEQ ID NO: 139509 - protein, 427 aa, unidentified
MNFTQNEKLNQLSETSIVIGVDIASKLHYARAFDWRGVELGKVFKFANSAEGFKDLSAWIGQLKKQTQKDSIVIGAEPTGHYWFGLASYLKEQSIKLVLVNPFHVKRSKELDDNHPSKTDVKDPKTIAKLVIEGRYNEPYIPEGIYAELRIATACRLRIQKEMNSIKNRIQRWLKIYFPEHETVFGKFDAASSMLVLQEAPLPSDIKKLGAEGINRIWRDNKLRAVGMKRAKSLYEAAQETIGCTAGESCSRMEIMLLLQDYQNKTSQYEAIMDVLDGLCRQIPEVAKLLEIKGVGLITIAGFLSEVGEIRRFNSPKQIQKLAGLALRESSSGKHKGQTTISKRGRARLRAILFQAVMPLVAKNTEFAEIHNYYTTRVKNPLKKKQSLIALSCKLIRVFYAILMKGIDYDPQKLIKDIHRPAEYLAA

SEQ ID NO: 139510 - protein, 343 aa, unidentified
MPHLHYLEQLPGAVEDSVSGRLRTEGTLIMSKIIYKEHAGIDVSKTMLDICIRSTGEFFQVPNAETGWKQLVKRLSPLDCLIVMEATGGYEQACLHELQKSGLAAAVVNPRQARDFAKATGHLAKTDRIDAKVLAHFSEAISPEPKSPISTEHEELQQMQQRRRQLVEMLTKEKNRLHMAGKRMGKHIEESIKFIKKQMEALDQEIVAAINGDQSLSEKARLLETVKGIGKVTGILLVTGLPELGQINRKEIAALVGVAPLNRDSGSMQGKRGIWGGRASVRSAIYMATLSAVRYNPQIKRFYKRLYAAGKPTKVALIACMRKLLTVMNAMIKHGTSWQTQIC

SEQ ID NO: 139511 - protein, 343 aa, unidentified
MTNITTIGLDLAKLIFQVHGADEDGRPVVRKKLRRGQMLGFFASLSPCLIGMEACGSAHYWARELQALGHEVRLIPPQYVKPFVKTNKNDACDAEAICEALLRPTMRFASIKSAEQQSVLMLHRARELLVRQKTMLINALRGHCSEFGIVVAQGASRVKELITIIEDCQDDRLPTLACEALGSLVEQLRMVQAQIADLEKKLKVWHRASEASRRLETIPGVGVITATALVATIGDASQFHSGRQLAAWLGLVPRQHSSGGKEKLGRISKRGDGYLRKLLVHGARTVLLWSRRKKENRSAWQEALLARRPTNVVLVAMANKTARVVWVLLSRGETFRTEPCAAI

SEQ ID NO: 139512 - protein, 335 aa, unidentified
MAIVTIGLDTAKSWFQVHGVDESGQVVLRRKLARGRVLQFFAGLTPCVVGLEACGGAHFWARELAKLGHDARLMPARYVRAYVKTNKHDAADAEACCEAVQRPGMRFVPVKSEEQQGMLMIHRSRDLLVRQRTAAVNALRGHLAEYGITAAKGTARARELMSLVDTDERVPAIARDALLQLVEQIRDTERKIEAFDKQILSLARENEVCRRLMTVLTIGPFAATALTATVGDPRYFASGRHFAAWIGLVPKQYSTGGKERFGGISKRGDAYLRKLLIHGARAAVHRVRSHQRPGAWIAGLLARRHFNIATVALANKTARIAWAVMVNGSNYRAAA

SEQ ID NO: 139513 - protein, 352 aa, unidentified
MRKYYVGMDVHKLSIAIAVLDAHGKLVTRTVIETTTEAVRDFFRNLRGEIHLTFEEGNHAAWLYDIVEPLVKRVVACNPKSNRIEGSRNDRVDAVKLAELLRLNGLKPVYHGEQGTRTLKHLMRSYECLVKDITRVKNRLKALYNSQAIKQRGRELYHASKRESWLQKLPNQGQRTRAELYFQQLDELKVIKRAAQKAMVAESKRHPAYKVLSTVAELGPVRIAQIIPTVETPWRFRSKRPFWNYSGLAVVTRSTADHEFEDGRVRKRQKQVIQTRGLNPDYNRRLKSIFKGAAMHASHCGAYREYYEGLLKTGMREEMARLAVARKLSATVLAVWKSGESFDAGRILRKAV

SEQ ID NO: 139514 - protein, 357 aa, unidentified
MLSSNVKYIGLDVHKEAIAIAVLNGAGKLVMESIVETKASTLLDFLHGLRGELHVTLEEGTWAAWLYDVLKPHVQKIVVCNPRRNALLKEGSKSDRVDARKLAELLRTGMLRAVYHGENGLRTLRELARSYLTISKDQRRVMSRLKALYRSWGIPCAGRQVYAPRHREQWLSKIAHAGVRRRAELLYQQLDGLLVLRHTVRGELLAESRKHQAVKILRQVPSIGPLRATLLLALMQTPHRFRSKRQLWTYSGLGVETHDSAQHRYVDGQLQRSKKPQQIRGLNQNHNHEMKEIFKSTALSASRCAGPLQDFYAGLLAKGMKPDMARLTLARKIAAITLTLWKKGEHFDAEHLKSQAA

SEQ ID NO: 139515 - protein, 343 aa, unidentified
MKYMGIDYHKQHFVATTMNEKGKVLSTEKVSTDRDSIRHYFKKANAKGDVKAVMEACYGWEYFYDEVEDLVEELIMAHPLKTRLIAEARIKTDTIDSQTLAHLLRADLIPKAYAPAAETRDKKNLLRYRSSLTAMKVRIKNMIHAVLARNHIEDKDFKALSDKFGQKGRSYLRAVSLKGTDTMILNQYLDLLGETEGKIRAAETQIRLVCRQDKTCQLLKTVPGIGDILAVTLRYEIDDIERFVSAGKLCSYAGLVPSTYSSGNRTYQGKITKQGDKWLRWAMIEAAQRAPLNDAWLESFYMRIAKKGRKLARVAVARKLLEIIYRIWKEQKPYYHRPVPAAL

SEQ ID NO: 139516 - protein, 457 aa, unidentified
MANQSGKRKKGGAKADATEGLPPLNLHAAGIDVGSAEHYVAVPLDRDVEPVRRFGSFTADLHRMAHWLKDCRITTVVMQSTGVYWMALHDVLESHGFEVNVANARHTKTLPGRKTDVQECQWLQKLHTFGLLNNSFRPPEEIRVLRGYLRQRENLIAAAATCIQHMQKALTEMNIQLANVISDISGTTGLAILYDIVRGERDPYKLAMHKHSRIRASRQEIARSLQGTWRQELLFVLEQSLDLYQTYQQKIQTCDERIDGQLRSMEPKIDPVSEPIPEPRRGKDWRGHQSGFDLRGQLYRITGVDLTRIDGIEVQNAQTIISEVGVDRSRWKTEKHFASWLGLCPDNRISGGKVLKRGTRHVVNRASTALRLAASALLRSQSALGAKFRRLRSKLGAPKAITAMAHTLARLVYRMLKFGHDYVDRGIDFYEAKYQHQQLQRIRKQAAALHMQLIPLT

SEQ ID NO: 139517 - protein, 381 aa, unidentified
MMTMTRTTESTATPACLLLAFELSERTWKLGLSVGRGQRPRVRQIAAGAVDRLLEEIARAKVRFHLPAEAAVVSCYEAGREGFWLHRYVVAHGIENYVVDSSSIEVNRRARRAKTDGLDLAGLLALLERYVHGERRVWHVVRVPSVAEEDARHLHRQRETIQQERTRLLNRLQGLLTTQGVTVSVHADFLDRIAMVRRWDDTPLPSGLCERLRHVWAHLVFLNTQLAEVDGARAALTVDPQTETGRCVARLQTLQGIGSIGAWSLTTEIFGWRQIRNGRELGALVGVVPAPYQSGATSHDQGITRAGNRHVRRMIVQLAWSWLRYQPTSALSCWYRARFGQGRRLRRIGIVALARKLLIAWWRYLETGTIPEGAILKSTAA

SEQ ID NO: 139518 - protein, 343 aa, unidentified
MRIVGVTGGVDTHADTHVAAAVDQNGGFLGVESFPADRAGYEELLGWLVGFGELDKVGVEGTGSWGVGLTRFLTDQEIMVIEVDRPNRQTRRKVGKSDPTDAVAAARAALSGEASVTPKTRNGPVEQIRVLMVARRSAREQRIQTLNQLRHLVFTAPEPVRTRFKDRYKTGLVTEAANMRPNQGSDPVTYTTNLMIRNLARRIQAFNAEMAEIDGMLTALVQQTAPSLLALYGAGTDTAASLLVAAGDNPDRLHSEGSWAHLCGTTPLPASSGKVTRHRLNRGGDRQANAALYRIVLTRMSSHEETRRYVARRRDKGLNTAEIMRCLKRYVARQTYKHLPHMI

SEQ ID NO: 139519 - protein, 417 aa, unidentified
MSYTVAGIDIHKKVLMVVVAIAGDEVRDPAGEAIEFECRRFGTGAAERSHLVSWLREHGVTEVVMESTAQYWKPVWLDLEPHFAKLHLAQAHSNRAPKGRKNDFRDGKRLTRRLLADELILSFVPDAEQRGWRTVTRGKHQRIRDRVRLQNQLEALLEEARIKLSSVISDLLGVSGRRILQALADGETDPERLAELGDERLQCSKAELMDALTGSLEPIHRDLLKLHLEHLKLLDQQIAKLDQMAATALKRHQDAVVRVAEIPGFGADSAQQLIAEIGVDADAFKSAGNFTSWVGTCPGQDESAEQNHSSRSPKGNRFVRRILTQAAQAAVKKKGSYFQSLFRKFLPRLHYNGAIWVVANRLGRLVWKILHDGVRYIEQGQETTPAARKRRAQKMAQALRKLGYAVTLTPIPEPGRG

SEQ ID NO: 139520 - protein, 325 aa, unidentified
MTHLDKNINKEFVGVDIAKDKYDVCYNDGSRKIFSNNATGHKKFIKSLRKSDNFLVTMEPTGGYEQSLIFALQDAGHDVILASGFRVKNYANAMGYIAKNDKIDAQVIQEFSKEMYGKGKLEILMIKSANFRKIEQWLNRRAQVIKLLTAEKQRYEKCIEKVIKTHLKKSIAFHEKELKLIDEKIEKLSQKEELAKRAKKYQKIKGIGKVGANALVIYLPELGHYSNKVISALVGTAPYCRESGKYKGKSKTKGGRNKLRSILYMGVLAATSHNSIIKKFYDRLIRQGKHHNVAMIACMRKLLCILNAMERNNTEWDDNYGVANN

SEQ ID NO: 139521 - protein, 367 aa, unidentified
MDSVALSGGPIHLGLDVSKNRIAVGILRWDEQVPDTEMLFNDEPSVRRLINRFGDPGRLRVCYEAGPTGFGLYRLLGSMAVACEVIAPALIPRAPGDRVKTDRRDCRRLARLHRAGELVAIRVPTEAEEAVRDLCRARAAVVGDRTRIRHRLSKFLLRHDRVWRQTAWTLAHERWLLGQRFDDAALRSTYAHYRAMLSAREAELAAVEADLAYWYTHGPFADAVARLAAYRGVAQVGALTIASEVGDWRRFPAARTFMGFTGLVPSEYSSGDAVRRGHITKAGNTHLRTQLIESAWAYQHHPNLGVTLRRRQEHVDPATAARSWHAQQRLCARFRRLSARKTSRSVVAVAVARELAGFLWAEMTAAS

SEQ ID NO: 139522 - protein, 409 aa, unidentified
MERLIERVCGLDVHKQTVAACVRVPASKGAREQHVRTFGTTAAELLALRDWLEAHEVTHVAMESTGVYWKPIYYVLEERFTCLLVNAAHVKQVPGRKTDVQDCVWIAQLLEHGLLRGSFVPPAPIRELRDLTRYRKVLIQDRTREANRLHKLLEDAGIKLASVATDILGVSGRAMLEALVRGTTDPEVLAELARGKLRAKLPALRLALRGRFRPHHAFLVSQLLAHLDYVDETITTLSERIEEVIGPFADELARLDTIHGVARRTAEVLIAELGVDMSQFPSDRHLASWAGLCPGNNESAGKHKSGKTRRGNRWLRAALTEAALAAIRTANSAFTARYRRIMRHRGHKKAVLAVAHAMLVTAYHVLARQTTYQELGADYFDRRHGERVTRRAVQLLERQGYRVTLERAA

SEQ ID NO: 139523 - protein, 347 aa, unidentified
MIIIGCDFHARMQQIAMVDTETGEFTEQQLEHESGEAKRFYEGLKEAVLVGIESTGYTRWFAEMLGELGHELVVGEAGKIRAKQTRKQKHDRGDAEHILNLLMKGDFPRIWLPSAEERDVRVLIEHRHQLVQLRTRAMNGLQAVALNYGLRLRRRLWSKAGEQKLQKLPLREGPARRRADLLALVAQLNAWVKELDQGIAEEITRRPDAQLLLTHPGVGDLTALTTVLVLGPVERFPTTAQVTSYVGVIPEEDSTGGRQRFGHLTKQGNRLLRFLLVEAGQTACRRDPGLQRFYRRLVFRKGTAIAKVAVARKLLIRLYIMLRDKIDYQEFCRRGSHAGMLGDLALV

SEQ ID NO: 139524 - protein, 335 aa, unidentified
MKHYAGIDLSMETSHVCVVDADGCKVAAQCVDSTPEAISALLERHGPVERVVIETGRMTPWIARGLHELGVAIVCIDARQAHQSLKAMKANKTDPHDAAGLAQLARTGFYKEVHVKSPTSHGVRSVITARAHLVEARVRLDNTIRGLCATFGIRPGAGQGERFLARVQAAIAVPGLGEAVASLLRARTGLVDEIRRMDRELKAISIASPACQALMSIPGVGVQTSAAFAAAVDEAGRFKRSRTAGAYFGLVPRRHQSGELDWTGRITKQGDGTVRKLLYEAANSILTRTRQTFALKTWALKIAKRRGLKKARVALARRLAVIMHAMLRDGTLFEA

SEQ ID NO: 139525 - protein, 333 aa, unidentified
MKQVKAEKRAIGIDISKAYFDVGYMEDAVAQHEQFENNKKGFRALKKWLRKRNVRTAHFVMEATGRYGLELAEFLHQQGYAVSIVNPKQIKAYRESYLRRNKTDAADALLISEFCRNRTMPLWQPPAAEVVAIQDMERRIGSLQKIRTMEINRLKSGKLAKAVEKSLKRSIRHLEEEIEQMEKAIRELTTKHTALKAAFQLLTSVQGVGDRTAAILIGEVKDISLVASGSSLAAYVGVTPYIHESGTSVRKRPRMSKVGNARLRAALYYPTLSAMQHNPVIKAFAERLKAKGKPNKVVIIACMRKLLHIIYGVWSSGKPFDPDYEQKRQAVPA

SEQ ID NO: 139526 - protein, 322 aa, unidentified
MVSDEADRVVYQRRLPNDPVQIRAALAPHREDLVGVVIEATFNWYWLVDQLMNDGYRVHLANPAAITQYEGLKYSDDFTDAAHLAQLLRLGLLPEGYIYPAEERPVRDLSRKRMQLVQCRTAQILAIENLFSRHTGGQMRGEQVKRLDETQVRGFGFAPDVALAMQANLAVMQRLQEQIGILEKRLMERVKLQPDYVLLNSVPGIGPVLATTIMLETGTISRFTEVGNFSSYCRCVDSRRESNSRKKGAGNTKNGNRYLAWAFVEAANFAIRSCPEARRFYERKKRARNRIVAIKALAHKLARACYHMLREHKPFEIARCFG

SEQ ID NO: 139527 - protein, 346 aa, unidentified
MEASVEKVSIIGLDIAKSVFQAHGAEASGAVVFRKKINRAKLLEFFASQPPCTVAIEACGGAHHWGREMAKLGHEVKLIAPKYVKPFVKRQKNDAADAEAICEAACRPTMRFVAVKSETTQASALVFRTRDLLVRQRTQITNAMRGHLTEYGLVVPQGAGHFKKLVAHLEDPASPLPNEVRSILSLLSQTAMRLDEKISLLDKEIARRTRDDEIARRLMTIPGVGPITATAIAALAPPAATFRKGRDFAAWVGLTPLQKSTGGKQKLGATSKMGERTIRRLLIIGAAAAIHHATRRGVPPTTWLGRMLARKPRMLVTVALANKMARIVWALLVKGEDYRAPGGAAA

SEQ ID NO: 139528 - protein, 456 aa, unidentified
MRRHSCRATNGAVVPKLRVQPAAAAGLDMGAAEIWACVPAARDTQPVRVFGTFTPDLHALAAWLGQCQVTSVAMESTGVYWIPIYEILEARGMEVWVVNARHLKNVPGRKSDVQDCQWLQQLHRYGLLTASFRPAEEMRVLRTYLRQRAMLLEHRAEHIQHMQKALQQMNVQLTQVVRDITGTTGLQILRAIVAGERDPQVLAGVRHGRCHHSEAEIAKALSGQYRAEQVFALKQALALYDVYTVQVQECDTYVAQHYATIKPTSDEPPPPLGPDPKPNSHAKNAPAFDVRGCLYRMLGVDLTAIAGLEASSAQVLVAEIGTDMRKWPTEKHFASWLGLAPHNDISGGKVLRSKPLKGNRRAAQVLRLAAQTLGRTPTALGSYYRRLRARKGPASAITATAHKLARILYHVLTHRTPYQPQSQETYDQHLRQRVIRHLKRTATRLGFMLLPQPGTA

SEQ ID NO: 139529 - protein, 334 aa, unidentified
MTSVAHTRQVIVTRIICGVDVASKSLEARVGWQGTADSFPNNPEGIAALGSFCQTHQVELVAMEATGGYEQQAFALLWEQGLPVAVLNPRAVRQFAEGMGRLEKTDRIDAGTIAWYAEVRQSRPLCLASKSQQHLRALVTRLRQLTDIRTAQRNQQRLVTDRAVQASFGKMLAFLAKQIGQLEQRIAALLDQDPLWRELNQTFRSIKGVADRTVARLMAEMPEIGILSNKTISKLAGVAPLARDSGNYQGKRRVRGGRPTVREILFVVASVVARHEPDFIAFQQRLRTAGKPPKVVRIALAHKLLVRLNAKAREVRQKLAALQPSPTALPAESA

SEQ ID NO: 139530 - protein, 349 aa, unidentified
MSTFYLGIDLHLKRSYITLMDQTGKILKEKRINNQEIEEYLGSEIPKNTYAVMEATRNWAFLYDFLVEKVDRVELAHPKRLKAIASATVKTDRIDAKTLAHLARLDYLPVAYAAPKKVRDLRLYVRHRTSLVEERTQAKNRIKAVLARYNIVAPMSDLYGVKGREFLSEALEKIRPMARRVIEDLLFLIDVLNQRIQALEENLELDRNQKRIIALLKTMPGIGDINAITLLAEIGDISRFSSPKALCHWAGLTPRVRKSDQVVHHGRITKEGSPFVRAAMTSAAQIASKVSPKWYGIYEDLKPRCGKVGAKVAVARRLLGVIYYMWKRQQPYQENYRSQINEPAAKQGA

SEQ ID NO: 139531 - protein, 381 aa, unidentified
MKDLLYIGLDVHKDSISIAVAEPGRGGEIRSYGKIVNNLQAMEKAVARLRKQYGKETELHFCYEAGPCGFVLVRRLVQLGHHCIVVAPSKIPRSSGDKIKTDRRDAEKLARCHRAGDLDAIYIPEATDEAIRDLCRARTDAVDDQRRARQRLKAFLLQHGYPYEGKGHWGPAHMRYLREFVLPHPAMKTILEECLMAVNDAGARVSRCEQSMADLLQTWRLKPAVEALMAFKGFQIVAAMITVSELGALPRFEHPRQLMAYLGLVPSEHTSSDKRRQGAITKCGNPHARWLLIECSQHYARPPKVSKALSRRQEGQPTSVLKTSWSAQNRLHRRLMNLLARRVHRNKALVAVARELTGFIWEALRNLPCYEAQPDPKQNAA

SEQ ID NO: 139532 - protein, 398 aa, unidentified
MKGPVIALDVSKGSSHLRGFKSFGVPVGKTERIHHSREGFSVIREIAESLGKETGEMPSVVLESTGVYSACVVRHCQSINLAVYLISPLASAKMRKAEIRPTKTDAIDPSTIAKVFYSRELRRLPVQGGARDSLRELSRIYGSESEALTELKNRYRRLLDLIWPCLDEAWGDPFSSVPMAIVSKYGHPEILATKAKAQIARAISAGSFASKAKSESEAEKAKEYSKGHVSGVAASSPYVAEIRAKAAEIRAKDAKLDSLRKEMERIADSIPEWRCLKTVPCCSGISGLRILAEIGDVHRFETPDSLVAYAGLDPCVSQSGEISGKGLSITKKGNSVLRHQAYLVVKTMHQFSDCPITGFYDKKKSSGLSDKAAAVAASNKLLRVIYSVLSKRAEFVQQ

SEQ ID NO: 139533 - protein, 328 aa, unidentified
MYFVGIDVSKLTLDIAYCDQATKHWAKACQVKNTKPGWQTLIDWAKQQTQAPREAICMVMEATGVYHVKAAAYMAKAGLNIIVVNPGRAAEYAKSQNQVNKSDKLDAQALQQYGSQLKKVHWFTPDSPEISQLKALLSRLRQLDKDLQRERNRFEKCAFQEGSEWSRSSVQRQIQAITREQQLTQQQIDQLIQGHAHLHRNQDLMCTIKGIGKNTSQWLLPLLSAQRFNSAREVAAFLGLVPCHRHSGTSLHSRGRLSGRGNADLRARLYMPAMSAVRHDPQMKRFYQHLLAAGKPKKVALTAVMRKLVHLCYGVVKHQTPFIENYAA

SEQ ID NO: 139534 - protein, 340 aa, unidentified
MQQVTTVGLDLAKNLFQVHGADAQGRPVLKRRLAREKVREFFANLPPCLVGLEACAAAHYWARELATLGHEVRLMPPQYVRPYVKTNKHDAADAEAICEAVQRPGMRFVPVKGEEQQALLVLHRVREQLLKQRTATINALRAHLAEFGVVAAQRRTGLRELLAVVADAEDRRLPPLARELLRVLAEHLRALEERTAEVDRRLLAMARDGDACERLTAVPGIGPVIATALAATVGDARVFASGRHLAAWLGLVPRQHSSGGKERLLGISKRGDGYLRRQLMHGARALVAVSRGREGRLWSWVNDLLARRPYNVVVAAVANKLARIAWALLSRGEDYRAAAA

SEQ ID NO: 139535 - protein, 352 aa, unidentified
MAVTIVETRAEIRAITGGVDTHADVHVAAALDPVGGLLGVNEFPATAAGYTRLMSWLGGFGTVALVGIEGTGSYGAGLARHITTAGVRVVEVDRSDRQDRRRQGKSDSFDAVSAARAAQSGRARGASKGRDGAVEAIRALMVAKRSAASERTQTINQARALILTSPDDLRARFTGHTAAALVTELAALRPRPGSTVGYATRIALRELGRRAEFLDGQLERLDELIGPLVAARAPGLLALYGIGPHTAALLLIAAGDHPERLRSEAAWAHLCGAAPIPASSGKTVRRRLNPGGDRQANHALWRIVFTRLGSDPATRAYAGRRTAEGKSKKEIIRCLKRYVAREVYPHLRGTAG

SEQ ID NO: 139536 - protein, 358 aa, unidentified
MAGKVTETAVVGGVDTHKDLHVAAVVDQNNKVLGTQFFSTTRQGYRQMLAWMTSFGALKRIGVECTGTYGSGLLRYLQNAGLDVLEVTAPDRMERRKRGKSDTIDAECAAHAAFSRIRTVTPKTRNGMIESLRVLKTCRKTAISARRVALQIIHSNIISAPDELREQLRNMTRMQLIRTLGSWRPDASEYRNVTNVYRISLKSLARCYLELHDEIADLDVMIAAIVDELAPELIKRNAIGYESASQLLITAGDNPQRLRSESGFAALCGVSPVPVSSGKTNRYRLNRGGDRAANSALHIIAIGRLRTDDKTKEYVARRVAEGHTKMEAIRCLKRYISREVYTLLRNQNRQINSIPITA

SEQ ID NO: 139537 - protein, 475 aa, unidentified
MSNKLFAGIDVSLENNQLCLTDGDGSTIGKSLSFANNLPGALAMVDHLNAIMENGDFEKLTIGMEATALYWFPLLNFLSSEASFRETQAQVLPLNPKIVSNFRSSYPDVDKTDIMDSFVIADRLRFGRVPQGHVPDVNFLALQRITRFRYHLVQCASELKNYAKSFLFLTFSEWSRTKPFSDLFGATPSKLLKKFHSAQELADVSAEDLKELLWQFSKGRFRDVDAKTEEVKQSAKDSFPVPRELADQVHLILKQTLQQLELLEKHVARLDKKIAKKMKKFNNVLESIPGIGPVLSAGILAEIGDISRFPGQAQLAKYAGLTWRKNQSGNFSGDFTPLTKTGNSFLRYYLIQAAQCMITHNAEYREYYNRKFKETTRHAHKRALSLTARKLVRLVYALLSKNQLYMVPEERKRRELARKEVSKTSVPEVQSEDFQALHKPQKKTKKVKTQTVAARPKRTLPRQQEHMRGRRAVNT

SEQ ID NO: 139538 - protein, 438 aa, unidentified
MRKKKSKATKKVHFQGLPLIHPNAAGIDVGSKEHLVAVPADRDPQPVRTFQAFTPDLHELAAWLKRCGIETVALESTGIYWISLYEVLEQYGFEVRVVNARHVKHVPGRSKTDVLDCQWIQKLHSFGLLNGSFRPEAQIRKLRTYMRLRDNLVVEGSQAIHHMQKALFEMNVQLSNVISDITGESGLRIMEAILTGERDPEQLASLCSIRIKASRQTVAKSLHGNWDEALLFCLKTALETYRFSQNKIQACDKCIENQLAAFEIRRALPNATHNLRTQLHQVCGVDLTKIPGIKEQSAQIIISEVGLDMSPWNTEKQFSSFLGLCPNNLITGGKILRRATRKVYNRAADTLRLCAQSLTHSKSALGAKYRRLRARLGAPKAIVAMAHHLARLVYRMLRYGENYVEKGIEHYEHKFRLQRIKWLQKEAMSLNLQVVAVQ

SEQ ID NO: 139539 - protein, 459 aa, unidentified
MKRDNRQGNGLPAQLAAVNLHAAGIDIGAQAHWVAVPPDSDAQPVRGFGACTADLEAMAKWLQQCGVTTVAMESTGVYWIPLFELLEARGFAVVLADAREVHRAPGRPKTDVRDCQWLQRLHTYGLLAAAFRPPEQIWVLRSYLRQRAMLVTYAGQHIQHMQKALTQMNLKLQHVVSDVTSVTGLAILQAILSGERNPQKLAQLRDRHCQHSEAEIARALQGNWRAEHLFALQQAVELDEFYHRQIALCDRQIETHLQTLPDQSGGKPLAAVPHRAKRRRNEHHFAARLPLFRATGVDLTAIEGINEHTALVLLSEIGTDMSRWPTEKHFAAWLGLCPLHKISGGKVLARKVRPSANRAAAALRLAASCLHHSQSALGAFFRRLKARLGTPKAVVATAHKLARLVYRLLKHGEAYVTHGMAAYEQTYRERVVQSLARKAKALGYKLLPTTDDALQASSA

SEQ ID NO: 139540 - protein, 390 aa, unidentified
MFYLGIDIGKFNHAAALLTDKGKVIATVPSFSNTHAGFEVLLTAISSHLPRAEQLRIGMEATGPYWIPLAEWLNTHGWPPVVLNPIKTSSLRNYGVRGSKTDNIDSVLIANALRFEGDKPQQVSPKHSEELCHLTRLRADMVNDRTRVALRATSLLDRLFPELLSSFSKTLSPSCLALLSQAPTPTRVLALGEERLTALLRKASRGKLGVTRASQILNKAAVSIGVTSQALEEILPLLLEQIDLLDSQLTTLDHRITESYDQAGLHFTTIAGVGTLSAATILGEYGSVERFKQAKQMVAFAGVDPKLRDSGQHRGGVHISKRGSRYLRRALYLACQGVVRNDDYFNAIYQRHRDNGKSYKEAIIAVMNRFIHVIYAIWRDNRPYYPLTPV

SEQ ID NO: 139541 - protein, 350 aa, unidentified
MKIIGCDFHTRYQQVAMMEEATGELTERRLEHENGEARAFYASLPKPVRVGMEATGHAQWFESLLAECGHELWVGHASEIRAGVVRKQKTDTRDAAHLLDLLLQKRFPRIWIPSWAERDARQLLRHRHKLVCFRTSVKNQLHALAMSQGICRKKKLFTVRGRAELEQVSLGPWACRRREELLRMLDHLDPSIAELDRAVQEQAQSHPQAAWLMTHPGVGPVTALAFVLTIGPVERFRRSKQVVSYLGLNPCEHSSGGHQHLGSISKQGNTMMRWLLVEASQTAVRFDPALRRMYQRLKFRRGGSVAKVAIARKLAVKLYWMLRARASGAQRAPMQGSPGGTLVSGPSPIC

SEQ ID NO: 139542 - protein, 362 aa, unidentified
MRIIGCDLHTRQQTIAMLDTTTGEVVEKTLTHEGNNVREFYSKLPRPVRVGIEATGSMQWFVNLMEELGIECLVGHPAEIRAAEPRKQKHDRRDADLILTLLVENRFPVIWLPSKELQDLRSLLRHRHQWVRMRTRVQNALQAIALTNGLRRGPSLWSHDGQHTIASLPLAPHTAYRRNELQALYAKFEAEIEKLNQRVEEQACGRPGARLLMTHPGVGPVTALATEVFLGDAARFRDSKALASYVGMIPREYSSGGRQRLGGLTKQGNPLLRFLWGEAGAHAVRRDPELQRFYRRKLNQKGFGKASVAVARKLGIRLWIMLRDQIEYNEFCRRGQKQQKSSDACAGMPETRNGATSHRPVD

SEQ ID NO: 139543 - protein, 293 aa, unidentified
MIIIGCDFHTRYQEIAWLDTDTGEIHERRLEHTGDETRKFYAAFSGPVRVGIEATGYSQWFERMLRELGHEYWIGDAGAIRASVVRKQKTDRRDAAHILDLLMTNRFPRIWVPTPAERDLRQLVLHRVKLVQLRTKVQNQWQALALGQGVCRKKKLWSVRGRAELESLPLDRWAQRRRQELLQLLDQLEGSIRELHAAVEQQARQHPEAVLWMTHPGVGPVTSLAFVLTIGPVSRFARSKKVSSYLGLNPGEHSSGGHQQMGPISKQGNSMMRWLLVEAGQTAARRDPALGRM

SEQ ID NO: 139544 - protein, 350 aa, unidentified
MDATTIAVDLAKNVFEIAVANSHGRIVRRDRVNRAKFATFLREEPVAQIVMEACGSAHYWARTAQASGHRVTLLPSQYVRPYVRRHKTDRTDAEALLEAMRSGNLPHVAVKTVAQQEVLALHRLRAQWMTTRTARLNAMRGLLLEQGIAIARGARTILTEVGRLLAGEDPRLPRRLRAVLSTTRDEVRELEERVHAVERDLAGLAADDPVIQRLMRIPGVGLLTATALVATVGHIHAFRRARRFASWLGLTPREWSSGGSRHLGAITKQGDVYLRCLLTHGARAVLLMAARAAHAGRPLTRLQQWAQTVQRARGHNKATIAVANKLARIIWAVWSHDVEFSATPLRAVAA

SEQ ID NO: 139545 - protein, 417 aa, unidentified
MKPWNELTHFAALDWADDHHDLIVVDAKGQIALELTFSHTAEGWQQAQQALAGWTDLPVAIETSCGPAVDQLLQRGFVVYPVMPKAAVRYRERKRPTGSKHDRHDAWSLADALRTDGHGWRPLSPLDPLTAQLRALCRDEIALIEQRTALVNQMLAALKEYYPAALQAFDDWTAPYAWAFVLAFPTPELLIKAGKRKWEKFLHTHKLWRPQTASERLKIFTDAQNFKGSPPITAAKSLLVQSLARLLQTLEEQLAAYRARIEELFGRHPDHDLFGSLPGAGSKLAPRLLAELSGSDWRDINQVQARAGTAPVNYESGKIKRVKIRRACTLPLRATLHLWADLSRRYSAWAAAYYQAHRAKGQSHACALRCLAHRWLEIIGAMCRTHTAYDAEHHLRQIQTHGSWVLSLITKAPPIIR

SEQ ID NO: 139546 - protein, 486 aa, unidentified
MVKSPKSTPARLPKEAHNRQQRKQLERHLTSANPGLEVVHRHAAGIDVGNASHFVAVPPDRDSQPVREFGCWTADLQRLADWLKRCGIQTVVMQSTGVYWVALYDVLEQRGFQVWLVNARHTKNLPGRKSDVQESQWLMKLHTYGLLRNSFRAPEAIRGVRTIWRLRARHVVQAGRCVQHMQKALTTMNVQLANVISDISGVTGLAILRAILAGERDPQRLAKLRDLRIRASQQEIAQSLEGNWRDEVLFELQQALDAYQFWQRQIQECDLRLQSGLAALPTRVPEPTASPTPAPGVVAGSQPRKKKKKLTGNAPRFELEAELHRVCGVNLTRIEGISVMTAQTIVAELGHDLSRFPTAGHFASWLGLCPSRDVSGGKVVRQEPRHVNSRVATALRIAASTLLRSPSFLGAKYRHLRTRLGGAKAIKAMAHYLAVLVYRLLTRGQEWVDRGIQEYEHKSQQRTMVHLQRKATSLGYRLVELSETPA

SEQ ID NO: 139547 - protein, 406 aa, unidentified
MQSVIAFDVSMGKSYMVIYNAARSCMFEGEILHNRPHFEQLNKRIIDLVQKDGQVPAIVFEATGVYSRPLERFMNDHGFPYCLLNPLESKIQTATMRIHKTDKSDAHRLAQTHFTTERRIKKPQDNYFDQMRALSRYYHELDEELAMLRSRMHTLLQLTFPEMESLFTQKSELFLNILQLFPHPDYVKNLSKTVVRNRLLANTDKKLAPKTAEKKAIQLIGAAQDSYPAVDQDDIRCEQLKDYAKRSLAILRKREELIQQMVVLSKERNEYQILISIPGIGKNTAVRLIGEIGDMTRFENHKQLNAYAGIDIRRFQSGTLFYKDKINKRGNSHLRKILYFTIQNMIRQRRFGHNHFVEYYDKLKTQPYNKCHKVASIACVNKLLKCLFHLITHNLTYNYEIASVSS

SEQ ID NO: 139548 - protein, 344 aa, unidentified
MEHYAAIDVSLEWSSICVVDAAGQIVREAKVRSEREALVAFFAESGLTFARIGLEAGPLSQWLYAGLVEAGLPAILIETRHVKAALKAMTVKTDRNDARGMAQLMRMGWFRPVHAKAPMVQEIRALLTARKLLVAKLRDVESSIRGILRGFGLKVGAVSKGKFEARIRELVAGQAMLERVAEPLLRARAALRTEYATLHRDLLRTVREDAVCGRLMTVPGVGAVVAMTFRSAIDQPERFAKSKAVGAHFGLTPKKYQSGEIDRTGRISKVGDAMVRTALFEAANVMLTRAVRFSTLKAWALGGAGRHGMKKAKVALARKLAVVMHRMWVDGTIFRWGEASASAA

SEQ ID NO: 139549 - protein, 331 aa, unidentified
MKACKTAAVFGVDIGKNIFHVVGVDVRGKPVFCGKFRRDGLLKFFVNTPPVTIGMESCPGSQWLARKLQGMGHTAKIIPAQFVKPFVKSNKNDTVDAEAIAEALTRPTMRFVQLRNPEQISVQALHRVRDRFMRQRTGLINQIRGFLLEFGISIRQGASVFKLDFPRILEDTENELPHSLRCLLADLWNDLKGLEIRIEEITLAIQRTVQSSDTARRLMTVPGIGPLAASALEAAAGRGQHFKNGRFFAAWLGLVPRQYSTGGEPTLLAISKRGNTYLRRLLIHGARSCVQTCDRGKHPLGAGLPSSNNECIATKLSLHWPTKSLEWPGKF

SEQ ID NO: 139550 - protein, 417 aa, unidentified
MSRSVGRAIGLDVHRDFCEVAICEEGVVRSAGRITTSPDVLELFAVSLGRGDRVALEVTGGAWEIARILEPHVRRVIVVSPDDTGIRQARAKTDRLDARTLAKLLAAGELDAVWMPDERCRVMRRRLARREQLVRSRSRSKNEIHAVLMRRLKGRPPVSDLFGVKGRKWLRELELPVEEAESVASAMRHIEFLDAEIAEVERLIAREALRSADARRLLTVPGVNVICAASFLAAIGDVRRFRTSRQMVAYLGLDPRVRQSGSEPARGGRISKRGSASARWALVEAAWSVVRQPGPLHAFFERIRARRGHGKAVVASARKLAILFWCLLSRGEDYAHQQPSLTAKKLRLLEITAGAPTVKGKRTGVWATRERMRQAERELAQQAEASYTRTVRDWQAARPAKAAGPAKVGASVTPGHA

SEQ ID NO: 139551 - protein, 396 aa, unidentified
MKSNTQNAKIEAITEKTLVLGIDVGSETHYARAFDYRGIEYSKKPFKFSNTEAGFVTFKEWILDLKERHEKDKVVPGMEPTGHYWFNLGKFLQDNEMKPVLVNPHHVKKSKELDDNNPTKNDRKDPKVIAGLVREGRYMIPYLPDGVYADLRTASNIRFQLQAELTRIQNRISRWFNIYFPEYKTVYGKPDAKSGILILKAAPLPEDILTLGIDGVNQIWRDAKLRAVGKARAKTLIEAAKHSVGSKEGAVAARMEIRMLLEDYESRSIRLQEVMTLIEGLVKQIPMAEKLLEIKGVGIRTVSGFLAEVGDISRFNNPKELQKLAGLALVENSSGKHKGETTISRRGRKRLRYLLFEVAMSLVAKNPEFRELYNYYTTRRLNPLKKCSHLWRLQPS

SEQ ID NO: 139552 - protein, 343 aa, unidentified
MKLTRVGVDLAKQVFQVHGVDRAERPAWCKRLKRSRWIADLERDVEAGCEIGMEACGGAHHWARVLQVKGFRVKLIAPQFVKPYVKTNKTDANDAEAICEAMSRPSMRFVAVKTVEQQDLQAVHRVRSSLIRDRTAKANQLRGLVYEYGLVAPRELHALRRAVPAWLEDADNGLTVRFRALLAGLYSDLRLLDERVRELDREIAAIAREHEPVGRLEQLTGIGPLTASALYALVGDGRQYRSGRELAVALGLTPRQHSSGGKEKLLGISKRGDKYIRTLLIHGARSALRVAPNRTDRLSRWALALAERSHPNVAVTALANKMTRVVWAMLRHGTHYQPEHVAA

SEQ ID NO: 139553 - protein, 339 aa, unidentified
MKKYVLFIGVDISKKWIDVALTSDGQKDQMHHQRFSNKLKGFEKMMRWILKFIRKQNLATCFLFCMEHTGVYTFPLCHFLQEQGFDYVLDSALRIKRSLGIKRGKDDKADSMDIARYIYLHHKEVKISVLPAKVLMDLKNLLAYRNRLVKKRQAIKVAATETKAFMPDDSIMDWIMDDSAEIICLLKSKIKKVESRINELVSQDSEIKRIFDLATSVKGIGPINALQMIIHTNCFKAFDSARQFACYIGIAPFHKKSGTSLNIGAKVSPLGHKKLKAILTNGVMSAIQNDKELKAYYERKVAQGKIKYKVLNAVKNKLVSRVFATVKRGTPYVELSNYI

SEQ ID NO: 139554 - protein, 362 aa, unidentified
MERQSNFIGLDAHSRTCDVGWMTPTGKRREVWKVRTTIPELAEAIERVPRPRKLALEEGPMADWLLRQLRPLVDELVVCDPRRNALIGRDGDKTDALDALALADLYRGGYLRAVHHPDSMDREVFKRHVALYHDRVEHRVGEANKVLALVRRYGVVVRDADLADPERRATVIATLPEDPTVRLDVELLLSGYDSATDQVRRARAVLMKLAKKHEIVRRWTGVPGVRWVRAATLLAYLDTPDRFRNKSALWKYLGIGLQKRASGKGPEVLRPPTRFNRHLKNAILGAAMTAIRGKDNPFADQYKKLSERGVAPRIARRTVARTMAAVMWGMWKHGGEYQPGRVGVPDGKESARDADRPRSRPQ

SEQ ID NO: 139555 - protein, 348 aa, unidentified
MSKHTQMDKEIKVLGIDLAKQSFQVHGVDGNGKVILRKTLSREKLLEFMVQLPPCLVGMEACGGAHDFARKFQEYGHTVRLMAPQFVKPYVKSNKNDRADAEAICEAVQRPNMRFVPIKSVDQQDLQSLHRVRSMAVAHRTALINQIRGLLMEYGIIIPKGASQVRNHLPNILADTSNGLTAEMRELLIGLSSELLHSDKRVEEHDAKIKMTALNHPACLVLLAIPGIGPMIATALVAAIGDPRVFKNGREMAAWLGLVPRQHSTGGKDRLLGISKRGDVYLRTLLIHGARAAVRVADKKEDWRSRWMVDLQARRGENIAAVALANKNVRIAWALLTKGEKYQSDKAA

SEQ ID NO: 139556 - protein, 347 aa, unidentified
MNKPVTTPPATVFCGIDVSATTLAVALIAPDQPLLERQFANRPSGHKELLVWLGKRKACVRVSMEATGIYSLDLALALDAAPRVELAVLNPKLVNRFQQTLARSKTDAADAVVLAHYSQRMPFTSWHRPGLNGLQLRALARHISALVTQQSRERNRLHALKNSSTAPRAVIDDLGRSLASVARRIVKMRRAAMELIRADAQLNERFCLLTAMPGVAATSAIQLLAETVLLAPDLTARQWVAYSGLDPMHCTSGASVHKRPRISRCGNRHLRRALYMPALAAVRWDRHLKAFYEALQARHKTKLQALIAVARKLLHAIYGIFKTRTPYDGNKLFPQLNLTPELQSASR

SEQ ID NO: 139557 - protein, 339 aa, unidentified
MMDVSTIGLDLAKKVFQVHGIDASGTVVIRRALRRDRILAYFAKLPRCLIGMEACATAHYWARELRKLGHEVKLIPPAYAKAYVRRNKNDPADAAAICEAVSRPSMRFVEVKTEQQQAATGIHKVRELLMKQRTMQMNHMRGLMAEFGIVVGEGPAHVAKLVAILADPDDHRIPAPLLDGLVIVAELLRSIERKLEAIEKQLVASGRDNATARHLITIPGYGPILSTAMAAFVTNPAVFHSGGDFAASIGLVPRQDGTGGKVKLGPISKRGNGYLRRLLVNGATSVLNSKRAHQDPWLVKLLASKPRKVVAVALANKMARIGWALMMRQEDFRVVPAAA

SEQ ID NO: 139558 - protein, 367 aa, unidentified
MFKSDYKLGCDAHKHFSLFSVRGPHGQIVDRVRIDHDPGAIQSFLSQFPEDTPVALETVGNWYWIVDEIEASGCIPLLAHAHFAKKMMAHIHKTDKLDADGLATLLHNGTLPAVWIPPGDLRDERELPRTRMAFSKIRTMLKNRTHSTLAKYNLSLSDATDIFARKWRPDLLDLFEELPPETALCARQQIELLDAIQDNIDQLEARILAKIKITPSMQLIQTVPGPAKVLAIVIDREVGSIDRFPAAKNFASYSGVVPKVKASAGRAHYGRLIKQCNNYLKWAFIEAANVIVRQRHHPNWRKKYVAHLYERIRRRKGHSVAVGATARYLAEATYWVLTKEEPYKEPPRWRSAAGLSAASPSQRQART

SEQ ID NO: 139559 - protein, 382 aa, unidentified
MQTIDAINPTILLAIELSASTWLVAARVPGLEKPHLHRIDGGDTAALLAWISSLQARAARGLDATIGVVCCFEAGRDGFWLHRLLTAHGVVCHVLEPTSILVNRRARRAKTDRLDAEGMLRVLAAYLRGDRQACSMVRVPTPEEEDAKRMHRERESLVQERLRIENRIEALLFTQGIRKRPSLRSWERDLAVLRTGDGREMPSHLRVELDRLRRRLVMTLELIREVEVERDEAAETKPQDETCRKIAALCRVRGIGENFAAVLTREVFYRSFDNRRQIASYVGITPMPHQSGGMDRDRRISRAGNPRARTTMIQLAWLWLRYQPGSELAEWFRKRVGTLAGRTRRIAIVAMARKLLIALWRYAETGVVPAGAEIRAAATVAA

SEQ ID NO: 139560 - protein, 403 aa, unidentified
MAKVFIGVDPHKLSATIEVVDARETVLATGRFATDKAGYAAMRRQVAAFPDRTWAVEGSSGAGRPLAQRLLADGEMVVDVPAKLSARARLFDTGHNRKTDAHDAHAVAVVAVRTRGLRVLSYDSELEALRMLVDRREELTRARVQTVNRLQRLLAELTPGKAKKNITAGQAKTILAGVRPRDLAGRTRRRLAVEQLGELVALDKKITASSKELKTLVLARNSTLMDLTGVGPVVAARILADVGDVARFADRNRFASWTGTAPLDASSGEQIRHRLSRAGNRRANHMIHIAAASQIRHDTPGRAYYRRKLAAGKTPMEAMRCLKRRISDAIYRQLVNDAKTTAAIEVDAGPGGQSGASLQSSAAGFHPHTGTSDQPQPGPASTTLPVPTPTRKTTTSRTLPSAS

SEQ ID NO: 139561 - protein, 347 aa, unidentified
MNFYRQQHKQYCGIDLHARAMYVCMLDQAGTILIHKNLPTTPEAFLRVIAPYREDVVVAVECMFTWYWLADLCAKEGLAFVLGHALYMKAIQGGKAKHEKIDAHKIAVLLRGGMLPQASVYPAEMRATRDLLRRRCPLVRKRAELLAHIQNTNSQYNLPEIGKKLAYKANRAGVEEHFLDPSVRKTIEVEVSLIDHSDQLLGEVELYLTRTAKAHDVQTFARLHSVPGIGKILALVLLYEIQDLPRFPRVQDFGSYCRLVKCAKESGGKRLGTSGKKIGNVHLRWAFAEAAVLFLRQNQPGKEYFAKLERKHGKGKALTVLAHKLARAVYYLLTRAQAFDLNRFVPA

SEQ ID NO: 139562 - protein, 370 aa, unidentified
MKKRLLYVGLDVHKNTTDVAIATGRSNGKVRSYGKITSTLDALNKLIKKLQEGDKKLRFVYEAGPCGYQIYRHLHTKGIDCSVVAPSMIPRRSGDRIKTDRRDAINLARLFRAGELTSIYVPTTEDEAIRDLVRCRDDMKRFERKARQRLLSFLLRHGYQYSGKRNWTKGFYNWLATVGFSHSAQQVTLQEYIDVTNECSERIKRITQQIQVHVEEWNRAPFVKAYQAMRGVSLIVSTTVAAELGDMRRFQNPKQLMAYLGLIPSEHSSGKTVRRGPITKTGNSHVRRVLIEAAWTYKMQARVSNILLKRQQGLPKSVCDISWKAQTRLCARYRRLLARGKTKQTVITAIARELSAFIWAIDKEIQFAQE

SEQ ID NO: 139563 - protein, 453 aa, unidentified
MAKPMPGDHPELKMVNPNAVAIDIGSTMHMAAVNSDADAMLVRAFGTFTQDLHDLAEWFRSCDVTSVAMESTGVYWIPAFEILEAHGFEVILVNARYAKNVPGRKTDVSDAGWLRQLHSYGLLRGSFRPEAEIATLRAYMRQRERLTEYAAAHIQHMQKALMEMNLQLHHVVSDITGATGMRIIRAIVADERDPEVLAAFRDVRCKSSMDTIKAALVGNDREEHVFALTQSLELYDFYKAQIETCDRRLEAAVGALTIRADDDLAPLPKARIKGRQHNAPSFDVRAALYGVLGTDLTQIHGLGPSLALKLVAECGTDLHAWKSAKHFTSWLCLAPGNKISGGKLLSSRTRRSSSRAAALLRLAAVTIGRSDTALGAFYRRLSARIGKQKAVTATARKIAVLFYNAIRHGMAYQDQGAAAYDERHRQRVLSNLQRRAKTLGYALAPMPQELAVS

SEQ ID NO: 139564 - protein, 354 aa, unidentified
MAVASIAHAHVPARIIVGVDTHKDSHVGHAKDGLGRDLGHLEVPTTARGYAALLAWAQGFGEVTAFGVEGTSSYGIGLARYLQGQGQLVLEVIRPGRQDRRFRGKSDPIDAEVAAAAVLSGKARHLPRASAAKVEMIRALRIARTSATKARTQAINAIKALVVMAPEAVREPLRELPTARLVATCARFRVGPIDDSTTAIKAGLRSLATRYQMLDAEAGLLERQLDQLTLATDPLLRSRFGVGPDTAAALLLAAGDNPARLRSDASFSMLCGSSPLPASSGQTKRHRLNRGGDRQANAALYRIVMTRLRWHDQTKAYMRRRLNEGKSKTEVIRCLKRYVAHEIYQVLTAARERP

SEQ ID NO: 139565 - protein, 346 aa, unidentified
MPIVGGLDIHRKQITFDYLDTETGQVCRGQVCPADREHLRAWLARFAGRDDVAFAVEGCTGWRYVVEELAAAGIAAHLAEPADTAFARGRKRHAKTDKTECRHLRMLLAEGRLPECWIPPARILEARALLELYHDLRAEHTAWVQRIHAVLFHHGAPALGAGTLRTGPGVAALRAVTAEWLSPAGQLQVATALEVLEALEGRMHEVRHQLTGAARHLAGAKVLAERLYGVGPVTALAITCWLAGKDRFSSSRQAVRFAGLDVTVWSSDRKGPAGRLSRQGPPVLRWAVYEAGKTHARASAPDHAYYAQVKDRCNGKRAALSEARKILRQAHHILAELGDDALAPAA

SEQ ID NO: 139566 - protein, 365 aa, unidentified
MEIMHWIGIDDHADKWTIAYFRGDAEKPTKEFELMPDESGYRKLIAFAKTLGKKVRIVYEAGPCGYELYRRLRKAGLQCEVAAPSLTPRKPGQRVKTNRRDAAKLARYLRSNDLTLIVVPDEQRESLRDLIRARAAAQKDLVSVRHQITKFLLRHGHRFRDGRAWTLRFWRWVGQATFEGEYGQFVLDDMVAVHTERLERVARYDEEIEAAAKKPEYAPYVAAMSVLRAIDTRSAMTILAELGDLRRFATAPQLMAAVGLVPAEHSTGDKNTRLSITKTGNAHVRHIVVQAAWHYQRRITSGSAIQRRRKNQPPELLQIAHRCDQRLNRKFFRMTSRGKRSTVAAIAVARELVGFIWAIGQVLYA

SEQ ID NO: 139567 - protein, 315 aa, unidentified
MNYTTIGIDVSKNKLDVCFLPHNKVVSVPNDKSGHKQLLKLIGKNKSAIICMESTGCYHQTVSDFLAKAGCPAHIANPKHVRDYAKSCGKLAKTDKIDAHMIARFAAARDLRVSAGRDLVFAKFRSLVERRRQLIKMRSIEKTHYEKFVTIHEAGVCESINEAIAFYNDQLDLLDKQISDLLIGRVELRSVYDLLTSVCGVGVATAYDLMCDMPELGDLSPREVAALAGVAPMNCDSGAMRGQRHIRGGRFRVRGALYMACISGIRHNPVISAYYHRLRVESRKPFKVAIVACMRKLLLHLNSLCAKQKILSLGA

SEQ ID NO: 139568 - protein, 351 aa, unidentified
MSKVYIGIDLAAKYCWGATRDREGELRSIERFKTSEENLIAYVKSQEGEAVVLLEECDLAGWAQRILIPHAEVVAVCEPRANLWIHRDAVKTDKIDAKKLAEIAWLGNWRPVYHTADERIYHLHLAVKAYDRLTRRTTGLKNQIKAELRGEGIITEGAKVFGKRGRQEALAPIANPALREMIASDYELLDFLLREQAKAKGRFVRLGREIPMVRAFQEIPGVGPVGAAKFCAYVKCPHRFSDKRKLWRYSRLGITACETGGKSIRRQHLDRAGNGALKDVSRKAFMAAMRTRGDNLFKRAYARALASTGSEVHARLTVQRKILAVMWSMWRCGTPYDDNHDLKLRGLTARL

SEQ ID NO: 139569 - protein, 426 aa, unidentified
MLVLYDRVAAIDVHKDMVKVAIRVPGAKRGTRKTDVLEFRTFYGVLQAMARELRGRGVTHVVMEASGVYTDPVYYALRELDFTEVMVINPAHAKALKGHKTDAKDAIRLLDLYECGLLSGSYMPSEDLREVRDLARYRMKTVQARTSEIQRLQKTLETAGIKLSSVLSDVTGASAAAMIEALISGERRGSVMAGLAQTRLRTAGKMADLSMALAGRFTDHHALMCRLHRDRITIFDDAVKDLDAKIAPLVARYAREAELLKTLPGFGDVIVAGWLGAIGPAPYQHFATASRLASWATICPGNYMSARKSKGGRTGDGGAYIKPLLIQAAWAAVRVPGRLQARFGRLVRKFGGPRNKGARKRAITAIAHTLLKIAYSVLKTGKPYADLGADFYTRRESPDARQDYLMRQLQKLNPGCVITITPAEAA

SEQ ID NO: 139570 - protein, 400 aa, unidentified
MKGSCITIDVSKNKSHIQGFKNLNEPISKAVEISHDLKGFHQILELSLKLSGKEKLKPEVVFEATGIYHRGLQSFIEQNNLVYYIVNPLQSAKCRKQDLRTKKTDKRDCMNLSKMYYTMELRKSTIEDEKYYTLRQLSRHYEDLLNHLRKVKVSFNTTLDIVYPKYQDVFDNLYTQASIAILRKYSHPGVLAKKHPETVSSYLLKNTGHTESWCLTKSQQLNVYAKSCVSGCKATDVNTTIMIAQLDQVEYYLQLTESTLTQMIEIAKTISNFKVIRTIPGIGENLASRLIAEIGDIERFPTSKQLIAYAGIDPIIYRSGQNDGLHLKISKKGNKRLRSLLYLAVKCNLRVKRPTNTILEFYNKKTQQASPLCAKAASIACANKLLRIIYGMCISGTVFR

SEQ ID NO: 139571 - protein, 401 aa, unidentified
MSKKNTRNALDTSLSYAVIGLDLAKADCAVAAVPCSDDDLGLIDRMDYESLFEQAEKLEPTLFAMEPCCGYSQISLRLQNMGHEVKVISGHAVKNWIATHKSNQKTDLNDATALAKLALYDHDLQPIRVKNVEECRIASVQAIRIQLRTQATKSLVCFKSLCQCWGIVIRRGSLNTKKMAEAVAAVEKLLGAEVASSLMILRDAYKFTMKQINALDKLLDALVEANEQARTMKTVLGIGTQTAARLAVTTGDIKRFPMPRSYVAYFGLAPRNIITGHSGTPSPSKRGALKPVSSRGQGKVSRRGDRVARSFIIQGAATIYMLYCKDMLPECQLRRWLHEQIKRGKPYGKIIVSLAAKLLRIVWALLTYGEKFDSHKAGVPRSVLAAMEKPLKHDAAAESAA

SEQ ID NO: 139572 - protein, 315 aa, unidentified
MEKYIGIDISKATLDLYDGEKSYKVSNNREGFTFIRKLAKHKKDLVLIFEPTGVYAHALIAYCQKQSIRAVIVGSKEARDYARSIKQRSKTDKIDAKVLYRYHTQVSSEMISVPSLDTRIIQITQRRNVYDKYQHTITQLNNLIEATRKEDKILIRSIQKQIASLEKAADKLLAEIEVLLLKQEGNKVALENLQTIPGIGKKSALALLLEFIRYPKARSNEMVALMGLDPVLRDSGVFKGKSRISKQGGKHLRQKLYMATVVSIKYNDRLKLFYERLISNGKPKMVALLAAMRKLLRIAFAVVKNNEPYRALEMA

SEQ ID NO: 139573 - protein, 452 aa, unidentified
MAKSTAHTRKQNKPATQVRPEPRPDAAGIDLGATVHYVAVPPDRDKQPVRSFGTQTGDLHALSDWLIACKIKTVAMEATGVYWIPLFQILEDRGLEVCLVNARHVKNVPGRKTDVQDCQWLQYLHSVGLLHASFRPPAAVCAVRALVRHRDSLVRAGCEHLLRVQKALDQMNVQVHRAVTDITGETGLAILEAIIKGERNPEVLAQHRNYRCKKSHAEIVAALRGDWRPEHLFTLRQSFEAWQYHQKLIAECETELHKQLDGLADQTQEAAPPKVRPDKRCDEKTRQHLFEKFGVDLTAVEGVNTQTAYMFLSEVGPDVGKFASADHFASWLGLCPNDRKTGGRKIGVATRAVANRLSTALRMSAQSLHRVESPLGDWFRRMKAKLGAPGATTAAAHKLARVLYSMIKFRKPFDPARLGNPALRQARKENALRRAAKELGYALQPIQSVAVS

SEQ ID NO: 139574 - protein, 396 aa, unidentified
MQKGKNGTGMKKSSKKTKQAERKAKVARQEELVQLSALVERQPNSLVIGIDLGDKTSSYCVRTRDRQVVTEGVVATKAEAILESFREMQRQLMVMETGTHSRWVAQLLHLMGHEVIVANARKLKLISENNQKSDRVDSRLLSELGCTNVDWLHPVYQRNEGKHCDLLVVRAREALVEQRTGLINHVRGTVKSYGCRIRKCSAESFVGVAGSAIPEALQPASSGVLETLEEIGEQIYRYDAQIEHLCQTKYPETQWLRQVKGVGPVTALTYVLTIDDPHRFGCSRDVGAYLGLVPKRRQSGQRDPQLGISKTGDELLRKLLVNCAHHMMGPMGADSDLRRWGLELVAASLRAGKAKGARKRAAAAVARKLAVLLHRLWVEEEEYEPLRKRKSDEAAA

SEQ ID NO: 139575 - protein, 355 aa, unidentified
MGGLKHQKEKRSMDHFAGLDVSVKETSVCIVDDTGKIVREVKVPSEPKALLKVLTNAAYRFKRIGLEAGPLSQWLLSALAEAGLPVICVETRHMRAVLQAQINKTDRNDARGIAQMMRVGLYRPVHVKTLRSQKLRMLLTHRKLLQSKAIAVDNDLRGTLRNFGLKVGIAGKAKFEARIKELVENYPDLAVLVEPLLIVRRVLREQIVILHRRLLAIVRDDEVCRRLMTVPGVGPVVALTYRATIDVPARFRKSKAVGAVFGLTCSKYQSGEINRTGAISRCGDDMMRMMLYEAAQSMLVRSTRWSWLKAWAMQIARRRGMKKAIVALARRLAVIMHRLWIDGTEFRWTREVAAA

SEQ ID NO: 139576 - protein, 406 aa, unidentified
MTIYLGNDWSKEKHDVMIQNEQGGEVVAKVIQHNAAGFAELDELRSQLGVSAADCVVGIESAHTLLIDFLWSGGYEQIYVVPPGTVSANRGRNRQSGARNDRYDSRVIAETLRTDLAKFHPWHPGSECLQQMRVRFSQGEYWTKECNRIGNRLQEVLFRYYPAALAVFPSWPTQILCHFLIFYPRPSDAAALSLAQFTAFARNHRYPKPRLLPACYERLQAVYPVARPALAEAYADEVRPLAKALLAALRNKDENRHQIYSLFQQHEDAAIFASLPGTGTWLAPALLVKFGEDRSRFPSAGPLQALAGTCPVTYQSGKKRSVRFRRSCDHAFRHIAQQWARCAVLQSDWAASYRHKVLARSRSASHADRSLANRLLAIAWKIWQDRTTYDESVHLQNCVKRRKPLA

SEQ ID NO: 139577 - protein, 316 aa, unidentified
MSDDPIFVGIAVAKAQRDVALRPTGERWSVPTDDASIAALVARLQAVAPTLLVVEATGGSHRAAVAALVAAGRPVVVAHPRQPRDCAKATGQLAKTAALDARALAHFAEAVRPTPRPLPDGQTEALRALMTRRRQLIAMRTAELNRLDRAPAPVQAALQAHITWLDQRLTTLDDTLDTTRRASPVWRERETLYRRVPGIGPGCARTLLLDRPELGPLRRQRIAALAGGAPCNRERGTLRGHRTIWGGRAPVRATLSRGTLVAVRHNPVLKACSERLLAAGKAKKVALGACMRKLLTILNAMGKHQTPWQPREVAIA

SEQ ID NO: 139578 - protein, 341 aa, unidentified
MEITAMGIDLAKSVFQLHGVDRHGKAVLRKKLPRVQLGAFMANLSPCLIGMEACAGSNFWAREFKKAGHEVRLIPAQFVKPFVKSNKNDAADAEAICEALQRPNMRFAAPKSIEQQDIQSLHRIRKRLIGARTALINELRGLVGEYGVVLPRGPSMIRKHIGVAVQKAVEEGQMTAMSEKSILDLFEELAALDGRVKNYDDKIQSIHRAHPVCQRLSKMPGIGPITATAMIASVGNAQAFKNGRQFAAWLGLVPRQHSSGGKERLLGISKRGDTYLRMLLIHGARVVLRYRKENPQSKQEIWINNLVERRGMNRAAVALANKNARRIWVLMARDEEYREIA

SEQ ID NO: 139579 - protein, 375 aa, unidentified
MISASIERCAGIDVGKKFLAVCVMVGPLEGEPRVEIRKFGTIRAELEGLRDWLKQQGVTHAVMESTGSYWKPVFNVLEDAVKVYLANPQEVKNRKGHKTDNKDGWWLAHLLRHAMIRPSFIPPRAIRELRDLTRRRKRLLGAGTSERNRVQKILEDANVKLGNVLTDLFGVSGQLMLEALLRGQAKPEEIAQFAKGRAKKKIPAMIAALKGHQMSDHHRRMIRYSVDHMRFLEEQIAQLDKDIAATIQQAGLELQWQLLQSVPGVQETSAAAILAETGTDMSQFPSEKHISSWAGICPGNNRSAGKNRSSHTTGGNRWLRGTLTECAWAAAAKKNCFIKDKFWRITSKSGGKKAPAIVAIAHTLLSLTSVRLEVE

SEQ ID NO: 139580 - protein, 428 aa, unidentified
MAEDTTLTSQTWLVAIDIGKAFHAVLVEGGDGTRQQFRMANHVEDYDRLVVFLRGLPGPARIALEPTGDFHRTLAHRLLREGFSVVSVSSVAGARYREALFNSWDKNDPKDAHVILQLLKHGLVQHYHDPLLAGDHDLQELAKTYHQIVLARKRLADSLLNHYLPLYFPEMGRYWESTRVEWFVAFLEQFPTPAAVQALPKEAFVRAAWSVVGRKVNKQAKLEELYELAQRSIALPVAVDSVAIETFRLQLAQLRRLAELRQTLEARAHALLKDRADFQRLCSLPGVAAILALVILAEGGDLRRFPHHRQFLKYCGLDLAKCQSGQFRGRERLSKRGNARLRMAFWMAAQRAVRMNENSFRDKYERYTRHDSGNPDVRRKALTAVAAKMARVAYAVVKHDQPYHGYHEHALPSGSIPLKRAVGARATP

SEQ ID NO: 139581 - protein, 428 aa, unidentified
MSGRLGRGAGGRPRGAKMEGETVIAGVDTHKDVHVLCLLDGLGRKIRSGSFGADPEGYDRLAEAIGDPGSCMVVGVEGTASYGAGLTRRLAELGYNVVEVLRPKRDKARPGEGKSDPLDAERAARKAASGRGCSVPKSQDGWVEAVRQLYVARRLAVATSTSCVACAKSMLTTAPSALRERFRGRERPKDLMPLLARGRKAGALEESVLASLRSVAAVWKEARSQVESLDERIRALLEANAPALLGVEGCGTTTAAALVVAAGDNPGRLKGEAAFSMLCGVSPIPASSGKTDRHRLNRGGNRQANWALYEIAIKRMAYDERTRRYVARRTSEGKSRREAVRCLKRYIAREVYRVLMDPNPDGAAPEGPELAKMRKAMRVTQKQAAEGLGLSAATLGHLEHGRRRSTKLERRYYELLCELKGALPQTAS

SEQ ID NO: 139582 - protein, 432 aa, unidentified
MNPSTTANDIVATIGLDWADEKHDLCIRPQQGKPEHQTIEQTPEAVHEWIAKLRQRWPVGKIALAVETSRGAIICALMAYDFFLIYPINPKALSKYREAFYVSGAKDDPTDAALIEDMLRNHRERLRLLVPQDPNTRTLLGLCEKRRQLVDGRTAAVNCSHAELKCYYPLARELLKDLTTTLAADFLLKWPDLASLKKAGPAQMRKFFYAHNCRSEDRLKERTALLEKARPLTEDPAILTPARLMVQAMALTIKNLNQAIEKMDRHIEGLMEAHPDAFIFKSFPAAGPVLAPRLLVAFGTDRDRFASALEVAQFYGIAPVRRASGKSHVIAMRYRCPKFARQSFHEQAGCAIKVEPWARQYYDQQRARGNKHQAAVRATAFKLIRIYYRCWKTRTTYDSNTYLAALKKHGSPLAGLVEKSIKEKGEKLSKNY

SEQ ID NO: 139583 - protein, 416 aa, unidentified
MSDEDKIASIDIHPKVLMVVVGAREEEAKASEGKLQRRRFGTMASDRRSLLAWLQAQGVKEVVMESTGPYWKPIWWELEPYMRLHLAQAFSNRAPRGRKGDFRDAERLLRRLVAGELILSFVPDPEQRAWRTMTRTKTQLARERVRLYSQVDGLLQEMRIKLSNVLSDLFGASGLRILHALAGGETDPKKLAALGDDRLKCTEEQLRDALTGNVQAMQQELLKLYLQRLELVEEQTEKLEGMITQALKGHQEVVARIAEVPGFGPDSAQQVIAEVGVQASAFPSAGNLASWVGTCPGQEESGEKNRSSRSAKGNKYLRRLLTEAAQAAVKTKGSHFQAVFRRLLPRLGYKQALWAVAHHLCRMIWKILHDGVRYVEQGEYRDSKAKKQRAQTLARLLRKLGYEVKLTPIEPEAAKA

SEQ ID NO: 139584 - protein, 419 aa, unidentified
MITQQSTPPQAALVAIDIAKNRHEILIEPGSGMRRRRLSVLNSRAEHDRLVATLHALGKPVVVGFEPTGNYHRVLAHRLITEGFQTRLISSMALARTREALHNGWDKNDPKDAQVILHMLQIGASTVYNDPGCDRLNDLQELSKTHDMVSRAKTELWHRLLTHYLPLYFPEIEKFHGNSRSDWFLALLEQFPTPGSVTALSKEAFAKAAWDLVGRKVSKTRLLADIYETARSSTALPVQLDSPAIAMFRMVLAEGRSLLRQRDQIEAQAEILLANDPDAARLRQLPGIGPINALTILAEAGDLRRFGHHRQFLKFCGFDLATHQSGMFRGQTKLSKFGNARLRRSFWLAAQVAIRQRDNSFRERYGRYIAKDPENKHLRRKALTAVAAKMARVAHAIVRSGADYRPFFDRPVPGGRTSL

SEQ ID NO: 139585 - protein, 354 aa, unidentified
MIIIGCDFHTRYQQIAMARAETSELLVERRLDHASGEAHAFYRSLQDLHEPVRVGIEATGPIHWFERLLTELGHELWIGDSAKIRASEVRKQKTDERDARLILDLMLAKRFPKIWVPTPAERDLRQLLWHRHKLVCLRTMLTNQLHFLAMSQGLCRKQKLFTKKGRAELGSLALGPWASRRREELLKLLGQLDPPIAELDRAVLEEAKRRDDAVLLMTHPGIGPVTSLAFVLAIGPVTRFHRSKKIASYLGLNPSEASSGGKRRLGAISKQGNTMVRWLLIEAVYPAVRLDPELRQDYQRLKFRRGHAVAKVAIARKLAVRMYWMLRSGAAYAQLVRRQGSPGATLVDASPSLG

SEQ ID NO: 139586 - protein, 405 aa, unidentified
MADGIRWVGLDVHARESTIAIFDQATGEVVTRRVVGRPHELLAWLRGVARPARMVYEAGPTGYGLARRARAEGIELSVCAPSKTERPPADRVKTDKRDAIRLARLLAAGELTLVTIPSVEREQLRDLVRCREDIRVDLMRARHRIGKFLLRREIYYDGPGEAWSRKHRSWLTSVRFADQASCATLADYLHAHDVLIARRDQVEAELAKLALSAPCASTVARLRCLRGIDTLSALGLCCEIGEWERFDHPDQLAGYLGIVPCEHTSGAQRRLGSITKAGSTHARRLLVEASWHYRRGPAVGEHLERRQRGHAPEIINISWRAQRRLNARWRQLKDTRRKPGGIVAVAIARELAAYCWEIATWTPHPDVLPPASLPAGDPLTQAASNPGSSKKTPTTTTRRRLTNSR

SEQ ID NO: 139587 - protein, 407 aa, unidentified
MDAILESCAGLDVHQETVVACILTGSLDQKPKKVVKTFSTTTTELLALAKWLEEFNCSHVAMESTGVYWKPVWNILESCSFKQLLANSQRIKNVPGRKTDVKDAEWIAQLLRSGLIEGSFVLHDIRDLRDLTRYRKKLVQEVTQEKNRIHKILQDANIKITTYVSDIFGVSGRCILETLIQGETLTASKLRNMVFGPIKSKISDLMEALNGNVRPHHRDMIRYSWNHLLYLEETIERVERQIDECLKPFRNEVELLDTIPGVNQRAASIMIAEFGTDMSVFPNDSHLSSWSGISPGNNESAGKKKGSKTKRGNKALKGVLCECAWAASVTRNTRLSATYWRLVKRLGKNKAIVAIAHLILRIAYQILQTKTPYQELGTQFIENQEKKKEQRLIKVLESKGYQIVKAS

SEQ ID NO: 139588 - protein, 352 aa, unidentified
MDRYVGLDAHAETCTLAIMGPTGKRLTSRVVETNGHALVEAIRGIPGKIHLCLEEGTQSTWLYEILEPQVSEIVVAVPEESKGAKDDLRDAWARADELRTGRIRTRVYKAPKHMTALRSSAVAYRMATQDVVRVKNRLKAVFRSRGILAESDVYQSRLRTKWLKQLPAGHRELAEWLGRELDTLMPLREEAEERLLKEAKTHPITRKLGTAPGMGPLRTAQLVAIVATPHRFRTSRQFWSYCGLSVVTRSSSDWVRDKRGQWVRAEVQQTRGLSRRRQPVLKSIFKGAATTVLMQLMDHPLHAEYQRRLQSGIKPNLAKLTLARRIAAIVLSMWKHEEVYDAARLKVVTDKP

SEQ ID NO: 139589 - protein, 414 aa, unidentified
MVVALVDVVATWCFEPGNQQDAGTVDRHLEVLLRARVSDSFAYRVPTEAATPTTDFDRADEGGWSVMDVLHERCAGIDIGKADVKVCVRTPARNGRRHNEVRTFSAMTTDLLAMRDWLAAQQVTVVGMEATGSFWKPIFYLLESQVECWLLNAQHMKAVPGRKTDVKDAEWIAKLVEHGLVRPSFVPPQPIRELRDLTRYRTEVVRERTREAQRLHNLLEDAGIKLTSVVSDVLGKSGRAMLEALIGEPYRRHIELLATIPGISPATAEVILAEIGADITQFASAAHLASWAGICPGNYESAGKHGSGATRPGDPWLKGVLGQAAISAARGKDTYLGTRYRRLLVRRGRRRALVALQHSILTAVWHMFTNDLPYRELGGTYFLDRTARTTATRRLIGQLNHLGYQVTLNPLGAA

SEQ ID NO: 139590 - protein, 360 aa, unidentified
MHTSNVSPTTIVALDLGKYKSVACLYDGAPATARFQALTTSRAEFVRLLRQHAGATVVIEACALAGWVHDLCAERGQTCVVANTAAEAWKFKHSKRKTDRDDALRLAQLYALGQLPTVVIPAQQTRQWRALISYRQVLVGRRVRLQNRIRSFLVGQGLPAPRGAKAWTAPGLDGIGQHAKALADCAADELWRGLLLLALTELRQVRQLLDQAEQRLDQLAADDAGVQTLQTIPGVGPRTAETVVAYLGDPQRFDNGKQVSAYGGLVPRQYQSGETGRRGRITRRGPALLRKLPVECARVMLRYNPWARAVYRRLSHGTARKKQAIVALARKLLVRCWAMLRDGTPWRDDTPQEATAPVPA

SEQ ID NO: 139591 - protein, 347 aa, unidentified
MEEITLISIDLAKNIFRINCVDKKGKRVMNKNLHRDSLLRFLATAPQCTVAMEACTSSHYWGRAVASLGHTVKLIHPHYVTPYRLGDKNDANDAAAICAAALRPDMRFVRLRSQRQSDIQSLHRVRSGLVQERTATINRVRALLAENGIVIKQGPSAVFTLLPGILDDESNGLSTLMRRILRSQHAHLLHLREQIKEFAGTLKTLIIEDDDCKRLMEIPGIGPLTATMLASEIGNGSSFSRGRSFAAYIGLVPRQHSSGGKNLLLGISKRGNRHLRTLLVHCARTALRTIVLGKKTPFGGAIERWVLQVMERRGKHKAIVALAAKLARVACSMLSRGTSFQNAASAC

SEQ ID NO: 139592 - protein, 346 aa, unidentified
MKILALDLGNYKSVGCIYEMASISHKFTSVVTTPKGLHDLLVEEEPDRVVIEICPLAGWVSDLVRALGIELQVASTTHDAWRWKNVKRKNDRQDALKLAQLSALGQLTLVHVPEQGVRQWRSLINYRGRLVSRRTKIQNHIRALLLRQAEPMVSGRSAWTRTGIAQLEALARPLKEVEREELWRGELGLELEGLKALVEPLRQVEARLDELGVADQRVQLLRSIPGVGPRGAEALAAVIDKAQRFKRGKELGAYLGLVPKQIQSGESNRLGRITRQGNRLLRSLLVEISWSGLRYNSWMRSVYERVRRGSKARKKIAIVAVARRLLIRCWAMLRDGTTWRLANSGA

SEQ ID NO: 139593 - protein, 349 aa, unidentified
MIRNKPRGATVYGIDLGKNIFHVVGTDPAGNVVQRVKFRRDTLRAFFERAERAVVGMEACPGSQWLARKLQAMGHTVRIIPAQFVKPYVKSHKNDTIDAAAIAEAVTRPTMRFVQVKQPEQVDLQSLHRIRDQMVGSRTRLICQMRAFCLEYGVAIRQGAGLFKSDLPRVIADECNDLTPTMRRLLNELFEDLMRLEKRIADITREIEALAARDEKARRLMTIPGIGPLGATALLAAAGNGQQFKKARDMAAWLGLVPQQYSTGGKTQMFGISKRGNRYLRRLLIHGARSCVMHLDRSRDRLGAWLRQLHSRMHVNKVTVALAAKIARIAWVVLNRPGAIYERRDPALA

SEQ ID NO: 139594 - protein, 344 aa, unidentified
MNVHKVRPLKTKGKSLSVEDFDHFVAVDWSMKTMAVAHMGRRRKEPKVFEHSSNVTVLKEYLRSLKGRTILTIEETTTAQWLYVELRDCVDRILVCNPRHNRLLCDGPKTDKIDASKLCTLLRNGLLKEVYHTSDELYDLRLLVSAYVDLVQAGVRVLNQRTALERGHREESRHAAFILNPVSKSIELYEQSKEQYEAKFHAISTQNRSMKLLLPVSGIGEIGAAKVVATVIDAHRFPKANHYLSYCGLVKHEKLSGGRSYGRRKAPYCHLLKSVYKTAAMAAIAGNNPIREYYDHLVSNGVAEHNARHAVARYIARITYGILKTGTPYEPYRWRAHNTKRDVA

SEQ ID NO: 139595 - protein, 419 aa, unidentified
MSKSMFCGCDVALENNTIWLMLDDGSQPVKLFNVDNNQLGAEVLVERVYNIAKEHCVSDILIGTEATSMYDWHLLEYLAESKLAFEFNLKLYRFNAKWIKNFKKSLAPRGKTDPIDSFAIAERLRMGRLPKEYVPDIKYQPLRKLTRFRFHLQQQIAREKDFFLANLFLKCSAYSSVKPFGSTFSATSLAVINDFFSVDELAAMPIEELTEFILEKGKSHFSKPGEIVDNLKRVARESYRLKPELAPTVNLILASTYNNIRCYKDQVKLVDEAIAENLKAFKHTLESIPGIGPVYAAGILAEIGDIHRFPNDSALAQFTGLTWPKHQSGKFQAEETRMSHTGNQYLRYYLVEAANSVKRCDATYKAFYEKKYAESSKHHHKRALVLTARKLVRLVWTLLTRQVLYQPGYCSFEDLSKIN

SEQ ID NO: 139596 - protein, 416 aa, unidentified
MFKIIRFNCCGLDVHKTWIYACIGITDANFRTEYFEARFSSFPKDLRRLAAWLQEYKCEEVCMESSGKYWIPVFNALETTCKVTLAHPKYTKPQKGNKTDRKDARWICDLFMCNMIKPSFIPPPDIRHLRDLIRYRTKLTNMLTSEKNRAQNCLTVSSLKLDDVFSDVFGKSARSITEYILAHPGKKFDVTPFIDKRCKTPIDQIQDAVDGAICPEQAVKLRECLNHIDELNTHRDRIEQEILTLVEPYSVYLDLIRTVPGMNKDPMTAILILSEIGSDMSVFPTAKNLVSWAGCCPRNDKSAKHVKSTRISQAGSCLKPRLVQVANALLKSKDHPEITERYRRIKSHRGHKKAVIAVCKMLLTAIWNILSTGEAYNASAYLIQTPRPTVETKVLTQKQALELLRLRGYVIKEEPA

SEQ ID NO: 139597 - protein, 355 aa, unidentified
MKNQAIQYLAFDVHQATTVATVRDEHGAIRLRATVPTEASAILGLVRGLGGRVHIAFEEGTQAQWLHDLLEPHAERVIVCNVRGRSETTNKSDRIDADGLSEMLRVGSVKSVYHGASGMQTLKELVRCYVNLVDDSTRVMLRIKALFRARAIPTPGTSVYRVSNRGAWLAKIESRGARMRAASLLWQLDSLLELRPKAKSDMIAEARRQAGWKVLRSIPFFGPVRVALLLAIMATPFRFRTKRQLWPYAGLAVITRSSGDEDFVNGKLRRRRRAPLTRGLNRNHNPALKSVFKGAANAAAAKPGPLKDFYDACVGRGVREELAKVTLARKISSIALRLWKEGELWDPDKLTMQTT

SEQ ID NO: 139598 - protein, 404 aa, unidentified
MWYVGLDWADTHHDVEVPYLAGKRMGARRFAHSHDGLHELKQFVLSIAASPENLACIVETTHGLLISFLLEAGIPVYPVNPKTANQLRKAAGAKTDQIDAHLLAKLGRLDLAELRRLAPDSETVQELKTLTRDQDALIQTQTRLVNQLTACLKDYYPAALHLFAKLQQRSTLVFLQAYPTPQAAQAASVEELTATLRAGKHTNPTKAAPKIFEELHRPQLVASEVIVRAKSRLLLSLVKQLLLVIQEIASYDKAIRSLFLRHDDHALWSSLPGEGLRLAPRLLAEWGEDHSRYADAGSRQTLAGTAPVPFQSGNYAKAHKRFACVKPLRNALHQFAWQSTRQEAWALAYYQRKRAEGKTHSMAVRALANVWVRIIYRMWVSHTSYQTATFEAARLAHAPRPHAA

SEQ ID NO: 139599 - protein, 345 aa, unidentified
MQYVGIDYAKLRSHFTVTTPEGRVMKRGYVANTPEALATFMDALPPDQRAVVIEACRNWTVIHDLIEPYAQAITLAHPLKVKAIASARIKTDAIDSRTLTDLLRADLIPAAHIRPPAVRARQHVLRQRAFCTKLRTSVRNQIHTLLDRQAPAGRAAYHAFKDVFTKAGRAWMQTIDLPEAERMLLTRYLAVEQTLTEQRAATTAEVTAWVTEDRAMQLVDSIPGIGAILAALIAVEIDGIRRFGRAGQLASYAGLVPSTHSSGTVTRHGPITKQGNRWLRWALIEAVWPAIQCNAALRRFYERIKARRGANPAKVATARKLCELVFQVLTRQTPFEVTRRVVQTT

SEQ ID NO: 139600 - protein, 442 aa, unidentified
MSKDVEEIDEDDDEELLERAAAIDVAKASGKVCVRIPGAKRRITRVWDVAATTGAIMALADELVDLCIERVVLEATSDYWRSFFYLLEARGLCVWLVNAKDVKNVPGRPKTDKLDAIWLAKLNERGMLRPSFVPPAEIRALRDYTRLRADLVAERTRVKQRVEKLLEDALVKLSSVATDIFGVSGRAMLAALIEGERDPEVLAELARQRLRAKIPALKEALVGRFDEHHAELLTILLRQLDALSADIDALGRRIDELIASIPAAQAPVDPETGEIGGSGGLSVLERLDEVTGIGLAAAQVIVAEIGLDMAQFPTPGHLVSWAKVAPRTVQSGPRSRSGKTGKGNRYLKRVLGDAAAAAAKTDTFLGARYRRLIKRTGKMKALVAIERSILVIVWHLLDDPNARFVDLGADFYDRRIDKDRRTRDLVRQLKALGHEVTLSPAA

SEQ ID NO: 139601 - protein, 344 aa, unidentified
MVYYAGLDVSLRSCAVCVVDGNGAVLHERDLPCEIEEIAGYLTALSFPIERIGFESGTLSQHLFYGLKAEGFDVVCMEARQVSAALSAMRNKTDRNDARGIAQILRTGWFSPVHMKSREAHGVRALLSTRKALLSKTIDLANEVRGLLKIFGIRLPKTVKHGSFDGVVRPMIEMDEVLADAMLPLLDARLVLYQHFLELDRRVKRAASQDEVCMRMMTVPGVGPIAALTFKAAVDDPARFKRSRTVAAHFGLTPRRYQSGERDNPGRISKAGDRDVRATLYAAANALLMRTMAGSQIKSWGMRLMRTKGRRRAVVAVARKLAVLLHRMWADGTEFRSEKVEGMA

SEQ ID NO: 139602 - protein, 391 aa, unidentified
MNKLIRIGLDTSKSVFVLHGVDTAEQPVLRRKLRRQQVVEFFGKLAPTKIGLEACGASHHWARELAALGHEVVLLPPQYVKPYVKRNKNDAADAAAICEAMSRPTMRFVPAKTVEQQAALMLAGTRDALIRRRTQLSNMIRGYAAEFGLTAARGLAKIAPLLARIAASATLPELAKELFAGHGREYADLQAQIRQIEGRLMAWHKDNEASRRLKEVPGIGPIGASLLAMKVADPHAFRSGRDFAAWIGLTPKDHSTAGRKRLGVITRAGDEALRSVLVVGATAVIQQVKRGRARAWPWLIDLLRRKPPKLAAVALANKMARVAWKLMVSGERFKRARFLREVAAGAAALRIVGATRHAPLAHHKPSCARQPPRPARPAHNEFGARAILASR

SEQ ID NO: 139603 - protein, 319 aa, unidentified
MTTSSVVVGVDVAKDRLDVAVRPSGEAWSEANDEAGITALVARLRPLGPALIVCEATGGFERAAIAALAAAGLPVVVANPRQVRDFARATGQLAKTDQLDAAILALFAERVRPTPRPLPDAAAQLLDAVLTRRRQLLEMLVAEKNRLGFAPKPLHRGIQAHIRWLERQLDDVTKELAGLIEASPVWRAKDDLLQSVPGVGLIVSSTLLGELPELGTLSHKQIAALVGVAPLARDSGTLRGKRLVWGGRASVRTALFMAALCGRRWNPQLKVFYERLKAAGKPTKVALIACARKLLTILNAMVRDRARWAAPAPSVQYSC

SEQ ID NO: 139604 - protein, 389 aa, unidentified
MIYVGIDVAKDKHDCCILGTEADKLYPVFTIPNNKAGFDELYEKIFSVTNDKTKIKVGLEATGHYSLNLLGSLIDKGLPTCVINPLHTNLYRKGLSLRKTKTDKVDARSIAMMLMTNKTLKPYLDTSYHSEELKSLTRYRFDKVQERAKLKSSVARLVNILFPELEKLFPSLHMASVYALLSKLPGASYITECHLTHLKNLLETASKGHYGRDMAITLRNTARDSIGSVIPAKSMELKHTIHLIEVMTEEIDEIEDSIKSIMDTCNSPIMTIPGISYRMGAMILAEIGDFTRFNYADQILAFAGLSPSTYQSGQLDSSYSHMEKRGSRYLRYALFNAAKFVCKWDENFGAYLSKKIGEGKHYNVAIGHATKKLVRTIYRMELTGEAYRR

SEQ ID NO: 139605 - protein, 440 aa, unidentified
MGQIPATVNERRRKRTHMVKNRIPVCHVAVCSTGRLLNSMITMNDKDQNKPKTKDKRIIGMDMHPDVFSAAALRGANAAQTQTEWVHDRQPVPKLEAWAEKHLGQTDTVVLEASANSFEIAARLHRIGITAVVLESAQAAKIRENYCNDDRHSAVKLARVYLSGLAKIVWTPDAVTRERREVLYAHRNAVKDTTRCRNRIRAQLNEYCVRLPAGTRLGEESGLKKALSMKAWTPLQESLIRAKFAQLWESEKTRRQMEETMIHELLGQPGWKRLWRLMGVGVCTAFALMALIGDINRFPTAKKLAGYIGLAPGKQQSGNDAKGQSLGIGFGGRGDMRALLVQGAHNAMQNRASPLHKWGWKLAMRKERNVAVAAVARKLCVSAWHLLKGHYSELNETPGQLKAKLLSIATQLGKKQLKKMKYKSREAFVNAQLQTIFIPT

SEQ ID NO: 139606 - protein, 438 aa, unidentified
MELSKCNETVKVSVGIDVSKGHSTVSFFRTGDKSPSKPFTINHDIPDLKSLERKLDRYKANGTLRIYMECTGRYHLGLANGLYKDGYTVYAVNPKLLADFHDDSLRKPKTDPVDAQKIASYGIQYWNKDRRPFNQMDSKRECLKECERQYKLYTDECVTFTNNLLSLTDLTCPGVNRLFSSNTNQNGHLKWVDFVNTWWHVDCIRKMSMNAFSNRYCKWCQKHGYEFSEDKAEDIMDWAKKALVAMPKSTYIKSTYIKKTIQIAVNAINDLLETIQNTKKHMNQLASQLPEYPVVMKMDGVGEVTGPIIMGELGDVTRFNKRSQITAFAGVDPKKHESGDDKPKSSRATKIGSPELRRALYLVMTSKLARKPQGDRVYDFIVKKRSEGKKYLVYMTAGANKFLRIYYGTVRDYMQNKQNPSFIQDKAPAGQANVSQTA

SEQ ID NO: 139607 - protein, 372 aa, unidentified
MNEFSKYVGLDVHKETIAVAVAEANGGEVRYVGEIANTEEAIDKLVKQLRKGGANLTFCYEAGPCGYGIHRQLTDLGWDCQVVAPSLIPKKAGDRVKTDRRDSLMLARLHRAGELTAVWVPDGAQEALRDLTRAREDLKHLQRQARQRLLAFLLRHGRRYDGGKSKWTLTHFRWMETVKLDHPVQQIVFQEYIDTVKVMTKRIEAVDQHIESAATESVFWSVIEGLMALRGVSLLTATTIVAEIGDLRRFASAPQLMAYLGLVPSEHSSGGTKLRGGITKTGNGHVRRLLVEAAWTYRHPARKTATLQRRAEKATEEVQEIAWKAQTRLCGRYRKLDARGKLSVQTCTAIARELTGFIWAIGQALPMPVARA

SEQ ID NO: 139608 - protein, 371 aa, unidentified
MITLGVDAHKTMHVAVSVDEGGRPLDTWEGTNSQSSWQEMLAWASQWESRQWGIEGTGNYGRGLAQHLVAVGETVYEVNPRLTAQGRRRARKQDKNDRLDAQAVARALLRDVPELPEVVLEDEAAVLELMNRERDRLRTQVDRLRNQLHNRLFQVDPQYRKSFPSLSKLAAIQNLEQYTAAADTPLASVRGAAVRRVASLLRLVLEQHQQITGEIESLSGTRYGALTETQGVARLTAGILAGILGTRRFATEDQFASYSGASPIETSSAGRVRHRLNRGGNRRLNRVLYLIALTQWKQKGAGRNYIQRRMEQGKSWLEAVRALKRFIARAVWRLWQRHYAIKHPPNPDPTSPQPGPSKYSQHCPLPQPQLT

SEQ ID NO: 139609 - protein, 394 aa, unidentified
MIYAGVDIAKTDHVIGAVDERGTETCRPMPFKNTEAGLERAVAWLEGLAGSPSDVVVGMEATGHYWMACYSFLVARGYSVAVINPMQVKAVRKLKGLDKVKNDRVDAGLIAEALRIGRYDETRLATDEVASLRSLSRYLQSLRGMAAELKTQCVCLMDAHFPEYAGVFSDMFGAGSRAVLSKSPLPFELARRRADSLARDIAEASGRGGKSAGYAAKIKAAARSSIGVRLGQEAASFQIKSLIRQIEFADSECAKVEARVRALLDEVEPLVLTIPGVSYATGAQIVSEIGDVSRFRSAPALVSYAGLNSSVSQSGKFDSGGGPITKHGSPYLRRALWLAANRARQYDPGLRAFYDKKRAEGKPHRVAVTAVARKLCHIVFAVMRDQVPYDPGRE

SEQ ID NO: 139610 - protein, 451 aa, unidentified
MAKRKEKQERRSMVLEPDAAGIDIGAEEIYVAVPPDRDEESTRRFSSFTGDLHALADWLGQCRIQSVAMESTGVYWIPLFQILEERGFKVYLVNAHYLKSVPGRKSDVSDCQWIQYLHSVGLLRASFRPPEAICALRTLWRHRGSLLEMAAEHILHMQKALSQMNLQLHHVLSDITGTSGQAILDAILAGQRDPVALAQLCHRRVQSPRDKVAQALVGDYRPEHLFTLKQSLAGYRYYQKLILELDQETARLMQALPSATDDPMPPRTKATAYHRQGNDPQFDLRSELYRIACVDLTDIPGISAATAQVVLTEVGTDVSKFRHASAFASWLGLCPEKRISGGKVLSCKTRQVKHRAATALRMGANSLCRAKGYFGEFFRRMRARLGTAQAITATAHKIARILYHVLLTKEPFTETVFHRCDEQAQQRAEIRLRKQAARLGFQLLPIAAPGE

SEQ ID NO: 139611 - protein, 349 aa, unidentified
MRFYNRQHRHYCGIDLHVKTMYVCILDGAGQILLHRNVATTPAAFLAAVAPYREDLVVAVECMFTWYWLADLCAAESITFVLGHALAMKAIHGAKAKNDRVDSHKIAVLLRGGLIPQAYVYPAGMRATRDLLRRRLHLVRKRGQLLAHIQMTREQYNLPAFARRLAYPANRDGVSAHFADPVVRKSVEVDLALIDEYDTLIADLEQMLVREAKCDDADAFHRLRSVPGIGPILALTILYEIHDVHRFDRVQRFASYARLVKGQHESGGKILGTGGAKMGNVHLKWAFSEAAVLFLRHAHTPRVQKQLARWEKAHGKGKALSILAHKIGRAVYYMLTRGTVFSLEKFLAA

SEQ ID NO: 139612 - protein, 364 aa, unidentified
MKKLVVVGGTGQECLEDRRRPETGQDVWIGVDVSRMKWVYNVRWGGQEQRKLSTAGELRHLQALVADYHGGKVHVVYEACGFGYEIAWWCQEQGIDVVVVAPSTIEQAPGSRVKTDRLDAGKLARDREQGRLKGVRIPTRIQHAHRQLSRTYAQAMKDKQRAQARVRSLLQEQGRIGPPPAAGWAAYVRWCRTQELPDTVAQCLQEMLQLREAALASVKRLRAALHQLSTQAPYAPVVRGLAAQAGVGAFTAVRLVLELGDMHRFPTAGSFPRYLGLTPSEYSTGLTERRGHLTKCGPRFIRAWLIQCAWVSVRLGGDARLRAVFERLAPKIGKKRAIVAVARRLALRLRARWIEVLTTQAVAA

SEQ ID NO: 139613 - protein, 400 aa, unidentified
MNPVIGLDVSKGESEVQAFLDNRKPYKKSFSVLHNNNGLENLLRFLIEVEGETGVRPTVIFESTGHYHTSLVQFLEENDYLYIMVNPLLSYQAKKSSLRKVKTDAIDAYNLCELFYKEELEPYKQRGIQLLNLRNLSRQHETVTGIYVQTKLQFHAILDQVFPEYRGVFGDLFSKVSLNTLLEFSTSEAVLKAGENRLSDKIASECVTRSERWAKDRAKKLVEAAHRNPFKNTLYQSHLISLQMYIQMLLQYQEHLSKLDDQIDALAEEIEEYKIIQSIPGIGGKIAATIISEIGEIERFNHPKKLVVFSGIDPSVHSSGKFTATINRISKRGSSRLRHALYMGALCGIRSSRNKRLREFYDRKREEGKPFKVAMIACTNKLVHWIFILLKRKETFLDLA

SEQ ID NO: 139614 - protein, 358 aa, unidentified
MNNITRVGVDLAKNVIQVCAVDAAGKVVLNKPLPRDRFLTWCAELPQGCLIAMEACSGSHHWARELNKLGLNAKIIAASHVSPYRMEGKGGKNDANDAAAVCEAASRPNMRFVPVKTSNQQGILCVHRLREGFKEERTGCINRIRGLMAEFGIVVSKSPNKLREKLQDILEDAENGLDWLARLAIQELYTHWSAIDEKIDWCDKRINAHIADDMQAQSAKQLIGVGALTASAAVATVVDFKQFKNGAQFGAWLGLTPKQSSSGGKTKLGRITKRGDTYLRTLLIQGAKAAVMSAHKRKDPISKWLFQLKEKSGWQKAAVAMANKNARILWAVMTKGINFDPAYVSVKPGGSIGTALAV

SEQ ID NO: 139615 - protein, 408 aa, unidentified
MAVSGLPFILDRGCGLDVHKDTVVATIKGSDFDTETKTFLTFTDDLYDLVQWLQSHSITQVAMESTGVYWRPVYAVLEDYFHILLVNARHIKNVPGQKTDKKDSEWISKLLLSGLLKGSFIPAQHIRELRELYRHRRKLIAMRTAEKNRLQNILESANVKLRSVVSDVFGVSAMEMVRSMAKGQSDPLLLASMAKGSLVKKHAELIKALTGKVTDHHRFMLTLILQSIDHINLQIAQSEAQMEQYTRIMYRELELLETIPGVSSKVALGIVSEIGTDMTQFATHQNLSSWAGVCPGNNESAGKKYSSRTTHGNKYLKTTLVEAAWVASRSKANPLLAVKHHQIAVRRGHKKATIAIAHKILTAAYHVLRDMEPYQLHPQDIKILENRRLKRIDRLQKQLSTLKNTSYK

SEQ ID NO: 139616 - protein, 341 aa, unidentified
MNVKTIGIDLAKEVFQVHGIDEHGKRLFNKQLKRAKMLSFFANIPPCLIGMEACASAHFWAGKLMSMGHNVKLMAPQFVKPYVKTNKHDAADAEAICEAVTRPNMRFVPVKTPEQQAVLALHRSRQSFIKQRTAQANQIRGLLAEFGIVVPRGIQQLQRQLPEILEDADNSLPSLFRVQLSLLQHHMAYLFDVIATLDKQIEQCYRQNALCQRISKIPGIGPVTATALIATIGNASNFENSRQLAAWLGLVPRQHSSGGKQVLLGISKRGDIYLRTLLIHGARAVLQSVKRKQDAVSGWASRLLARRNNNIASVALANKNARIVWALLVKDQEYYAPVMNV

SEQ ID NO: 139617 - protein, 477 aa, unidentified
MDRAAQPFRWSQQEELRMNPERSKSRDGGKMPTVHPNAAAIDVGATMHMAAVRADRAPEPVRSFGTFTADLHRLVDWFTECGVETVVMESTSVYWIPIFELLDARGFTVFLVNARDAKHVPGRKTDVSDAQWLQRLHSFGLLRASFRPKGHIAELRAYVRQRERLLEYAASHIQHMQKALTEMNLQLHHVVADITGATGLRIIRAILAGERDPEALACLRHYSCRSSAETIAKALTGSYRAEHLFALEQALAFYDAYHEKASACDARIEAVLKELSIDRGGGHGSAPRASRRRNRTDQANALTFDVREALFALLGKDITTIDGLGPYLSLKLIAECGDDLSSWPSAKHFTSWLGLAPSNKVSGGKMLSSRTRRSGGRAAALLRLAAVTVGRTDTALGAFYRRLSSRIGKAKAVTAAARKIAVLFYNAVRYGMDYVDPGASSYETRYRARVVSNLHRRAKSFGFVLQPLEPKVGAAVS

SEQ ID NO: 139618 - protein, 343 aa, unidentified
MHTITTIGLDIAKSVFQVHGTDAAGQVVIRRQLKRRAVLAFFQKLQPCLVGIEACASSHHWSRELQALGHAVRLMPPAYVKPYVKRQKNDMADAEAICEAVTRANMRFVPTKTPEQQGCLMLHRTRHLFIRQQTAVINSIRAHLAEFGIVAPVGRKGVMELLQVVADPSDKRVSEVARSCLAALGNQLLSLKEQILEFDRMIMAWHRSNEPSKRLRYIPGVGPMLATALVASVADPKTFRSGRNFSAWVGLVPKQHSSGGKDRLGSISKQGDRYLRSLFVAGALSVIRYAKIHGTKHRPWLTALLARKPTKVAAIALANKLARMAWAMMARGERYRNPVALAA

SEQ ID NO: 139619 - protein, 387 aa, unidentified
MAIDHVKKTNQASDRSATVGLVTLNRRLVTAATEVYSRKQLEETQMRFIGVDLHSNSLTVCYLDEQQHEELRTFALQELERFQATLSLHDEVAVEATSNTRHFREAIKNLVRKVVVVNPSQFEVIRKSVKKTDRHDARMLALFLSKDMLPEARLKEPTEAQLHSLAHTRDKLVKLRTTLINKIHALHVAVGLKSKKSSFSSRRGLQAALQRSWDELTRVELEVVVSQINSLNEGIKRLDQQLSHQGRRLVGHRNLTSIKGIGDKSAAILLSVIGEVSDFASEDKLASYFWLVPRVANSNETINHGHITKRGSKLARTTLVQCTLTAVRYSPYLKTFYERIKQKKGAGKAIIATARKFLGIIYRTLKYNWVFADFPNFVLAEETSTSE

SEQ ID NO: 139620 - protein, 428 aa, unidentified
MNDVEDTKRERFCQIIGEISGSDEYLVVGIDVAKDKHHAFMGTATGKTLCRRLIFENSRSGFVSLLEQVELIRSQNGLKKVIFAVEPTGNYHKPLSRFLVDSGSHLVLVTGKAVKNNREILDGRWDKHDTKDAANVADLASRGRCQYYDRPSEKIVEMRDLLSLRRRFKKDEHGIRVRIRNTVLAKYFPELDKYFDTGRGEILSIVKWCPNPAKIADMPFDRFFRMVTRRERGIAQKLRLMKIHKSAGESIGCPMGEAAEFEAKLLVDKLDQVRQDIGEVEKRIEEISEGFDEYRYLLTIPGYGPYVSSVVLSAIADPCRFDKASQVLKLSGYDLCADRSGKSSDKAVPVISKRGSGELRYALYQAAQVASVKNRYFKAYFTGLLQGRQRERGIRTKMRVKLAAKMLVIAWTMMKRKEVFDPGRLNIG

SEQ ID NO: 139621 - protein, 492 aa, unidentified
MKPNYRRCCGIDVHKKSISVCVLPPEGRQGVVKRETFRTFLRDLKRLRAWLVKCQVTEVAMESTGQYWRPVWNVLEGFVRQVLLNPAHVKGLAGRKTDKRDAEWLARLHEREHLLGSFIPPVEIRELRELTRTRVHWLEDANRTKNRIAQVCEAGNIKISSVATDLFGVSGRRMLEVLIENQRDPGWMADYARGALRGKRDQLEMALDGTLSDHQRTLLARMMKQLAAQEADGADLTREIEQRVSRWNEILDRMVQIPGIERVSAWTILAEIGTDMSVFGDARCLASWAAVCPGNRESGGKRMSGKTRKGNSYLRRILCQCAWAATRKKGSYFGVLYRRVRGRRGHQKAIMAVAHHMLTVIYHMLRDGTPYREPGETFYDEKRKPEITRRLVKRLQRLGYQVTLEVAMTPEETREVNAAISQPRKDITESATATLQLPETSPARRRPGRPCKCAERGLECFHKRPAKPKPAEINSQQLPNRRGRAEIISMNQ

SEQ ID NO: 139622 - protein, 341 aa, unidentified
MKNLFIGVDFSKEKVDVAIIFADGLTETAARVFNEFKTTVSGYKQLVKWVEQNSYGIDSSLWLFCGENTGDYSNGLCNFLYGKGYDMWLENAKSIKDASGLRRLKSDRADASMIAEYAMRNYDRAIMYEPLSESLAQLRELFLYRQMVVRHRCSFQVRRGEKRLTMEKSPIKTMISQSGRHIVSELNKEVEKIDKRIAELIKSDEELTEVFTIVTSVPGIGTQNAVCLMVYTDNFRRFNYDSRKIACYYGIAPFGKDSGTSVHSDPHVHYMANRQIKAMLTQAALAAVNFNPIMARYYMRLVERGKKKQVALNNVKNKLVHLITAMVRNRQLFSPEYKISA

SEQ ID NO: 139623 - protein, 413 aa, unidentified
MSVSCGIDWAEDHHDVGLVDADGRIVGKHRISDDVAGFALLLQLLTDAGDSAEDPIPVAIETSRGLLVACLRATGRPVYSINPKAVDRYRDRHSVARKKSDAGDALVLAHILRTDRAAHRPLPADSELAQAIAVLARAQQDAVWERTCAHNKLRSLLREYYPAILAAFADKRGGILRPEARAVLAAASTPAAAAKLTTAQLRKLLTAAGRQRGIAPEAQRLQTVLRGEYLRHPPLVEDALGAQALALLRQLNTACTNADELAAEAVAHFDKHPDAEIITSLPGLGSLTGARVLAEIGDDRSRFADARSLKAYAGAAPVTRASGKSRTVMHRRVKNQRLAGVGYVWAFAALTASPGARAHYDRRRTTGDRHTAAQRNLFNRLLGCLHHCLDAHQIYDENTAFPPTTITTREVAA

SEQ ID NO: 139624 - protein, 348 aa, unidentified
MDKITAVGLDLAKQIMQVHGIDAAGRVVLRKAVRRERLLALLAQLPRCVVGMEACSGTHHWARELRQLGHEPRIMAAEFVRPFRKSLAAKNDANDAEAVCTAVVQPNMRFVSIKSVEQQALLSLHRIRQGLIEERTATINRLRGVLAEFGVVFAQSAARLQRALPAVLADEERLPALVQRSVQMLREHLHDLDSRVAEFDRGIAQHAKSSAPAQHLVALSGVGPLTASAVVATVGNAQDYRNGRQFAAWLGLVPRQYSSGGKRKLGRITRRGDAYLRALLIQGARSTLQAALRRAPARHDRLSAWIVQLAQRVGYHKTLVAIANKHARIIWALLARDQALDLARTTMR

SEQ ID NO: 139625 - protein, 368 aa, unidentified
MKQVTTYVGIDAHKKDLFIAMLIGQQKTPVTWQLANEPQAVRRLVRKLEREAPGPISVFYEAGPCGYALQRQVTTSRVSCDVIAPALIPRKPGERVKTNRRDARKLVELGRAGLLTAVQPPTPEDEAVRDLARARDDAREDLQRCRHRLGKLLLRRGLHYSGRNWTRAHRQWFDNLTWAHTAERAVVDDYLLAIDHTEARLLELDARLAEIAEREPYREPVGWLRCFRGIDTLTAMLILAELHDFRRFASAPALMAYLGLVPGEDSSGEKHRRGRITRTGNALVRRLLVETAWHYQHRPSVGIALARRRKGQPGRVIAIADKAQQRLCRRFRKLAAEHKPAPKIAVAIARELAGFLWAALQPAPVGVK

SEQ ID NO: 139626 - protein, 424 aa, unidentified
MNLTQNDRLKQVTSDTLIVGVDVGSKTHFCRAFDWRGFELSRRVFKFSNTGMGFFTFLRWTEELMNKTEMKKVIVGCEPTGCYWLTFQKFLQDHDVQLVTVNPFTVNRSMELDDNSPEKSDLKDPKTIALLVKDGRFSTSYLPSGVYAEIREASVCRDQIMKQHVRLSNQIQGWLQKFFPEYFECYADWDSTSGLMLLREAPLPQDILKIGAGGINQIWRNAKVRAAGIKRAQTLVEAAQNSVGLEAGEAARLEIWVLVNDYILKAEQLKRLDEYLEEKVKEVPNVEKLLAIKGVGMSTVIGFIAEVGDIGRFTDPKQIQKLAGLEIVKKSSGKKKGQPRISKRGRRKLRRTMYESVRALMTWSPAFQDVFLYYRNRTKNPLGGMQAKIAVACKAIRIFYVVLKTGCDFDEEKFRKDIIRPEAA

SEQ ID NO: 139627 - protein, 349 aa, unidentified
MKKLSKMPKQMGETIGSDLGDKVSRYCIVDHHGDVVEEGSFRNQASSIEKHFGGEPRRIALEAGAQSAWISRELKRMGHEVIVANPRELKWITSSDTKNDPVDARKLALLARADVRLLAPVEHRSAEQQAELAVIRARDAILRTRTLLINSARSIAKGFGLRLPKSITGTFGKRALDALPEFLRTALTGLLQQIDAISREIAGYDQKIGQLAEKHPELARLESIPGVGRLTAMTFVLTLGRAERFAHSRDVAGFLGLRPKQRQSGARDPQLGISKSGDPYMRKLLVQCAHHILGHYGKDSALRQWGLAKSEGGKKATLRAIVAVARKLSVLLHRLWVSGEFYKPFPKMA

SEQ ID NO: 139628 - protein, 340 aa, unidentified
MINNFLGIDISKDRFDVSLSFISNKGKRETRKRSFKNNDHGFQGLLSFLQKHNVEQVKACMEATGCYSEALAEFLHNTGHFVSVVNPACIRFYAKSKLIRQKNDQTDAEIIADYCQRQEPIRWAPPSPELKKLKHLYRCSAALKDELTLVNNHLEKKERLPKEVANAWEDLAMNIKQKIERIKNSLRELLNKHKELLENSQLLLTIPGIGEESAVAILAEVPNIKAFKDARQLAAYAGAIPRNITSGTSVHAKPRLSKSGSRTLCKAMYFLAIVAKNHNPTIMTFCKRLKEKGKHNMAIVGAAMRKLLHIVFGVLRSKKAFDPDHIKNYRARSLAESLVL

SEQ ID NO: 139629 - protein, 523 aa, unidentified
MSATTTRRRSRSRRTEVLHKPRGTFHPRVQQVGPEHFGIVSVDCAKARSKWMLCDFYGNVLVPPTTVEHNRVQLDAASTRLRQAVTQHYLGDLIVAVERTGRYHRPVQRAFAAAGYEVRILHPFATKQFRQSNDPGNKTDDTDLAAIHRAAVNGCALVEATLDETWRTFQLLIRQRRDLVQKTSILCCQIREHLDAAYPGFAAGFDKFWDSACAWHLLRHFDAPQHIHAAGLTALCHSLDEAGVRYQRRTVQAVLDWAVQAAAPDVAADRHRAIAFALDDDRTRKTSEIHGLERDIAARLARTPYVLLLSFPGINVVSAADLAGEMGPIEHYANARSITGRAGVRPTRYQSDQVDRCNGPLVRACNHRLRAALLGIADNLVKCNQHFNVLAATWRAAGKDARHTRVKIGARVARIAYQIVAGRQVFRHPAIQGRHYILDKLTAFHREHDTDMMTTLRDLEAALQQVPTKEYRAEAQPLHDEWRRIQEGRRRGPQLLGDILPIVLARLGVHVVQSPASGETDPR

SEQ ID NO: 139630 - protein, 390 aa, unidentified
MLYIGIDISKYKHDCIVIDDAGVVVRKTFSFANSRTGFDQFMEMYRSLDPTEIKKIGFEATGHYQDNFKVYLERSGIEFMELNALLVYKFKNSQTLRGVKTDKTDARLIANYLSSIEFKPYPKISYHTLALRSLCKRHYDLITERTKYLIRITNFLDRTFPEFKKFMNDNLKSKTAMYILRNYGTPDKIINLNVQSYQNFKKESHGRFTPAKFEKLKNLAKNTVGFSYETDLFEIKSLLSSYDTIQEEIDSVEDKIYLHMSKINTHIQSIEGIGMVSAATIIAEIEDITRFVNPNKLLAFAGLEPRLYQSGTQEFKGRMNKKGSVVLRRVLMNCAESILIRNPVFYSYYLKKKEEGKSHQVAISHVARKLVRIIFKLETEHIDYNPNLYY

SEQ ID NO: 139631 - protein, 387 aa, unidentified
MPQVNDLSRSLAAFDPISTLVVVVEMSKTSWLVSGVVPGVERQPLKKLEPDATALLRLIERWRIEAVRAGRPIRRIALAYEAGRDGFWLARWLIARGIEAHVIHSASVAVSRERRRAKTDRLDAAMLTRVFLGWLRGERGHCGMVAIPTMEEEDARRPNRERESLVNERSRIVNRMKSALARLGIRGFKPHLRKAPERLAGLRTAEGTGLPANIIEEFRRDMARLALVREQISSIEKTRAERLERAPDTGPHAMVRLLARVIGIGIETADMLVREILSRNLRDRRALARYAGLTGSPDESGLKSREKGLAKAGNARVRRGLIQLAWRFLMFQKDSALARWYRTRTEGPSGARKTTMIVALARKLLIALWRLVTTGEVPDGVELRPAA

SEQ ID NO: 139632 - protein, 324 aa, unidentified
MQVPLVTVAPACIGVDVDSKRLNITRADAATLATPVTGVANTASAIKAWLKTLPAGCRIGMEATGPYHRSLADLAVRAGHTVFVFNPAQVASYLRSLRSRGKTDVLDARGIARYVLNESVQCHSYVVPSPFHAKLAVLIGRRHQIVKECSSLQMSLGDLTDCAAQIKALRDAFKHLLARIDAQINAAFAAEHELQVQRQRLATIHGFGPLVSAAVAARLSRLPYANSDAVVAAFGMDPRPRDSGEFKGLRRLSKRGNAEERRLIYLAAVSACNNPLFRAIRDKLLLKGMSAIQAHCVIARKLLRIAFAVWTSQQPFNPELIGRA

SEQ ID NO: 139633 - protein, 294 aa, unidentified
MKVFYLGVDVSKKKLDLCLRSNGKDILYDVIPNDLSSIKSWLTRTFEKFFLSEDSLVVCAEHTGQYTYPLVCATKSIGVYLCLEDAAKIKYCHGIPRGKNDKIDACRIAMYAERYNDCLQPYTASELIIQKLKNLSTERSMLVADRAKYQSQLKDQVDYMEHSIYIAKCNRVEGIINTFTDYIAQIDLEIKELINQAPVIAHQMDLLMSVDGVGERVALKMIMETDAFTSFTDPRKFCCHAGVVPFVYVSGSSQRSKNRVSNRADKSIKHLLHMAALSVSQVKNSPLKNRKSVV

SEQ ID NO: 139634 - protein, 347 aa, unidentified
MVACAIDDEAGEIRTLRVSPKTEAIVAWAQALPGPVVVAYEVGPTGFGLARALTAAGVRCEVVAPSKLERPPGDRVKTDRRDAERLARLLRIGELPGVRVPTEAEEAARDLVRAREDARGDLMRARHRLSKLLLRHGLVWENSAWTAAHEAWLRAQRFDRLGVQLAFDEAFDEAFDAVLTVHARRDRLDAAITEMAATGPFASVVGRLCCLRGVGTLTAFGLAVEVGDWRRFTGSSIGSYLGLVPTESSSGARRAQGGITKTGNSHARRLLVEAAWHHRKPYRPSRELIRRRDGQPPAVRDRADHGNRRLHRRWARLDVRGKRSTISAVAVARELAGWSWSLAVMDD

SEQ ID NO: 139635 - protein, 347 aa, unidentified
MNSVGIDLHRKRSHVAVLDEHGRELLSRRIVNDPQTFLELLEGIDGESKIALEATYGWEWLADILEEAGYELHLAHPLRTKAIAAARVKTDAVDARTLAHLLRTDLLPEAYVAPRELRDLRDLLRHRVALTRIRSALKQRVGAILAKHGIARPYSNLFGPGGLRFLDELELREAPRRRLDSLLSLIADFDREIDATSREIDQHAKADPYVEVLCQIRGIGRYIAMLVIAEVGDIGRFPSARHLCAWAGLTPTVRSSDGKARLGHITGQGSPALRWALVEAAQHAGRGGGPLRQSYDRITKRRGKSVAKVAIARKILTLCFYGLRDGEIRCLAPRARARAIRTVAVTP

SEQ ID NO: 139636 - protein, 459 aa, unidentified
MQRFYLGIDASKGYADFVILDANKMIVQRNFQLDDTFRGHCYLTERLRLFFKNHPEAAMFAAIESTGGYEKNWLNTLTKCRSVWKIKTARVHPLSVSHNIRAELKRNITDKISAQSVAEFLIVHPEKVTYNADDPLSSLRRQWHFINTLTKQKTQLLNQLQTLIYTANTELCSYCKDGMPQWLLKLLERYPSARKLARARIVTVARIPYVSKEKAKTLITMAKKSIAADSDPITENTITMMVKQINTLAKAIDAQTAMIKKHSTMPEVNLLKTLKGIGDFTAMGLMLEIRSVNLYSSSKKLAAFFGLHPIYKISGDGQGSFRMSKRGRKEPRRLLFLVAMSATESNPLIRKLYLQKLGEGMSRMAAIGMCMHKILRILYGMLKHNQPFDPQVDIQNTKVTRKRWDKRSVIKSRRYQDYDPNAPISRRQQAKRMERKRSQSVENTKRGIQTPVPMDTLTN

SEQ ID NO: 139637 - protein, 350 aa, unidentified
MKLYIGLDVSMKDTSVCIISETGKIIKEHILTTDPEIIATYIKKQNHDIDLVGLESGSLSHWLTEELLERGLPVKCIDARHCSAFLSMRINKTDRNDAQGIAEVMRCGIYREVQVKSRDIREVSSLLTSRRQLVEQRSRILMSIRGILKPFGIRLGSISKTKAGVGKILEVIAEKGINESVLFAVQNMIVAAQALIDGISNLDRKITECVKNEPKAQILMTIPGVGPITALKYLVEISDPHRFKNSRSVGAYLGLTPKQYASGETQKQGRISKCGSKDLRSLLVEAAIVLITRTKSWSKLKAWGLKLMRKNGLKKSATAVARKLAVIMHTMLVTNTTFRFCDEELKPQNA

SEQ ID NO: 139638 - protein, 508 aa, unidentified
MPTPTTRRKPASAAGAPHAQAQAHSPPEQRRKTRAQPRSEAPGPGTAARVEALPVQHPHAAGVDIGSRSHWVCVGFSNDADSGSTREFPAHTAGLNAIAAFLREHRVDTVALESTGIYWIPLYELLQAEGFEVLLVDPSYTHQLRGRPKTDRRDCQWIYRLHSVGLLAAAFRPDEKTCQLRAYLRQRANLVRAASRHVQHMQKALEQMNLKRTEVLSDITGLTGRAIIRAILRGTRSPEKLARHRDKGCKASEAEIAQALTGSYRDEHLFELKLAYEAWQFTLGQVTQVDGQIALQLGRMKCDRALPPLKPKARPKRRASSPGFDVRAALYYVVGLDLTEIEGVSELTALTVIGEIGPGVSRFPTVKKFCSWLGLCPNWRKTGGRVKSSRTRRGVNRAAQALRVAAQGLHHSKGALGGFLRRMKGRLGAQAALTATAHKLARIVYLALKHGLTYVRRGQEEYEAQMKEKQLKALRRKARQLGLEVVEKTSDSVPTATAAPEQGQTAGR

SEQ ID NO: 139639 - protein, 351 aa, unidentified
MELLHRRCCGLDVHKETVVACLRLVSNGKVTTEVRTFQTTTADLLRLSEWLAANDCTHVAMEATGVYWKPVWHILDDGEFELVLANAAHVKNVPGRKTDVNDATWLAELLAHGLIRASFVPDTQTQEMRNLLRTRKQLVREQSSHVLRVQKTLEDANIKLDSVLSDLMGKSGRAMIEALIVGETNPAKLASLADRRVKASPEELREALRGRVTKHHRFLLRLHLNQIDALDAAMATLDAQVAANLGPFRTAVDLIMSVPGIKNLGAQAIVSEIGIEMSRFPSDAHLISWAGICPRNDESAGKRRSNRLRKGAPWLKTTLVQCAWAAVKKKNSYLRASCKTVGRGVWETFMR

SEQ ID NO: 139640 - protein, 443 aa, unidentified
MINADAAGIDLGAEYHWVSIPEDRSPTCVRRFACFTADLYEMAKWLHECGIKTVAMEATGVYWIPVFQILETEGFEVKLVNARHVKTVPGRKSDVLDCQWLRQLHSYGLLAGSFRPNDQVCVLRSYIRQRDTLIKNASAHIQRMQKALTQMNVQLHRVISDISGTTGLAIIRAIVAGERDLHKLAALKDCRIHASTNEIAAALTGDYRTELVFVLHQELQLYEMFQAQIAACDLQIEQCLNQFADPVDVSLSPLPPSKRRGKKQPGNAPNFDLRMHLYRISGIDFTQIDGFGVLTVLTLLSELGLDPSRFPTAKHFASWLGLSPGSRITGGKRKSSQTRRVVNRVANALRMAAQTLSRSHSALGAFYRRMQARMGAPKAITATAHKLARIFYQLWTSGQSYVDPGINAFEQQHHERVVKNLRKKAQAIGFDLVPHSGSPECVS

SEQ ID NO: 139641 - protein, 353 aa, unidentified
MRTYYVGMDVHRATIAIVVLNGAGKVVEQLVVETSATRVRRYLKQLQGRVYVTFEEGTQAQWLYDVVQPLVTEVIVCDPRHNKLLKAGNKSDRIDAQKLAELLRNGSLKAVDHRDHGVRALKELVRNYDCLVSDTTRVMNRLKAMFRRQAIACGGHEVYRQDRREVWLGKLTERGAQERASSLYRQLAALKALRHEAKLAMVREARRGAAYVWLMSVPRLGAVSVAQLLAVVGTPHRFRTKRQFWTYVGLAVVTSSTADMEVVDGVLRRSRRPVATRGLNRNHNHLLKRVFKNAATSACQSEPFKQHYELRLQQGMDPALARLTVARQLSAITLSLWKRGEKFQAERMKRQAA

SEQ ID NO: 139642 - protein, 394 aa, unidentified
MRFIGIDIGSEKHFVAIVDEAGKPLRKPTPFAEDDAGYKQLRSLLGDPSDTTLVAMEATGHYWQNLFAFLHTAGFEVALLNPTRTARFAGEDLRRAKTDALDALGIARFAQQKRPAPTPLPDEVTLELRELVRLRDRLVQDLGDRARQVHRTLDLSFPEFTQHVRDVASAKATTLLMACPTGAAFQKADPNVLAELKYDGRHVIGLELAQTLCAAAKITVGRHHGAPYALQMRYACEDIATLRARLKKLDGDIKASLDRHEVGKLLTTIDGIGDNTAARMIASIDFSTFRSAAALAAYVGVAPLVNHSGKRQPLRGPACTMGDAGLRAKLWMPTLQAVRRNAWLKPFYERLVAGGKPKKVAIIASMRKLLGAMVSVARTKTPFVPRLAAEAASG

SEQ ID NO: 139643 - protein, 343 aa, unidentified
MKLIRVGVDLAKNVFQVHGIDQSEKAVWRRKLTRENWLKVLRQSVEPGCEIGMEACGGAHHWARRLQEQGFRVRLVAPQFVKPYVKSNKNDANDAEAICEAIGRPHMRFVSVKTVEQQDIQAVHRIRAELIKQRTAKANQIRGLVAEYGLVAPKELGHLRRALPCWLEDAENGLSGRFRRLLHGLWGDLQALDERLSELDREITLVAQSDPVARRLQQLRGVGPIIATALVAAVGNGEQFAKGRQMSAALGLTPRQQSSGGKERLLGISKRGDVYLRALLIHGARAVISTAKDKDDRLSQWVRRLSARSHPNVAAVALANKTARMAWAMLRNGTDYRPRMVSS

SEQ ID NO: 139644 - protein, 421 aa, unidentified
MRGLRAKRVRTVKEGTLIATVDIGMTINTGYCTTIDGRDMKVFKFGNTREGFDKFWSLVAASKTRFHCDEVIVGYESTGPYAEPLVHYLTDKPARIVQVNPLHTKRLKEVNDNSPGKTDDKDPRVIADIIKLGRALSIVVPEGDAAYLRRLNNARERHIGERTALLNRMQQLVFLIFPEFKTVIKQMRGRTVRFILNKYTTPEKIGALGKEVLGEEMRKRSMGKLRIKDAELLIGLAQRTVGIKEGVAGISLDIKHIIAQLAAVDSFIVEIEAEMAVVLERIPASARLLSIKGLGVVSVAGLIGEVGDFSKFGTQSEIMKLAGLDLYEVSSGKRKGQKRISKRGRSLMRKILYIAVIQMIKKNGIMHEYYERLTGRGTLKMRALVAAMRKLLRIIHAIMRDNRDYVGQCDAPKRRVIKKAA

SEQ ID NO: 139645 - protein, 312 aa, unidentified
MERTFVGIDIAKDHVDVHVHPTDERFQLSRNDAGLAELVARLQPLGPQLVVLEATGGYEIPVAAVLASAGVPVAVVNPRQIRDYARATGQLAKTDALDARLMALFAEAVHPEVRPLPTPEAQALGDLVTRRRQLVDMLGAERNRHQQARDLRLQRRIATHIRWLTTALAEIEADLGTRIRSSPIWREQDDLLHSVPGVGDITAYTLIADLPELGHLDRRKIAALVGVAPFNRESGHWRGRRMIAGGRPAVRSVLYMATLTAVRFNPAIAHFYQRLTAAGRPKKVALTAAMRKLLTILNAMLRDQRPWQPESA

SEQ ID NO: 139646 - protein, 350 aa, unidentified
MDVLGIDVAKASLVVVLLASQRQQRAEFANTPAGHAKLLTWLAKRCPAPLHACLEATGTYGDDLAQVLFDAGHTVSVVNPARIAAYAKVQAARHKTDQADAALIARYCQREQPAAWQPPAPELRELRALVRHLDTLQQQRQAEHNRLEAGGHPAAVTQAIQAHLTFLSAQIATLEQQIEAHFEQHPDLKRQRALLDSIKGIAVRTATRLLAELGDWQRFANARAVVAYVGLNPREYRSGSSVQRRTRLSKSGNAAVRAALYFPAIVAKQHNPLVQALCARLTARGLCPKAVIGAAMICNLVAAALAGTLIPIGLQKFGVDPAVSSTVFLTTVTDVIGFLAFLGLATLFLL

SEQ ID NO: 139647 - protein, 448 aa, unidentified
MEILYERCAGLDVHKKNVKACVALPGGGGKRRKETRTYLTMTQDVLEMRDWLKEQGCTHIAMEATGVYWKPIYNLLESDFEILVVNAHHIKTVPGRKTDVKDAEWIADLLSHGLLTASFIPGAPQRELRDLTRYRGKLVEERAREVNRIQKTLEDTNLKLGDVVSDVMGKASQMILHAVVDGETDPVRLADFAAGRVRANRETLERALTGKVTAHHRFLLGEHLRQIEHLDEAIERISEEIARRLTPPEPPDPPKEEENRPASQKEASPTSSPSSAALSDVQNWQHAVEVIDQITGISQRIAEGLLAEIGVNMKQFPSAKHLASWVGVCPGNHESAGKRLSGKTRKGNPYARQLLIQAAHAASHSKNTYLSAQYHRIAARRGAKKAAVAVGHSILVIIYHLLSEGRTYQDLGSTYFDERDRELVQKRLVRRLERMGYQVELQPMAQAG

SEQ ID NO: 139648 - protein, 322 aa, unidentified
MAPIRMPEAVIGLDVGKSSHWACVATRDGEVLLSTPVANREDDLDSLFGRFPDALVVVDQSRNIGALALARARAAGMSAAYLPGLAAHGAARLFAGDAKTDERDAMVIAKTALGIPDALLPVGDPGPTIAAARALAAQRNFLTCENTRNKNRLRSILLESCPAFEALVDLSDGPQLRLMASLGGAWSVADAGPRRAAALTRGAARGKIEALVRSTTSSTRPDASVVAAEDRAVKLLARRISENSAEIEAITAEISALLEGDDTYRCLLTVPGIGPKTASELAISIDIEDFPSHDRLASYCGLAPRNRQSGTSISSVTASRQG

SEQ ID NO: 139649 - protein, 417 aa, unidentified
MEVISTMDVVYRCCAGLDVHKQTVECAVRRLTEGGTVQVEIRQFGTMTDDLLEMVKWLTAQGVTHVAMESTGVFWKPIYNVLEGNCTVLLVNARHVKQVPGRKTDVRDCQWLAQLLQYGLLKGSFIAPRWQRDLRDLTRERTQLSDEQTRVANRIHKVLEDANIKLGSVATDILGVSGQDILQGLIAGEEDVEILAQRARGRLRDKIPELRRALQGRLSEHHRFQLRLHWDHLQRLQELLERLKERIAKLTQPYQAQIKQLDQVVGIDQRSAESIVAEVGVDMKVFPSDGHLSAWAGICSGNNESAGKRRSGRIRKGSRWLRRTLVLAAQAAGHAKDSFLASRFRRLAARRGKKRACIAVGHSILKIVYHILKDGVPYKDLGGSYFDRLDPKRLTRYLVRRLERLGHKVTLEPATTG

SEQ ID NO: 139650 - protein, 423 aa, unidentified
MHTSTLCVGADVHLKEITLRAVDKLTSDEVIAPFNVANNLPGAQSAASRLAEVATRLGYTHIEIGCEATGMLWIPFHRFLSTCQLLEPFDLQQVCFNPKLVADFKDALVLRGPKDDERDAFDVAARVQVGHWPDSYVPDDFWQGLRRLTRYRFKLSRNLSQEKMRFQAYAFLKCSDWKRVKGFSDVFGATSVALLTEFTVAELTEMTHDQLVDLIRRRGRGHFADPTATARKVRQALRSSYPIEPHMDEMVTATLATIWDHIRFINRLMKRLDKLTAQAIDPVPNPIITVKGLGAVITAGLLAEIVDITRFAEHKHLAQYSGITWEKRSSGNFVSQNTRLTKAGNKYLRYYFTLGANTLRQFNLEYKAFYWRKYGEVSKYQHKRALVLTARKLVRLVHALLTKNVPYVRPQALVDVQEDGALQ

SEQ ID NO: 139651 - protein, 368 aa, unidentified
MASVVYVGLDVHKDSIVIAVAREGREPADNWKTIPYDGVRLRKALKSLVKDGEELRVCYEAGPTGFGLCRRLREAEIDCIVVAPSLVPGKPGDRVKTDRRDARKLAHFLRSGDLTQVYVPEESVEAIRDLERARDDAKCAERVARHQLSKFLLRHDRHWEENTWTQKHRDWIRAQRFAYPAQQRVLEDYLKTVEDLAERVERLTEQVAALVQETALAPLVQALQAFRGISVVSAVTIAAEVGNFQRFATASQFMSYVGLVPSEDSTGKRRRQGAITRCGNRHLRRIIVEAAWSYRHGPLMSKELRRRNQGVAEGVRRIAWQAQKRLNKRLYHLLHAGKSAQKAITALARELAGFIWAVGQQPTLLEVR

SEQ ID NO: 139652 - protein, 350 aa, unidentified
MPCKTVAIAHTIGIDTGKNTLHMIGLDKKGTIVVREKVSRTRIAARLVNVPQCLIGIEAGMASHHVARELLALGHEVKQVPPAYAKPFRQGHKNDFRDAHAIAEAVQRPSTRCVPVKTADQLDLQALHRVRSRLIGNRTAVINQLRGFLLEHGIPVRQGLRFLRQQLPQILAMRTDVLSPRMIRIIEELIGDWEHLDERIERVTDEIETLARADENCRRLMTVPGIGPIIASAMVAAIGNGGAFAKGRDFAAWLGLVPKQMSTGDRTILGRITKRGNRYLRMLFIQGARAILFRPAGWAKHSFGPWLAAAARRLHRNVLATAFANKLARIALTVLVEGRSYAARVEPRAA

SEQ ID NO: 139653 - protein, 343 aa, unidentified
MGEVSTIGLDIAKSIFQIHGVDAAGAVVMRKRITRAKLLEFFATLPGCLVGIEACPSAHYWSRRLQALGHTVRLLPPSYVKAYLKRSKNDANDAAAICEAVTRPSMRFVATKTEQQQSGLMLHRSRQLLVCQRTMLSNAIRGHMAELGIISAKGRNGTAELLKIIADENDDRIPAAARFSLDVLARQYTVIRAEIVAIEKRIHAWHRSCGESRRLEEIPGVGPIVATALVAEVGDWKVFSSGRSLAAWIGLVPRQHSTGGKERLGRISKQGNRHFRWLLVAGAMAVIRYARQHGTNRLWLARLMDRRPIKVAAVALANKIARMAWAMMVRGERFKEPRLLPAI

SEQ ID NO: 139654 - protein, 289 aa, unidentified
MGNEKRRFSNDTIGHRELIKWVKQLKVPVQVICESSGGYERALVQAFAGAGLKISLVQANRVRQFVRAAGILAKTDRIDAEVLCAFGKVMGPQAVTAAKLEQEHLRELESQRRHLTHLLVMELNRGARVSDACVQRLNRRLIKQIKNQIEQLDLLIKGHINQSHELSAKAAKLMSISGVGTRTAALLLARLPELGELNRREIAALVGVAPFNRDSGRMCGKRAIYGGRKPVRHGLYMAALVAAHHNPFLRDFYLRLRAAGKPAKLALTATMRKLLIALNSALKTDPTYA

SEQ ID NO: 139655 - protein, 357 aa, unidentified
MKIVGCDLHARQQTIAMVDTETGEFTEKTLFHERNVVREFYAALEGPVVVGIEATGAMQWFLELLEELGIESRVGHPAKIRAKETRKQKHDRRDARLILELLVEDRFPEIWMPSTEQRDLRTLLRDRHQWVKMRARLQHTLQAIALNHALRQGHALWSAAGQSTLQALALPPYTGQRRTELLSLYVQLQKRIQELDQVVEAQARQRPQARRLLTHPGVGAVTALATEVFLGDPSRFATANQVASYIGMIPCEHTSGKRQRLGKLTKEGNSLLRYLWTEATLHAVRKDPELKRFYRRKLVQKGMGKARIAAARKLGIRLWIMMRDRIDYEEFCRRGKLRQKGEAHAGMPGFNSGPALQ

SEQ ID NO: 139656 - protein, 440 aa, unidentified
MAMRKRDDEVFPNAAGIDIGASSHWVAVPGHLADDAVREFGAMTDDLNALADWLIACGVDTVALESTGVYWIPVYEVLEQRGLKVWLVDARQMKYVPGRKSDVQDCQWLQKLMSLGLLRAAWRPDGEVCVVRAVARQREVLITEQASWVQRMQKSLVQMNIQLTEVLTDVMGMTGQAIIRAIVAGERDPLVLARHRHSRVKASAQEITKALTGNWREEHLFVLRQALAMYDDIAKHLVECDAKLQALLDQRSQTQVALGKAPKAGSKSRVEFDVRQALANWAGVDLTRINGLGVTVVMKLLTEIGPDVSRFASVKHFCSWLCLCPGTKISGGKVLSSGTKRSANRARQALKMAAMNLSHSDSALGAFYRRLCGRMDKPRANTATAHKLARMVYFMLTRGEAFVDQGQQRYDEQQRQRSIAALKRRAASLGFRINPLEAVA

SEQ ID NO: 139657 - protein, 350 aa, unidentified
MKVTTIGLDLAKNVFQVHGADAAGTPVLRKQLRRCQMAEFFAQQRPCVVAMEACGGAHHWGRKLRALGHEVRLIAPQYVKPYVKSQKNDAADAAAICEAATRGHMRFVSLKTVDQQSVLALHTVRSGFVKQRTALSNQIRGLLAEFGLVLPQGLSKLSGQLPVAVADQHNELPDTMRDLFRMLHAQLAHIDDLVARLERQIRVWANQDEAAKRLQQIPGVGPITASALAASVGDARQFEDGRQMSAWIGLVPRQHSSGGKSVLLGITKRGDKYLRTLLIHGARAALKAYQRAPGKIPEHLAQLLQRKHPNVVCVALASRNARVAWAMLSRREDYRGRGTLKLPSLPAAMA

SEQ ID NO: 139658 - protein, 358 aa, unidentified
MAVNEGTRRIVGGVDTHKDLHVAAVVDEQDRVIGTRSFATTRQGYRQMLAWMRAFGDLQRIGVESTGSYGAGLLRFMQQAGIAVLEVTTPDKQDRRRRGKNDDLDAQNAAHAAFAGQRTVTPRSRDGMIESLRVLMACRKTAVSARRVALQMIHNTIVCAPDGLRDQLRSLTRMQLVRTLASWRPDLTAYRDLDSAYRIGLKSLARRYLELHDEIADLDVMIAAIVDELAPNLVARNSIGHLGAAQLLLTAGDNPERLRSEASFASLCGVSPVPASSGKTVRHRLNRGGDRAANSALHIIAIGRLRTDQRTKDYVTRRIAEGHSKLDAIRALKRYLAREVFTLITQRRREINATRIAA

SEQ ID NO: 139659 - protein, 369 aa, unidentified
MDQHSIVVGLDVHKGSITAAVLPPNVARPQETCTIENDARAVERLVKRIMKNGNAVFVYEAGPCGYTLHRQLYRLGCQAAVIAPGLTPVRPGDRVKTDRRDAENLAQLYRAGQLTEIRVPTGEEEAARDLVRAREDAVADRLRARHRLSKFLLRQGRLYDGKQAWSQKHYAWLRQQRFELTLAQQTFDAYLRGVEEADARLASLTTQVLELAQRPSYAALVQGLRCLKGVDTLTAITLIVETQDFRRFGHARAYMDFTGLVCSENSSGDRTRRGSITKVGNAHLRRVLVEAAWSYSHHNSSGATITKRRHGCPAAVVQIARRAQDRLHRRYWRLTQRNKPRPVAIVAVARELAGFVWAIAHSVSSTTAA

SEQ ID NO: 139660 - protein, 343 aa, unidentified
MDYFAGLDVSVKDTSICIVDDTGRIVREVKVASEPDALLAVLTNSSYRFKRIGLEAGPLSQWLFSALAEAGLPVICVETRHMRAVLKARINKTDRNDARGIAQMIRVGLYRPVHVKTLRSQKLRMLLTHRKLLQSKTIAIENDLRGTLRNFGLKVGMVGAAKFEARINELVENLPDLAVLVEPLLVVRQALREQIGVLHHRLLAIVRDDEVCRRLMTVPGVGPVVALTYRATVDVPVRFRKSKSVGAVFGLTCSRDQSGERDRPGAISRCGDEMMRAMLYEAAQSMLVRSTRWSWLKAWAMKIARHRGMKRAIVALARRLAVIMHRIWVDGSEFRWTREAAAA

SEQ ID NO: 139661 - protein, 347 aa, unidentified
MKEQNNRSEFTIGLDLGERRHRFCALNGKGEVVEEGTLGNDRVSLGRLSARYRGALAVMEAGAHSPWVSRYLEGLGWEVIVSNPRKVRAIYQQERKSDRRDALMLARIGRMNRALLYPVRHGSEEAQQDLLRIKLRDSLVRARVALINSVRFSLKSLGYAVANPSSERFHKVAMESLPEVVREMIAPSVQALAELSARIAVLEREISVLARTKYPQTLWLQQVPGVGAITALYFVLKIEDPKRFKNVRDVGAYTGLCPRRDQSGGSDPQLRISKRGDAYLRRLLVSAAQYILGPFGPQSALREYGLRLAADGTTRAKKRAVVAVARKLCVLLLSLWKNQTPYQPYPA

SEQ ID NO: 139662 - protein, 419 aa, unidentified
MSFKILKNNCCGLDVHKTWIYACIGITDSFKRTEYKQARFSSFTKGLQELCLWLAKYNCIDVCMESTGKYWIPVFNVLEKNNIFVTLSHPKYTKPQKGNKTDRKDAKWICDLYMCGMVKPSFIPPADIRQLRDLVRYRFKLTCMITGEKNRAHNCLTVSNLKLDDVFSDIFGKSSRSITEQILQHPGEVFDVAPFVDSRCKTPIEEIQAAVDGAISHEQAVKLRQCLKHIDGLEMHKAEIEREIFRLSQKYESVLDLIRTIPGFDKNPLTAIQVLSEIGADMSVFPTAKNLVSWAGCCPRNDQSSRKIKSTRISRAGSYFKPVLVQIANALIKSKKHPEFTTRYRRIKARRGHKKAIIAICRMILTAIWHILTDLKPYTPEGFLESRPVNKEKVLTISQALNLIKQRGYIIKDDVGPVT

SEQ ID NO: 139663 - protein, 407 aa, unidentified
MDVLHPKCAGLDVHQQTVVACARTGAGKAVTYDVRTFGTTTAEVLALSDWLTAHGCTHVAMESSGVYWKPVWHVLEGHFELVLANARHIRNIPGRKSDVNDATWIADLLAHGLIRGSFVPPEPIQELRDLTRTRKQLVREIAQHTLRIQKTLENANINLTAVLADVLGSSGRAILRALARGERDPERLAELASDRVKASRAELVAALHGRVTPHHRFMLTLHLTQIEALEAAVREVEARLGDALAPFRAALDRLITMPGVSETVARVIVAEIGFDMTRFPSAGHLVSWAGLCPRLHESAGKRLSNRTRSSNPWLKTTLVQAAWAAARKKDSYCRAQFLRIKSRRGPKKAVLAVAASMLTAAYYMLKHGVDYRDLGADHFDRRDKAKLAKRLIARLHDLGLTVEVRAA

SEQ ID NO: 139664 - protein, 366 aa, unidentified
MDVHASSINLAYAVDDGPIEHFGKICNSIESIRKTIKKLHKRGTDLHACYEAGPTGYVLHRQLKQLGVDCIVVAPSLIPKKPGDRVKTDKRDAKKLTQLYRAGLLTAVWIPDEAHEAFRELLRTRERAVKDRTRARNRLTKFLLVIGRRQPSNIKSWGSRHFLWLNKQQFEHKAHQSVFVDYLSEVTHQNERVLWLESELSSLLPSLDKKVQAVIHALQALRGIAVLSAATIVAEVGDLMRFPTASELMGYSGTVPSEHTTGQRQRKGRITKTGNAHLRRVIGEAAKQYSRCPGIGAPLKRRQKGLSKEVRDIAWKAQKRLHQRYWSLRNKGKEANKASIAVGRELLGFIWAIGRQVEAEKELQVA

SEQ ID NO: 139665 - protein, 430 aa, unidentified
MKSNTQNAKIEAITEKTLVLGIDVGSEMHYARAFDYRGIEYSKKPFKFSNTEAGFVTFKEWILNLKERHEKDKVVPGMEPTGHYWFNLGKFLQDNEMKPVLVNPHHVKKSKELDDNNPTKNDRKDPKVIAGLVREGRYMIPYLPDGVYADLRTASNIRFQLQAELTRIQNRISRWFNIYFPEYKTVYGKPDAKSGMLILKAAPLPEDILTLGIDGVNQIWRDEKLRAVGKARAKTLIEAAEHSVGSKEGAVSARMEIRMLLEDYESRNTRLQEVMVLIEELVRKIPMAEKLLEIKGVGIRTVSGFLAEVGDISRFNNPKELQKLAGLALVENSSGKHKGETTISRRGRKRLIYLLFEVAMSLVSKNQEFRELHNYYTTRRLNPLKKMQSLMAIAAKLIRVFYAMLTKGVDYDPKKMVSDIKRPAVYLQAA

SEQ ID NO: 139666 - protein, 311 aa, unidentified
MTDDSIGIDISKGHLDVHRLSDGQYAQFTNTGHGFTALHRWIGDTATARVVYEATGPYHGTFEQALRDHLPLVKVNPLQARRFAQASGTRAKTDAVDARMLARMGAAFKFEPDPHLPEDLPDLKELQIARTALIKDQTRLKNRFQTQTLAITRRHTKARLDQIARQLAQLDEEITSRLTASPKRQKAYAILQSIPGLGATTAATILIEMPEIGTLTNKAVACLAGLAPITRQSGKWKGQAFIQGGRKFLRDALYMPALVAARFNPDLTRKYQSMKAAGKPSKVALVTIMRKLIILANTLIKDDRKWIENAA

SEQ ID NO: 139667 - protein, 425 aa, unidentified
MSKSDYNKQVLRRQRIKKTTLIVGVYIGNAFNAVGFMNKEGHVLGSCAKLYNSREGFGQFVDMIEVLKTKHHFRDVLIGMEPTGHYWRKLAYFAKEHGYEVRFVRTTALKHHRELDESSSAKSDQRDALTIANITREGKYIDTVIEDGVLRQLRTLSKARERLLRYSVSAKNSLHAALDDYFPELHEIFWSMGSRSLWTILEQCPFPQDVMLMEVSTLQNLIARSSRKKAGSVHKAEKLIEAAQKSIGVKQIGNADRYRVQMCLEEVKRTVLSLKNIDKQLKFLLKETTAASYLMSIPGIGPLSAAVFLGELGDYTHFHNARQIVKYAGYDPQESDSGSRIGRKFISKKGRWLLRKYLFFMSMRVVVLSNYFQEYYLRKLETKNRVGQQPRRKEMLCAVAIKLIKVIFALLRDKREFEDLVPVAA

SEQ ID NO: 139668 - protein, 427 aa, unidentified
MDYTQNAKISQVSEQTLILGVDVGSEVHFTRAFNWRGIELSKKPFHFTNDAVGFQSFFRWADAYAKTIKAEKILVGCEPTGHYWFNLAKYVTEQGMTLVLVNPYHVKQTKELDDNSPSKNDRKDPKTIAQLVKDGRYVIPYLPDGVYAELRSAVATRDRIIKELNALTNRIKRMLKMYFPEYLKVYKKFSAESGMLLLEAAPFPADILRQGAEGINQIWRAHKLRAVGMKRATTLVKAAQSSVGLDAGPCVRLELQLLLEDFRTKQAQLEAITTVLEAETLKVPHVEKLLAIKGVGLITVAGFLAEVGEIGRFDSPKQIQKLAGLELKENSSGKHKGRTSISKRGRKRLRKVLFQAVLPLIRSNAEFSEVYHYYTTRQSNPLKGKQAVVAIGCKLIRVFFAILTKGIDYDANRLRSDILRPGQRRAA

SEQ ID NO: 139669 - protein, 385 aa, unidentified
MDQTSSFTLSANILHCALELSKKSWLLAIQFPDREQPSLYSIEGGNTEKLMAKLIAARDCWAKTSGALPVITLCYEVGYDAFWLARFLRAGGIECLVIDPGSLQVNRRGRRVKTDRVDVKMLLRTLIAWCRGERHVWSLVRIPSVDEEDLRRSHRERSRLVRERTAHINRIKGLLFGQGIRGINVKSKYKTLTVDQLVTGDGHRLPPRLAGEIAREIQRLAMVQEQIAEIERERDTAPTPCEATERKRHLLLQLKSIGPAISALLSREVYYRQFANRRQVGSFLGLTPSPYSSGEEERCQGISRAGSGHVRAIMIEAAWLWIRHQPKSSLTRWFLERTAGQSTRLRKIMIVAVARKLAIALWRYVEHGLVPQGAILNPPTTGNAR

SEQ ID NO: 139670 - protein, 424 aa, unidentified
MPHRPHEPFAAFVGIDWADAKHALCLQAAGSTTREAHSLDHTPEAIDAWVCTLRQRFGGRPVAVGLELNKGPIVSALHKYEFLVLFPVNPLTLARYREAFTPSRAKDDPTDAELQLELLLKQRDKLQPLQPQSPQMRALAQLVEARRRLVGDKVRITNRLTSALKNYFPHVLRWFEDKDTVIFCDFLSRWPTLKAVQLAHRATLATFFRDHHVRSAEVITQRLQAIKAATSLTTDEGILTPNVLLVQALVAQLRVTLQAIADFDHAIAQHAQRHPDFPLFQALPGAGPVFAPRLLVAFGEHRERYTSAAELQKYAGIAPVTERSGKKSWVHWRWQCPTFVRQTFVEWAGQTINKSFWAAAYYRQQRAKGSSYQAAVRSLAFKWIRILYRCWQTRTPYDESRYLNALRQRGSPLLKNLTLNGQNA

SEQ ID NO: 139671 - protein, 400 aa, unidentified
MRTVFGIDVSKASSEVAILVNGERVHSYTMPNDIIGFSHLLKDLKTVSNPEIIFEATGVYSRRLQAFLEENSYDYTRLNPLEAKKQLDSLRVRKTDKIDAEKLASSQFVLNRKSTYVQEEVYQNLHDLSRFYQNLTEDIVRTKNRLHKVLQVAFPEIENILSTPTGEQYWNLVSIFPTKHWVLELSEVELKETIRNSTSKRISENRVGNLAEKLVGLAKQSYSAISKTSPMIEEVKYNAQELIRLTNRREQVLQQLIALAEPLPEYEILLSIPGIAETTATSIIGELGDIRRFKSANQINAFIGIDLKHYELGDFLGQEHITKRGNPYARKIMYKCIHNIASASHTNPCHIADFYEKRKRQSQTTSTKPHTIASIHRLIRTMYYLIMHNKLYDYTLAKSH

SEQ ID NO: 139672 - protein, 343 aa, unidentified
MQAVTTIGLDIAKSVFQIHGVDAAGNVIVRRQLKRRYVLPFFQKLPPCLIGIEACASSHHWSRELTALGHTVRLMPPAYVRPYVKRQKNDAADAEAICEAVTRANMRFVPTKTLEQQSCLMLHRTRHLFIRQQTAVINAIRAHLAEFGIVAPVGRNGVEQLLDVVADASDKRLPEIARACLLALGAQLRTLKVQILNFDRQITAWHRSNEASKRLDEIPGIGPALATALVASVPDPKAFRSGRNFSAWIGLVPKQHSSGGKDKLGSISKQGDRYLRSLFTAGALAVIRYAKIHGTKHRPWLTALLARRPTKVAAIALANKIARMAWAMMARGDRYKQPVALAA

SEQ ID NO: 139673 - protein, 339 aa, unidentified
MQISVVGLDIAKQVFQAHAADAEGHALAQVKLRRSQVLDYFRGLPPCLVGIEACATAHRWARELIALGHTVRLMPPAYVKPYVKRNKTDAADAEAISEAVTRPTMRFVSVKSAEQQAALMLHRTRELLVRQRTMLATSLRAHLAEFGIIAPQGIHRVEKLAAEVHNPAVPPLARDALMVLVGELASLWERIDALEAQIIARHRADEVSRRLASIPGVGPITAMAIVSTVPDPSMFRSGREFAAWLGLTPKSHSSGGKDRLGRISKRGDRYIRHLLYVGAGNAIRFAKARAATGEAWIRALQERRPPKVVIIALANKMARIAWALMMRGESFRPPAVAAA

SEQ ID NO: 139674 - protein, 355 aa, unidentified
MASRKYIGMDVHKESISIAVRNSAGKIVMESVIEAKTNTILDFIDGLRGEVYVTFEEGTWSAWMYDLLKPHVTKLVVCDPRRNALLKEGNQNDRIDARKLSELLQNNQLRPVYHGDHGLRAQKELVRSYLTLTKDLSRVMTRVKAIYRSWGIPCDGTQVYSRCHRAEWLAKIHEPGVRRRAEHYYLQMDALRLLRLETRKDLIAESKKHTIWKRLRQIPPIGPIRAAVLLGIVQTAHRFRTKRQLWTYSGLGIEVHSSADHQVVKGQLQRKKKPIQIHSLNRNCNHDMKNVFKGAAATALAKPGPLQEFYAALVAKGMRPEMARLTLARKIATITLIVWKKGVSFDASHLKPQTA

SEQ ID NO: 139675 - protein, 358 aa, unidentified
MKYVGIDVHKKMCQAAILDDDGELFEETGFTNTPEGIERFAKRLKDLEGQVHAVLESTGNLWIQIHDRLEEHGVPVALSSPANSRLISESRLKTDRTDARALARLHRAGVLSTCYVPGALERNRRGLLRHRLRLVKNSTAVRNRIHSLLDKHGVRVPYKTKFSKKAVRWMKGLSLGFIDDAILRSDFALLEALDEQVASVEEKLAALAVDDPKVRLLMTMTGVDYFSAMMILAEMVTADRFRCDKQFCSWMGVTPRVWQSGEKTWIGGIGGPGNRRMRWLLVQCAHTARRYDPRMRRLYERHERRKGGKCAVAVVAHEMARIMYYMLKRDEPYRGVKVELWERKLKRMEKNALNGLRN

SEQ ID NO: 139676 - protein, 347 aa, unidentified
MLIIGCDFHPGFQQVAIFDNRTGEIEEKRLQHRAEAEQFYRSLAGQEVRVGMEACGHYPWFERLLAELGFELWFGDAAQVRASVVRKQKTDRRDAEHLLHLLLENRFPRIWVPSLEVRDVRQLLVHRHKQVQARTRTKNQLQAMALSHGVQKKHKLWTKAGRIELEQVPLLPYAAERRQKLLAALDQLEVEIVELDRRVGEEVKQHPEAGLLMTHPGVGPVTGLAMVLTLGPAERFESAKQVGSYFGLIPREDSSGGKQRLGKISKQGSSFLRFLLVEAGQTAARYDPQLKRFYQRLAARKNRGVAKVAVARKLATRMYLMLREGWTYAQLSAAVMSVSPSHSVAGE

SEQ ID NO: 139677 - protein, 477 aa, unidentified
MPLLGRNHNQTNMKSKTPKSKERKQKVSVDQGWEVANPHAAGIDIGAKEHFACVSAKATPKNIRSFGTFTADLNALADWFKECGVTSVAMEATGVYWIPVFQILEERGFAVILVNARQTKHVAGRKSDVQDCQWIQRLHTYGLLQGSFRPEDPYCVLRTYLRYRDELVSARSTQCQHMQKALQQMNVQLVQVLSDVMGVSGMAIIQAILAGERDPMKLATLVDHRVRATPATIQKALEGDYREEHLFVLQQAFSLYGTYEEKINACDEQIVRETATLSDKVDPQFNPLPPRKEGRPACKDKMQGQDMREVLYRKFGCDLTAIEGIGVTTALVVLTEVGPNMAGFKTEKHFCSWLGLCPDNRISGGKVLSSHTRRVINRTSDALRMAAVTLERSQSALGGFYRRMKGRLGAAEAITATAHKLARIIYRLIKHGEAYVRQGIEDYERKFRERKLYALKKTAMSMGFNLIAKQELASAVS

SEQ ID NO: 139678 - protein, 338 aa, unidentified
MALELLAIDLGKRSFHLYGIDTNGEILSRKVSRTKLAEVVNNLAPKAIAMEACASAHYWARCWLAAGREVRLINPRFVKPFVKGSKNDAVDAEAIFEAAMRPTMRFVPVKSRDQQDLQSLHRARDRLICQRTALINHTRGLLAEYGVVLPQGPWRFTAQAPAAVAGAELSDLARSIFGELMDQLDELDRRVKKLDATMVALCRTNETCRRLAKLPGVGPVIATAIVAAVNDGRQFRSGREMAAWIGLVPRQYTTGGKPRLGGIGRRANHYLRRQLIHGARAVVSRLPRHDARHDARRSTWLKALVARRGFNRTIVALANKTARIAWALLNRKEDYAIT

SEQ ID NO: 139679 - protein, 400 aa, unidentified
MNPVVGLDVAKGESQVQAFLDKSKPFGKSYSMKHTKEELDRFIGFLKEIEGMTGQMPMVILESTGHYHSPVIQYLEDHEVLYILLNPIISYQAKRSSLRKVKTDAIDAYQLCVLYYKEDFEPHKNRGIQLLNLRNLSRQQEIVTNMYVEAKLQFHTILDQVFPEYRKVFGDLYSKVSLMMLKKYPTSEDILAAGESKLAECVMEFCPRRSSLWALDKAKKLMDSASRNPFQKVVYHSHLINLQMYIEMLFQYQEHLSELEIRIVTLANELEDYEIVQSIPGIGEKIAATIISEVGEIDRFSHPKKLVAFAVVDPSVHSSGKFTATTNRITKRGSSRLRHALYLAVLCGIRSSRNKKLKEFYDKKKSEGKPSKVAIVACINKLLHWVYALLNRKESFQDIA

SEQ ID NO: 139680 - protein, 351 aa, unidentified
MGEVTTIGLDVAKNVFQVHGVDAAGNTVLRKRLTRSRLLGLFEGLPRCLVGMETCSGSHHWARELAKLGHEVRVIPARYVKPYVKTNKTDARDAAAICEAVSRPDMRFVPVKNTEQQAVVVIHRTREILGRQRVMLINALRTHCAEFGIVAPQGARHVGELVARLTDPDDTRIPDLAKQALRVLVEQLEACGERLSTIEAQLLAWHQSDADSQRLATIPGVGPITATALAANLGAGTQFRSGRDMAAWLGLVPRQHSSGDKVWLGAISKRGNSYLRRLLIHGARSVLRWQAPESRPGTPWVKKLIKTKHANVVATAMANKNARIAWSVLTRKEVYDPHRQADVDATAALRG

SEQ ID NO: 139681 - protein, 329 aa, unidentified
MHYLGIDVAKAKLDCCLLLELSSCKRKTKSFSNNDSGFTELVHWLDKQRISASDTHAVMEGTGVYHERAAIALHDAGMQVSIINPAQARDFAKGLAIRSKTDGLDSLVLARYGALVQPTIWIPPTPQARALQALLSRVDAVHQDLLREKNRQEKADATDTPELIRQSLADSIMFLQTQLKKLRQGIDDHINRHPELRDDAALLITIPGVGIKTSQHLLSVIHLHHFHTAERLAAYLGVVPIQRQSGSSVLGRPKLSKTGPSHIRAVLYMAAVVASRHNPHVKALYERLIASGKSKMSALGAAMRKLVHLCFGVIKNRQPYNKNYSQESC

SEQ ID NO: 139682 - protein, 387 aa, unidentified
MYYIGIDISKFKHDCAVIDDVGDVVTPSWSFANDHEGFLQFKALLDSLGSETRIGLESTGHYGTNLKLFLESCSTTFMEFNPLLINRFIKSKSLRKTKTDSIDCEMIARYLMTVEYKPYPSSFYHTEKLKSLTRFRDNLVRQRSRQLVELTNILDKVFPEFKPFFKGKFSTTAFHILVNYSSPESIANMNSKSYETLRKLSRGRFSLADFTTLKHIARNTVGRPDDFLLSEMAMVIDIFSQLDSKVDETEALIKECVLEINPPILTIPGIGVDSAAVILAEFGDFSKFQNPAQLLSFAGLEPGYFQSGTSESTGKMVKHGSSYLRYTLMNCAQSVANYEPIFAEYYSKKRAEGKTYRVALSHVTKKLVRVIFTLQTKNLVYDPDAIR

SEQ ID NO: 139683 - protein, 414 aa, unidentified
MDRVVERCCGLDVHKASLTACVKVPAESGGPPHQEVGEFATTTQGLLKLRDWLASFEIELVGMEATGVYWKPIYYMLEDDFECWLLNARHLKNVPGRKTDVKDAEWICQLVEHGLVHPSFVPPKEIRELRNLTRYRKAQIEERTREVQRLDKVLQDAGIKLSCVATRVLGVSGRAMLDVLVEGTTDAEVLAELARGKLRSKLPALRDALEGRFSSHHALMVGKILAHIDYLDESIAELSVEIERVIAPFSDKVELLDTIPGVDRKTAEVLIAEIGADMSQFPTHAHLASWAGMCPGNDESAGKRRSGKTRKGSKWLRSALIEAARAAARSRGTYLAAQYARLKGRRGSKKAAVAVGHSILVICYHVLERKVPYEELGEDYFHRQRSGEAYTKRLVRQLERLGHKVALEPLPQSA

SEQ ID NO: 139684 - protein, 352 aa, unidentified
MKTYYGCDAHKRYSVFGSVNERGQPGVLHRVDNDRPLFRRFLTSLPLGSPIAVESVGNWYWMIDEMEEVGHNPILVHAAKAKLMMGQINKTDKLDAVGLARLLRNGTLPSVWIPPRELRDQRELPRLRMALVRIRTLLKNRVHATLSKYGIQIGEVSDVFGVGGRALLKNRLQELPPQTRQSVDVQLGLLDQLEEQIQATEDQIKAVVAATPEMKLLMTMPGVGPILAVVLALEIGEVNRFPGPEHMASYAGTVPRIKSSGGRSFFGKVRPDINRYLKWALVEAANIVMINQSRWADRHVVQLYQRIKDRKGHAKAVVAVARHLAEASYWILKKQEPYKEPGRKTPISSSRK

SEQ ID NO: 139685 - protein, 412 aa, unidentified
MKDLLEISCGLDVHKEKIVACILTGPLGKPTHSEIREFSTLIPDMIALRNWIVSKNCHHVAMESTGIYWMPIYEILEDAFSGDITLLVVNARHMKNVPGKKTDMRDSEWISTLLRAGLLNGSFIPEKRIREFRDLNRYRKSVIRDITSQKNRIEKFLQSSGFRLSSFISDIFGASGRNIILHLIEHGQIDKTALDSCLKTKTRNRIDEILMSVNGTLSEHQKAFLRILMTHYDSLKKHLAEIETSLDEDMAPFALQVEQLNSIYGISTTASCAIIAEIGIDMKPFKTAEHICSWAGLCPGNNESAGKRKSTSVTKGNPYIKSMLCEIAWVIAGKRNTYLSAWYWRIKQKKGAKKAIVALARKLLVIIYTMLKQGTLFDESCFETRRKHCEQKQLSRYIRELEKHGYHVEAQS

SEQ ID NO: 139686 - protein, 347 aa, unidentified
MKKVSVIGMDMGDKNHKAVGLSEDGEIVDRAEVLCTPEDVREYLKRHPGALLAIETGTHCRWVSKLGLELGHEVLVGNARKLRMIWDSSRKNDWRDAEMLAKVARADRSLLSPVRLRGEGDQELMRMVKSRDLLVKSRTGIVNQIRGFCKSEGFRLPKRSAASFARLEDDVPPAVREVAKPLFAVLKELAKKIGLYDTMIADAVKRLHGEEAALLEPIAGVGPVTAAAFLAAVGDVATFGSARDAGPYFGLVPRQDQSGQTDRQLRISKEGNEVVRRLLVTAANYIMGPFGKDCDLRRHGMRIAERGGKNAKKRAKVAVARKLAVLMLAILKSRTAYRPLTDVEAVA

SEQ ID NO: 139687 - protein, 373 aa, unidentified
MPKYSTAFGMDVHLRSTTVCALDADTGEAVTRRFPGNPWGEIAGWMDGFPGPSLAAYESGYLGFAPQRELAGLGVECVVAAVSKIPRSAADSASKNDRNDAARMAKAILAHDISPVWIPSPEVEGIRDLAGAYDGATARLATAKQRLLAFLAKRGFVYGGTTPAGNPRKYWTYDFLRWLDKVRPEDDGGVRTLAALRNEVEAAAEARADLLSEYRAAVDASPIAAEVAALQSIKGCAFALAAAFSAEVGDFTRFRSGRQVTAYFGLAPSQRSSGDSVRLGGISGAGNALVRKLAVEGSWCYAAARHQPKLMPRDAGVPLEIRMHGRKGSERLLRRREEMLARGVPAAKANAATAAELVRWLWALGMMCREGAE

SEQ ID NO: 139688 - protein, 319 aa, unidentified
MTASLVVVGVDVAKDQLDVAVRPSGEAWRETNAEAGITALVARLRSLGPALVVCEATGGFERAAIAALAAAGLPVVVANPRQVRDFARATGQLAKTDQVDARILALFAERVRPTPRLLPNAAAQLLDAVLTRRRQLLEMLVAEKNRLGFAPKPLHRGIQAHIRWLERQLDDVTKELAALIEASPVWRAKDDLLQSVPGVGPIVSSTLLGELPELGTLSHKQIAALAGVAPLARDSGTLRGKRMIWGGRASVRTALFMAALCGRRWNPALKVFYERLIAAGKPKKVALIACARKLLTILNAMVRNNTRWMRQSATLQYSC

SEQ ID NO: 139689 - protein, 400 aa, unidentified
MVRKRKAYCGLDIHKETEVATILPGKLMRKFEISLEGYGDLISWLKENGCTDVVMEATGVLWIPTYEALTAAGMKVVLANPEQVKAIPGKKTDVNDSEWPATLLKNGQIKPCYVPDEETKKLRELCRTRGEFVRSRTDFANRVHRILDRKGIALSSVYSDIFCRASREVLDGLVGGKSMGEITGSTDNKYILDRREKLLKAEKGRLDESDRLQLRLYLETIDYLNSRIGELEEMILSVAPKGKVGILDSMPGIAEISAANMIAEIGYERRFELDSQVVSYAGMNSSVYQSAGKTHYGPITKKGNKWLRTAMVEAALAAIKVKGTALREFYDRIKSRHGHKKAVVALGRKMLCIAWHMLMNNEPYREVESKDREKMQAKRLQAMARTLKLAGYTVGPPPAT

SEQ ID NO: 139690 - protein, 343 aa, unidentified
MHKSSAELLTCCGIDVSALQLAVAVQTEDARCWQRGFPNRASGHRALIVWLQKIGGRVRVCLEATGLYSLDLALALHAASGIEVAVLNPKTANRFAATLCRSKTDPADAQVLCEYARRMPFQLWQPPSSIALQLRALTRHIAALTQQHTRDSNRLHAVSASIAGSGCVRQDLQRSLRQLQHRAEKMRAAALALIQQDAELRPRFALLLSMPGIGEISALHLLGELALLAPGLSVRQWVAHSGLDPAHHESGSSVRKPARISRAGNRYLRRALYMPALVAVRHDPHLRAFYQTLLARHKAKLQALMAVARKMLHAIFGMFRWRSAYDGSRLLPKIELPALAAVA

SEQ ID NO: 139691 - protein, 391 aa, unidentified
MIYVGIDVAKDKHDCFITNSDGEVLFKPFTISNNREGFENLFQRIESVSDDFTKVKVGLEATGHYNYNLLGFLIDKGLPTFVINPLHTNLFRKSLSLRQTKTDKVDAHTIALMMMSGVNLQSYSDTSYHNEELKSLTRYRFDKVQERAKLKTSISRLVNILFPELEKLVPTLHMVSIYALLAEFPSSAQIASCHLTRLTNLLANASKGHYNKEKAIEIRNAAKHSIGSNMPAKSLELKHTIRLIQELTSEIDEIECSIKSIMDDIRSPILSIPGINYRMGAMIIAEIGDFNRFSSPDKILAYAGLSPSTYQSGQLDGCYSHMEKRGSRYLRYALFNATKFVCIWDNQFSAYLAKKRSEGKHYNVAISHAAKKLVRVIYQLEKSGQLYHRAA

SEQ ID NO: 139692 - protein, 313 aa, unidentified
MPEPLVYVGMDVAKAHLDLHALGRSQPTHRRFGNDEPGHQALVSWLRQWEAVQVVCEASGGYERAAVRRLQAVGIAVSVLNPRQVRDFARARGRLAKTDRLDAAVLAEYGQCLRPPAQKPRPATQAQLAELVARRHQLQQLRTAELNRREQTTHPALRRQLQRHVAVLERQLQQLDGWISELVSADQSLAQKVARLCLVRGVGTVTAWVLLASLPELGTLNRRQAAALAGVAPFNRDSGAWRGHRMISGGRAPARRALYMAALTAAFANPRFHQFYARLRAAGKAAKVALVAVMRKLVILLNRILQDPLFQPS

SEQ ID NO: 139693 - protein, 434 aa, unidentified
MNQQTTTSTAAPPPDYAAFVGLDWADQSHALSLSAAGSTAQERTTLEQTPEALAAWANSLRARFPNGRVAVALEQARGALLAGLSQYEHIVAFPVNPKTLACFREALYPSRSKDDPVDADLLLELLLKHRDHLRPWQPDTAQTRQLALLNEQRRHFVDHRTCLTNQLQAHLKAIFPQALALLGEDLASPMATDFLKKWPTLQAVQKAKPAQLRKFYYGHNSRSEELITQRLELIQKAVALTTDPVLLASHSLAIQILAAQLATLRPFLKQYEEQIAELFAAHPDAPIFHSLPGAGAILAPRLLTSLGTDRGRFSNAQAVSCYTGIAPVTERSGKNQFWVHVRWSCPKFTRQSWHEFANSSIKYSAWAAISYHQLRKRMDHHQAIRKLAYKWQRIVWRMWQERKPYDENRYLAALEKRGIKLVAVQALELTKSGE

SEQ ID NO: 139694 - protein, 403 aa, unidentified
MDTTVSDFMKGRYNLMIYVGIDIAKLNHFAAAISSDGEILIEPFKFTNDYDGFYLLLSKLAPLDQNSIIIGLESTAHYGDNLVRFLISKDFKVCVLNPIQTSSMRKNNVRKTKTDKVDTFVIAKTLMMQDSLRFMTIDDLDYIELKELGRFRQKLVKQRTRLKIQLTSYVDQVFPELQYFFKSGLHQNSVYALLKEAPTPTAIASMHMTHLAHLLEVASHGHFGKEKARELRVLAQKSVGVNDSSLSIQITHTIEQIELLDSQLFHTELEMANLVTCLHSVIMTIPGIGFINGGMILGEIGDIHHFSEPKKLLAFAGLDPSVHQSGNFQAQRTRMSKRGSRVLRYALINAAHNVVKNNATFKAYYDAKRAEGRTHYNALGHCAGKLVRVIWKMLTDEVEFNLE

SEQ ID NO: 139695 - protein, 362 aa, unidentified
MMLVVNKTSKTKERRAVNNHNSKGNITTLGIDLAKNSFQLHGVNEKGDRMLRKKLTRRQLTAFVANLEPCLIGLEACGGAHHWVRVFSQFGHTVKMIAPQFVKPYVKSNKNDAVDAEAICEAVQRPSMRFVPSKSLEQQDIQSVHRIRSLLVGRRTAQANQIRGLLMEYGVVIPQGIHQLRRAIPEILEDAENTLTAYFRELLQELYEEIIHFDQRIETIELKLKRVSEQNKDCQRLLTIPGIGLLTATALIAAIGDISAFKNGRELAAWIGLVPHQHSTGGKPTLLGISKRGDSYLRTLLIHGGRSVVRVASRHQDKRNQWITEIKQRRGENISNVAVANKNARVVWALLTNKQDYNVVAA

SEQ ID NO: 139696 - protein, 359 aa, unidentified
MRIIGVDLHTRQQSVAMLETETGELVEKILEHEGEKVREFYSALPGPVLVGIEATGSMPWFLKLMEELKIECRVGHPAKIRAAEPRKQKHDRRDARLLLNLLAENRFPSIWMPSTEQRDLRTLLRHRHQFVRMRTRVQHTLQSMALANGLRRGVTLWSQAGQHALQALPLAPHASERRATLLTLYPALQKPIDDLDHQVSEQALLRPQARRLMTHPGVGPVTALATEVFLGDPLRFTDGKAVASYIGIIPREHSSGGRRQRLGALSKQGNALVRYLWGEAAMHAVRRDPELKRFYGRKLIQKGLGKARVAAARKLGIRLWIMLRDQIDYEEFCRRGRMRQKSGDARAGMPGPINGPAVQ

SEQ ID NO: 139697 - protein, 453 aa, unidentified
MNQLSFNIINPQAAGIDVGSRTHLVAIDQNKDNVREFGVYTKDHQEMINHLRQHGVTTIAMESTGSYWQTLFSALQHAGFNVLLVGGNQTKNVKGRKTDVIDCIWIQKLHSLGLLSGSLLLSDTFQQLRTYYYHHLHLVQQSARYSNKMQKALRLMNIRLDVVINDITGQSGMAVIEAILAGQREPEHLVSLVSHRVKKSRQEIADALQGWWREELLFELQASLDFYRLYERKIKECDQVIETFLVKYAPEVEVSIDEKKQLKTNRKRAGKHAPSFNLSHLAYQYFRTDLFAISGISYNAVLCLLTSLGHDIHKFPTAKGFACWLGLVPNNKISGGKVIGNRTPSGKNHIAKALRHAANSIGNQKDHELTPFFKRIAFKKGRLAAIIATARKLAVIIWNMIVKAEPYQKNQMELSNEKQKAMKLKHLDKKLHALQLTKEELEKLFLKHSLSVT

SEQ ID NO: 139698 - protein, 348 aa, unidentified
MKYYAGIDVSLADASMCVVDETGRTVVEGKVASEPETLVAFLNNTGLEFERVGLEAGPLSQWLYAGLAEAGQPVVCIETRHAKAALSAMTIKTDQKDARGIAQIIRTGWYRAVHVKTPASQELRMLLTSRKFVVRQLVDLKNEIRGILRAFGLKVGKVGNVGFEARVRELVGHQPRQRAVVEALLRARTALLAEYDVLHRMVLRAARKDAICCRLMTIPGVGAVIALTYRCAVDVPSRFAKSGLVGAHFGLTPRRYQSGEKNVSGRISRCGDSLAREALYEAATVMLTRTRSWCTLKAWAMRIAQRRGLKRAKVALARRLAVIMHKMWVNGADFRWGHEAPGGVAATR

SEQ ID NO: 139699 - protein, 324 aa, unidentified
MIDGILGIDVSKNTLDASMSSCNKVRAKSFANSPDGWRHLLDWLIGQKIRRVHACLESTGLYSLGIACKLNEAGHVVSIVNPAQIRDFARTKLGRNKTDAVDASHIREYCELFKPPPWSPPSHAHRQLGELQTIRAGIVAGLTEWKNRKNSGMIDGVAQSLADATISHFTSQLGAVEKAIAQAIDNDTDLRRKRDLLLSISGVGETLASVVLAELPGPDVLRSSAEAVAYTGLNPRRHQSGTSIDRLTRISKIGNAVLRAALYMPAMSAMRYNPAIVALVTRLKARGRLNPKQIVVAAMRKLLVLCFGVLKTGKPFDPALAMGC

SEQ ID NO: 139700 - protein, 338 aa, unidentified
MQVTTIGLDLAKNVFQVHGISDNGDVVFNRALRRAQVLSFFEKLEPCLVGIEACGTSHHWAREISKLGHTIKLIPPVYVKPYVKRGKSDAADAEAICEAVTRPTMRFVEVKTPEQQAILAVHRTRDLIVRQRTQTINMLRAQLAEFGIVRPQGIYHALQFAKDCLNGEQSDLPEVAGDVVFELCDQLLFLHSKILRCSRQMNQIAKLEKRVALLRTIPGVGPITASAIVATVGSGKFNNGREFAAWLGLTPLNKSSGGKERLGHISKMGDQYIRRLLVLGMTSRIRSIRTKPEKFDPWFADILSRKPGRLAAVAMANKTARIIWAVLTRNEPYKVRTV

SEQ ID NO: 139701 - protein, 407 aa, unidentified
MDSLKTVFGIDVSSRKSNVCIMVNGQKVNDYAISNDMVGFNQLLDDLKQVTNPQIIFEATGVYSRRLQAFLDMHDLRYVMMNPLEAKRKTKDDLHQNKTDKLDAMYLAKMQSEHPQRLAYVQSEEYQELMANNRIYEQASHDLITNKNRLHKAIQLTFPEIEHLLANPRGKNYWSIVLKFPHPNIVLETKEADIIDFLKSLSGIGEKRANDLAQRLIRLAKLACPAVKKSSAHIRGLEMAINNILSAEETCQTALKEMAKLAPKRDLEILKSIPGIAENTALRIISELGDIRRFNKPNQLNAFVGVDPQVYESGNLTAHLSISKRGTAIGRKVLYLAINQIQSAKKAGNPCHIADYYEKRKRSSETASHKKAAIASIHKLLRTIFALITNDQLYSYDIAKHNQRLLS

SEQ ID NO: 139702 - protein, 369 aa, unidentified
MKNVTTYVGIDAHKKDLFIAMLVGQEKTPVTWTVPNEPSAIRRLVRKLERDAAGPVRACYEAGPCGYALQRRLTTPRVSCQVIAPALIPRKPGERIKTNPRDARKLVELLRADLLTEVHPPTPEDEAVRDLCRARDDAREDLQRCRHRLGKLLLRRGLHYTAGRHWTQGHRRWIGSLEWTHAAERSVVDDYLLAIDQVEARLKELDHRLTEVAETEPYKERVGWLRCFRGIETLTAMFILAELHDFRRFHSARALMAYLGLVPGEDSSGEKHRRGRITRTGNALVRRVLVEMAWHYQHRPGVGGALARRRRGQPSRIIAIADKAQQRLCRRFRLLALQHKPGPKIAVAVARELAGFLWAALQPAAPTQA

SEQ ID NO: 139703 - protein, 390 aa, unidentified
MYVGIDVDTDNCHVILLDGNGEEIDSYRIDNTSKEITRLMQKIPNDAEIVLESSTLGKPIYWQLKKAGRNVHMAAPSKIALISQSKKKTDDHDSRLLADLLRLGYLPESYVPSEEIEELRKMVRYRKSLGEKCAVVKNQVHALLARNGIKNEFSDLFGRTGMRSFMELRLPVMEKIILEGCVREIGFLSEEINMMDIRLAEVAGNYKEIHLLMSIPGVDYYSAMVIFTEVGDVHRFPAAKKLVGYAGLAPRVYQSGKTTHYGHISKDGPSILRWVLTIAAQGAIKKPGKLQRFYKRLSKRKGGSKAIVATARKLLIIMYHMLMNHQEYEERDDDLTCRKIRRMNMKAKRMMNIKENGGPIVEKHKMLMEKGLKMLISEEFDVSLGTKQFS

SEQ ID NO: 139704 - protein, 532 aa, unidentified
MREPQEIPDEEYEQILERVAAVDVAKASGMVCTRVPHQDRPGKRRTRVWEVDATTNAVLELGEHLAGERIEKVTLEATSDYWRIWFYLLEAAGLQVQLVRAQDVKQAPGRPKSDKLDAVWLAKLTERGMLRPSFVPPAEIRRLRDYTRLRTDLARERTRHYSRLEKLLEDALIKVSAVASKLDTISVRDMLEALIAGERDPKVLAGLARGRMRVKHAALVEALTGRFCDHHAELARMLLDQIDALTAQISRLTARIEGLIAAIPAAQGVDAGGTTGPGAGLAEGAPVLPAIDRLDAITGIGRDGAQAIIAEIGLEMSVFPTPGHLVSWAKLSPRTIQSGARSRSGRTGKGNPYLKGMLGEAAAAAAKTDTFLGERYHLVFVHSSGRLIVFESDSGIPATIEVTPYRVSVGFDEEILVAFERGYVRLRPAPSLAINRAGTLDVYRDRGNGAVPELSSPQLRWMDPQQAQASDFLRVCRGETPPPTGVDEAAEDLHLVSDIVRTRVALPGARELIRAERTDHDQAWQERLSGKR

SEQ ID NO: 139705 - protein, 345 aa, unidentified
MDKVTCFVGLDYHQHSVQVCVLDESGRQLLNRSVANDWRQIRDAVEPVGMVRRAALEACCGAADLGQELIERAGWAVDLAHSGYVARLKQSPDKSDYSDGRLLADLTRVGYLPRVFLPSAYERDLRQLVNHRQDLVDRRRAVKLRVGAVLREHRAKPPKELSRWSKAWRLWARSTEGLSDHARWIVCELLEEEAELDKKVIKAEGRLRQASDGDGLFKKLMKEEGIGEVTAWVLRAYVGDFSRFNNGKQLSRYCGLSPCNASSGQRQSDAGLINGCNKLLRATLIQAAHRLGRTSDRWAGLKRSLVGRGKAKCVATAAVANRWVRGLWHRLKADPQPPQQPRTAE

SEQ ID NO: 139706 - protein, 390 aa, unidentified
MELPMQKLNDLSRSLIALEPDGTLIAVIEMSLSSWLVAGIVPGVERQPLKKLAVDESALLKLLHRWREEAEKAGRRIGRIAVAFEAGRDGFWLARWLKARSIEAYVIHAASVAVSREHRRAKTDRLDTELLKRAFLGWLRGERDHCKMVAIPSIKNEDAKRPNRERENLVSEQSRIINRMKAALIRLGIRGFNPKLKRAAGRLEDLRTPEGEPIPPNTLAELRRDMERRRLVRDQIRQIEEARLERLDHAPGDGPHAMVRLLVRVIGVGIETADMLVHEVLSRNMRDRRAVARYAGLTGSPDESGRKRREKGLARSGNGRVRRGMIQLAWRFLMHQKDSALAHWFRARTENARGTRKSMIVALARKLLIALWQLVRQGVVPDGVVLRPAQ

SEQ ID NO: 139707 - protein, 361 aa, unidentified
MSHDVKYIGMDVHKEAIVIAVLNESGKQVIESVIETKASSILQFLHSLRGELHVTWEEGTWAAWLYDLLQPQVQHIVVCNPRRNALLKEGSKSDKVDARKLADLLRTGMLRPVYHGENGLRTLRELGRSYQTISKDLTRVMNRLKALYRGWGIPCAGTQVYAARTREEWLSKLPQAGVRRRAELLYQQLDGLQALRREVRPEFLTESRKHKAAKLLRQIPCIGPIRAARLIGLMQTPHRFRSKRQLWTYSGLGIETHDSAQYRYVGGQVQRSKKPQQIRGLNQNHNHEMKEIFKSAATRASCGRGPFYDFYAALLAKGMNEAGDGASDAGAQDRGHYVDTLEEGGTFRRRTTEDASSLSIE

SEQ ID NO: 139708 - protein, 317 aa, unidentified
MEQIYTGIDVAKDSFVVATRLEGKVTTTSYNNDKKGIAGFLKSLSDNTWCIMEATGVYSLQLAIALYEKGIKVSVVNPLQIKRFAQTKLKRTKTDQVDAALIAEYGERMQPKLYEPPAPFMRQLQQLRMSLKLLVKTKRSFLNQLHALNQLEEADKVALKACKTVLKSIEKQVKELQDQMELLAEEHCQDLFSLLQTIPGISKKSALELIIVSCGFKNFTSAKQFSAFIGICPCINESGTSIRGYRGISRIGDKNIRATLYMCSLAAKVYNKGCQQLYDRMLAAGKAKKVALVAVMNKLLKQVFGIVNSGEVYCVNS

SEQ ID NO: 139709 - protein, 354 aa, unidentified
MAKTIQAEQSGFATIGIDIGKDVLHLVGFDHDGRITLRRKIKRLALVSTFEALSPCIVGMEACLSAHFVSRTLRKLGFEPRIIPAKYSKPFIKGQKNDYNDAEAIAEAALRPNLNLVAEKTQAQLDLQALHRVRSRLVSRRTATINQIRAFLIEQGIAVRTGSRALRNSLFAILKNRTDEISPRMSAIIIDLHDDWSALDDRIARISAEIEEMSQQEENCRRLMSVPGIGPIISTAMVAAIGTGEAFDRGRDFGAWLGLVPRQFSTGGSTILGRISKRGSRYLRTLFVQAAHIIMMRPKNWERFSFGPWLAEATKRMHKNKAAAALANKLARIAWSILRHGKGFDAHRIEGFAV

SEQ ID NO: 139710 - protein, 340 aa, unidentified
MTSAIGIDTHKDTLAACRVDGSGADVDERTFANDPAGHRALRDWVELDPSTVGIEGSASFGAALARYLVAAGLTVREVPARLSHRERGRSRRAGKSDPGDALAIARVTLREHDLPPVRLVDPTLEVQLLVDAREDLVAEQTRVRNRLHADLRTLLPGYGATAANLTAVHHQHTVGRLLRGLRGVQAELARGRLARLRRLTPDIAGLTAQLTERLAGHPLLSVPGVGVLVAAKFIGETGAVGRFRSADAFAALAGVAPIPASSGQTHHLRLNRGGNRQLNRALYTVAMVQAAHHPPARAYIARKRAEGKSGRDAIRALKRQLVRTIFRLLTEGTHVHELAA

SEQ ID NO: 139711 - protein, 364 aa, unidentified
MNKCFLHTELSSPEETRCQFNGSKADIKLGIDVHQDFYVVVEQVGGSNPKPPQRFRKEAFLPWAAKRKSWGGEVHAVYEACGFGFGLQRQLSALGIQCQVVCPQKLDERNRRVKTDGLDAKALCLRLDRFVQGNKDALALVRVPSEAEEQLRAIHRQREQLVKARKQLEAQGRSLMVNHGIEPVQRWWKPRTFAALQVPQWMKALLSNSQPILAALQEKIRALTVQLQAAARAKQPRGLGALTSVVIDREIGNWKRFNNRRQVASYTGLCPGEYSSGNTRLQSCVTKHGNPRLRAALVELAWRLVRFQPNYKPVVKWRETLRKGALATGAARKKAIVAVARQLAVDLWRIRSGRLSAESLGLSN

SEQ ID NO: 139712 - protein, 405 aa, unidentified
MKVYIGIDWSKDKHDIVFMNEQGGHISHLTIEHSPGGFELFDEKREIMGVQPQQCLVGIETHHNLFLDYLWSRDYSSIFVLPPFQVNRSRGRYGSSGASSDRSDAGLIADILRTDRHRLTPWRPDLPLTQQIASRVSLQSFLTHSIIQITNRLRMVLWRYYPNAAHVFSSLDTQIALEFICAFPTPADAEKLTFEDFRRFAKQHRYPNPKKLPACFARLQRNQPQAEQATVQAFRDEAVRLSKLSLQLVRERALTEREINKLFAAHPDAPIFSSLPGAGKRLAPALLAKFGDNRNRFPTTQALQSVAGTCPFTKQSGKRKYVLFRYACDREFRNIAQMWARASLKESVWANTYFQMALPRCKSFSHAYRRLANRWLVIAWRIWQDGVTYDENLHMRKHAMRVKPN

SEQ ID NO: 139713 - protein, 341 aa, unidentified
MKQIITIGLDIAKHVFQVHGVDESGAVVLRKRLRRSEVLSFFSRLDPTMVGMEACATSHYWARELKQTGHEVRLMPAQYVRAYVKRQKNDMADAEAICEAVRRPTMRFVPVKSEEQQSVLMLHRSRDLLVRQRTMLVNALRGHFAEFGIIEARGLGKVTSLIAILGDEEERIPVSARKALEPIAAQLRSIQEQISQLDANIADWHKTSEVSRRLATVPGIGPLIASAIAASVPDAAAFTSARQFAAWVGLVPRQNSTGGKPRLGRISKQGDAYLRRLLIIGAQSVLRWSRATRRNLWAVALLDRRPRKVAAVALANKMARIVWALMVHREDYRRPVASAAA

SEQ ID NO: 139714 - protein, 313 aa, unidentified
MGPQSVYVGIDVAKATLDVAVHPTGARWTTTHTEREVAGLVPRLTALDPALVVLEATGGLEGPLAGALAAAGLPVVVVNPRQVRDFAKATGLLAKTDALDAAVLAHFAAAVRPTPRPLPDAATQTLAALVTRRRQLVEMLTAERNRLGSAPRALRAEIQAHITWLQRRLGRLDEDLNQAIRTSPVWRAQDDLLQSVPGVGPVLSRTLLASLPELGRLNRKAIAALVGVAPLNRDSGTFRGRRMIWGGRAAVRAVLYMGTLVAVRHNPVLRAFYQRLRGVGKLPKVALTACMRKLLTILNAMMKHQHRWNPTHA

SEQ ID NO: 139715 - protein, 369 aa, unidentified
MAHSTASLPTPATHTTVELVTTLGLDLSDRVSHFHVLLGDGRTLARGKVLTLREPLSELFAEWKGCRLVIEAGGHSPWISRLGKECGMEVVVANPRRVELISKSDRKTDRTDAETLAELGRSNPKLLAPITHRTKEAQADLAVQRARDEVVRTRTGLINHVRGVLKSHGYRAPSCSPESFGRRAVASIPPELTTALLPMLKLIRDVSAQIKDYDKEIERLGREQYPITQRWQKIPGVGPIVSLGYALTLDDPKRFPRSRKVGAYIGVVPGQKSSGKSNPQMHITKAGDREMRRLLVLAANYILGSFGPDCDLRRFGLKIMGAGNDKVAKKRARVAVARKLAVLMHHLWVTGKTYDPFYLAKKRGEPLPA

SEQ ID NO: 139716 - protein, 332 aa, unidentified
MKSWCVTIASEHAVLKRFTQSPSPEALHSFLTRKYPDAEYKSVYEAGFCGFWIHERLMELGIDNIVVNPADVPTTTGEKLRKTDAIDSGKLARSLRAGELKGIYIPDKVSLEIRSLTRLRDSVTKDQTRQKNRIKSHLRYLGIEIPQEYCERGRCWNKSFVAWLRSVESACEYGKQTLDQLICQYEDLRKRRLEMIRLLRRLSRTERFSEPLGWLMSVPGIGQLTGMTFMSEIDDISRFKNADQLASYIGMIPMCHSSGEHDGTGDITLRCHSKLRSVLIEAAWVAIRQDAAMTQAYTEYCRRMKPSKAIISTVSTAFLGAIIPPKSLPESV

SEQ ID NO: 139717 - protein, 438 aa, unidentified
MATKLVHLNAAGIDISSKEHVVAVPEDRAKESVKTFQGFTRDLHQLADWLLACKIDTIAMESTGVYWYDLYTILLDYGFEVYLVNAYHVKNVPGRKSDVSDARWLQELHTFGLLRSSFQPDNLTRSLRNYVRQRKNIIQGLTKQTQRMQKALEQMNIKLNNVIRDLNGKTGTAIIIAILKGERDPKLLAQYRDWRIKASEETLIKSLEGNWREEQIFNLRIAYNHYLFLQEQLNQCDIESEKVIKRMSGVSSSEKKVDKVQKSKNNPNFNVSQYLYQSLGVEVTKIYGIKEITALTIFSETGINLKEKFPTEKQFLSWLNVVPNNKITGGKVISSRVKRKKNNAGQAFRDAASALWKAQNPIGDYIRRKKAKTGGKQAVVATARKLAAIYYKMVTDKVEFNPIHIIKNKEEYLRGKLKELEKMKVRTERTLLNYQKGI

SEQ ID NO: 139718 - protein, 335 aa, unidentified
MQVYGIDLSKEKFDVNFLDSDGKEKNKTVRNGLTGISGFLSVVPEGTVLCAENTGTYGDLPVFLCNQYGISIALVPGYTVKHSLGLVKGKSDPVDAARLREYGERFFDKLSFKDYQSENMSELRQLYTLRSQLVKSRKELITGAHAREQQPLQSMKADLILKASLSSLDGQIGEVEKEISLIIMDDAEMAENYTLSVSVFGVGLVIATNVIIKTGNLKAIDTSRKAASYAGVCPFPNTSGNMVGKSKTSPFADKELKSLLYMGAKAAVKHNKEYRLYYQKKQQEGKPHYLIMNNVMNKLLRTIYSVVKNKTPYSRDYVCLDPREKNINGSEKNVA

SEQ ID NO: 139719 - protein, 343 aa, unidentified
MQAITTIGFDIAKSVFQVHGVDAAGQVIVRRQLKRRQVIAFFQKLPPCLVGIEACASSHYWSRELQALGHRVRLMPPAYVKPYVKRQKNDMADAEAICEAVTRANMRFVPTKTPEQQSGLVLHRTRHLFIRQQTSVINAIRAHLAEFGVIAPVGRKGVEQLLCVVADANDKRVPEVVRACVAALGSQLLSLKKQILDFDRMIMAWYRSNQTSKRLNCIPGVGPLLATALVASVGDPKTFRSGRNFSAWIGLVPKQHSSGGRDRLGSISKQGDRYLRSLFVAGALAVIRYAKIHGSKHRPWLTTLLAPWPTKPPGIALSNKLARMAWAMMASGARYNYPAALRV

SEQ ID NO: 139720 - protein, 378 aa, unidentified
MRLYNQPHRFYCGVDLHARTMYLCILDQAGAIVLHQEVPAEPGAFLEAVAPFRDGLVVACECLFCWYWLADLCAGEKIAFVLGHALYMKAIHGGKSADDRIDSQKIAQLLRGGNLPIAYVYPKGRRETRDLLRRRMYLVHKRAEVVAHVVNTNSQYNLPPFGKKLIYARNRQALQIADRFADAGVRKSIELNLRLLDTLDDLIGDVELYLVRTVKVDDADTFYRLRSIPGVGKILALVLLYEIHDIQRFAGEGMFLSYARLIRPLKTSAGKVKGGGGAKIGNAHLKWAFSEAACLLARESDQAKRFLARQQKKHGKPKALGILAARLGRAVYQMLRQKKAFDPKRFWNGEAGVTPEQLQKAAVNRPRRAQRSRCVLEA

SEQ ID NO: 139721 - protein, 313 aa, unidentified
MVEHPVFVGIDVAKASLDVAVHPTTERWTLAYTEREVAGLLSRLAALAPALVVLEATGGLEGPLVGALAAAGLPVVVVNPRQVRDFAKATGLLAKTDALDAAVLAHFAAAVRPTPRALPDAATQALAALVTRRRQLVAMLTAERNRLSSAPRALRAEIQAHITWLQRRLGRLDEDLHQAIRTSPAWRAQDDLLQSVPGVGPVLARTLLASLPELGTLNRKAIAALVGVAPLNRDSGTRQGRRMVWGGRAAVRAVLYMGTLVAVRHNPVLRAFYQRLRAVGKLPKVALTACMRKLLTILNAMLKQQTRWNPSHA

SEQ ID NO: 139722 - protein, 400 aa, unidentified
MRTVFGIDVSKASSEVAILVNGERVHGYTMPNDIIGFSRLMEDLKTVSNPEIIFEATGVYSRRLQAFLEENSYDYTRLNPLEAKKQLDGLRVRKTDKIDAEKLASSQFVLNRKPTYVQEEVYQNLHDLSRFYQNLTEDIVRTKNRLHKVLQVAFPEIENLLSTPTGEQYWNLVSIFPTKHWVLELSEVELKEAIRNSTSKRISENRVGNLAEKLVGLAKQSYSAISKTSPMIEEVKYNAQELIRLTNRREQVLEQLIELAKPLPEYEILLSIPGIAETTATSIIGELGDIRRFKSANQINAFIGIDLKHYESGDFLGQEHITKRGNPYARKILYKCIHNIASASHTNPCHIADFYEKRKRQSQITSTKPHTIASIHRLIRTMYYLIMHNKLYDYTLAQSH

SEQ ID NO: 139723 - protein, 316 aa, unidentified
MTNQKLAKSRVNVGVDVGKWSLDICIHEKKLVWQVENTPKGIRSLMNRLSRYHVERIVMEATGRYEFALAEAAYDKGLPVCIAKPTSVRKYAGAIEQLAKTDRIDALVIAEYASVIKPRVTPEKSKNLIAIKDLLARRRQVLSLRTQEINRRHIMDGGIKRSCRRLIKCFDAEIAWVEKRLEKLVETESEWSEKREILESAPGVGKTLAFTLLADMPELGSLTNKQASALVGVAPINRDSGKMRGKRRIQGGRASVRTTLYMATLSATQCNPAIKPFYKNLVAQGKHKKVALTACMRKFITILNAMIREKQAWCAT

SEQ ID NO: 139724 - protein, 345 aa, unidentified
MEVSTIGLDLAKNVFQIHGVDASGRIVIRRAIRRSQVLPFFAKLPPCLVGIEACGTSHHWARELLSLGHDVRLMPPAYVKPYVKRSKTDAADAAAICEAVTRPTMRFVPVKSREQQAILSLHRTRALLVKQRTQLVNMMRGQLAEFGINIPQGLERALMLARQIVEGKEVPDLPGHAVKMLAILSRQTLAADEQIREINRDLLVLQKSDEMARRLATIPGVGPIGATAFAAAVTDPGQFRSGRQFAAWLGLTPLQNSSGGKERLGRISKMGDKYLRRLLVIGATALVRQFRNRPDKATPHFASLLARKPVRVATVAMANKMARIVWALMTRGETYRAAHTPILAA

SEQ ID NO: 139725 - protein, 479 aa, unidentified
MKENLRRCCGIDVHKNSVTVCVLAPAGQQHIETKKRKFRTFTRDLKQLRAWLKNCQVTEIAMESTGQYWRPLWNLLEGEFTKLILVNPQHIKGLNGYKTDPKDAQWIADLLDSGKLRGSWVPPRSIRELRDLTRHRVNILEDLNRAKNRIEQLCQSGNIKVSSVATDLFGVSGRKMLKAIVENQHDAGWMADYARGQLRNKRRELELALQGTFTDEQRWLLEKELRQVEWLEGQVEGLEEEIERRVSGFEEAIQRLLTIPGIDRKTAGTIVAEVGVDLSAFADAKHLASWAGLCPGNRESGGKRMSGRTRKANRYVKRAMCQAAWAASHSKNTYLSAFYRRMAIKKGAPKAVMALAHHMIVVIYQVLSRKEEYVEMGGDYYDQRNKPRTIARLVARLGRLGYQVDLKLLENAMPADPTEKDNESEPAIQPDAVPEEGLGAKRKRGRPCKCRQRGIICKHQAAREVNPLIQQQPSEGRFS

SEQ ID NO: 139726 - protein, 399 aa, unidentified
MKTKQSSAVVEPTAKVVNKVNFTNKTLYIGIDVHKKRWQVAVFFEGIVLSNVSIEASANGIVAYLRRHYGDAAFHCVYECGCFGFALCRQLWAAGMECIVVNPADIPGTDKERRSKTDPIDARKLARHHAAGLLQGVHVPAEKSQKQRSIIRFRKKLWGDLVRAKNRLKSELMFQGIAVPAKYDNPHWSHNFMNWISQQAHGDEDLKDTLLLMLEEVQALRLLLLKTERKLRELMRSSEFKEKHDLLRTVPGVGPLTAALFLMEIGDVRRFRSFDALNKFVGLCPDSDSSGDNERHTGITMRRHKSLRSALVESAWQLLRRDAAMLNCYKELCKRMKPQKAIIRIARKLLRRMRAVMLHQKMYVKGIEGNVTGKEIDAPALPPSKPQGRPKVKVVDEFS

SEQ ID NO: 139727 - protein, 357 aa, unidentified
MTTYYIGADVHSNSTELAIERNKKIVQRYNLPTSIAALSNVLDSLKGEKYLAIEEGPMAGWLYRNLGKKVDELIICDPRRNKLIDSDGDKDDKIDAAKLACLLRGNFLRPVYHSDDAGRTELKHWVGLYHDRVRDAVRNINKIRSRCRMHGVSIPRMVVRRATVRDKWLAKTSNQPLAKQLELLWLGYDATSQQVRIARRRLSILSDKYKIIKFWSQLPGIGLVRATTLFAYLDTPWRFKKKNKLWKYCGVGLQRTTSGTDSKGRPKPARLQLPWAVNRTLKNAILGAASSVINQKNNLFRRYYERMLEDGIMPSNARHAVARKLLTVMWAMWKTNSRFDEGMCRKSDMQTTAASLG

SEQ ID NO: 139728 - protein, 372 aa, unidentified
MNYNTVYVGMDVHKESFTLCSMTIEDEKASHYQKTEADYKKVLKYLEFLRTIYGDNAKFICGYEAGCLGYTLYHQLMSQHVECVILAPTTMLEQRSRKRIKTDKRDAEIIAKCLAQRNYSPVHIPTATDEQTKEFLRMRDDHKLALKKIKQQILAFCLRHNYRYDGNSHWTAAHLRWLKSLQPEALYKEILDEYLLTYTTLSDKLERLDKRIEELASKDEYKEAVKKLCCFIGVKTHTALSVLVEVGDFNRFASAKNFTSYLGLVPGENTSSDDRNLLGITKAGNRHVRLLLTEAAQSYARGQIGYKSKDLKSRQSGNSAQVIGYADKANERLRRRYYKMVLGQSKKHNVAKVAIARELACFMWGIMTDHIA

SEQ ID NO: 139729 - protein, 341 aa, unidentified
MSIVTVGIDLAKNVFAVQGVDDNGKAVLVKPKVSREQLLPLMAQLPPCVIGMEACSGAHHWARQFRQHGHTIRLMAPKFVTPYRMSGKRGKNDAADAAAICEAVTRPNMRFVPVKEEHQQIILCLHRTRQGFVEERTATYNRLRGLLSEFGIVLPQKVACLRREIGAHLEDLPGYANQCVGDLLAHADQLDARIETYDRIIAKAARDDARSKRLMTLPGIGPNTASAMLASIGGGHDFKNGRQVAAWIGLTPGQYSSGGKARLGRITKAGDNYLRSLLVMGARAVLSGLGEKQDRFSRWARNLLERRGYWRAVVAIAAKNARLAWAVLKYGEDFRLNRSAA

SEQ ID NO: 139730 - protein, 414 aa, unidentified
MEGEINKSCGLDIHKRFFIATILSRSGEKQQQRFERDDDGILALKNWVTSEQCDVVACESTSDFWVPIYESLIQHLPVIVGNARDMKAFTHKKTDKIDSEVIAQLALNKMIQPSRVFPKRHREFRSYVRLRLTLVRKRTDIKNEAHAILSSEMLHLGDVLTDIFGKNGRAILSGISSGKNVDQIIESLSSNVRKKAVQIREVLDREISQSAAIRLQICLNLIKHLDEEIEILEREIFNYAYRNHKHEMEILMSVPGIGELSAAILIAEIGNFNDFSSGDKLASWLGIVPNVYQSADKYHNGRITKRGSKVARWILTQIAQAAARKKNSKLKEFFNRKKKSIGHAKAIIALARKIATIIWHLITNDEMYEDETGYQKGEVQKRKIVETEIFAVDERIKIISGIIAIMGKEDREST

SEQ ID NO: 139731 - protein, 342 aa, unidentified
MKQYVGLDVSQKETSVCVVNEAGRILFEGKAKSDPGALTALLRERAPHAERIGFETGAMASWLWHELRRVDLPVVCIDARHAHAALSVRMNKSDQNDARGLAELVRVGWYREVKVKSEESQKVRAILVARSRLVAIRRDIENQVRSLIKEYGLLFPRAIGLQFRNQVSELLGEDHQLIGVIAPLLSIHEHICEQQSKFDDEVRRLAKSDETTRRLMTVPGVGVVTALTFRHTIDDPSRFRSASTVGAYLGLTPRRNQSGETDTNGKISRWGDRLLRSYLFEAATVLLYRTKKWSSLKAWGMKLAKRIGVKKAKVAIARKIAVILHCIWVDGTSFDWGQAKPA

SEQ ID NO: 139732 - protein, 372 aa, unidentified
MRKSSSSQRSLKQVAKAGHTRSMTIGVDLGDKNSCYCVLDSNGVIVEESRVGTTKASISKAFGSMPYCRIAVEVGTHSPWVSRLLHAFGHEVIIANPRQVKLISASSRKDDRLDAQTLARLARVDPRLLRPIQHRSRKAQEDLMVIRVRAALVEARTSLVNTARGLAKSLGERLPVCDTDQMGTEQTKSLPVELQRVLEPLMGQVVSLTERIKEMDRKVEQIAREDYPETALLQQVKGVGPLIALTFILTLDDKARFQKSRDVGCYAGLRPRRSESGESQPQLRITKEGDAYLRKMLVQGAHYILGHRGPDTDLKRWGLKLAARGGKRAKKAAVIAVARKLGILLHRLWVTGEVYEPLRNANMQHSRKRLAA

SEQ ID NO: 139733 - protein, 340 aa, unidentified
MNATTYGLDVAKRVFQMYWVDAQTGEIVNRRFGREELIGFLARRPAGRVALEAAGSGHWWARKIKTLGHEVVLLHAKFIRPFVQTNKTDAADAQAIWTAVQQPGMRAVAVKTEDQQAMLSAHRIRALLVKFRTMQVNQLRGLLYEFGVTFRAGRVAGLTEIRARMAQLDDVLPGSMMCGLREQLKRIDELEQDIDRLEQRISTWHKHDALCRAIAEVPGIGKLTATALIATIGDAKAFKSGRELASFLGLVPRQSGTGGKIRLGSISKRGDPYLRTLLIHGARSVLYHTKEPTAWQKAIVARRPANVAAVALANKMVRTAWAILAHGRAYQNCHVSAKPA

SEQ ID NO: 139734 - protein, 346 aa, unidentified
MNETTTIGLDIAKQVFQVHGVAIDGTVTVKRQLRRSEVIRFFDKLPRCRVGLEACGGAHFWARELTVLGHDVRLIPASYVKPYVKRGKTDAIDAEAICEAVSRPTMRFVPIKTVDCQAGVMLLKTRHLLVKQRTQSINSLRGHLSELGIIAARGTGKVETLIAIIRDKTDERIPAVARRALEMLAEQVEALVRRIATLENEIVSEVRRDDTMRRLATIPGVGPITAATIVALVPDPGAFNSGRHFAAWIGLTPKMHSTGGKERLGRISKMGNPVLRSLLVVGATAVSRHARRGATVSPWLTGLLARRPAKVAAIALANKMARVIWALLTKGGVFTRRPATAAQHAA

SEQ ID NO: 139735 - protein, 408 aa, unidentified
MEVLYERCAGLDVHKDSVVACVRIAEPGGASSEVRSFGTTTSELLKLSDWLEEQGCTHVALEATGVYWKPVWHILEGNFELLLANAAHIRNVPGRKTDVNDATWIADLLAHGLLRGSFVPPPGIQEVRDLTRTRKQLMRELAQHTLRIQKTLEDANLKLTGTISDILGLTGRAILDALVAGETDPEQLADLAHRGIRAPRTKLVEALRGRVTAHHRFLLRLHLGQVDALRAAVAELDAQLGKALGEASRMADLLTTMPGVGDIVAHVIVGEIGTDMTRFPSAAHLVSWAGLCPRSDQSAGKRRSTRIRHGAPWLKTTLVQAAWAAVRKRDSYHRAQFLRLKARRGPGKAIVAVAASMLTAAYHMLRDGAEFHELGGNYFNQLNRDAAARRLTRRLQQLGFAVELRPAA

SEQ ID NO: 139736 - protein, 428 aa, unidentified
MNFNTQNAKIASITEKTLIVGIDVGSDTHFARAFDWRNYEYTKKPLEFSNTEAGFQMFKAWVEDIAEKQGKTAVIPGMGPTGHYWFALGKFLQDSGMKPVHVNPHHVKKSKELDDNNPNKNDRKDPKTIAALVNEGRFSYPYIPTGIYAEIRSLSNLRFQTQEELTRIKNRIARWFAIYFPEYKVVYGDLMAVSGRMILKEAPLPEDIRMLGVNGVNQIWRNAKLRGAGMKRAKTLVSAAEHSVGSKEAPETARIELKNLLNDMDVYATRLEELLQNIEGKLKTIPYVDKLMEIKGIGLVTVSGFIAEVGDIRRFDNPKQLQKLAGYAIVANDSGKHNGESRISYRGRKRLRYVLYEAAISLVGKNAEFKEIHGYYRTRKENPLKKMQSVVAVACKVLRVFYAILTKGVDYDPLKLISDIKRPQLQAA

SEQ ID NO: 139737 - protein, 403 aa, unidentified
MNAVGIDVSKGKSMVAALRPFGEIVAKPFEVPHTSSGFHQLVDQLNSLDGSTRIIMEHTGRYYEPMARWLSDSGFFVSTVNPKLIKDYGNNTLRKVKTDKADSVKIARYALDNWQDLRQYTSMDIIRNQLKTMNHQFSFYMKQKTSYKNNLISLLDQTYPGINDFFDSPARSDGSQKWVDFVSSFWHVDCVRSLGLATFTERYQKWCKRHGYNFQPEKPAQIYSFSKELISVFTKDSVTKFLVKQAVEQLNTVSFTVEQLRLEMNRLAAQLPEYQVVMAMKGVGPSLGPQLMAEIGDLSRFSHREALTAFAGVDPGVNQSGTYEARSVRTSKRGSPQLRKTLFQIMDVLIKSAPSDDAVYRFLDKKRSEGKPYYVYMTAGANKFLRIYYGRVKEYLAALPKPE

SEQ ID NO: 139738 - protein, 343 aa, unidentified
MDYFAGLDVSVKETSICIVDDAGKIVREVGVASEPEALLQVLTNNNYRFKRIGLEAGPLSQWLFSALAEAGLPVICVETRHMRAVLKAQINKTDRNDARGIAQMMRVGLYRPVHVKTLRSQKLRMLLIHRKLLQSKAIAIENDLRASLRNFGLKMGLVGTVRFEARIKELVENLPDLAALVEPLLIVRRVLREQLGILHRRVLAVVRDDEVCRRLMTIPGVGPVVALTYRVTVDVPARFRNSKSVGAVFGLTPAKDQSGERDRSGAISRCGDELMRVMLYEAAQIMLVRSAKWSWLKAWAMKIARHRGMKKAIVALARRLAVIMHRMWIDGTEFRWTREVAAA

SEQ ID NO: 139739 - protein, 342 aa, unidentified
MEYGAIDLHTQDSQIRIVREDGTVVLDRRIRTRTDRFAAVFGDHAPMRILLETGTESEWVAQCLEGLGHTVVVADPNYAAMYGARVRRIKTDRRDVAALADANRRGVYRAAHRASATALQLRRQLQVRAHLVTMRTELINLVRAQVRAAGYRVPSGGADAFGARIARLAMPAPLERTLAPALAALAALQPLIATEDRQARATAAADPLATRLQTAPGIGPITALLFRATVDDVRRFAGPGPLTSYLGLVPRERSSGTQQRQGGITKTGPGQLRALLVQSAWTIWRLPGSSPRLHDWVHRLAARRGRAVAIVGLARRLARILYAMWRDGRPFVAARLHDRVAA

SEQ ID NO: 139740 - protein, 381 aa, unidentified
MNEQPCRWCPVRGVARKRRTHWLSSGVPVAVPHDEKGTMTMTLVVIGIDPHKGSHTAVAVDRDENELGELRLRSSRKQCDVLLDWADRFPQRRWAIESASGLGYLLAQQLVAAGEDVVDVPPTLSARVRVLDSTKASKSDPHDARSAAIVALRHRQLRTVAADDHAAILRMLANRHHALGRLRTQAVCRLHAQLANLTPGGLAGTLSVKRARELLETIHPDDGVTVERKHQAVELLDDVIRLDRDVRAVTQRIGVAVDATRTSLLDIFGAGPVVAAIVFGHVGDITRLPSRHHFASYAGVAPIEASSGPKKRHRLNPRGNRQLNHALHIIAIAQIRYDTPGQAYYQRKLAEDKTKKEALRALKRRIADAVYRALVADAHRS

SEQ ID NO: 139741 - protein, 360 aa, unidentified
MRNYVTNLDSIITRHEKNPDDIHVIVGLDIAKNVFQVHAVDLDTGELITKAIKRDQLKEFFANMSTALIGIEACGSSQYWARELKQLGHVVRLLHPKSVKAFLQGSKSDANDAFAIYRAVQSPDIREVSVKSIELQSLDSLRVLRAGAVKEQTAAINRFRMILAEYGQAIQKSKKAFMRNASEALASLESSINGVTYHALELELQTIRDRDEKIEEYNRRIHEVVENNHLAKLLKSMPGVGDLIACAMAVALADPSVFRSGRDFAAFLGLVPGHTGSGGKVIMLGITKRGDRSIRSLLVNGAMTALRQKHRPDFVERLIKKGKTKKVIAVALAARMARALWAMASRQEKYKAKVLSISNP

SEQ ID NO: 139742 - protein, 429 aa, unidentified
MIMGFTKPIEHFNIQRKKVITMNTLYVGIDVSSKSNVVYLMLPNGDKHSNFSVANSHEGSTQLVKRILSVLTSHSLDTVLIGLEATSVYGDNLVYFLREDATLAPFNRKIHVLNPKQVKKFHDAYNDLPKNDYVDSFVIADCLRFGRINKEVYMGDYRYKALQNLTRARFFAVQNLVKEKQRFMNVLFKKYSTMTQEKVFSDTFSTTALAVYDAFESAEALANMDLHELTDFIMEKGKNRFPDPDAVAKAIQKAARSSYRLPKTMNDSVNQVLSISITSMKALESQIKEFDKAIKAQMELLPNVLISIPGIGPVYSAGIMAEIGEIDRFNSQAALAKYAGLAWKQHQSGGFEAEVTRLIPSGNRFLKYYLCEAAFSLVRCDKEYSDFYHLKYKEVNRCQHKRALALTARKFVRLVFRLLKDNRLYCPAK

SEQ ID NO: 139743 - protein, 328 aa, unidentified
MNSYKIVIGVDVSKNSFTATVLYDNKKETFEVKSDPVEFEMKVKPFLKKFKKSDMLIIMEHTGVYHLKLANYLYENGYKVAVVNPFSIKKFMEAKMTRVKTDKADSFFIAEYGRTFFDGELYKPKSDVEKEIEVKLKILEDLQQQLTMLRNKRESLTYVPMKKLKENLEYYDELIRKIEKNIKELEKEIKELSKKNYQEEYKLLKSIPGISDRTIGMIISVYGNFERFKSVKDISSFIGISPGIHESGTSVKKSGWIKKMGNPYARKILYMAALSAIRFNKYCRELYERLVSKGKAKKLALVAVAHKLLRQAYGVLKSKRPFDENFCT

SEQ ID NO: 139744 - protein, 362 aa, unidentified
MPMLAELIDAVVGVDTHRDTHEVELALPTGTAIGIRKISNDNSGFAELLAWILDHSPGPRVVVSIEGTRSFGVGLARAVAAAGLTVIECEQPNRKARRGKGKSDPIDAHLAVLAALRLDADRLPVPRADGDREALRILLGTRHELTVVTTAQTNRLRALLLGGKDSERDLARATLTDPVLLAMVRRREPPQASREQAVRHGEIRRLAHAIRAGRHALAANRAQLQAIVDQIAPELTERRGIGAVTAAQAIVSFSHPGRCRSDAAFAALSGTSPLQASSGKTVRHRLNRGGDRALNSAIHTIAVTRMRCCPTTKNYVARRTAEGKSSREIQRCLKRYIARQLYRALNASTTLTTQTSAAPTPA

SEQ ID NO: 139745 - protein, 358 aa, unidentified
MKKIVVGIDISKEKIDASAIDVSESRLGVVKLDYQVFDNRPMGFRRMLVWARRLKADTGLEDVLFCCETTGGYDRSLCDYIYAKGYDIWREGALQIKRSMGVRKGKDDKADSLMIAEYAMRHIDKAVMYETPSQSVRELKALLLYRHKLVQEKTEKTVRMKELEATAPRSKTVSFILRDARKSIRAIDKSIRECEAQLQQVYKQDGELMKSYGHITSVSGIGIINATAFIAYSNNFAAITTPNKMASYWGCAPFRQRSGTSVDRKACVKCYSSSLLKAYLTQAAECTVKPHGIYHDYFLRLTAAGKPYRVIINNVRNKLIHLVVSLVTNNTDYEQEHELLRMKRKSEQEMSAPLGFIN

SEQ ID NO: 139746 - protein, 420 aa, unidentified
MKDWKDITHYAGFDWAKDHHAVVIVDAQGQVVADFEFEHSLEGWKKFGEKTAGWPNLAVAIETNQGAAVDQLLQRDYTVYPVNPVASKSYRERKVPSGTKTDHLDGWALADALRVDGQGWAVLRSMDPLTQKLRLLCQDEVGLIEQRTLLVNKLQQALSEYYPTALQAFEDWTAAFTWDFVIEFPAPQVLVKAGKRRWEKFLHAHKLWRPATLEHRLALFAQADQFKATDPIVEAKSQLALSLCKLLRTLDQQLAQYRQQIEALFKDHPDHDLFGSLPGAKKVLAPRLLAAIGNDPDRYGEHQVLQAYAGTAPVNYQSGQINKTHMRRACDKFMRHTVHLWADCFRKASAWGQTYYQKKRQEGMSHACALRCLGQRLLKIVFRMLRDRKPYDAELHALNQKKHGSWVLTLVEKTAPQPGE

SEQ ID NO: 139747 - protein, 324 aa, unidentified
MSSHEIVGIDVAARKLVVIGERLALTEYENTAAGRSKLAKALSQSPRPVRVVLEATGIYFLDLACELAAAGIAVMVVNPKATHHFAEAILQRRKNDPVDAAMLREFGRRMDFVPWQPPRHELFAFRALTREAQALSKAVAAAKNRLHAITATQLAPDTLIRALERQIAQNQALVDELVAAALAETKTNRELARLVARTDSAPGFAVKAAVLVVGELAVLPPMTARQWVAQAGLDVREECSGTSLARRPRLSKRGNKRLREALFYPALTAARCCPLAGAFVERLVAAGKTRLQAIVALMRKLLHGLHAMWRNDEDFDAEKLFAPA

SEQ ID NO: 139748 - protein, 339 aa, unidentified
MAILYVGIDLAKNVFAIHGVDEHGKPALVRPSVPRSRLHQLVAALPPCTIGMEACSGAHHWARLFAQHGHTVRLMAPKFVAPYRMSGKRGKNDAADAQAICEAVQRPNMRFVPVKSQDEQARLCVHRVRQGLVEQRTATINRLRGLLSEFGIVLAQKAATVRREVAAHLEDLPGWANTAVGDSLSELHRLDERIAEYDRHVVHMAREDERSRALMQLQGIGSTTASALVSTIGNARDFKNGRQLAAWLGLVPGQYSSGGKTRLGGITKAGDGYLRTLLVLGAKAVLAAARNKDDRLSRWAMALEVRRGYWKAVVAIAAKNARMAWAVLAKGENFKLLEA

SEQ ID NO: 139749 - protein, 324 aa, unidentified
MIDGVLGIDVSKNTLDASMSSCNKVRARSFANSPDGWRHLLDWLITQRVRRVHACLESTGRYSLGIAGALNEAGHVVSIVNPAQIRDFARTKLGRNKTDGVDASHIREYCELFKPRPWAPPSEAHRRLGELQTIRAGIITGLTEWKNRKNSGMIDAVAQSLADVTISHFTSQLSAVDEAITQTIGNDSVLRRKRDLLLSISGVGETLAGVVLAELPGPDVLHSSAEVVAYVGLNPRQHQSGTSIDRVTRISKIGNAVLRAALYMPAMSAMRYNPAIVALVARLKSQGRLKPKQIVVAAMRKLLVLCFGVLKTGKPFDPAIAVGC

SEQ ID NO: 139750 - protein, 342 aa, unidentified
MYYIGLDVHKKTISYCVKDAAGKIHSEGKIGSTRRELDAWITTLPQPRMMAMEATIFTGWIYDHLLPHAEKVKVAHPLMLRAIAAAKRKNDKIDASKIADCLRCDFLPECYMTSTEIRDRRRTLRYRGLLVKQMVQMKNRISGLLMETGVSYNKQRLHKVGYFTELMSGNEEIDCVRPLLKLSRDTINRSQKLDYALVSSLERDPLLAERLKRLRTVPGVGPITALTWVLEIGDVVRFRSIKQAISYCGLCGAERSSADKVMRTPISKQRNKHIQKTLVEAAKLAPRYSHELSLIYEKEMQRGNRNRATLAVARKMVAWMVAVERRKQDFVPAEERGGTVAA

SEQ ID NO: 139751 - protein, 376 aa, unidentified
MTTLRFVGLDVHAETIAVAVAEQNGEVRCLGIIPNRSESIRKLMKKLGPAKQLRVCYEAGPTGYVVYWQLAALGVKCEVVAPTLVPVKAGDRVKTDRRDATKLARSYRAGDLTPVWVPGVAHEALRDLVRAREAAKKDQQRARHRLGKFLLRHGRRPSTAMPSWTARHLAWVKTVHFDHTAQEATLLDYLHEVEHMANRVERLERAIDDAVKIAPEPMRAVIDALQALRGVALVSAVTIATEVGTLSRFAKPRQLMGYSGAVASEDSSGERTRRGGITKTGNAHLRRVVVEAAWAYRHRPAIGAGLRKRQATVSAAVKEIAWKAQHRLHTRYRALTARGKCKQQVVTAIGRELLGFIWAIGVHVESRPDHVQPIAA

SEQ ID NO: 139752 - protein, 301 aa, unidentified
MTDVSTPQVIPFFVGIDVAKKVLDLARSDSGELLHVENTPAGIRQIVAALASPKPACIVLEATGGLEQPLLEALLEAELPVARVNPGHVRHLAKGLGILAKTDAIDARVLVEFARLAQPRLAVKRSEKQAELDALVTCRKQLVAAKVDQDNRLESTASKPARKALNAVLRVLEKQIKTLDKQIAAIIDSDDDLRDLDRRLKSVPGVGPVLASTLISQLAELGQTSRQKLASLVGVAPFNHDSGKHRGKRAIRGGRDAVRNVLYMSANIAILHNPVLKAFANRLKATGKPPKIVIVACMNYL

SEQ ID NO: 139753 - protein, 355 aa, unidentified
MDSIKYIGLDVHQSTISVAVLNADGKLVMQSVIATHATTILDLLHGLRGTLHVTFEEGTHSAWLYDLLVRRVTKLVVCNPRKNALLKAGNKSDTIDARKLAELLRAGLLSPVYHGQNSTAAVKHLGRSYAALTEDTTRAMGRLKALYRSQAIACAGKKPYGARHREEWLAKLSESGLRRRAGRLYQQLDLLQELRRDARQDLILECRKHPETKLLRTIPWLGPIRAALLIGRVQTPHRFRSKRQFWAYCGLALKTRSSADYGFVNGQLERKKKPVFIRGLNLNHNHDLKNLFKSAATTASGSNGPFRPFYENLLIKGMKPELARLTLARKIAAITLHVWKKGEPFDAEYLKPQAA

SEQ ID NO: 139754 - protein, 317 aa, unidentified
MSIPTASFVGIDVSKQQLDVAVRPSGETWSVAHDEAGLSALVAQLRALAPALIVLEATGGWEVALASALAAGPLPVVVINPRQVRDFARSTGTLAKTDRLDAQILAQFAEVIRPQPRALPDAQAQELAALLQRRRQLVEMLTAEKNRLTLASRRIRPQLQAHIEWLHKQIAQFDEDLRQLIRASPLWREKDDLLRSAPGVGPVLATTLVAALPELGTLTRRQIAALVGVAPLNRDSGTLRGRRSIWGGRAQVRAVLYMSTVVAMRHNPVVAAFYQRLRAAGKAPKLALTACMRKLLTILNAMLKHHTRWAPGLAQHA

SEQ ID NO: 139755 - protein, 371 aa, unidentified
MGKHRLAFVAFDSAKNKHAVAVADGGRGAEVRYLGEIDNSPDAVRKLVAKLTRQYERLHFCYEAGPTGYGLHRQLTELGHVCDVVAPTMIPKRSGDRVKTNRRDSVALVKLLRAGELRAIWVPDNVHEAVRDLTRARETAMVDLKTKRQQLLSFLLRHGRSFPDRNWTKTYERWLAKQTFAHPAQQIVFQDQLEAITTAQARLAALEQQLREIVPTWTMAPVVAAYQALRGVSFLVAITFVAEVGDVRRFATPQQLMAFLGLVPSERTSGDTVRRGSITKTGNRRARRVLIEGAWTYRFSARVGETLRTRLKDLPLSVRAIAWKAQVRLCARYRRLIARGKKTPVATTAIARELAAFLWAIAQQIAPRTSV

SEQ ID NO: 139756 - protein, 352 aa, unidentified
MSKVKELNFAGKRICCGLDAHKSNWKVHARMDGKELASFSQNPDAILLSRYFKKNYPGAEVNVVYEAGFCGFGIQRSLSELGIECIVVNAADVPSSDKERKRKDDKVDARKLSRQLAEGNLKGIYIPGIQMEHARALVRQRYRLVQDQTRCKNRIKHMLMCNGVPLNSNGHWSGKYVKQLENVKCEPPLQTALNLAIEEYKQMRSLLKGATLAIRNLAEQPAFAKVQRYIQSIDGIGLINGMVIQTEIQDIERFKTLDGLCDYAGFVPDISSSDDRMVIKGITYRCNEFLRKALIESSWILIRKDPAMLMKYNEYRKRMNKNKAIIRIGKHLLSRIRYVWSNQKEYERGIVG

SEQ ID NO: 139757 - protein, 434 aa, unidentified
MDRVIIGIDPHKLSVTLEARDSREILRATGRFGTDARSYRQLLAYTRQWPERVWAVEGANGIGRPLAQRLLASGERVLDVPAKLAARARVFDTGQGRKTDATDAHAIVMVALRDKGLRELSIDPDLTVLRLLCDRRDEISRARAQALNLMHRLFLELVPGGAPVKKSTAQYKALLATVRPRDPAGKTRRRMAAEELADLERYDAKLKDMKAELRAAVEATGSHLMDIHGIGPAGAARILADVGDVARFPNRNHFASWTGTAPIDASSGEHTRHRLSRAGNRRLNHVLYMAGIVQLRNDTPGRAYYRRKLQQSKTSMEAMCCLRRRLSDVVYRQLTADAQAQTPEQAGPGGHSGATLLSSAADLPPDIGTSDQPLPGPAPATIPPPPLAPKTPAAPAAATPRRRAQGVNVERPTGRTTLTPTSAGAHSTAPGPRT

SEQ ID NO: 139758 - protein, 347 aa, unidentified
MNFYTQQHKHYCGIDLHAKAMYVCILDQNGTKLVHKNLPTTPEAFLRVIAPYRDDVVVGVECIFTWYWLADLCQKEGVAFVLGHALYMKAIHGGKAKNDKIDAHKIAVLLRGGMFPQAYVYPSEMRATRDLLRRRCHLVRKRGELLAHIQNTNSQYNLPEIGKKLAYKANRKGVEEHFPDPSVRKTIEMDVSLIDHYDQLLREVELYITRTAKGHDGQTFARLQSVPGIGQILALVILYEIQDISRFPRVQDFVSYCRLVKCAKESNGKRVGTSGKKIGNVHLRWAFAEAAILFLRQNQPGKEYFMKLEHKHGKAKALTVLAHKLARAVYYMLTREQPFDLHRFVAA

SEQ ID NO: 139759 - protein, 384 aa, unidentified
MQKPNDLNQSRIVLKQDSTLIAVIEMSLSSWLVAGIVPGVERQPLKKLAVDESALLKLLNRWREEAEKAGRRIERITVAFEAGRDGFWLARWLRARGIEAHVIHASSVAVSREHRRAKTDRLDTELLKRSFLGWLRGERDHCKMVAIPTTKDEDAKRPNRERQSLVGEQTRIVNRMKAALIRLGIRGFNPRLKKAAGRLEDLRTPEGEPIPPNTLAELHRDMERRRLVSDQIRQIEEARLERMEQAPGDGPHAMVRLIARVIGVGIETADMLVHEVLSRKLRDRRAVARYAGLTGAPDESGSKRREKGLAKAGNARVRGGMIQLAWRFLLFQKDSALAQWYRTRTEGGRNRKTIIVALARKLLIALWRLVTTGEVPAGVVLRAA

SEQ ID NO: 139760 - protein, 355 aa, unidentified
MKRAYFIGMDTHCQFCEIAAVNTRGDVVERDRCVTCIPALLEVIERVPRPRQLVIEEGPLAGWLWRHLHQAVDRMVVSEPRRNRLIALDGDKDDDLDAEKLAQLLRGGYVKAVHQVETLERALFKQQVSLYHHRVRQRVREGLRISSVFRQHGVMIREKAFAAAEDRPALQAQLPAAESFQEILPLLWSSYDAAVEHEELWRRRLVRLAKQEEEIQRFEALPGISWIRAATLYAYLDTPWRFRSKAALWKYLGIGLERKHSGNAPEYLGVPTRAHRLLKGTILGAACSAVASGNNPFAELYGRWIEQGLSSKLARRNAARALAATLWGLWKNGSAYRPEWVGVARVAGLATEVSR

SEQ ID NO: 139761 - protein, 331 aa, unidentified
MFPVGIDVSKDTLDLCMLYDGIKGRVKTRNIKNDRSAVENISRWLRLQHCGPEDVHVVMEATGVYHERLATALHDAGFYLSLANPHRSREFARGMGIMTKTDKVDAYMLACYALLKKPHRWEPPAADIRHLSALLRRRDVILADAVREENRLEKYQSTDTPADVISSCIRMAQLLRKEVKNIERQIKAHIKASPDLKRDYALLTSIKSVGPQLGMHMLVVLRSHHFESADQAAAFLGVVPVEKRSGTSVRGRPRMSKIGPPQLRAKLYMSALCGKIHNKRMRNIYEEMCLRGKPKMVAIGALMRKLVHWCYGVLKTGTAFCDGGPRAALNS

SEQ ID NO: 139762 - protein, 307 aa, unidentified
MTAVGIDVGKAALDLAVDGQPGVVRFANTRAGIGKLLRHLGRLESPRVVLEATGGYEEPLLEACGDAGFWVARVNPRQARNFARATGELAKTDAIDARLLALMSRLFADRLRPHVVAPVWQREMRDWLRRRGQVVTVLQMQKQQAAMAPAAVRALMRRSIAALTRELAAIDRTLRAQIEQHATPSLRSSKGLGPVFQATALALLPELGYLDRRQIGKLVGVAPMNRDSGQGQGKRIIHGGRAPVRVALYMATLSAVRWDPTMRDHYQQLRARGKLSKVALVACMRKLLGIVNARRREELRAEGLLAA

SEQ ID NO: 139763 - protein, 330 aa, unidentified
MAQEYIGVDLHKAFFQACAVTPAGERLWEGRFARTADGFAPFLARLGPQTQLAVEACGPTWAFVDTIAPTGAAVCVVDTRKTKLKAGCAAKTDRLDARRLADALRRGSVVSVYVPPPAIRALREVCRGRHQLVRVRTRLVQMLRALLLRSGAADAPQRQLYSARGLAWLGQVALPPEAAASCQRLTQLLRLVHAEVTAADGPVRAQAAADPIAGVLDGLVGIGPVIALTLRAEIGDIARFPRGPQLASYAGIVPRVSRSAGRGYSGRITRDGAPWVRWALVEAARHAVKRQDAVGGWARRLARRIGWQKARVALARRLCDEIVRVWPRSH

SEQ ID NO: 139764 - protein, 413 aa, unidentified
MAVFCGIDWAEDHHDIALVDQDGTLLTTRRIGDDATGFAALLQLLVEAGDDPDAPIPVAIETSHGLLVACLRATGRPVFPINPLSVSRYRDRHSVARRKSDAGDALVLANILRTDLAAHRPLPADSELAQAIAVLARAQQDAVWARTDAHNKLRSLLREYYPAILLAFATKRGGLLRPEARALLRAAPTPRAAARLTLSQLRALRHRAGLQRGIDTEALRLQQLLRADYLHHPTLVEEAFGRQALALLRQLDTACGNAEDLADAATEHFAQHPDAAIITSMPGLAALTGARILAEIGDDRARFADARGLKAYAGSAPVTRASGKTTAVMHRRVKNQRLASVGYVWAFAALTASPGARAHYDRRKAAGDRHVAAQRNLFNRLLGCLHHCLHTGQTYNEATAFPAPSNTTQARAA

SEQ ID NO: 139765 - protein, 367 aa, unidentified
MTSVALSAGPIHLGLDTSKNAILVGILRPDEVSPDTEKIFNDEASDPAVDRPFPDRSQLRVCYEAGPTGFGLYRLLRCMGVACEVVAPSLIPRAPGDRVKTDRRDCRRLARLHRAGELTAIRVPTEAEEAVRDLCRARADMVADRTRTRHRLSKFLLRHDRIWRGGQAWTLKHEQWLLGQRFDDAALRATYAHYRAVLMARDAELAAVEADLAYWYANGPFVDAVARLAAYRGIAQLGALSIASEVGDWHRFATARAFMGFTGLVPSEYSSGQSVHRGHITKAGNAHLRTQLIESAWAYQHRPTLGARLQARQRDVTPATVARSWAAQQRLCARFRRLGAGKTSRNVVTVAVARELAGFLWAEMTTN

SEQ ID NO: 139766 - protein, 357 aa, unidentified
MDKVLKQCLGIDVSKLSLSLSLGFLTDKLAKEFLVHNDVTNDLSGYKELLKWMKESVDRSTDLLIVMESTGVYHQGIAHYLYELGYSVSVMQSGRVKRYAQSLDQRSKTDALDSKMLSMLGLERELRLWSSPSVELQQLKMLSRERSSLLKDKTIETNRQGAIVSGVYRDKSASKRHKQRLKLLKDQIVSIEEEMRELISKNEFLKKKLGLLESIPGISFISAATVVGETLGFESIANAKQLTSYAGYDVVLRESGNFKGKTRISKKGNSHIRAALHMPSMTCVRCNPTLKQFYNRLKPNKAKPLVALIAVQRKLLILMFTLWKNEEIYDADFEKKKQQKHKALAAQDNKLINQYVS

SEQ ID NO: 139767 - protein, 418 aa, unidentified
MTTQTFQFHVGIDWASEHYDVCVVDGSGTALGTKRVEHSGEGIGECIEWLLKVAGGDASSIAVAIEVPRGAMVESLIENNLAVFAINPKQMDRFRDRHTVAGAKNDELDAFVMADSLRTDQRCFHRVELDEPAVLRIRELSRMADDLQMDSNRLANQLWEQLRRYYPQMLKLSPAADEDWVWDLLESAPLPSTVGTLKLAKVKAILGAHRIRRVTAEQVLEQLRQPALRLAPGAAEAASEHVLMLLPRLRLLQQQRRATANRIQSVLEELCATPPEGQEREHRDAEILLSLPGVGLVVAATMLAEASQPLRDRDYQALRHYAGAAPITRQSGKRKVVVMRYACNERLRNALYHWARCSMQKDPRAKQHYADLREGGHGHGRALRGVADRSLAMLVSMLKSNTLYDPARRVGVTLAQAC

SEQ ID NO: 139768 - protein, 355 aa, unidentified
MDNKKYIGMDVHKESISIAVMNDAGKIVLECVVETKASIILQFINGLRGDLHVTFEEGTWAAWLYDLLKPHVTRIVVCDPRKNASMKEGNKSDKIDARRLAELLRLNHLHPVYHGEHGLRTLKELVRSYLTITKDLGRVMTRVKALYRSWAIPCTGKQVYAPQHRAEWLVKLTEPGVHRRAEFYFQQLDALRSLRQQVRRELLQESKKHQAWKRLCQIPSIGPIRAAVLLGILQTPHRFRTKRQLWTLGGLGIETYSSADHRYVEGQLQRSKKPALIRGLNENCNHDLKNLFKGAAIIASTKPGPLQEFYAALLAKGMRAEMARLTLARKIATIVLVIWKRGVCFDAQHLKPQTA

SEQ ID NO: 139769 - protein, 463 aa, unidentified
MAKKNATSRKSKSKARKNVLERINPNAAGIDIGANFHLVAIREDRAQENIRKFGPFTSDLHRLADWLTEHQIETVAMESTGVYWIPVFQILEQRGFEVKLVNAAHVKNLPGRKSDVSDCQWLQQLHTFGLLNGSFRPKDEICVLRTFLRLRDTLVKDCSSHVLRMQKALTEMNIQIHRVLSDITGYTGMAIVRAILAGERDGLKLAQMKHPQVKASTEQIVKALEGDYRAEHLFALQTAVALYDTYQLKITECENKIEQQLEHFETKLDFEKILEESGALKARSAKVRLQLQRQAYLASVCGVDLTRLPGLSTLAVEVIISETGLNMDCWRSEKHFCSWLKVCPDNRISGGKVLSSRSRKTKNRAAGMFRLAAQGAMQSKTAVGAFIRRLRARLGAPTAINAGANKLARLFYRMLKFGAAYVEQGQTYYEQRYKERLLHNLTKRAKELGFQLTPFQPVTVSVS

SEQ ID NO: 139770 - protein, 391 aa, unidentified
MIYVGIDVAKDKHDCFITNSDGEALFNVFTIANNLEGFNDLFNKIISVETNPDNVKIGLEATGHYNYNLLEFLIDKGLPTFVINPLHTNLFRKSLSLRLTKTDKVDARTIALMMMSGVNLQSYSDKSYHNEELKSLTRYRFDKVQERAKLKTSVARLMVILFPELEKLVPTLHMASVYALMTEFPSAKAIAEAHLTRLSNLLQKTSRGHYTKNDAILIREAARTSIGTSMPAKSLELKHTIKLIQEISSEIDEIEQQIELIMNTLNSPITTIPGINLRMGAMILAEIGDFSRFDSPDKILAYAGLSPTTYQSGQLDSSYSHMEKRGSRYLRYSLFNAAKFVCIWDPTFSAYLAKKRAEGKHYNVAVSHAAKKLVRVMYQLEKTGQPYIKAS

SEQ ID NO: 139771 - protein, 359 aa, unidentified
MDHRTYVGLDVHASSIKACGFDLDTGTLFDKTFAYNPDAVLDWCLSLPGPVLAVYEAGPTGFGLARLFSEHSVDLIVAAPSKLLPKPGDRVKTDRKDAMHLAELARSGLITAVTVPTVEQEQARDLFRCREDAQLDFKAAAQRLGHYLLRWGHQMPGAGWNKSRLDKLAKLQFDSLTAQVVFGDYLAVVEQAFRRKAELDEQIRIEAVKEPWCRVVDALSCLRGVSTLTGFALATEIGNWSRLDARTIGSYLGLVPSEFSSGQTRSQGGITKTGNPHVRRLLVEAAWFHAKPYQPARSPSLQLAWSKVPGPVNVKADAANRRLYHQWTRFKVRKKRPVVANTAVARQLAGFCHDLAMMV

SEQ ID NO: 139772 - protein, 408 aa, unidentified
MEVVVIVGVGLDVHKKRIVACCLDGRSSPPTVVTCAFGTFRDELERLRTWLIKRECTHVAMESTSVYWMPVYRVLEGSVQIVLGNARHMANVPGRKTDMSDAQWIAKLLRHGLIRPSFVPPRPIRDLRQITRYRHKLIQSRTSAQLRVEKLLQTTNIKLSSVASEIFGVSGRLMLTALASGVTDPVKLAGLAKGKLRNKTIELTRAFRGSFTAEDARLLDAELCVVDDLEKNLARIELLIDERVRPFQEMIERLDTVPGIDRTLAIDLIAEIGTDLTVWPTAQQFAAWTGICPGTRESAGVRRRARVRDGNHYVKTVLTQAAVCASHTVTSYLARRYRRLAARRGERRAVIALAHEIAVSIYHMLRNNQPYIAPKIADPEKARQHRRNQLIRDLKKLGFEVTCTPTNA

SEQ ID NO: 139773 - protein, 340 aa, unidentified
MLAHKVVQRPARGKVEAAYDHYIALDWSLKIMAIAQMVRRDQAPRVFERPASLKELKTYLGSLKGRVILTFEESGFAHWLYLELLDEVDRIIICDPFKNKLLQHGPKTDKIDARKLCQLLRAELLTEVYHSTSGLYELRLLVSAYDDVVRSGIRLLNQQAALKLTHRDTGKTASFIGGFLTENIDLYRKSKEQYERRFRESARRNSLVRFQQQLPGIGTIGAVKIVACVVDARRFPYTGKYFSYCGLIKHEKLSGGRSYGRRKPRYSRMLKSVYKTAALAAINGKNSIREYYDHLLAHGVAEHNARHAVARYIARVSLGMLKTGTRYEPYRWRDAQNKDS

SEQ ID NO: 139774 - protein, 349 aa, unidentified
MKRTTIGLDIAKRVFQAHAVDPESGEVRRTKLQRSEVLRHFAQLLPSLVAVEACGSAQHWAREIRKLGHEVRLISPQFVRPFVKTNKTDAADAQAIWTAAQQPEMRSVAVKTEEQQAVPALHDIRTRLQKSRTAAVNQLHGLMGEFGVELPRGWRTMLPQAATALDSASSPVPALLQPQLHFQLMEIRSLTARITEVEGHISAWMRRREDCERIAAIPGVGLLTATAAVATIGEARTFRSGREFAAFLGLVPRQSGTGGRVRLLGISKRGDRYLRTLLIHGARAVISVRKGKYATDPNTWLDRLLQRRPTNVAAVAQANKTARQIWALLAHRRIYEPKHGVLEPVAAPA

SEQ ID NO: 139775 - protein, 433 aa, unidentified
MPTNHPYDLVIGLDRSDRTADLHLIDTHTGKVQKQTVATSPEALHDWLAQLRQDHPQARVALCLEQPAANLIVFLETYSWINLYPINPISLQKFRETFVTSRAKDDGKDAQYLAELLLSHHDKLKAWQPDDSQTRQLQQLVLHRRAVVDQRTGLTNRLKALLKAYFPQALELCGEDLWRPLATAFLLKWPTLQSLQKVRKESLKQFYHLQGSRSQTLIEQRLERIDKAVPLTDEIALLQSYTLRVQLICKELQLLDKTLDQFDRQIANGFQQHPDRSIFEALPGAGPVLAPRLLTSMGSERERFPRPGNLQCLSGVAPVTKQSGNKCYIHRRYLCPKFLKQSFHEYAKESILHSRWAAAYYLQQRTKGSQHHTAVRALAYKWQRIIWKCWQTRTVYQEQIYEAALKKSKSPLVGLLDQIELGESPVKSRAKKS

SEQ ID NO: 139776 - protein, 369 aa, unidentified
MSKRIIAQDEEIVIGVDVSDAKHNITVCTSRGEILDERVMHTPTRKGWEAFIETLPGCRITVVYEAGPQGYTLYETMRRLGRRAVVIAPVKAVGVKTDRRDARRIARDYLAQRTRQVCVPGEKQRSMRQLLRQRAQIRKDMTRIRNRIKSLIRFHGLDGALTAEFTDPANIEYLQFCVEQQEEMYAFLKGKRDQIDIILNGVAQNPQYSRDMQTLKGIKGIGTLSALELTLNVADMRAFGTGQQFSSYCGLCPGEWSSGVTRRQGHITRSGTGRLRGILVQCAWVAVRHDKRKKEQFEALSYRIGRRKAIVATARRMCVEAWRAINERGNRPRRIMRDANAHKAKNNGIPYARTSGPLDPPYVANWHAL

SEQ ID NO: 139777 - protein, 357 aa, unidentified
MLGIDTSKKTLHCAFRDPLTRELLWDQEVAHTPAGIAAILKRTPAEAPWVIEPTGRFSIELARRAKEAGRTVLLAPPRKAKNFLASLQSRAKTDKLDSKGLALFGLSQKLAPYPIKEEALDEIDQLLSARKGLSTSISKLQLQANELPHAREVLNRTITSLKADLKALDQQIAERAAKEPKLSIAKNLRAVPGIGAVTAIAVASRLAGKSFAHPDQFVAYLGLDIDIVDSGPRHSQRGLTHQGDAELRRLLYCCAQASLRAKDSPFKAQFEREKAKGLSTTAALCAISRKMAKLCWSLHKNQSTYDPARVYNAPERSKPVAQAPGAQEVGSTSLDPSLASPAETSRDASGDQNAPSA

SEQ ID NO: 139778 - protein, 304 aa, unidentified
MRFYTTQHPFYCGIDLQARSMDVCILSHDGELLLHRNRHAAPAPFLQAVAPSREGLVVAVACIVTWYWLADLCAAQGIPFVLGHALYRKAIHGGKAKNEKIDSQTIAALLRGGMLPHAYGYPAEMRAPRDWLRRRTPLMRTRAELLAQVQHTNSQYTLPEIGTNIAYTANRAGVAEQFEAPAVHKTLEVDLALIPYYDQRLSDLALFILQTAKQHDAQPLSLLQTVPGIGKLLSLVLLYAMHQIARFPRVQDCASYCRLITCAQASGGTRFGTSGNTIGNAHLTWAFSEAATLFLRGHEPGPKL

SEQ ID NO: 139779 - protein, 375 aa, unidentified
MSEHSEAFVGFDTSKLRNAVAIAEGGRDGEVRFFGEIDNTVEATAKLVRKLAGKYERLTFCYEAGPTGYGLYRQITGLGQACSVVAPSLIPKKPGDRVKTNRRDAMSLAKLLRAGELTAVWVPDEGHEAMRDLTRARASAVIDLRAKRQQVSAFLLRLGRHYPEPRKTWTKAHMNWLAGQKFEYPQQRLVFEEMMLAIRQAQERLTRLEEAMRGAVPEWSLAAMVTALMAMRGLDLISAATLLAEIGDLSRFRMPHELMAYLGLVPSEDSTGDTVRRGAITKAGNRRARHMLVECCWSYQHPPRVGPDKQHKVDAAPQAVREIAWKAQCRLHKRYRALIRRGKLKTVAITAVARECAGFIWAIGREITTAQGAAR

SEQ ID NO: 139780 - protein, 430 aa, unidentified
MKSNTQNAKIEAITEKTLVLGIDVGSEMHYARAFDYRGIEYSKKPFKFSNTEAGFVTFKEWILNLKERHEKDKVVPGMEPTGHYWFNLGKFLQDNEMKPVLVNPHHVKKSKELDDNNPTKNDRKDPKVIAGLVREGRYMIPYLPDGVYADLRTASNIRFQLQAELTRIQNRISRWFNIYFPEYKTVYGKPDAKSGMLILKAAPLPEDILTLGIDGVNQIWRDAKLRAVGKARAKTLIEAAEHSVGSKEGAVSARMEIRMLLEDYESRNTRLQEVMVLIEELVRKIPMAEKLLEIKGVGIRTVSGFLAEVGDISRFNNPKELQKLAGLALVENSSGKHKGETTISRRGRKRLRYLLFEVAMSLVSKNPEFRELHNYYTTRRLNPLKKMQSLMAIAAKLIRVFYAMLTKGVDYDPKKMVSDIKRPAVYLQAA

SEQ ID NO: 139781 - protein, 347 aa, unidentified
MKKGIRFVIGMDLGDRWTSVSVLDRETGEETEALRVRTTRESMDELFAGRGRCRVVMESGTHSPWTSRAASRHGHEVIVADARRVRAVWDSPKKNDRRDALLLAELGASPRGLLKPVRHRGERAQSELALLRAREAVVDSRTALINAARGAVKAFGARLPSCSSASFHKRAKDALPEALRPALEPLLAAVAALTATIASCDAEVERLCALHPETARLRQVGGVGPVTSLAFALVVDDPARFARTRDVGAYLGVAPRQDQSGDCDKQLGITKCGDRLMRRLLVQCAHRVLGPFGTDCDLRRWGLELARRGGRNAKKRAVVAVARKLAVLLLALWKKDSDYVPLRTAAA

SEQ ID NO: 139782 - protein, 411 aa, unidentified
MLEVKAERCAGIDVGKKFLAVCVMIGPANQKPVVEVRRFGTNVKDLERLRMWLQETGCTEAVMESTGSYWKPVFNILEGSLKIILANPEQVKALRGKKTDPNDSRWLASLLRHGLVQGSFIPPRDIRELRDLTRRRRVLLSEGTAERNRVQKVLEDANVKLGNVLSDVFGTSGQAMLEALLENTLTATQIAELAQSRLRPKIPQIVETLEGHRMSDHHRLLIKQSLDHMQYIEKMIAELDTEIAKRLQPYQKQIELACTVPGIGRIAAACILAETGMDMSPTGPFPDCHHLASWSAICPGNNESAGKRKSGRTRNGNRWLRATMTQTAWAGAAKKDSAFQIRYRRVKLRRGAQRAVTAVAHAQLIALYWVLRNGIPYQEQKRQKEENRRDALIQHHLRQLTKLEYTFHSNH

SEQ ID NO: 139783 - protein, 342 aa, unidentified
MNMHKVSHRNLNSKDGMLLGFEHYVAVDWSKQTMAIAHLSPRSQHPKVFERDSHLVAFKEYLSSLRGRTVLVIEETTTAQWLYVELRDCVTRIIICDPYRNRLLSDGPKTDKVDAAKLCQLLRAGLLKEVYHTTDEIYQLRRFISAYEDLVKSGVRLKNQRHALYHGHSESGGEATFILGHLDTAVGLYEATKKQYEERFEQLSARYRFARLLQDIKGIGVIGSLTILAIVVDARRFPRSSYYLVYCGLVHFRKQSGGRDYGKRKARYNHTLKRVYKLAAMSAISSVDNPLREYYDALRAQGVADYNARHALARYIARITYGILKTGTPYRPYGVTLKKNAA

SEQ ID NO: 139784 - protein, 339 aa, unidentified
MEAVTSDFARPSVDRHGGERTAASMATTQDACFVGIDVSKPMLDVAWTTEPGVTWQTSNDASGWSALVSRLVPVAPVLIVLEATGGYESGAASALALADLPVAIVNPRQVRDFARAMGILAKTDALDAQVLTTFAARIQPPARPITNELQADLRALVARRQQLIEMLLAERNRLELARPAVRGSIRTHVRWLEARLRDVDRDTRQRIEQSPIWRGHARLLQTVPGVGPATSARLISDLPELGRLTAREIAKLVGVAPLNDDSGSRSGPRRIWGGRAGVRHTLYMATVSAISCNPHIGAFYQRLRAQGKPGKVALIAAMHKLLIILNAIMKTRQPWMLTP

SEQ ID NO: 139785 - protein, 371 aa, unidentified
MKQTIRSFVGMDVHKATISISVAEDGRSGPVRFIGVIPNTPEAVGKMAKQLAKHSELDFCYEASGCGYGIHRQLTHLGHKCTVAAPSMIPRRPGERIKTDRRDSEKLAILHRSDDLTPVWVPDTTHEALRDLVRARVDASMHLMRARQQLLAFLLRHGRSYPTGNHWTQRHRCWLAGQTFQEQAHGIVFQDYLETVWAAQERRDALVKRISAMVATWSLGPLVEALRGLRGVDLISAATFIASTGDLSRFESPRLLMGYLGLVPSEQSSGGTIRRGGITKTGNREARRMLIEAAWSYQYPARIAKEKAEILVRLPKSIRDIAWKAQTRLCSRYRSMIARGKKPTVVVTAIARELAGFIWAIGREMRIPMTT

SEQ ID NO: 139786 - protein, 432 aa, unidentified
MKYKMKQKQNQRITRINEATLVVGADIAKKIHVARAVDYRGIELGKDCVFHNDAQGLTKLSSWMKEVGQAHGKTEIVFGIEPTGHYWFPLAAFLQEQGITVVVVNPHHVSKTKELEDNSPTKSDYKDAKVIADLIRSGKYSEPKLPTKAYADLRILMNLREKVSASLTQVKGRVVNWFDRFFPEYAGVFKDWEGKASLMTLRAFPLPADIAAKGARDVLAHWKTEVQRGVGIKRAETLVASAAASIGLTEGTTAARIELSTLLGQYELFSEQLACIMEQVLTILNDIPGTARMLAVPGVGVVTVAGFLAEVGDLSGYDHGQQIIRLAGLNLKENSSGKRKGKTGITKRGRSRLRALLFRAVMPLVAKNEAFKALHAYYTTRSQNPLKKKQSLIVLCGKLIRVLHTLGTKEREYNALEMLGRVRLAQIGQVGA

SEQ ID NO: 139787 - protein, 337 aa, unidentified
MVYGAIDLHMRYSQIRIIDAAGAVLRDQRVPTTRERLTAAFAGFGAMRILLETGTESEWVAQAVAAAGHEVVVADPNFAPMYGERRRKVKTDRRDVAALAEANRRGWFRATHRVSAAQRAVRQVLRTRRLLVQQRSSTIALLRAVLRQEGYRLGGGSTERVGARLAALDLPAALTATLAPLCRMLTMMTTEIAALNTQTQALATADPVTRRLQTTPGVGPVVALTFRAVVDDVARFGHAGQVSAALGLVPREDSSAERRQRGHITKAGPRELRSLLVQAAWSCWRSGHSGALRAWTDQLAARRGKRIAVVALARRLSRILYALWRDGATFEARTSAA

SEQ ID NO: 139788 - protein, 321 aa, unidentified
MTGIICGVDIGSSSLAARIGQDGAAATFANTPEGIAELAAFCKTHQVALIAMEATGGYEQRAFAQLCGHGLPVAVVNPRAVRQFAQSMGWLEKTDAIDAGMIAWYAETKKSQPLCLAPPTQLELRVRVTRLRQLTEVRTAQLNQQRLVTNEAVQKSFGAMLTFLAGQIRELEQAIAALIQADPLWRELNQAFRTIKGVADRTVARIMAEMPEIGTLSNKTVSKLAGLAPLANDSGKHQGKRAVRGGRAAVRDILFLVGSVVARYEPDFLCFQQRLRAAGKPPKVVRIAVAHKLLVRLNAKAREVRQQSAHTQLSCSASQQP

SEQ ID NO: 139789 - protein, 317 aa, unidentified
MNNSKIQIPVNIGVDVGKANLDIALHPSGQFYSIPNSEAHIRRFVKILKGYSIERIVVEATGRYEHALVQACDQADLPIIVVNPTSVRRYAQAIGVLAKTDRIDAQVIAKYAATLKPEFKPIPDKTSQQIRDLLTRRSQLLEMSTMEKNRLQILPKTLHRSIKSLLKMLQSQVETITKQIEQEVAKVDHWRIKSEILTSVPGVGKVLTYTLLSELPELGSLNRKEIAALVGVAPINRDSGKLNGKRRIRGGRHRVRTVMFMAMLSSIQCNPVFKRFYEHLKAQGKIPKVALIACMRKMIVVLNTMVKNQEPWREKMA

SEQ ID NO: 139790 - protein, 388 aa, unidentified
MPLNIAPGFQSETAVAPDHATAFVSLELSRSKWVITSLSPCSNKMSKYSIDGGNGTALLDCLARLRVKAESRIGTAVKIVVIQEAGLDGFWIHRLLESNGIESHVVEPASIAVPRRHRRAKTDAIDGEMLVRTLMAYKRGEPRVCSMVVAPTPEEEDRRRISRERRTLIKERIEHVNRVKGLLASQGIFEYEPMRKDFRNRIESLRTGDGRPLLPQLKAEIIRELDRIDLVLRQIAAIEAERDALVKSDSTDTEAPAALLMKLKGIGPEFATVLWLEGLFRRFANRRQLAAYAGLAPSPWQSGSVNRDQGISKSGNPRLRTIMVELAWLWLRYQPDSALARWFTERVGAARGRVRKIAAVALARKLLVALWRYTTHGELPNGAELKTA

SEQ ID NO: 139791 - protein, 390 aa, unidentified
MDVLYQSCAGIDVHQATVVVCILHGPLTSTRPKREMAQFDTTTKGLKACHDFLSQFHVEAVGMESTGVYWRPVWHELCDDFELILAQPAHMKAIPGQKTDKKDAHWIAQLTRIGLLPRSFVPDETIQELREITRQRKHYVESRNRETNRIHKILQSGGIKLTTYIEDIMGASGRNLLQLLIDETPATPRMIHQSVYTSLKRKVPQLLEALDGYFSAHHRFMLAQSLEIYDFYQKQIDCLEERMNGYLNLYERPVEILDSIPGMDLITASVIIAEIGVDMSQFPTAGHLASWAGLCPGNNESAGKKRSTKIRHGNSYLKRCLCQAVFAAKRQKGSPLAERYYQIQNRRGPQKATIALAHQLLKLAYILLKENLTYQEFVLQKKATRDEPVA

SEQ ID NO: 139792 - protein, 357 aa, unidentified
MDKITRIGVDLAKNVIQLHGVDSAERVVVKKAIPRQKFLEWFANLSPCLVAMEACSAAHYWARKLRALGHEVRLIAPQFAAPYRKGGKHVKNDARDAEAICEAASRPHMRFVPVKTTDQQNVLVLHRMRDGFVEERTALVNRLRGELIEFGVFLPQGIDAFRARFINALEDGATELNGTARTALLRGWEHWQALDVEIARFDAQIAAQVKHDSDAQRMMAVVGIGPLTASAATATVGDARQFKNGRQFAAWRGAVPSQASSGGKTRLGHITRQGNTYLRTLLFQGARSAVTSAHRRTDRLSRWIVQLQARIGWSRTCAAVANKHARILWAILAKGERFDPSYAQTRPMPAGRGPSKL

SEQ ID NO: 139793 - protein, 324 aa, unidentified
MGSAQRPNAGIDVSKQHLDVCCGTEERRLANDAQGWDAAAAMLLRANVDLVALEATGGYERGMVCALQGADIVVARVNPRQARDFAKSLGKLAKTDKVDARALRDFADVLSRHQDRQKYITEPVEPHREELAALVTRRKQLVEMRVAEGNRLGQARAHTTVKSIKNVIKTLDRQLADIDHDIDDLLEEHFKSQRSLLNSVKGVGPVTIVTLLALVPELGRLARREIAKLVGVAPLACDSGQHQGKRRIWGGRADVRSVLYMATLTAIRYNPPIRLFYERLLAAGKPKKVAIVASMRKLLTILNAMLRDQAMWDAAKHVVQPSVT

SEQ ID NO: 139794 - protein, 347 aa, unidentified
MLYAGLDLSRHKLDVHVMNQAGEPVQVTTAPPDADGLRGLARQTAGYGEPVAAAIESMNGARFVHDQLELAGWQVQVADAQKVKGLAPLACKTDRIDAWVLAELARRELVPAIWLPTPEVRAERERARWRLHLVRHRVALKNRVHATLLAFGRPCPTSDLFGSGGRQLLDRLRLPEPWAGTTAAAVALIDDLDEQVHGCERELRHLGADHAYVPLLMTAPGIAWVLGYTIAAELGDIARFPSPKKLCGYTGLCPRVYQSGTRDHRGPLAKNGPKYLRWALIEAATHAARHPCYHDHYQATKRRLGRQRGPAVARVEIARKLAEAIWHMLTTQAPFRPARPHAKALAA

SEQ ID NO: 139795 - protein, 387 aa, unidentified
MAQVNDFSRSLTAFDPISTLVVVVEMSKAKWLVSGAVPGVERQPLKKLEPDATALLRLIDRWRNEAVRAGRPISRIALAYEAGRDGFWLARWLIARGIEAHVIHSASVAVSRERKRAKTDRLDAAMLLRVFLGWLRGERGHCGMVAIPTMEEEDAKRPSRERECLVNERTRIINRMKSALICLGVRGFKPHLRRAPERLPGLRTAEGTGLPANILEELQRDMARLALVREQINAIEKTREARLEQAPDTGPHAMVRLLARVIGIGIETADMLVREILSRRLRDRRAVARYAGLTGSPDESGLKRREKGLARAGNARVRRGLIQLAWRFLVFQKDSALARWYRTRTEGPSGARKTTMIVALARKLLIALWRLVTTGEVPDGVALRPAA

SEQ ID NO: 139796 - protein, 413 aa, unidentified
MNEGYRRCCGMDIHKDTVVVCVLPPVGRDGQSIRKVYGSFRNDLIRMRVWLKQLKVTEIAMESTGVYWRPVWNVLDAEGFLLLLVNPVQVKALAGRKSDGRDARRIAEYLQDGRLDGSFVPSAEVRQLRMMLRHRISLLEQRNEVHNQIRDLFETANIKLSSVVTDLMGATGRGIVEALIAGEDSPDRLSWKVRGSLRMKEKLVKESLKGYFNDFHRSMLASHYKHYQFLTKEVAVFEERIAKAMEPYASQVELLTSIPGVDRMVAWHLLAELGIDLKAFPDAAHCCSWAGMVPGENESAGKQKSSRCRKGNKTLRRVLTQAAWAVSHCKAGYLRAFFHRVKARRGWAKAIVATSHKLLVIAFQVLKTNTPYVELGSDYFDRLNPARTARKLVQRLEALGLQVQLSPIVGSNA

SEQ ID NO: 139797 - protein, 426 aa, unidentified
MWDARRRVLKIKSLKHGIIQDKRGNIMRTVFGIDVSKASSEVAILVNGEKIHGYTMLNDAIGFNHLLNDLKTVHNPEIIFEATGVYSRRLRAFLEEYGYAYTQLNPLEAKKQLDSLRVRKTDKIDAEKLAHSQFILNRKPTYAQEEVYQHLRDLSRFYQNLTEDIVRAKNRLHKVLQVTFPELENLLSTPTGEQYWNLVMAFPCKEFVLNLSQNELCKIIRQSTSKRISEKRIAYLTDKLIKLAKQSFCAVKKISPMLEEVRYYAQELLRLSEHRQVVLDDMVALAQPLPEYDILRSIPGIAEITATSIIGELGDIRRFQSTNQINAFIGIDLRHYESGNFLAKEHITKRGNPYARKILFKCIHNIASASHTNPCHIADFYEKRKRQSTIASTKPHAIASIHRLIRTMYYLITHNKLYDYSLTQNR

SEQ ID NO: 139798 - protein, 372 aa, unidentified
MRNDSTVYVGLDVHKESIVAAYAVDLGEVQDLGEVGVLQRDLDRLCRRMRSKASQVHFVYEAGPCGYAVYRYLTGKGCACTVCAPSLIARKPGDRVKTDRRDAQKLVKALRMNDLSSVHVPDAPDEAFRDLVRAWGATRQDLKQAKQRLKSFLLVHDVRYTGKANWGDAHRRWLSKFVFPQPNSQLAFQEHLRCIEDRLAQCERLEGVLREAAPQWRFYPMIQAMQALRGVQFTVAVGLAAEIGELSRFDNPRQLMAWLGLVPSEHSSGLRKRQGAITKCGNGYARRLLIEAAWAYRYVAKVSPTIQQRHEGLPKAIIDRAWDAQLRLCKRFRKLTARGKPHNVAIVAVARELSGFIWDIARLATPASNTRH

SEQ ID NO: 139799 - protein, 354 aa, unidentified
MKELLKQSLGIDCAMDEHVASFSVMTGEFEIVHRATLTFKNTKSGFEKLNKWIQHQHPIQSLVIVMEATGVYHEQLACFLTDRNYYVSVILPNKAKYFAKTLDLKTVNDKIASQSLAIMGLEKKLSKWEKPSELLNKIRQLTRERDQIVNERTQIKCQLHAEKSGAWANASSIKRMNQRIKILDKQEAEIKNEIAELVKKDAELARKIKLVSTIKGVGLLTAATVIAETNGFRTVRNKKQLVSYAGLDVMQHTSGISINKKSKISKHGNKYLRKCLHLPALSAIKSSKNQKELFVRLVSRHGIKMKAAVAVQRKLLVLIYTIWKTETPYDPNYEVKKSRNELGQPRRATLKELA

SEQ ID NO: 139800 - protein, 347 aa, unidentified
MTIVEAPPSITGGVDTHLDVHVAAALDPLGRLIGTESFTTDAAGYRDLLTWLSGFGEVTKVGVEGTGSYGAGLARFLRRQGVHVTEVNRPNRQARRNAGKSDTLDAVEAARAALSGRASGHAKTKDGAVEAIRVLVVAKRSARQARVKAIVQMRHLGVSAPDELHQQIKGLPVTALVHDSARLRPSRSPDPVTAATKSSLSSLAHRIQSLDAEIASLDEQIASLVHAAAPDLIGLFGVGPDTAASLLVAAGDNPERLHSEAAWARMCGVAPIPADSGKVTGHHRLHQGGDRQANSALWRIVMVRIAHDPDTRAYFERRVKEGRTKRDVIRILKRYVARQVYRHLPRG

SEQ ID NO: 139801 - protein, 353 aa, unidentified
MADNHLPYEVILGVDTHLDSHVGVVIDYRGKWLGALSVQANPTGYSELLRWAQSFGNLLRAGVEGTGTYGAGLFQLLHEQGIDVFEINRPDRSQRRCQGKSDPTDAESAARTVLSGKALAIPKSQNGSAEAMRTLSVARRSAVKARTQAINQLRALLISAPDTIRNQLWKSKPDLCVKGCAQLETLGDTVALQSLAMTLRLLAKRWMYLTTELCELDKTLESLTRQAAKRLRSQFGVGPQTAATLIAVAGDNPERLRSEAALAALCGANPLPASSGKTVRHRLNRSGDRSANNALWTITLVRMRSDPRTRAYVARRTAEGKSTKEIQRCLKRYIVRELYPLILADLKDAAFAS

SEQ ID NO: 139802 - protein, 336 aa, unidentified
MWYIGLDVHWRTSTVCILDECGRQVKCQTIKGRWEKLLEWLGGLSQPFAICYEASCGYGTLYEALGRLSRRVVVAHPGKLRLIFRSKRKSDRVDAEKLAKLLYLDEVPPVHVPAAETRSWRQMIEYRRKLIDKRTRCKNGLRTLLRGLGIASARNLWTRKGLAWLGALALPTELAACQRDLLLEELDQFNRQVSRVTDVLDRLSVSRPEVGLLRTIPGVGPRTAEAIVAYIDDPRRFQRNRQVGAYFGLVPCQDASASSNRLGHITREGPGTARKLLIEACWQVIRLNPSARVFFDRVAGGKPDRRKIALVATAHWLLRCMLTMLRTGEVWRPQAA

SEQ ID NO: 139803 - protein, 456 aa, unidentified
MEKNKLNKEPGGFELINPDAAGIDISSREHYVAVPKDRDKDSVKKFGTFTEDLHKIALWLKACRIKTVAMESTAVYWVQLFLVLEEYGFEVFLVNARHVKNVSGRKTDVKDCQWIQQLHSYGLLRNSFQPENQIRELRNYVRQRKKLIEDKSRYVQLQQKALEQMNIKLHIVISDINGKTGKAMINKILEGERRPDELAKYTHPRIKATREVIIKSLRGNWRDDQIFILKQAFESGAFIDQQIIELDKQIEKVITAISEKFGKPEHKDTNQKESKSSYKNRLNFDSKKYLKCLYGVDITKMEGIDEISGLSLLAEVGVDIKSKFPTEKQFQAWLNVVPNNKITGGKLKSSRVMKKKNKAGQIFRNAAYTLFNSKGYFGQYLRSRKAKDGTPQAIVATASKMARVFYKMVTEKIEFNSGILYLSNEMYLRKKLAKMKSTIENIESVINANTVNYAFS

SEQ ID NO: 139804 - protein, 353 aa, unidentified
MNYIIGCDAHKHYSQFAVYEGHNLRGKQVRVEHERGAIREFLSEFPEGTPVALESIGNWYWIVEEIEQAGCQALLAHPAKAKVMMGNVNKTDKLDALGLATLLRNGTLPTVWIAPSEVRDERELPRTRMALCKIRVALKNRIHATLAKYNLSLPTESDVFAPKWSSQLNQVIEQLPPETQTCLQQELQLLEKVQEQIRAKEERMKERIALTPEMQLLKTVPGVGDILAIVIGTEIGLIQRFSCAEQLASYAGTVPAVKSSGGKVRYGHTPKESNHYLKWAFVEAANAPAQYRMHPRWQSRHVTRLYECVRLRTGHSVAVGAVARHLAEATFWILNKQEPYREPSRQKVLPRQA

SEQ ID NO: 139805 - protein, 488 aa, unidentified
MTKSATGGHPDLKMVNPTAAAIDIGSTMHMAAVNPDSCDMPVRAFGTFTQDLHDLADWFDACGVTSVAMESTGVYWIPAFEVLEARGFDVILVNARYAKNVPGRKTDVSDAGWLRQLHSYGLLRGSFRPVAEIATLRAYLRQRERLVEYAAAHIQHMQKALMEMNLQLHHVVSDITGATGMRIIRAIVAGERDPEVMAAFRDIRCHSSIEVIKAALVGNDRAEHIFALTQSLELYDVYQAKIGDCDRKLEVAVAALTVKADGDIPALPTARTKRKQANAPSFDVRAALYGVLGTDLTRIHGLGPALALKLVAECGTDLRAWKTAKHFTSWLCLAPGNKISGGKVLSSRTRRSSSRAAALLRLAATTIGRSDTALGAFYRRLSSRIGKQKAVTATARKIAVLFYNALRFGMIYDDPGAAAYEERHRTRVLANLQRRAKTLGFELAPIPAPGRTQGICPSQPAAPRRKSPSRPRPHRPGSLRRPAASKAG

SEQ ID NO: 139806 - protein, 453 aa, unidentified
MGKQSGKARSLSLDCIEPNAAGIDVGATEIYVAVPPDRDGEPVRHFKTFTSDLREMASWLLQCRITTVAMESTGVYWIPPYEVLEEAGMRVCLVNSQHVRHVPGRKSDVSDCQWLQYLHSVGLLKPSFRPDAAICALRSLNRHRSSLVESAAVHIQHMQKALTQMNLQIHHVLSDITGISGMAIIDAIVAGQRDPGQLASLCHAKVPSDRQTVIKSLTGNYRAEHLFTLKQSLAAYRNYQLLLAECDQEIQHLTGTMAGKMESGRPAPQQNRRKRRKNQFHFDMASELHRLFGVDLTAVPGINELTAHALLSEVGPDLSCFPSAAAFANWLTLCPGTKKSGGRVLSSKTRPTNSRLSHALRVAAQTLAHSRSHLGNFYRSMRARLGAPKAITATAHKLARILYHLLTTGSAYDETVFDREQQKQNLRLHKRLSKQAKLLGLQLVPINAGESCS

SEQ ID NO: 139807 - protein, 309 aa, unidentified
MDTIVVGIDVSEDRLDVAVRPAGTTLSCSRDAAGIEGLIGELGRLGAQLIAVEATGGFETVVAASLAAASLPVVVVNPAQVRAFARAIGQRAKTDPIDARVIAHFAEATKPQVRPLPDAATQALADLVARRRQIIQMIVAEGQRAKRAAPRAKRSIGRLLEALRRELSEIDADIDETVRGSPAWWEKENLLTSVPGVGSGTARTMLADLPELGSLDRRQIAALAGLAPFTRQSGKWCGKSFIGGGRASVRTALFMAAMTAVRWNPALRAFHHRLRAAGKPKMVALIAVARKLLTILNAILRDKIKWQTA

SEQ ID NO: 139808 - protein, 330 aa, unidentified
MGFRYFLGVDVAKAKLDCLLLDSVEQRRRSKVVANTPEGFEQLVKWLTKQGVGCQQVHAVLEPTGVYHERALFALSQAGIAVSLVNPAQLRRFAQGLGIHTKTDACDSAVLARFGEMIKPAHWQPAPSKARALRALLARRDVVAQDLQRERNRCEALVIEDTPERVRQSLTDTITFLEQELQALQKSIDEHIDDDPDLKRIWDLLQSIPGVGQRVADHFTALLAGRDFKSAEQLAAYLGLVPIEWQSGTSIKGRPRMSKAGPASLRQLLYMPAVVATRHNPHVKALYQRLLAKGKAKMSALGAAMHKLAQLCFGVVHTGQPYRADWLGRA

SEQ ID NO: 139809 - protein, 429 aa, unidentified
MNYTQNEKIEQVTDSTMVVGIDIGSQIHYARAFDNRGRELTKRIFSFHNDLEGFNSFKLWAETLKTENKKTAVLIGCEPTGHYWFAFAKYVNDHQKRLVMVNPFSVKKIKELDDNSPKKTDSKDPKTIAKLVVDGRYSIPYMPEGIYAEIRDLVYSRDRIMKQHNISANRIQRWLAIHFPEYLGLYTRFDAISGLAVLEKAPLPKDVIALGVNGIRKIWHDKKMRGRGVTEDRAKTLVEAAHNSVGLDGGIGTKSELYMLLEEHRLWTSQLEAVNKVLEEMILKVPHVEKLLAIKGVGSITIAGFIAEVGDIRRFDSPKQIQKYAGLELLENSSGKHKGRTRISKRGRRKLRKILYQVMVPLLARNKEFRGIYDYYVTRIKNPLKRRQAMVAVSCKLIRVFYAVLTKGVEYDRFKMMSDIHRKSDIIAA

SEQ ID NO: 139810 - protein, 457 aa, unidentified
MVDKKIPQSKIRLLTCRLVKILLNREVSKMNCNTQNAKIASITEKTLIVGIDVGSETHYARAFDWRNYEYTRKPLEFSNTEAGFQTFKAWMEDIAAKHGKTAVIPGMEPTGHYWFALGKFLQDSGMRPVHVNPHHVKKSKELDDNNPNKNDRKDPKTIAALVNEGRFSYPYIPTGIYAEIRSLSNLRFQTQEELTRIKNRLARWFAIYFPEYKDVYGDLKAVSGRMVLKEAPLPEDIRKLGVEGVNRIWRDAKLRGAGMKRARTLVSAAEHSVGSKEAPGAARMELKNLLNDMDVYTSRLEELLVKIEEKLKEIPYVDKLMGIKGIGLATVSGFIAEVGDIGRFDNPKQLQKLAGYAIVANDSGKHNGESRISYRGRKRLRYVLYEAAISLIGKNAEFRAIHEYYRTRKENPLKKMQSVVAVACKVLRIFYTILTKGVDYDAGKLMGDIRRPQIQAA

SEQ ID NO: 139811 - protein, 374 aa, unidentified
MNNTIFIGLDVHKDSIAVAIARAGCGDAESLGTISNDSLAVTKLIRRFEKKGAVLVFCYEAGPCGYGIYRQITALGHKCMVVAPSLVPHKPGDRVKTDRRDARKLARHLRNGDLTPVWVPDEEHEAMRDLVRGRESAKQDLHRNRQRLGKFLLRLGLKNPEGVRNWSAKHFVWVKSLKLDNSASQMVLSEHIHAIEECKDRVKRFEREIEELSSTNPHQATMAALQGLKGVALVTAATIVAELGDLTRFNKPQQLMSYAGLVPSESSSGNTTKRGPVTKCGNSHLRRVIVEAAWHYRHRPSVGVNLEKRQEMLSEEVKQISWNAQHRLNLKYRKMITKGKISQKAIVAVARELLGFIWSIGQIAEEGRVLAEDI

SEQ ID NO: 139812 - protein, 317 aa, unidentified
MTEQSAYAGVDVSKYRFDAAIVPSGDHVSLATADLAKLVAWLARRKPKLVVIEATGGYQRDAVAAFAAEGLAVVVVNPRQVRDFARATGRLAKTDRIDAAVLAAFGQVVQPEPRPLQDEQGRALRDLVARRRQLLDMRKAEKTRLQGPISPPVQAGLQRHLAWLDAEIASADDDIDRMIRQSPAWRADEELIRSVPGAGPVLARTLIAEMPELGRLNSRQIAALVGVAPFNRDSGKMRGTRSVWGGRAQVRSVLYMATVCAVRHNPPLKAAYERLRQAGKPPKLALTACMRRLIVTINAMLKSRSTWDPDLTANTAA

SEQ ID NO: 139813 - protein, 341 aa, unidentified
MKTFIRIGVDLAKNFFQVHAIEQEGGAAVARKLTRTKFREFFKGVAPCRVGMEACGSAHYWARELRAMGHDVVLMPPAYTKPYVKRGKNDAADAGAICEAMSRPEMRFVPVKSVAQQAVLMLHKTRDLLVKQRTMNVNALRGHLAEFGLIVAKGIHRLEELIALARAETTLPDEALAAVEMLALQTEQLDTRIASLAKSIGKTNAKSPTSQLLLEVPGVGPLIASAMTASHPDPGVFKSGRDFSASLGITPNQYSSGGKEKLGVITKKGNRYLRKMLVVGCTSVLRVAAKYKGGLAEWIVSMRSKKPERVVAVALANKLARICWAIMSTGEGFREELFTRA

SEQ ID NO: 139814 - protein, 359 aa, unidentified
MQAQRNELNFKGQNIYAGIDVHLKSWTVCILTEKLEHKRFTQPPDAKVLYNYLTRNFPGATYHSVYESGFSGFWAHRQLESSGIHSIITNAADVPTSQKEKLQKDDPVDSRKLARALRSGDLEAIYVPSSSTLEERCLLRTRATLVKDMQRCKQRIKSFLYFFGIRYPERFSQSGTHWSNNFMRWLKEEVQTAEESGKQSLHLQIQQVEEMRKLLLLVTRQIKSLAANEKYASNVKLLRTMPGIGLITAMTLLTEIESVERFEDTDHFAAYAGLVPDRHNSGDTKKDGEMTCRGQATLKKAIIESTWIAARKDPALSLAYNRYVHRMDPNKAIIRIARKFLNRIYYVLKNKKEYVTCVA

SEQ ID NO: 139815 - protein, 409 aa, unidentified
MTVYCGIDWAEQHHDIALVDEHGRLVAKGRIGDDLDGFTKLVEMLAAAGDSVDEPIPVAIETPRGLLVAALRTSRRRVYSINPMAVARYRERYSVSRKKSDHADAVVLANILRTDAHAHRPLPHDSELVQAIAVLARAHQDATWRRTRASNELRSLLREYFPTFLAAFSGRKGNLTSVDARAVLAIAPTPAAAAKLSTTRIAAALRRGGRQRGVEALAAELQEALRRPQLRQPPVVEEAMGSQALALLATLNVECVSVEKLAEAASEAFRQHPDHVIVTSFPGLADVTGARVLAEIGDDRARFADARALKAYAGAAPVTRASGRSISITHRKVKNDRLAAAGYLWAFVAATHAEPAKQHYQRRRDHGDRHPAALRNLFNRLLGCLHHCLATGQLYDAGKAFNQLVPAPA

SEQ ID NO: 139816 - protein, 332 aa, unidentified
MTEVVTFTQIVKRGCGLDVHQQTVVATISGEGLKEETREYGTTTRSLTELKEWLLSSGITHVAMESTGVYWKPIYHVLEPSGMTLWVVNARHVKYVPGHKTDKRDSKWLCKLLLAGLLKPSYIPGREQRELRDLTRYRRKLIDQIASEKNRIIRLLEDCNIKLSSVLSDTQCVVGTKLIDKLCEGKTIRMEDIREVYNKHLHASPEELLEACQGVITPHHVFMLQVIKEDIRSCESLITQIDSRIKEILSPYENVLELLKEVPGLSTKTIEDLVAEIGLDMTVFPTEKHLASWSGLSPGNNESAGKKKRKNTPWQQTGKGSDNRGSMGCDKD

SEQ ID NO: 139817 - protein, 395 aa, unidentified
MRYAGIDIGSERHVVAVVDERSEVLVAATSFGEDADGYAKLLAKLGDAADVLVAMEATGHYWCNLFTMLTGRGYAVALVNPLSARRFAQAQLQRTKTDAIDALSIARLAALRRPSATKLPDQLAIELRERVRLRDRLMQDLGDRVRELHRVVDLAFPELTRHLKDLGSAKAITVLSAFPTAKSLSIASVRMVAQLCYDGRHKIGEELAATLIQAAKRSVGQHQGPVFGLEVKYFCADIKTLSERLREIDQDIAAQVAGDELATLLTTIDGIGPNTAARLIADLGDPADWKSADAISSHVGVVPELKHSGKLRPMRAGISALGNRRLRHALWMPVLVAVRRNPWLRYHYARLRARGKLAKVALIACMRKLIAVIYSVAKSRKPFVPKIPSTTTAVA

SEQ ID NO: 139818 - protein, 482 aa, unidentified
MKKRNIYQNQSQELLHLFEGAGSSEKVMCVPMDYAKKDHLVMFCNGHGDILRKPFSVKNTPEGIAYIADQVTRSCRRRGIQKKHVFFGGEDANSFAKNFVSTLRSKGFLVANVNAHDAKKQRGNVQASTDRIDLMGIATMLLNCRANCGPAQSGIYRNLRTLVRHRRKLVQMLTEVKNRVHGIVDELFPGFLNEKNSGIIPFTQSSLYLMEDRFSPKQIRRRRRQKLIEILKRFGTSKAERTAVKLQQYAAKVLHAPVEYVDTMQLSLAQHVKHIRCLKESVAQMDKEIALNLAQTQGAFLTSVRGIGLVLAAGVTAEIGDLNEQKPLNNLASYSGIIPRVKQTGGSDGKTYTGPVAKRCNRILKDYVVKSAYHLGLHGPKDLMADYKRRDASGQHADFGMGRRYLRMAISLMRTSQVYLPPNLRRDDYTLEERAGYYLTSWPYLKEKWKKVGALEAAFAKDRPLGLWRQIVQELYDIKLKL

SEQ ID NO: 139819 - protein, 370 aa, unidentified
MKKNVNVKADYIIVGCDLHEESMLVKYAADKSEPKTKSYAYKRVRRQAMIEDLKKLSARHGGAEVVFAYEASGLGYVLHDELVAAGIDCRVIAPSKVDRSPHYRRRKTDEVDAARMFELLRGHLLAGNKLPACHVPNKQERDDREVTRASHDVQQKVAMVKAQLTCLLKRYGIEEPDDVGRRWTKCYRAWLKGLPESKLDLGAGKVLLSYLRQIELMEEELAYWNKEVETLGQSDSHKAPVEAMMAHKGVGMVTATTFLTEVGDLNRFKKGRHVAAYLGLVPSSHESGEVDDRKGHITKQGPSQVRAVLNQAAWSFIRTEPWARAKYDRIAQRNPKKKKIAVVAVMHDLAIWLWRTGLAAKRAAAATAGS

SEQ ID NO: 139820 - protein, 425 aa, unidentified
MNSNTQNAKIEAITEKTLVIGIDVGSETHYARAFDHRGFEYSKKPFQFSNDEAGFESLQEWILDIKEKHEKENVVPGMEPTGHYWFNLGKFLQDNDMKPVLVNPHHVKKSKELDDNNPTKNDRKDPKVIAGLVKEGRYMIPYLPEGVYADLRSVSNIRFQLQSELTRIKNRISRWFNIYFPEYKKVYGNPEAISGILILKQAPLPKDIQALGVEGVNRIWRDAKCRAVGIKRAKILVEAAEYSIGSQEGVVAARMEIRMLLEDYESRITRLQEVMALIEELVGKIPMAEKLLEIKGVGLKTVSGFLAEVGDISRFSNPKELQKLAGLALVENSSGKHKGETTISRRGRKRLRYLLFEVAMSLVSKNREFASLHHYYTTRKVNPLKKMQSLMAVAAKVIRVFYAILTKGVDYNPAKMLGDIKRPAV

SEQ ID NO: 139821 - protein, 353 aa, unidentified
MSKDITLTVDYHDRVCVVRWFDHGTGRDQVFTEVPTTKEALKQMVEQARLAAGPAGHVTWIQESTTGWARVQELLSDRVLFRLANVLQMPLPPKARRRKTDKIDTARLQREYLNGSLPLAYQPPAQWRQLRRLVAYRESLVKRRTAVRNWINRYLAHETWFDRTGLWSPTGQKRLRALLKRLPKTDALVIGQKLDELTRLGEQLEVAFKEFASAYSNSPEAQRLDAIKGIDIVSAVSIVARIGPVERFRDADRLIAFAGLAPGISESDQTRRNGRIGGGGTDWHLRNYLIEATIWARKLPRYKHTYNRIYKRRGAKVGRLVVARMLVRSIFKILRDGVEFAAGVARPIAAVTS

SEQ ID NO: 139822 - protein, 360 aa, unidentified
MAKTKAVHSSYVIGGVDTYKDLHVAAVVDQNNCVLGSEFFATTRQGYRQLLAWMASFGTVKRIGVECTGSYGAGLLRYLQSAGVDVLEVTAPDKMERRRRGKSDTIDAECAAHAAFSLIRTVTPKTRGGMIEALRVLKVCRKTAVAARRTALQMIQMNIVSAPDELRDQIRSLTRMQLIRTQASWRPDVTAYRNVQDAYRIALKSLARRYLELHDEIADLDVMLASIVDELAPELIKRNSVGYECASQLLITAGDNPQRLHSEAGFAALCGVSPVPASSGKKNRHRLNRGGDRAANSALHIIAIGRLRTDTKTQEYIGKRVAEGHSKMEALRCLKRYISREVYTLLRNQNRQINSTQITT

SEQ ID NO: 139823 - protein, 347 aa, unidentified
MNFYTRQHKHYCGIDLHARAMYVCILDQSGTKLVHKNLPTTPEAFLRVIAPYRDDLAVAVECIFTWYWLADLCAKEGIAFVLGHALYMKAIHGGKAQNDKIDAHKIAVLLRGGMLPQAYVYPAEMRATRDLLRRRCHLVRKRAELLAHIQNTNSQYNLPEIGKKLAYKANREGVEEHFPEPSVRKTIEVDVSLIDHYDQLLGEVELYITRTAKAHDAQTFARLQSVPGVGKILALVLLYEIQDIARFPRVQDFVSYCRLVKCAKESNNKRLGTSGKKIGNVHLRWAFAEAAVLFLRQNQPGKEYFAKLERKHGKAKALTVLGHKLARAVYYMLTREQPFDLQRFVAA

SEQ ID NO: 139824 - protein, 326 aa, unidentified
MEKVMLYVGIDVSKLSFDVAILNNSSYQNKQFVNDSEGFKALSKWVKPFSKEVVFCMEATGIYGLALAKHLVQKGEKIIVANPIKTNAFAKMEMSRNKTDKADAQSISRYCKHLDDKGEITKNLFKPKGEAFEKLQFLITRLEQLDKIATQENNRLGVSLDKEAVRSIKSMLSHIDKQIIKIKTVLKEIVKQDDTLNQQVGLLISIPGIGEKTAWAILAYLGDISLFSNAKQVTSYAGINPKIEQSGTSVNKSSLSKIGNKHLRKALYMPALTAAKHNPLMKDLYERLQQKGKPNKVALCAVMRKLLVVAYGVLKSGKAFDPCYQR

SEQ ID NO: 139825 - protein, 346 aa, unidentified
MDLYIGLDVSLASTAICAVSAQGKVVKATVAGSEPEELVRALRSLPGTVIGVGLEAGPLSQWLHRALVEAGFDAVLMETRQVKGALKAMPNKTDRRDAEGIARLLHMGWFRPVHRKSMSAQETRALLSSRKAIQQALMNIELSMRGVLRNFGLKIGKVAKGRYEGRVRELVDGNPMLEAAATSILTVRKELRKEIAGLEKLLLGHAKSDPVCRLLMTMPGVGALVALTVKSAIDDPDRFRSSREVGPWAGLTPKRDQSGERDVLGHITKAGDAGLRAALFRAATVMLNRGRASWLTAWAWNVAKSRGKKRATVALARRIGVVLHRMWRDGTEFCFKRADAMAAAAA

SEQ ID NO: 139826 - protein, 350 aa, unidentified
MLIIGCDYHPGFQQIAFVDTETGECGERRLAHREEAEQFYQDLRQRNATARLGMESSGHSRWFERMLRDLQFELWIGDAAEIRTRRVRKQKTDRQDAQLLLRLIMEDRFPRIWVPDAENRDLRQLLWHRHRLVQMRTRVMNQLHVVALNEGLRRKKALWRPAGRNELESLKLAPWASRRRQDLLDLLDQLTPKIQDLTGKLEQEVESRPVTRLLMTHPGVGPLTALAYELVIGTPERFHCGKQIASYVGLVPTEESSGDRRRLGHISKQGNVLLRFLLVEAAQVTVRSHPEWRSTFFHLAMRRGRKIAKVAMARKLAVHLYWMWRQGLDYGQMQKLGSHAGEPGNRHGAQ

SEQ ID NO: 139827 - protein, 316 aa, unidentified
MVGIDVASKHVEVAAVGAELSAALRQVPNDADGHSALAEALARLKPELVLMEATGGYEAALACALQAAGPRVAVVNPRMTHHFAQAMQKLAKTDRIDAAMLAEFAGVLARRPDCERFIRPLSEPEQQDLAALVTRRRQLVAMQLSERQRLRLARAVTRPSIEALLEAIARQLDDVEAEMAAHVEQHHAQMAKLLQGIAGIGKVATATLIAELPELGRLNRRQICALVGVAPYAKDSGASKGRRRISGGRFELRRALYMATLAATRHNEVIRAFYERLVAAGKLKKVALIACMRKLVTHLNALVRGYLNTQHQVSIA

SEQ ID NO: 139828 - protein, 485 aa, unidentified
MILFRRFPRSDRLGRSRITELKLDKDMPKKSSNKAKSQRSRERALLQKVHLNAAGIDIGADAHWVAVPEDRDANPVRSFGVFTRDLILLCEWLKRCQVETIVMESTGVYWIPLYQMLERKGFEVRLVNAHHVKNVPGRKTDVKDCQWLQQLHTFGMLGGSFRPQAQMCVVRSYLRLRDTLSKDCNSLVQRMQKALTEMNVQLHRVISDITGVTGMSILRAIIAGERDCLKLAQLRHPQIKSSALDIAKALEGDYCQEHLFALQTALELYDSYLLKIMACDRHVQKALSTFEAKTSAPAPELDRMRSAEKRQEALRRHHLEQMTGADLTKLPGLDLLAVERILSEIGLDMSRWPSEKHFCAWLNVAPNHRISGGQILSSKPRKNANRAAAALRLAAQSAMQSKSAIGAFIRRIKSRLGAPTAINAGAHKLARLVYRMLKFGKAYVETGQEAYEKFFKERTLRNLQRKAHQLGFQVTPITTPTVPVS

SEQ ID NO: 139829 - protein, 355 aa, unidentified
MNSEKYIGLDVHQATISVAVLDSTGKLVMESILETKAATILEFFAGLRGTLSVTFEEGTWAAWLYDLLKPHVAKLVVCNPRKNALLKDGNKSDRIDAHKLAELLYLNKLSSVYHGETGVRMLRELARSYLTIVKDLTRVMCRLKAVYRSWAIPCAGRDVYYTRHRTEWLGKIKEAGVRRRAERLYQQLDMLQYLRQQVRRELLAESRKHAITVKLRQIPSLGPIRSALAVALIQTPHRFRTKRQLWAYSGLALETRTSAEYCYVKGGLRRSKKQISIRGLNKDHNHDLKGLFKGAATRASVLPGPFQDFYQRSLAKGIKPTMARLTLARKIAAITLTLWKKGENFDADKLKSQAA

SEQ ID NO: 139830 - protein, 412 aa, unidentified
MNPVIGLDVSKGESQVQAFLDKGKPYRKSFSVKHTLDGLDSLLDFLKEVTIASEGMKPSVILESTGPYHSPVVQFLDEQDYVYIMVNPLVSHRSRSANLRKVKTDPVDAYQLCELFYKEELEPHRKRGIQLLNLRNLTRQQEAIVGVSSQTKLQLQTLLDQVFPEYRGVFGALYSRVSLNVLNTFPTSESVLKVSKSALIDIISSLCKSRSNQWAEEKAEKLIEAAERNPFQHNMYDSHIFNLKILINIVLQYEEHLSKLAAEIDALAEELEEYKIIQSIPGIGEKIAATIISEIGEIERFNHPKKLVAFAGIDPSVYSSGRFTATKNKITKRGSSRLRRSLYMAVRCGIRDTRKQKTTDEIIARNKKLREFYDKKRDEGKPFRVAVIACVNKLLHWIYALLKSKTTFQDIA

SEQ ID NO: 139831 - protein, 333 aa, unidentified
MKPAIEKEYAIGIDISKAYFDVAYVKDGVKHHRQFKNTKQGFRNLKKWLRKQKVRTPHFAMEATGRYGLKLASFLHRQGYAVSIVNPRQIKAYRDSWLFRNKSDAADALLIAKFCRSRSLPLWQPPAQELSAIQDMERRITALKKMRTMEKNRLKSGEMAKAVAKSIKKHLAFLDKSIAQMEGEIKELVNQHPALQEIIKLLTSITGIGEKTAIILMGEIRDITLFGSAPALAAYAGVSPQNHNSGDTVRKKPKMSKVGNAHLRGAVYYPALSAMQHNPIVKDFVERLKANGKEGKVLVGAAMRKLLHIVYGVWSSGKPFDPNYEKRSQSLAA

SEQ ID NO: 139832 - protein, 339 aa, unidentified
MNEVSTIGLDLAKNVFQVHGVDEAGKVVVRRQLRRSQVIAFFKKLPPCLVGMEACATSHHWARELQALGHEVRIMPAHYVKAYVKRNKNDAADAAAICEAVTRPSMRFVAVKSPEQQSLLMLHRSRSLLVRQRTMLVNAIRAHLAEFGIVARLGRAGVQRLLAVIADPKEARLPDLARSCLESLVAALMTVEQEIARAERRILVWHRGSETSRRLATIPGIGPIIATALTASVTDPAVFRSGRELAAWIGLVPRQNSTGGKERLGRISKRGDAYLRWLLVTGAMAVIRHGRKTGFEKTPWLGDLMGRKPTKVAAVALANKMARVVWVLLNTGESYRHPA

SEQ ID NO: 139833 - protein, 408 aa, unidentified
MANKIAGIDVHKKVLMVVVIDARTPDSKPERRRFTTMPSDLRRLSTWLDQLGVEEAVMESTAQYWRSVWLELEPHFRLHLAQAFSNRAPRGRKHDFKDAERLVRRLIAQELILSFVPDGEQRIWRNLTRMKLQLVRDRVRLQSQIECLLEEMRIKLSVVITDLLGTSGLRILHALANGETDAKNLALLGDHRLKCSEEQLVEALTGRPHSMHRQMLSLQLERLRLLDEQIGKLNSLIAVAMNPHQDTVIRLAEVPGLGIDSAQQIIAEVGVTASTFRSAAEFTSWVGTCPGSQESAEENSSSRSAKGNKYMRRVLNQAANAAARSKGTHFQAVFRRLLPRLGYQSAVWAIAHRLCRLVWKILHEGIRYIEQGIESEPKLLIYRARSLAKQLRKFGYNVQITPADGAPA

SEQ ID NO: 139834 - protein, 391 aa, unidentified
MVCVGIDVAKDKHDCCILDSDGTIRADCITIPNNMDGFKQLLQTIRDCTKKSDKIKVGLEATGHYSYNILGFLLDNDLAVYVMNPLHTNLYRKSLSLRKTKTDRVDARTIATMLLSDVDLKSYTDTAYHNEELKSLTRYRFDKVRERAKLKQSVSRLVTILFPELEKLVPSLHIASVYALLSEYPGAKQISEIHLTKLTNLLATASKGRYGKDKAIQIRDAARTSIGSVMPAKFLELKHTIKLIRELTSEIDEIEVSIQKIMDELNPPILSIPGVGIQSAAMILAEIGDFSNFESPDKVLAYAGCSPSTYQSGKLTNCYAHMEKRGSRYLRYALYNATKYVCYWNPVFAEYLAKKRAEGKHYNVALSHATKKLVRLIYALQKSGKAYLTAA

SEQ ID NO: 139835 - protein, 357 aa, unidentified
MRRPKAKSNDKLIAGIDLHGNNLVMGVINQDGTRLMHRKLDCRLEQVEEFLRPLKLRLQSMAVESTFNWYWLVDGLRAQGYPIDLANPAKIEQYSGLKHADDKDDAFHLADLQRLNILPKAHVYDPELRPVRDLLRRRTNLVHQHTALLLSLQSLYARTTGQRLDLGEAKKMEPKQAPKLYEHPANQLIAQVQVEHIGALAKSIHRIEKAVLDCAREIPLYEKLLTLPGIGRILGMTITMEVGDISRFKTAGDFASYCRRVDAKRLSNGKCKADNNQKCGNKYLAWAFVEAANFARRYDESCRRWYDRKAAKAGKIIAPKALGCKLAKAAWYVMAQQCNYDEKRMFPELVNKPMKTS

SEQ ID NO: 139836 - protein, 408 aa, unidentified
MEEAVVEPLRFVALDVHKHYVMVGAVDARQTIVLTPRRVGLPDFPDWARAHLTATDAVVLEATANAWHLYDVLAPLTAAVTVAHAGAIKAIAQARVKTDARDTIHLARLLAARMIPSVWVPPHAVRELRGLVAHRRRLVSQQTQARNRLHAVLQRHQIVPPAGKLFSREQRSWWASLALAPVERLRVRQDLALLATFEPLIAEADGELGRLSTSAPFADQVPYLVQLTGIGVLAAMTTLAAVGDISRFPTPKKLVGYAGLGASVHDSGQTQRGGRITKQGCRELRGGMVEAAWVAVEHHPKWKAEFARLSARLGAQKAIVAVARKLLVVVWHVLTKREADRHGDTQAIARKLYTWVSRCGATPGHHRPLRLLVRREFDRLGLDAPEVMVGYGRNRRPLAPPGVSASAT

SEQ ID NO: 139837 - protein, 345 aa, unidentified
MKITTVGLDIAKRVFQLHGVDAAGKAVLRRNLQRSEVLAFFKALPPCLVGIEACGAAHYWARQIRELGHEVRLMPPSYVAPYVKRGKTDAADAAAICEAVTRPTMRFVPIKTAEQQAVLMLHRTRDLLVRQRTMLVNALRGHMAELGIIAPQGIARVADLMAVLFGEDTTNVPALAREALRGLAAELEALDRRMKEIEVAIVRWHKDNEASRRLATIPGVGPITASAIVATITDPFQFHSARHLAAWIGLVPRQHSSGGKQRQGGISKQGDRYLRRLLVLGATAVIRHSRSKSTAEAGWLKSLLERRPARLVSVAQANKTARIAWALLVRGEAYRMPAAVPGGAA

SEQ ID NO: 139838 - protein, 344 aa, unidentified
MKVTTVGVDLAKAVFAVHGVDGRGKVVFRKSLKRAQVLTFFANLEPCLIGMEACGSAHHWARKLSALGHTVKLMAPQFVKPYVRTNKSDAADAEAICEAVARPNMRFVPIKTIENQAVLALHRARQGFVKARTAQANQIRGLLSEFGLVIPQGVASIAKQVPRILEDAENGLPDTLRALIARLATHLKELDCQVDELESQIQAWHRQNAESRRLAEIPGIGPITATALVASIGDAKTFANGRQLAAWLGLAPRQHSSGGKPTLLGISKRGDVYLRTLLIHGARAVIRASVARLTQEAWLKRLLDRRPKNVAAVALANKNARMVWALLAHGRTYRPGGRTSPLAA

SEQ ID NO: 139839 - protein, 355 aa, unidentified
MLYLGIDQHARQITISLRDENGDVVQARQVSTEPEKINAFFRQLTRERLRNGESFVAVLEVCGFNDWLIRMLQDYHCHKVILIQPDDRKKCKTDRRDAAALSELLWANRARLLHGKPVRGLRQVDIASSFDQENRRLTTLRKDAGRDRTRLVNQVRHILRRHNLQWEMPTKRLPTKAAIAWLKEVALPQIDRLEMNQLLADLEHIQQRMKELEQVIAQRCGVSHEAALISSMPGVSYFTATALACRIGRVERFPRAHSLANYWGLTPGCRNSGENNQRLGSITKAGSGMARWLLAQVTHKVLRKDARLREWFKRIRRRRGATIARVAVMRKLATIIWHMLSKRTTYAECRALAAA

SEQ ID NO: 139840 - protein, 410 aa, unidentified
MKVAGIDVHKKVLMVVVVDESTPEEKPGRRRFVTLPSELHRLLTWLREQGVEEAVMESTAQYWRSVWLELEPPMGLHLAPAFSNRAPGGRKHDFKDGERLVRRLIAAELISSFVPSGEQRIWRSMTRMKVQLTRDRVRLQNQIECWLEEMRIKLSIVVSNLLGASGLRILHALANGETDPRKLAQLGGERLQCTEEQLVDALTGRVQPVHEAMLALQLQRLQLIDQQMERLNHMIAAARKPHQDAVIRLAEVPGLGVDSAQQIIAEVGAQATTFSSAAELTSWVGTCPGKDETAEQNHSSRSAKGNKYLRRVLNQAAHAAVCKKGSYFQALFRRLLPRLGYKSAIWAVAHRLCRLVWKILHEGVRFIEQGAEIGPREKKKRAQMLARALRKLGYEVTITPINQLAPKPVV

SEQ ID NO: 139841 - protein, 417 aa, unidentified
MARRLRLEPEDIIVGLDLAGEQHQAVICRMEGERLTRFRVPHSLVGFDDLLMRTRLLASQSAGRRVFAFEATGHVWEALAHYLEARGEEYVIVNPLATFRLREARQMNRHKTDISDAEQIAELVRNDLVTETKLEAGPYLELRRSWGEYARLREERARLKTLLSHQLYGVFPELRSVWTDLLAPGCVAVLRLGLTPQEIAALPVNDFIRRARAASRGRRLWRFKLIAVHERAQRTVVPASALGPLARELARLVERVDLLSDQIDALAHEIQKVLAVVEESRYLLSIPGLAWSSAAGILAHTGSIDKYRHGRQLIKLAGTNPSRHDTGQRIGRKQGMTHRGRSGLRQVLYMATLSCLQHNPRIRAHFDRLIQRPDRPLARMQAFGACMNKLLLYAFAVMKRRETFDAEHAWKGVALVA

SEQ ID NO: 139842 - protein, 414 aa, unidentified
MEQKMIYVGIDWADDHHDILITDDSAKTLDQFRIDHTCDGFALLHSHLANHQTSPGLVLIAIETSRGLLVHELLQKGYTVYAINPKAVNRYKDRHVLSKAKSDALDALSLGHLLRTDRHLFQPIKPLPEDYRLLDRLCSDLRKAVDEKSRVINQVISCLKEFYPKALETFSLNSQIFIDFLKAFPDHGTLRACTKKAFLTFLKKHRYPYPSRAEELWKVIQSPALQPDRVIARSGKLRLGMLLGQLENLKEHITHYEQEIQAILDSLPESNPIKSLPGVGERLAPELVATLGPNSKDGHHRFHAAVEIAKLSGCVPVVRESGKWKSVSLRYACVKSLRRTFHDWAFASINYSSWARAFYDYHKEKNQSHCTILRNLGKKWIKILFAVWSNGTSYDEALHIQNLKARNVPWAMAL

SEQ ID NO: 139843 - protein, 464 aa, unidentified
MYLGGFSPRLFNVDELPKRTAVCCITQVKSTSSKVRIPTRAIPSLHISGRDLMQDILTCAMGLDVHRDVIVACLARGELGTEPEIEIRSFSTLIPEMRKLRDWVLEVECRHVAMESTGIYWQPIYEMLEPCFDGQINILVVNARHMKNVPGRKTDMRDAQWIATLLRAGLLNGSFIPDKTFRELRHLTRYRKSIVHDITAQKNRIDKFLQSSGFRFTAFLSDAFGASGRNIIRHLMEYGDISREALDKCLKTQTRKRNDEILVALNGSLSEHQRSFLRMIFEHLESLERHRHTVEDAISEEIVKHEAALSLLCSIPGIDVTAAASIIAEIGTDMSAFPDSQHICSWAGLSPGNNESAGKRKSAHINKGDPYLKSMLCEVGWVISGKRTLYLSGWYWRVKQRKGAKRATIALARKLLTLIYTMLKTGTPYNEECFEIRRKQSERKRAGRMVNELQKLGYFVVAPD

SEQ ID NO: 139844 - protein, 342 aa, unidentified
MQKVSIIGLDLAKRVFQAHGAHADGSVSFRKKLSRERLLAFLKEQPRCVVAMEACGSAHHWGRAIRDLGHEARLIPPIYVKPFVKRQKNDAADAEAIAEAAIRPTMRFVAIKTEEQQARAMLFRTRDLLVRQRTQLINALRGHLAEHGIVAPQGPTNVKVLEQAIEDEAKSLPLLITELARVYLEQIDQLSERIGVLEKTVAYEAKCGATTRRLQTMPGVGPITAMAIETFAPPMNVFRRGRDFAAWLGLVPVQHSTGGKQVLGRTSKMGQRDIRRLLISGAMVIVRWACRKGTPEGSWLHRMLARKPRMLVAIAIANKMARSIWAMLTKGEDYRVPVTVAA

SEQ ID NO: 139845 - protein, 324 aa, unidentified
MQGKEASEQESRKCTAGIDVSKDRLDAYVLPADKALRVPNTREGIRKLKRWFGLYKPVLVTVEATGKWHREVCRSLVASAIAVAITDPYRVRMFAKAQGILAKTDRIDAKVLALFAAVMAPPCRPLPPQALENLQELVTARDSAVAEHTAVKNQIAAARDPFLKRQLDRRSAQLAIHVAALERECLKRIKAEDALAKRLQILTSIPGIGNTVAIMLIAHLSELGMLTGKQVAALAGLAPVPDDSGRRIGIRAIRGGRAMVRRMLYLAAVSAVRCNPSFKAFYSRLAANKPAKIVLVAIARKLATLANTLIAQNRPWEKIAPNYA

SEQ ID NO: 139846 - protein, 337 aa, unidentified
MYYIGLDIHKKTISFCVKDAAGCVHWEGKIGSSRRELDAWVRTLPQPRMMAMEATIFTGWIYDYLLPHAEKVKVAHPLMLRAIAAAKKKNDRIDAAKIADCLRCDFLPECHIAPTEIRDRRRVLRYRNLVVKQMVQMKNRVSGLLMETGVSYNKQRLHKVGYFGEMMLTNAEINDAVRPLLNLSRGMIRRSSKLEYDLVSSLERDPLLKERLRRLRTVPGVGSITALTWALEIGDYTRFRSNRQAISYCGLCADEKSSADKVMRMPLSKQRNKHIQRVLVEAAKLAPRESPELAMIRARELERGNPNRATLAVARKMVCYMLAVERRQQDFVQTAAA

SEQ ID NO: 139847 - protein, 408 aa, unidentified
MKRYYMGVDWGDRLHQVYVGDEEGKKVREVKVQESPEGLAEIGRWLDERRAEGLELWAAIEKPAGRIVDFLLDHGVEVYPVNPKAVDRVRDRYRMSGSKSDAFDAYVLAEFLRTDQAHLRVLRPNSEKAQELKMLSRDQRRVGRHKTRLLHQLTTTLKEYYARPLEVFEDLETEIALDFLKQYPTPAHLSALKRKEFNRFATKQHHLSKQRCEQLWEKLQKPQLAVPEHVVRAKAQLLEVLIEQLGASIKAVKIYNHKVESFFASSPAAQFAKTLPGGKSGTLVAAIWAELGDAQGRWESSGHLQAEAGAVPVTKASGKSRVVHFRFACNKHLRHTMYWFSFVSLNHSEWAKLYYRGHRDKGHSHHQALRALGAKWLKIIFVMWRDHKPYDENFHLANIARQKMRQAA

SEQ ID NO: 139848 - protein, 389 aa, unidentified
MRNVALDLGVKKTTYCEVAEGRIVQRATVTEVSSLVSLLGPNQPPARVAIEACREAWFVHDLLVGWGNEVLVVDTTRIRQLGIGQHHRKTDRIDAEVLARALERGGIPLAHVLSPARRELRRVLGVRRALVEMRAQSVTTIRGLLREQGHKLPSCMTRKFAARVRETKLDESASRVIEPLLKVVERLDLEIQQSDAHLIELCAQEPIVALLTTAPGVGMVVAACLVSVLDEAGRFRRAHQVESYVGLVPSENSSGGKRRLGAISKQGNSYLRALLIQSAWGILRTRDNNDPLYLWGAAVAERRGKRIAAVALARRLLGVLWAMWRDGTTYDAPHLSRQGARGLRGAAQTLEQQQAALTRAANKRSITKFQNRAATTTASPPKTSATKAA

SEQ ID NO: 139849 - protein, 405 aa, unidentified
MENISILGVDLAKASFTICGLDVKGKKVLEREMRPDKFNDFLNKNKKTTIILEACSGAHYWSQRGTEAGHETKLIAPQKVVPYRKTNKNDRNDAFAICVAALSPGMEFVPTKKVCHQELQAVLRNRECLISNQTSLVNYIRGILAEFGVSVPVGIQYIRAVLSEISNRSKSSGGYQYEEKLPQVTLSLVDEIQKELLASTDRIEAMDRVIEKLTAENETCQKLLAIPGVGPNTAAAVVSSLINPSDFKNGRQYSASVGLTPKHVQTGGKDSKPIVLGISKCGNAQIRYLLVQGAMSTINAVKNRRKKMEIELPTASVLTPEPQDKTAVPNSGKKNALHPARKPVKTKSQKKSMSLKQEDWILRLVEEKGIQKAAVALANKTARMIWAISKSGNDYKHDMAYSAER

SEQ ID NO: 139850 - protein, 388 aa, unidentified
MFFLGIDIGKNTHVASLLDEKAKIIFKAYSFANTLDAAEALLVKLEPYKDSLEIGMEATGHYWLSLYSFLAEHKFIVHVLNPIQTDGWRKGIEIRKRKTDVIDSVLIADLIRYGNFLETSLADEDILSLRNLSRFRVYLVNSVSDLKRKAIAVLDQIFPEYASVFSNVFGQTSKELLKSLSLPSDYENLSATKIEEVLSNITQKKKASKTISTLSDKASRSFGISFCKDSFAFQLKLIIEQICFIEEQIASVELEIDQLMSKLGTNIKNIPGVGSVIGAVILGEIGDIERFDNPSKLVAYAGLDASVSQSGEYEASSGKLSKRGSPYLRKALYMAAQRAEFCDPVFHAYYEKKRNEGKHHLVATNAVARKLCHTIYAILKKDIPYEIQ

SEQ ID NO: 139851 - protein, 362 aa, unidentified
MTTIARDTNPAQIDVAGGVDTHQDTHTAAAIDGAGRLLGHQQFPATAAGYQQLLTWLRGFGLLLIVGIEGTGAYGAGLARHLAAEGVPMLEIDRPDRKTRRFAGKSDPLDAEAAARTALAGVRTGTPKDRTGQVEALRNLRVARHSAIDQRADCQRRIKSLIVTAVEPLRAQLRSLANARLIATCAGLRPDPARIGDPEQATKTALRSLARRHRALSEEITELDDLIGPLVTAINPELIACTGVGADVAGQLLVTAGQNTDRLHSEPAFAMLCRVAPIPASSGKTNRHRLNRGGDRQANAALYRVVLCRLRWDPRTRAYVERRTKEGLSKKDIIRCLKRMIARELYYLLRPAQRAQNLTAAA

SEQ ID NO: 139852 - protein, 357 aa, unidentified
MKIIGVDLHTRQQTIAMLDDQTGELVEREVPHEGEHVRNFYSALPKPVLVGLEATGSMRWFLQLLEELGIDFRVGHPAQIRAAEPRKQKNDRRDARLLLALLAEKRFPAIWMPSGEQRDLQILLRHRDQLVRLRTRVQLSLQAVALSHGLRRGHALWNRAGQHTLRTLPLAPQASLQRDTLLALCPQLQTPIAALDREVGKQAEQRPSARRLMTHPGVGPLTALATEVFLGDPRRFPDGKAVASYVGMIPSERSSGNRQRGGRLSKQGNALLRFLWGEAAIHAVRRDPELQRFYRRKLVQKGLGKARMAAARKLGIRLWIMLRDEIDYTEFCRRGHVQRQGSGATGAGMPAVGQWSN

SEQ ID NO: 139853 - protein, 484 aa, unidentified
MHLPSPVRLLGIDLGITSDHTAVVVDDAGSICARRRARSTVASLAALEAAALAAVPDAHLVVVVEPTGPAWLPVAVFFGRRGHTVLRVTSAKAADLRRFLSRHAKSNGIDAETLARLPLVAPSGLVPVEFGSPARASLDRRVRAVARLTADIGRRKNRIRALAQAMVPTIGAALSEGLNHTDLAVLERYADPRALLAAGPARLTRLIATTSRGQLGQAKAQALRTAAAEAVALWDGDSAAALDDLAAEVASEVRLVRAAEAERTRHEHARDAALAHVDPAGLAASLPGLGPVGTAQLVAVMGRPGRFPNAGAFKAFTGLTPRASETGQTDRKHQPMTKAGPRALRSQLVQSADTARKLDPQLAAVYHTQMTERGATHRKALCVVGARLAERAWLTMARGEPYVICDLDGRPVTPEQAKRLIAERFTVTPEVRRRRRSTKKAGKAPHMALKAQVKSQREAGHEATFPAVSLKAPSSTVNLASRPT

SEQ ID NO: 139854 - protein, 367 aa, unidentified
MKKVSTAAKKQGRNISRQTLTIGLDLGDRNSWYCVLDEAGQIQLEQRVRTNAKALCEVFGAIPHSRIALEIGTHSPWISRLLSELGHEVIVANARKVRLIGESRKKDDRLDAQTLARLARIDPELLYPVKHRSAEAQADLMMIRARAGLVRARTGLVNTARGLAKSYGERLRGCNVRDMDPEKAENLSPELQRALEPLLATIEELSERIVEYNDRIEALAEASYPQVELLKQIKGVGTLIALTFLLTLEDPHRFRKSRDVGGYLGLQPGRRNSGQKEPQLHISKEGDPYLRTLLVQGAQHILGPFGIDCDLRRWGLKLAERGGRNGKKRAIVATARKLAVLLHHLWVSGEVYEPLHNSSRVTVAAAA

SEQ ID NO: 139855 - protein, 340 aa, unidentified
MPLYGGIDLHANNSVIVLLNEQDEVIYRKRLPNELPTILGQLAPYHTEMQGLVVESTYNWYWLVDGLMEADYRVHLANPAAMQQYSGLKYTDDHSDARWLAHLLRLGVLPEGYIYPKAARAVRDLLRKRAHLVRQHTANVLSVQNIMARNTGARFSVKQIQELTKQELTTLLAEETQVLAVTSSLVVLDCLRQQIKTLEQTVHKRLHHTPSYEQLLTVQGIGTILAQTITLETGAISRFPTVGNSASYCRCVDSTKMSNGKRKGTGNVKNGNPYLAWASMEAAQFAMRFQPEAQRFYQRKLAQSRNNTVLARKAVAHKLSRACYYIMRDLVPFEATKAFG

SEQ ID NO: 139856 - protein, 304 aa, unidentified
MDVAVLPAGTHFTVAHTDEGIASLVLRLQELRPHSVVLEATGGYEISVAYAMSEASLPVVIMNPKVLRHFAKSTGKLAKTDKIDAQALAHFGEAVRPEPRILPDAKLQVVTAMMTRRRQVIEMLTSERNRLGSARGPVRKRIVSHIDWLQRELADLDNDLTKEIRESPVWREKDILYRSVKGVGPVTSMTLLSALPELGTLNRKEIAALVGVAPLNCDSGNRRGKRAICGGRAQVRAVLYMAALAASRSNPVIKAFYERLCKAGKLHKVALTACMHKLLIILNAIARTKTPWRTTNHARVYFCS

SEQ ID NO: 139857 - protein, 391 aa, unidentified
MVCVGIDVAKDKHDCCILDSDGMVRADCFTIPNNMDGFKQLLQTIRNCTKKSDKIKVGLEATGHYSYNILGFLLDNGLPTYVINPLHTNLYRKSLSLRKTKTDRVDARTIATMLLSDVDLKSYTDIAYHNEELKSLTRYRFDKVQECAKLKQSVSRLATILFPELEQLVSSIHGTSIYALLGEYPGAKQISEVHLTKLTNLLTTASKGRYGKEKAIQIREAARASIGSVMPAKSLELKHTIKLIQELASEINEIEDSIQKIIDELNPPILSIPGMGVNSAAVILAEIGDFSNFSSPDKILAYAGCSPSTYQSGKLTNCYAHMEKRGSRYLRHALYNATKYVCYWNPVFAEYLAKKRAEGKHYNVALSHAMKKLVRLIYALQKSGKAYLAAA

SEQ ID NO: 139858 - protein, 341 aa, unidentified
MKQFIGLDVSLKDTFVSVRKGGKRIWRGKCPSDPRLIAEVIRKRAPNAERVVFETGPLSVWFYHALTREGLPAICIDARHAKAALDMAPNKTDANDADGLSHLAEIGFYREVRVKSFDSMLVRTLVAARNQLLKMTTQLSNQIRGLMKTFGLVVPKGAGRVFEGHVCSLLANNAGLKQIIKPLLDAWRAMRARAAELSKQLVASARASEQCQLLASIPGVGAVTASSFVAAIEDPGNFRKSRSVGAWIGLTTRRYQSGEVDYDGHISRRGDNHLRGLLYEAATVILTRTRADSALRIWGLKLKERIGFKRAAVAVARKLAVIMHAMLRTGELFERSIAAEI

SEQ ID NO: 139859 - protein, 340 aa, unidentified
MKLYGAIDLHSTNNVTVVIDEQDRVVYQKRLPNDLALIVMELSVYQSELQGIVVESTYNWYWLVDGLMAEGHKLHLANTAAIQQYEGLKYTDDHSDARWLAHLLRLELLPEGYIYPRADRPVRDLLRKRSQLVRQRTTNLLSIQNLVTRNTGSSLSADQIKGLDVQQVDELLPNPDLALAVKANLSVLCSADEQTKILERTVIERVQLRPQFCFLKTVPGIGKILSLTIMLETGDIRRFASVGNYASYCRCVGSQKISNSKKKGRGNTKNGNKYLAWAFVEAAHFAIQFNSKIKSFYQRKKAKTKGVVAIKAVAHKLCRASYYIMRDRVPFNMTKAFGQK

SEQ ID NO: 139860 - protein, 319 aa, unidentified
MAKKKSKCFIGIDVSKQQLEVAVHESDCQFRCANKVNAFGKLIVELIDWRPALVVLEATGGLEIPVVSALQAAGLPVVVVNPRQVRDFAKALGQLAKTDRLDARVLAHFAAAIKPPLRPIKSKEEQELAALTGRRDQLIEMLVDEKNRRTSAASDTVRDQIKEHIDWLEECIAELDEQLKAMLQSSASWQAKDDILQSVPGIGPVVSFSMIADLPELGTLNRQQISKLVGVAPLNHDSGQQRGARHLYSGRAELRRVLYMAALSATRHNLVIKEFFERLCAKQKPFKVAITACMRKLLSIINVMVRDNTCWKSPQTVSA

SEQ ID NO: 139861 - protein, 409 aa, unidentified
MDLLHPLCAGLDVHKDTVVACLRRAVDGRIEREVRTFGTTTRELLELSDWLASEGCRHVALEATGVYWKPVWHILGDGDFELVLANARHVKNVPGRKSDVSDAAWQADLLAHGLIRASFVPDGATQELRGLLRTRKQLVRERTSHVQRLQKTLEDANIKLDSTISDVMGRSGRAIIEALIAGETDPGTLAALADGRIKASQTRLREALRGRVTECHRFLLRLHLRQIDGLSAAIADIDREVEARIEPFRKAVELLSSIPGVSTLSAQVITAEIGLDMSRFPTVGHLLSWAGLCPKSDESAGKRRSTRMRKGAPWLKTSLIQCAWAAKNAKRTYLQAQFYRVRARRGDKKAAGAVAASILTAAYHMLQRGVFYQDLGPEHFERSKAAQAKRLVQRLKNLGYAAAITPIAA

SEQ ID NO: 139862 - protein, 340 aa, unidentified
MREITTVGLDLAKNVFQIHGIDDAGEVVVRKQLRRAQVLGFFAGLSRCVVGMEACATAHHWARELEALGHDVRLMPPNYVKAYIRRNKNDAADAAAICEAVRRPAMRFVPVKTADQQATLMMHRARALLVRQRTMLVNALRGHLAEFGVIGAKGLHKVEGLMAIVRNGSEKRIPDVARRVLAVIAGQIDDIEAKIAGVEAQLLAWHKSNPTSRRLATIPGIGPIIATAIAATVPDPKVFRSGREFAAWLGLVPRQNSTGGKARLGGISKRGDGYLRRLLVNGAHAALFWSKAAKTDPWLTSLRARKHRLVATVALANKTARIAWAVMSKEEKYRPVAAAA

SEQ ID NO: 139863 - protein, 348 aa, unidentified
MRQVYVGMDLGSKVCAAVAIDHKGKMIDSSVFRTGEGNMISFFEGLKGRALVMIEEGELASWVARTLRPHVERVVVSDPRRNAWVARGGNKNDALDAAKLAELLRLGSYSEVWHPKDTDIFEFKLVVQRYDECSRKLARTRCQIKSLFRRQGVIAGGKDVYGLKGRSEVLNRIQSESVRQLIENEYEMLDFLFCANAKTLRILKRESTKFPVIKRLKEIPGVGPILAARFVAYVGDPHRFNKRTLASYSCLSIVKRSSDGSPIGRERLSKAGNSVLKDLSRTAFERAKITKRTNGIKEFYLESLSRTNSRTNARLNTQRKILAVMLAMWKDGSEYSDEMVTGGAFTGN

SEQ ID NO: 139864 - protein, 429 aa, unidentified
MRTESTPGARGPVFCGVDTHADSHWLYVLDWRGRKVLSRQFPADAAGYEALAGAIAAAGEPACVAMEGTSSYGAGLTRHLASLGMPVREALSPARTQRRRPGQGKCDEADAERAARAAMSGSRLGTPKSQDGWVDGVRCMLAARSGAVKARTSAINTARSLLTTAPEGLRSRFRGMAGPRLMEELPSVRAEGALGAALGALADLWAAARDAALDMERAIEASLEENCPALLAMYGCGPVSAAKLAVAAGDNPGRLRSEASFAAICGACPIPASSGKTVRHRLNRGGDRQANSALHEIARQRVMRDPETAEYAERAGGRGKSDREVMRCLKRYVAREAYRALMRPHEIRRPEDASELVAARRAAKVSQVRAASILGTSEKHISMLERGQRELKPIRRAYEAWVEAGLPLDWDRRAFEAERKMDSKKHLAK

SEQ ID NO: 139865 - protein, 319 aa, unidentified
MAQNDLVVAGIDVAKDKVDVCIRSLSLRRTFASTTEGRHELTSWLRRQKVGKAVMEASGGYERQWAKALRDAKIEVRIVDPKRVRSFARSAGRLAKNDTIDAEMIAWFAETFDEARGQAYDATREQLHQMVNARQAMKDMQAKLESQGEHAVPAAVQRMHARISKKIAVELVKIEAAISALIQATPRFTELAEIIESVPGLGRTTSAALIAAMPELGQANNKIVAALLGVAPYDDDSGRRRGERHIKGGRRRTRNVFYMACLGAATQHNPVLKTFYDRLVAKGKEKKVALIACMRKLINILNIMIERRQKWDASRYALS

SEQ ID NO: 139866 - protein, 416 aa, unidentified
MNAVGIDVSSRKSTVAVLRPLGEVVCLPFDVTHDIAGLASLVEKLKAIDGETRVVMEHTGRYYEAVEKALHEAGLFVCAVNPLLIKEYGANSLRRVKTDKADAIKIARYALDNWADLRDFTPMDAIRYDLKTLNRQFQLASKQRTASANNLIALLEQSFPGIRKCFDSPVRSDGTQKWVDFAHSFWHVDCVRKQPFPAFCERYRKWCKLHTYFFKLRNAEKVYALAKSAIVLTPKSKVVKVLVQEAANQLISISRSVEVYRAEMDRLAAMLPEYPVVMAMYGVGKSYGPQLMAEIGDVRRFERKQALVAFAGIDPMPNQSGDKNVRSNKSSKRGSPYLRKTLFNVIRTYLQCAPQDEPVFQFLNRKQAEGKPFYVYMLAAANKFLRRYYAKLRDYFASLDTLQSVDPIPTTLKASL

SEQ ID NO: 139867 - protein, 308 aa, unidentified
MEAPLIFVGIDVSKAQLDVAIRPSAQSLSVTNDRAGIKSLIKHLKKLRPQLVVLEATGGLERQVLSALIAGEIPVVMANPRHIRDFAKSIGQLAKTDRIDASVIAHYAEAVRPKPRPLPDEASLELRALSARRRQVVDMIVAEKNRLATASKVVKKRITAHIAYLEQELNDADQDLDRFIEKNAAWKENQQILCSTPSIGPVSSRTLLVELPELGALDRKKISALVGVAPFPRDSATLKGRRTIWGGRASVRSALFMATVVATRFNPVIRDFYKRLKAKGKPSKVCLVAWMHKLLTILNAMIKQNSLV

SEQ ID NO: 139868 - protein, 338 aa, unidentified
MNYYAGIDVSLEASSVCVIDANGKIVREGKVASEPEALMAWFGSLGVSLTRIGLEAGPLSQWLYAAMRQAGLAVELLETRHVRNAFKIMPVKTDRKDARGIAELMRLGWFRPVHCKSLEAQETRAILTARKLVQKELLEVESSLRGILRGFGLKVGKATPVQFEGRIKELVVGHPSLEGIAHALLSVRAVLRREFNALEKRLRAIARTDTRARLLMTTPGVGMIVALTYACAIDDPARFKSSKIVGAHFGLTPTRYQSGETDRTGRISKIGDSSVRAVLYEAAHVIITKAVRGCTALKSWAMRIAKRAGMNKAKVALARKLAVIMHRMLVDGTTFQPA

SEQ ID NO: 139869 - protein, 418 aa, unidentified
MKSIKAEKIKTINEKTLVVALDIGKKVHYGYFRTPKNKDIKPFPFYNTGKSFNKFWEKLCRFKEKYMLDEVVIGFESTGPYAEPVANYLRKKPIKLVQVNPMHTKRIKELTGNSPNKTDKKDPRVIADVISLGHSLTAVIPEGAAAQLRRLAHARERAMERRTAMNNQLQDLVFVIFPELGDIIKPSTKTGMYLIKHYPDPKSIVPIGIDTLCNVVRKISRGKLGIDRIEKLYHAAKESVGIAEGKEAILLETSHLVSNIEAENRYIEGLEEKIMMYLEQVPFSHSILSIKGIGNITAAGLIGEVGDFKKFKTISEVMKLAGLDLFEVSSGKHKGRHHISKRGRALMRKLLFFAAINTVKSHGIMYAWYQKMLKNGTPKIKALIAVSRKLLRIIFALARDNTHYDENYNRNHELKLAA

SEQ ID NO: 139870 - protein, 392 aa, unidentified
MKLVGIDVGKNSHHFCVMDKETGEFNVTPTSFSNNKEGFDFLINSLKPYSKKSILLGMEDTGHYHVALLKFLLSNGYTVALINPKTTDLTRKMEGGITKNDKLDTITICDVLDTPERKKQYRITKVDRFDLYEQRQLTRHHHDLKEELNVYCNRLQKSIDLVFPEFNTLFSSKYGVVYMNLLKTFGSAEAIASTDIRTIRKCFEIKGRGGRISLTPEKLKECAKNSIGISSEVETIQIKHLVSQITLIKEQIAEIDKKIEEFSITNNSPILSIPGISHFSGTSILAELGDIGNYSKPSQIIKFAGVAPYHYESSQYNAQHTGITKKGSKYLRKTLYQIILPVIKPVFKKYYLLKISQGKGHRCAQGHCIRKLLRIIYHLLETGQSFDPALLR

SEQ ID NO: 139871 - protein, 317 aa, unidentified
MPQSERIVGIDVSKRQVEACLRARQERLSQPSTPAGRRAMIAWLRQHDVTVAVMEASGGYERDWAAALRGAGIAVRIVDPKRVRYFARSAGRLAKNDPIDAEMIAWFAETFATAAAPAHDPEREAVDRLMTVRALLVRLESQIGQLGEHRQPPLVERAGRAIAGVIVRQRKRLETAIAARIARQADLAERHRIIQSVPGFGPCCAAGIIAWLPELGQIGGKPATALVGLAPYDDDSGGHHGERHIKGGRREIRDLLYMAALAAIRRNPVIKAHYRQLRARGKKFKVALVACMRKLVVILNTMLMRGQMWNPPAAAVA

SEQ ID NO: 139872 - protein, 346 aa, unidentified
MEYIALDVHKKYTWARVENTEGEKLYESRLQHAHGSIKNFINRWERQSPVAVETVGNWYWIVDEIEEGGGKPQLVNARLAKLMMGSVNKSDKLDAKGMNRLQRTGTLPTVWIPPSSVRDARELPRTRMVFSRQRTQLKNRVHATLAKYGFVVEEASDAFGKKGRAIVEGILVKLPPYTEQAVRRVLGQLDHVNENLKVIEAQMMEAFAPWAETNLLKSLPGVGDILAVVIWTEIGTMERFARAEQFASYCGLVAREHSSGGKFHYGAVRRDVNVYLKWAFVEAANSSILNRERCGYDHISRLYQRIKSRRGHGKAKVAVARHLSEASFWMLKKGESYREPVSSTQR

SEQ ID NO: 139873 - protein, 367 aa, unidentified
MLTSIALTYVGLDTHKDSISVALLRPGQSVPDEDRIANTPEEVRHLVSRWGDRTAVRACYEAGPGGYELQRLFTALGVDCAVIAPALIPRRPGERVKTDRRDARKLCRLFRAGELTAVRIPPPEEEALRDLLRLREDLGEDILRARHRLSKFLLRHGRTLDGASWTKRHLRWVREQRFGLPQLERLRDEHLAAIDMRVVQRDQIERELLRIAAAEPYASPVRRLSALRGIRELSALTVLVEVGDFQRFGSARAFMGFTGLVPSEESSGERRRLGAITKTGNAHLRRVLVEAAWHYQRKPARNLRGRPRLQDQPASVLAFALALEERLHERYWRMVNRHKIGNVAVVAVARELAGAIWALMRLEPATA

SEQ ID NO: 139874 - protein, 322 aa, unidentified
MTRIICGVDIASSSLAARIGQDGAPASFPNNPEGIAALAAFCQQHQVELVAMEATGGYEQQAFAQLCEQGLAVAIVNPRAVRQFAHSMGALEKTDAIDAGMIAWYAETRNSQPLCLAPQTQLELRARVLRLRQLTDLRTTQLNQQRLVINRAVQATFRKMLRFLASQIEELQQAIAGLIQADPLWRQLDQAFRSIKGVADRTVARIMADLPEIGTLSNKTISKLAGLAPLANDSGKHKGKRAVRGGRASVREILYVVASVVGRYEPDFITFQQRLRTAGKPPKVVRIAVAHKLLIHLNAKAREVRQRMAPVLDHSRLAPVTT

SEQ ID NO: 139875 - protein, 359 aa, unidentified
MITLGVDAHKKLHVATELDETGHEIGQWRGPNSDAGWQSALRWAIALGAAHQWGIEGAWGYGRGLAQYLVACGEPVYEVNTRWTTFGRRHARRPGKTDPQDARAVAMFVLQEAPDLPRVGAEDVTVVLDLLTSEREALRSETRRLWNQIHALLLQIDPEYKSHLPSFDSRSVLALLEAYEAQSADLVQQERAAAVRRLAQRLRLAQGQAEALAHEIEARTAAAGFSPLTEIHGIGLILAGTLAGILGPGWRFRTDAELAAYAGAAPLEASSAGLVRHRLNRGGNRRLNSLVYMIVLTQLRSWHPAQAYMARRLAEGKTKREAMRALKRFVIRAIWNAWKRCLLALAPKPANRSELSLAS

SEQ ID NO: 139876 - protein, 349 aa, unidentified
MKYYAGLDASLEETSICVVDETGAIVKEARALSEPAALSSVLRGLDLPLERIGLEACSLTAWLHDGLRADGLPAICIETRQANAAMKTMPAKTDRNDARALAQIMRTGWFRQVHVKSRECRLWRSLLVARRTVLNEMRSIENVVRAILREAGLKLGTPGRAKFAARVRELAGEDPQVMALAEPLLSVLATMLKELARLTRHVLDIVRGETTCRRLMSVPGVGPITALAFRATIDDPARFKRSRDVGAHLGLTPTRYQSGETDIMGRVSRCGDEIARTALYEAAHSLLTRSAKWSSLRAWGMSIAKRRGMARARVAVARKLAVILHRMWRDESDFRFGKEPARPSMAAAA

SEQ ID NO: 139877 - protein, 367 aa, unidentified
MEQGTTYVGLDVCKRTIAVAVRWPGRAEPEERSMPNEPRAISRWERRMKREAPGAVVCAYEAGPTGYALQRQLRGLGLDCRVIAPSLIPRKPGERIKTDRRDARKLAELLAGGLLTEVHPPTPEDEAVRDLSRAREDAKQDLTRARHRLSKFLLRHGLAFGRGRRAWTHAHQKWLRGLHLEHAAQQAVFDDYCLAIDQLEERLRALEAKLAGWAKTEPYATPVAHLRCFRGIDTVTALGLVAELHDFRRFRRARQLMAYLGMVPSEDSSGERTRRGAITKAGNSHARRLLIEAAWHYRHRPWVGPELRRRREGQPARVIAIADRAQRRLYQRRQRMTERGKAPNKITVALARELAGFLWAVLAVQAA

SEQ ID NO: 139878 - protein, 360 aa, unidentified
MASIALDRTDVIVGVDTHKDEHVAVAIDGLGGVVDQPRFVAANPGGYMELLRWASSLGTVHAFGVEGCGSYGSGLAKFLRRYDETVHEVARPPRRGERRMSGKSDAIDAEHAARTVLSGSGTATPKLADGQVEAIRVIKIARNTAVKAHSTTIITLKTLVVTAPDDLRGTLESLTDHQLILACAALDASGDIGNPEVAIRHTLASLARRYLGLHEEIKTLSRHLKALTKAAAPQMLERFGVGFDTAAEMLITAGDNTDRVKSEAAFAKLCGACPIPAGSGKTSGRHRLNRGGNRQANAALYRVVIVRMRWHPPTIAYVERRTAEGLSKRDIIRCLKRFVARELYHLLPTPSIPVGLESAA

SEQ ID NO: 139879 - protein, 388 aa, unidentified
MGPVVGLDVSKGTSTLQAFTDRNKPYGKMINIAHTQDGFEKLGNLLEELKQVTGLEPAVVLEATGHYHRSLVAYLEREGYRHFIVNPLQSKRAKGTRLRKVKTDAADAWHLAEMFYRGDIQPHRTWTEEMTELQHLTRQHEFMTSLLVQAKQNARALLDQVCPAYETVFYNLFSTTSLLVLRHMLSGRSVTVETMRQTAGTSHGQAWIQAKVERIQVLPPLSHSSKAQQMALLSMVEMVLTAQEQLRQLEDAIEETAMTLPEVELLKTIPGVGDKLAAALAAEIGDATQFRDPKQLVAYAGLDPGVHSSGKFTASSNRISKRGSKRLRRALYMAVQCGLKNGANERLKTYYEKKRKEGKPYKVVVIACANKLLHHIHAILVKGEPYQA

SEQ ID NO: 139880 - protein, 449 aa, unidentified
MSHFTNMSPTNEVGKPLNSHGPVRCLYHSAIGVDVHAQLLVCCFQKHLPETNQLLSEQAQFGTSNSQIKQFVDWVSSHKPEIILMESTGVYWMSPYEALESAGFTSQQLAVVNARDIKAAYGRKSDKADARRLTEFARMNSFKRSFVPSRDIRTARLIARRLHHATQDCTRESNRMQKLLSCSGTRISSVFSSFKGKAAQKIINSFLDDSYPEFIACVRSNCSRLRATFTDIVDAFRQLNTPTFKELLLEQRKSWRQAMERRDRLEALLRIQMKPYKKTVDQLCAIPGVKELAALKILSEIGTDLSSFRSSEAFCSWIGICCGNNESAGKAKKSGTPKGNNYLRAYLTEVGQAIALVKTYTTVLRKVFQAFKERRGHNRAVVAIAHKIARIIYTMIKNSIAYVEISSPTLEKIRLKKLRASINNAKEVGISLQKLSVVKDSTGEILSDT

SEQ ID NO: 139881 - protein, 403 aa, unidentified
MNMNAVGIDVSKGKSMIAILRPYGEIVSSPFEIKHTSSNIQSLIAQIRSIEGESRIVMEHTGRYYEPLARELSLAGLFVTAVNPKLIKDFGAHSLRKVKSDKADAVKIARYTLDSWTELKQYSLMDELRNQLKTMNRQFGFYMKHKTAMKNNLIGILDQTYPGVNTYFDSPAREDGSQKWVDFATTYWHVDYVRKFSLNAFVDHYQKWCKRRKYNFSKDKAEEIYGAAKELVPILPKDDLTKLIVKQSIEQLNTASKTVEELRTLMNDTAAKLPEYPVVMGMKGVGPSLGPQLMAEIGDVTRFTHKGAITAFAGVDPGVNESGTYEQKSVPTSKRGSSSLRKTLFQVMDCLIKTKPQDDPVYAFIDKKRAQGKPYYVYMTAGANKFLRIYYGRVKEYLMSLPE

SEQ ID NO: 139882 - protein, 480 aa, unidentified
MRAESTPGARGPVFCGVDTHADSHWLCVLDWRGRKVLSRQFPADAAGYEALAGAIAAAGEPACVAMEGTSSYGAGLTRHLASLGMPVREALSPAGMQRRRPGQGKCDESDAERAARAAMSGSKLGTPKSQDGWVDGVRCMLAARSGAVKARTSAINTARSLLTTAPEGLRSRFRGMGGPRLMEELPSVRAEGALGAALGALADLWAAARDAALDMERAIEASLEENCPALLAMYGCGPVSAAKLAVAAGDNPGRLRSEASFAAICGACPIPASSGKTVRHRLNRGGDRQANSALHEIARQRVMRDPETAEYAERARGRGKSDREVMRCLKRYVAREAYRALMHPHEIRRPEDASGLVAARRAAKVSQVRAASILGTSEKYISMLERGQRELKPIRRAYEAWVEAGLPLDWDRQAFEAERKMDSKNTLPNRSVRTEEAPAARSAQRGLPTCPRTFWEVTQTAPAILRELNPFRTCRGRYAK

SEQ ID NO: 139883 - protein, 367 aa, unidentified
MEKSSTAFVGMDVHKESIDIAIADAKEARHFGRIGGDAAAVDKAIRKLRSVHRRPMFVYEAGPCGFWLYRKLAAQGLPCMVVSPSMTPRNAADRVKTDRRDAMKLARLARAGELEPIYVPDAKDEAIRDLVRTREDAVSMQRQARQRLQALLLRNEIRYVGRSSWTAAHRRWISGLKLPEPAQQIAFEEYVQAVEEAAARLERLSGAILAQLGAWRWRPVVRALQALRGVSEIHAVRIVAELGDFQRFESPRKLMAYLGLIPSEDSSGARRRQGSITKAGNSSARRAMVEAAQAYAHPARVSWVIARRQGGLARSVTDIAWKAQLRLCARFRKLSGRRLPRNKVIVAIARELSGFVWAIARQLRPTH

SEQ ID NO: 139884 - protein, 341 aa, unidentified
MLIIGCDFHPSFQQIAMVDTETGDLHEKRLNHPAEAEQFYRSLAGKPVRIGMEATGNFRWFRGLLAELGHEFWLGNPSAIRASMPRNQRTDKRDARGILTLLLEDRFPQVWLPPVADDDLRQLLLHRCRLVRFRTRVKNQLDSMAKNEGLLGQQAWRRSGRQALQAVALSGWSKQRRQDLYDLLDELDKRIAPLNAAVAAAAEARAEAKRLMTHPGVGPVVALAFVLAIGPWQRFPRGKQVASYLGLIPEEESSGNHRRLGKVSKQGNSLVRWLLVEAASIAQRYDADWHRRYLRLSVNKHHGVAKLAIAHKLAIRLYWMLRSGQDYEQVKERGSHAGQSV

SEQ ID NO: 139885 - protein, 462 aa, unidentified
MPRQSKKRKKRSVQKVVKLDSLRQINLNAAGLDIGAAEIWVCVPEDRDKDSVRVFQTFTPDLQALADWLTACDVETVAMESTGVYWIPVYEILEARGFEVYLVNARHLKNVPTKKTDVLDCQWIQQLHTYGLLNASFRPEAQMVALRAYIRHRANLIRYRTGHVQHMQKALQLMNIQLTNVISDITGQTGMCIIRAIVAGEHDPVKLAQYRDPRCRSSQAEIAKALTGHYQPEHLFALKQALELYDFYNQQIQACDAEIERKYAAIKPVFKNQAPPLPPASKKKRRSKNEPAFDLHYDLYRITGVDLTQIDGLDVLTVQQIISETGIDMSPWPTVKHFASWLTLAPHNHISGGKVLRSRTQKSTNRAAQAFRMAAQSAGRSQSALGAFYRRMRAKHGGPKAITATAHKIARIFYHMLKHKQEYIDLGQDHYEQKNRERVVKNLKRKAKALGLELVPLQSSVS

SEQ ID NO: 139886 - protein, 537 aa, unidentified
MSCAVFRALRKSALYEGLGRGNLWLFNDVLPWFYAYAAGADTFNMCAQTRDCRNFVDQVETNFTRQKGYAESIDKVPYEIDKTSGAKLGYLKCTSLISQGFRLVSAWESEENTSNKAKMAFEHLLCIAYHEQGEVLQGLIYDDRDFKFWLDKQRAGLEASDQTAESQLSNDDHVAGLLAAVMRRGLKSVCETHFDPAETDMNYCGIDLHSNNCVVIVSDESDRIVYQKRLPNELTQIAAALEPYRHELAGVVIESTYNWYWLVDGLMDSGYQVHLAHPAAIRKYDGLKHSGDFADAAYLAQLLRLGLLPEGYVYPREERGARDLARKRMQLVRYRTAQILSIEGIMMRQTGSRISGEAVKRLTADQVNEFAFMPDVTLAVEANRAVSQALAQQIEVLEKRLMERVSLRAEYRLLKTVPGIGDTLATTIMLETGSIGRFAHVGNFSSYCRCVDSLRESNGKKKGEGNTRNGNKYLAWAFVEAANFAMRYCPQARSFYDRKKSRTNRVLAIKALAHKLARACYHMLRDQKPFDVHLCFG

SEQ ID NO: 139887 - protein, 369 aa, unidentified
MKKVGIDLGKRQSDCCVFDESGGIVERFQVRTRREALSKVFANREKRLIGIESCRDAGWMYEHLTGLGHEVVVLDTTRSRSIGIGEGRRKSDRRDAEAIGRALVSGVAKPAHVLSRKRRALRDVLWGRDKLVATRTRFIAMLRGQFQGRGQDTPKCSAENFTDRLRQSGLPEVEDPAVQSMLRILDKVNAEVAVLDRHVAGVAKQEESFERLCSVPGVGPITALAFIAAVDNAERFPDAHAVEGYLGFGTSEYSTGGKRRTGRITKCGNPMARRMLVMAAQNMLKGSSNNDDPLVVWAKQVESRRQKKRAVVGLARRLAGVLWAMTVDGTFYDPHGLARASWKGLNRRARRAQAESRTMESIVVATGMP

SEQ ID NO: 139888 - protein, 430 aa, unidentified
MKNRINERLEEITVTTLIVGIDIAKTVHWSRFVDYRGVEIGKAVSFRSGREGFEKILAKVEEVRNNKVLRQSFEKVIIGMEPTGHYWKTLANYLMQRDFKVVCVNPHHTKKSKELDDNSPTASDKKEAITIARLVKDGRYFEPYLPQDIYAELRVLTNARISVMKRLVSVKNTITAILDEYFPELWRVWKNPLEAKSSRQMLRSCPFPTLILSMGEAGVFSEIKKAVKKSVGMKKVRQLINAAKDSIGVEYGLESARMRLRLLLDELEMHEKHIEEIESSMERMLVTTGYAEQILSIKGIGVVTAAGFLGEVGDPLRFDDARQIARYAGLNLVEDSSGKNKSGTRISKRGRSQLRAILFKMAFTMVARNKEMKELHQHLTERAKNPLKKKQSLVVVSKKIITVIYSLLKKQAIYDPALVFGQVRREKMAA

SEQ ID NO: 139889 - protein, 348 aa, unidentified
MVRIGIDPHKQTHSGVAVDALGVQVAQRTVAARREGFGQLLGWGRKLDGERVWVIEDVRHVSGGLERFLIDRGETVVRLPPRLMAEARQGVRERGKSDPIDALAIARAALREGVQTLPTARLAGVELEIRQLALHRERLVDTRTRLINELRWLLHDLWPEWEIPKRVLIQPGWQTKITRRLGRAAATVQVQIARDMIARVRELTRTITELYEQLAGLVKQAAPQLLAETGLGVLIAAKLIGEIAGVDRFTSDAQLARISGCAPIPVSSGRTDRHRLDPGGNRQLNHAFHMLAICKITSDPRTAVYLAKQRRNGKSNREAIRSLKRHLVRRVYHLLCDANSVPITICLT

SEQ ID NO: 139890 - protein, 452 aa, unidentified
MPARKDYIMHYNKLLQMLDPTPYLSVGLDVGADFTWMSIALPNGSFIGKPFKVIHNDPYSRELAVAKIKEAQEMYSLKSRCFLESTGIYHVPLLCFLRDKGLDCSVINPIITKNSTNINIRKLHNDKFDSKKAALVGLNASLKTSIIPDEDIADLRNLVRDYYYFKDLQSAVVLKLNAELKVSFPAYLKVFSKITTQSSLKLLAAYPLAKDMLAAPKEELVGIIRSTARFGKAYALSRYEAILEAAKDAAVFGRALPSNAVRIRLYIESYQTYQKHLDSLLLALHEAVDKLQGTPVYDRICLLQSLRGVGFLSAVVLMAEMGDFDLFPSPKKLYAYFGLDPAVKQSGKLNGDKVHMSKRGSSLARRVLHMAALNNLKVDKGTKAPVNPVIYNYYTGKCASKKKNVAVGAVMHKICNIIFAMLRDNKPFEIIPPQMHCKQYALDHPASVTNAA

SEQ ID NO: 139891 - protein, 364 aa, unidentified
MSSLGLQTRALAWVVMSILLLTRTVAWDLKPVSTRLGERAMKSKSSEVFIGIDVCKDRLDIANDSNSEVWSESNNDVGILLLVERLSSLKPCLVVMEATGGLETLLYSSLVASDIPAVVINPRQVRDFAKALGKLAKTDAIDAWVLARFGASMRPEVRPIKDEQTRELSSLVTRRRQLVGMRTAEKTRLKQADKWTRKDIKSLIKVFDKRLSKLEKEIANNVKNTPGWKEKDKIITSVPGAGPNLSSYLLANLPELGKLNRREIATLVGVAPLNRDSGKFRGTRIVWGGRAQVRSALYMSTLSASQCNPNIKLFYRRLIEKGKKPKVALTACMRKLLTILNTMVKNNTTWDQSYSINLDFNHGC

SEQ ID NO: 139892 - protein, 327 aa, unidentified
METIVMGIDVSKDTLDVCLRWPMRQTYSRFDNTAGGHQQLQRWLKMQEVETVHACLEATGQYGEAVAEYLYQLGHIVSVVNPARIKAYGRSKLRRNKTDKADAELIADFCANQKPAPWSPPPAEFKDLQALVRRLEDLMAARQQESNRLQSGVTTRAVVQDLKAHLEFLDQQIVKIKHLIQDHIDQHPDMQQQQELLESIPGIGKLTAAKLLGEIRNIREFESARQLAAYAGLTPEQITSGTSVHKKSRLSKTGNANLRKILYMPSISAKRWNPIIKAFCQRLALSGLRPMELIGAAMRKMLHLVYGVLKHGRPFDPNYLAKRQFVP

SEQ ID NO: 139893 - protein, 352 aa, unidentified
MAKTEFDELMSVGIDIGKDTFHIVGFDPDGKRVLRKQIKRLALIATFEKLPRCIVGMEACLSAHFVSRTLRKLGFEPRIIPAIYVKPFNKGQKNDYNDAEAIAEAALRPNLTVVSEKSQEQLDLQALHRVRSRLVSRRTGTINQIRAFLIEQGITVRKGLRALKNSFERILEERKDEISPRMRSILIGLYGDWMWMDNRIDTVSKEIELISRTEENCVNVMTIPGIGPMISTAMIAAIGTGEAFSRGRDFAAWVGLVPRQYSTGGRTILGRITKRGSRYLRMLFVQAAKVILMRANRWPDFSFGDWLTKAAERMNRNKLAVALANKLARMAWSILRHKTAFDAPKDEVAIGV

SEQ ID NO: 139894 - protein, 346 aa, unidentified
MTIIVETRQITGGVDTHLDTHVAAALDANGGVLGVDSFPTTTTGFVELHEWLASFGTLERVGVEGTGAYGAGLARFLCGVGVIVIEVGRPNRQARRAHGKSDSIDAVEAARAALSGRAATVAKTGDGNVEAIRVLLVAYRSGRDTRIKCLNQLRHLGFCAPDELRERFRGMGVASLAETAAGLCPNPTGDPVVYATKLAMQTLGRRVVDIDADCARLHGELADLVKATAPSLVDLHGVGVRTAALLLVAAGDNAERITSEAAFAHLCGVAPIHASSGKVTRHRLNRGGNRQANHALWRIVFTRMSSDPRTRAYVQRRTLEGRSKPEIMRVLKRYVAREVYRHLPRR

SEQ ID NO: 139895 - protein, 316 aa, unidentified
MKTQVFVGLDVSKQHLDVAVRPQGRHFVTPNNDRGIKQLVKRLAALKPQLIVLEASGGYEFLATAALAEAQLPVALVNPLVVRKFAGATGKLAKTDKIDAQVLAHFAEALRPEPRPLPDQAQQLLKAALQRRIQVVKMIGQEKNRLEKTFIPALRQDIQAHLTWLSQRLAQLDRDLNDQIRRSPLWRDRARLLRTIPGIGPIVSRAVIAQLPEVGRLPGKKTVALVGVAPYNRDSGRFRGKRMIRGGRSYLRKMLYMAAVVASRWNPVIRAFYQRLLAAGKPKKLALTACMRKLVLILNAMVKNNQPWNQFITQVP

SEQ ID NO: 139896 - protein, 407 aa, unidentified
MELVALYKRVIGLDIHQAQITACALIEETDGSTRIEQRQFGGFKRDRRELAEWVASLHPDEVVMESTGIYWKSPYAGLESVGIRAKVVNARHVKNVPGRKTDVGDAHWLATLARAGLLRGSFVPPAKFRELRLIARQRQKLVGQLASEKNRMHKVLTDSGVRLGVVVSDLHGQSARAMVKAIIAGHSPNEVLKLASSRLKASREEIFDALQGELTASHRFVLDELMRHVEEIETRIVRFDARLLSELESERNTLALLQTIPGVDLIGAAMLLVEIGTDMNAFGNPDRLASWVGICPGNNESAGKRKSGHLRKGNLYVRRLLCEFAHAASRTTSVFKSKFQALLIRRGYKRAIIAIGHKILRTIYFMLKQREHYRDCATDYEALSVQRNAPRWIKALIKFGFITPANA

SEQ ID NO: 139897 - protein, 410 aa, unidentified
MDVFLERCAGLDVHQASVVCCVLIGAPGRKPQKLQGRFGTTTRDLEALRAWLAEHGVTHVGMESTGVYWKPVYAVLEGHVDLTVGNAHHIKNVPGRKTDVKDAEWIAQLVRHGLVAKSFVPPPAIRDLREMVRYRRTLIETRTAMRNRVLKLLEGANIKLSGVASDVFGVSGMAMLEALAAGTSNATEMAGLARGRMRRKHAALEAALDGRMREHQRFLLGMQLRSLGTIDQDLEALDARIETQLEPYQVQHRLLTQIPGVDWVTAASIIAEIGTDMDVFASARRLAAWAGVAPGNYESAGKPKGAGTRRGNVFLKSALFAAASAAVRTKGSYYRDKYNRLRARRGPVRAIMAIAHKLLIATFHMLSTGEAFRDLGEGYLDQVARKRSTSKLVQRLSNLGYNVMLVPKAA

SEQ ID NO: 139898 - protein, 434 aa, unidentified
MNDTIKREVPTFKTTKRELLALSEWLAAEGCTHIAMEATGVYWKPVWHILSDGDFELVLANAAHVKNVPGRKTDVNDATWLADLLAHGLIRGSFVPDQQTQEMRDLLRMRKRLVRERSRRVQRLQKTLEDANIKLDSVITNIMGLSGRRMIEAVIPTGQARGPKAHGESDPERLAQLAHRRIKAPPETLCEALRGGITRRHRFLWRLHLQQIDAIDNAIGDIDREVDAQVEPFRMTVELLSTIPGDQLSPCVILAEIGRDMRRFPTAGHLIFWAGLCPRNDESAGKRRSTRMRKGAAWLKTTLVQCATAAARKKTGYLQAQFHRLRAHRGAKKAIGTVAASILTAAYEMLRSGALYEDLCSDHFDKQGKSRHIHRLVHRLQNLGFAVQITPGDGRLVSTSASSRRVCCNRIIGRQTAAGRGGRGRGCSLVAYRA

SEQ ID NO: 139899 - protein, 429 aa, unidentified
MNSTQNKKIEQVKETTMIVGIDVGSEKHYFRAFNWRGIELTRKPVPFLNSMEGFNSFYNTIVELMQENKLEEAMVGIEPTGHYWFDLGQFMSEKNIKFVMVNPHHVHKTKELDDNSPSKNDRKDPRVIAGLVRDGRYFYSYMPTGVYAELRNASNRRFVIVEEQTRAKNRLQKWIAVYFPEYKGIYTHIDAKGGLLVLKQAPTPEEIINLGEEGIIKIWKDAKLRGNGHKKAMLILNAAMRSIGLKAGLTEARMEIQDLIEDYELQTKRLERINDLIKELCQQIRYVDKLLEIKGIGITTVAGFIAEVGDITRFDSTKELQKLAGLELVADSSGKHNGKTKISKRGRKRLRYLLFEAAISVVGKNEEFKEIHRYYTTREKNPLKKMQSLIAVACKLIRVFHVILTKGVSYDASKMLGDIKRPGTQLKVA

SEQ ID NO: 139900 - protein, 357 aa, unidentified
MGHYIGMDIHRKFSTVCRMDERGAVLAERKLWHDDLEGLEGFFRESPPGTKAVMEATVGWMWLSDLLEGLGVEVHLAHMAGVKLIATSRLKTDRVDARVLAQLLRADFLPEAYLAPREVRDLRMQLRHRQGMIKDRTMLKNRVHALLIRHNIQLEQSDIFGTSGKALLRQMDLPLPARQVLDDPLDLIEHYDAKIGQTDRRLRAHLEPDPRRKWVTSMPGIGEVTATFLLAEIGDIERFREAKKFVSYAGLCPSTRQSADSVRHGGIRGAGRRLLKWALVEAAHTAVKKDSYFATIFHRISRRKTRSEAYVAVARHMAEIVWKLLSEQRPYEPRRKRSQAGPRRPMVAPPMQSAPSV

SEQ ID NO: 139901 - protein, 362 aa, unidentified
MPKMIWLGMDVHAASITVARYEDQAATAMVQTIANDPAQVRRLVRRLPAGCDVRACYEAGSCGYGLHRQLTALGVHCDVIAPALIPRRPGERIKTDRRDAEKLGRFYRSGELTTITVPTPSQEGVRDLVRAREDVRRDRTAARQRLAKFLLRHGHRYPGSHWTKRHWEWVCGHTFDGPARTVFVHYCDHVLALNERLAHLERELRTLAESAAYQPVVTRLSCLRGLATLSALVLIAELYDLRRFRTPRELMAYLGLVPSEHSSGARERRGRITKTGNALARRLLIEAAWAYRHPARQTRRVHQALTTQPPEVHAISDRALHRLTARYRRLLSRGKTPHHAVTAIARELCGFVWAIALVPDLA

SEQ ID NO: 139902 - protein, 366 aa, unidentified
MRKTSTAAYCRRGKQQGQQLTIGLDLGDRSSFYCVLNSAGEVTLEERVTTSPEAMKKTFEKMPLSRIALETGTHSPWVSRLLTELGHEAIVAHSRNVRLIGKSRRKDDRLDAQALARLARIDPQLLSPIQHRSAQAQADLAVIRARYALVRTRTALVCSARGLTKSFGERIRGRNPKGFRTATSEALSPQLQVALAPLLSALETITVRIREYDAQIEKLAEESYPEVALLKQVKGVGTLIALTYVLTLEDPRRFRKSRDAGCYVGLQPGRRNSGQSEPQLHITREGDSYLRMVLVQGAQHILGPFGEDSDLRRWGLKLAERGGKRGKKRAIIAVARKLAVLLHHLWITCEEYEPLHNTRKRRLVAA

SEQ ID NO: 139903 - protein, 341 aa, unidentified
MAQLNTVGVDLAKSVIQVSVVTPGGKELVNKSLTRKKFAEFLATQKASRVAFEACASAHHWARTAKVHGHEVRLLPAISVAPFRQGHKTDQNDALAVAEAARRPKLKDAPLKSVEHQALQAIQRSRELLIRDRTAISNHIRGLLLEFGIAIPKGFHHLHRQVPEILEDAENGVPDTFRSTLHLMHRRLLEIKRDIDVLTDQIEGLVKANESCRRLLALEGVGPISAVLLYATLGSGEAFSSGREFSAYLGLTPKQYSSGGKTNLVGISRYVANKRLRAVLIQGARAYIYRVKDPKTVKDKWLMALVDRAGYGKASVALANKNVRTAWAMLTQGTDYRVMAA

SEQ ID NO: 139904 - protein, 469 aa, unidentified
MKNNQQRKCSGKKARRASTSLLERIQPDAAGIDCGEKHHFVAVPTDRDSQPVREYRTVTRELYRLADWLAQCGIKTVAMESTGVYWIPVYEILEERGFEVVLVNARDVHNVRGRKSDVSDCEWLQQLHSVGLLRASFRPAAAIVPLRSYLRERAILVEEASARIQRMQKALTQMNVMLHTVVSDLTGATGLKIVRSILAGERDAEILAAHRDSRCHASREEIVAALTGNYRAEHLFSLRQNFAAYQFHLQQITECDNAIEALLDTLAAAQPLPTAVLPPARRRNYPKSHEPRFDIRTPLHRLTGGADLSQIDAIGPQAALQLVAEIGTDMSRWPTAAHFTSWLTLAPNNKVSGGRLRSSRTPPSANRAAVTLRRCAMSLARTSSALGAFYRRLAARAGKPKAITATARKLAVVVYRVLSGDLIYQDPGATAYHQLNRSRELKSLRKRAKLLGLDLLDRSTGEVLLNSVS

SEQ ID NO: 139905 - protein, 408 aa, unidentified
MNTLYVGIDVSSKSNVVYLMLPNGDKHSNFSVANSHEGSTQLVKRILSALTSHSLDTVLIGLEATSVYGDNLVYFLREDATLAPFNRKIHVLNPKQVKKFHDAYNDLPKNDYVDSFVIADCLRFARINKEVYMGDYRYKALQNLTRARFFAVQNLVKEKQRFMNVLFKKYSTMTQEKVFSDTFSTTALAVYDEFESAEALANMDLHELTDFIIEKGKNRFPDPDAVAKAIQKAARNSYRLPKTVNDSVNQVLSISITSMKALESQIKEFDKAIKAQMELLPNVLISIPGIGPVYSAGIMAEIGDINRFNSQAALAKYAGLAWKQHQSGGFESEVTRLIPSGNRFLKYYLCEAAFSLVRCDKEYSDFYHLKYKEVNRCQHKRALALTARKFVRLVFRLLKDNRLYCPAK

SEQ ID NO: 139906 - protein, 392 aa, unidentified
MVISVGIDVSKDKHDCFIVSSEGEVLADVFTISNNMDGFHCLLQRIRGCVTPQGKIKVGLEATGHYSYNLLGFLLDNGLATYVLNPLRTNLYRKSLSLRKTKTDRVDARTIAHMLLSDAGLKPYTDTAYHNEELKSLTRYRFDKVKERAKLKTSISRLVCILFPELEKVVPTLHMTSVYALLEEFPSAKQIAAAHLTRLKALLETASKGRYKRDTALAIRDAARNSIGSWMPAKSLELQHTIRLIRELDAEIAEIEEQIQSIMDGLHSPIITIPGLGFRMAAMILAEVGDFSRFDSPDKLLAYAGMSPSTYQSGQLKNCYPHMEKRGSRYLRYALYNATKYVCYWNPVFADYLAKKRAEGKHYNIAISHAAKKLVRLIFALEKSRQPYCSAA

SEQ ID NO: 139907 - protein, 419 aa, unidentified
MSEPVYRRCCGMDIHKDTIVVCVLARDGETGAAVRKTYRTFRGDLVRMRTWLKLLKVSEIAMESTGVYWRTVWNVLEEQGFVLLLVNPAQVKALQGRKSDARDARRIAEFLQDRRLDASFVPPPEMRQLRELLRQRLSLVQQRGEVQNQIRDLFETASLKFGSVASDLMGVTGRRIIEALIAGEDSAERLSWKVKGRLRKKEKEVKESLKGYFNDFHRMLLSAYYRHYQFLTEAIAGFEREVEQRMAPHAEKVALLMGIPGVERLIAWHLIAELGVDMSVFADAAHCASWAGLSPGTCESAGKQFSGRTKKGNKYLRRVLTQAAWAASRCKDGYLRAFFHRVKSRRGWSRAVVATAHKILLIAFSILRTGTPYQDLGGDYFDRLHPERTARRLVQRLERLGLEVTVTPAHHPSTRFQDS

SEQ ID NO: 139908 - protein, 317 aa, unidentified
MSHSDLFVGIDVAKDELVIHAHPAGMLWRVPNTKTGIAALGRKLVRLAGTACLRIGFEASGGYERKLAILLDRMDVTAYLLDPARVRSFARAERQLAKTDPLDAAVIARCLAALHPELTPYVHDPEAVRLAEHVRMRDLAVAQAVQFGNQLESIADPAMRRLVVAQVARLKALVLRIEKAIASVIAASPDLAAREALLRTAPGVGPVVAACLLARMPELGRLSSRQVAALAGLAPFDRQSGKTSRPGRCSGGRPSIRRCLYLAALSIARSGKGQLAATTNRLREAGKPFKLAIVATMRKLLVTLNAMVKNNTEYRTA

SEQ ID NO: 139909 - protein, 370 aa, unidentified
MKTIAYLGMDVHKDTFNLCALDGTTGEILGETRCASDVKLVKKFIEKIARDHKREIQVKAGYEAGCLGYSLHDLLEKQGIDCDILAPTTMHSSSKNKVVKNDRLDAKMIALNLANNTYKPVYVPDKEDVCVKEYIRMMNDFKKSLKKVKQQIKAFLLRHGLIYQGKSSWTIAHLKWLKNLELTGLLKETLEEYLLQYDALTDKIERFSQRIEELSHKRRYEKPVAQLRCLKGVDTTTAMTIHVEISDFTRFPNTKAFTAYLGLTPSEHSSGEKVNRNGITKQGNATVRSTLVECANALVKGTIGIKSKRVKARQKGQASKVIAYADKATERLQRKYHRMMYQGKPRNVAITAIARELACFIWGIETKQID

SEQ ID NO: 139910 - protein, 347 aa, unidentified
MSEHTPTTMGIDISDQWSTVCVLAGDGEVMEESRFRSTRAGLGRYLEHRAPMRVVLEVGTHSPWMSRQIEELGHEVFVANPRQLRLIYQSDRKCDAVDAEALARLGRVDPKLLRPIRHRAADTQLARAQLRVRDMLVAARTRFILSVRGMAKSMGEVIPRASAESFHVGVPGAVSAPVWQVVEPLVEAVAGLTAKIKGCDAALEELSLTRYPETAALRQISGVGPITALAFVTTIEDPHRFARNRSVGAYLGLCPRRDQSGASDPSLRITKAGDPYLRRLLVGCAHYILGPFGPDSDLRRWGLAYAGRGTNSKKRAVVAVARKLAVLLLSLWKTGETYEPTRHAAAA

SEQ ID NO: 139911 - protein, 428 aa, unidentified
MTNQELIRRKQYCQIVKEITGSDQYLVVGIDVGKDKHHAFMGSATGKSLFRKLIFENNIGGFSRLLKTGDTIKSQNGLSKIIYGVEPTGNYHKPLASHLIRCDCNVVLVSGVAVKRNRELLDGRWDKHDTKCAANIADLVSRRRCLYYDSPSPGIIELRSLLSLRRRLKREEHGLRMRIRNNLLAQYFPELDRFYSACESESLAIVKWCLDPDKIAGMNFESFFQMVTRTRRGTAQLLRLRKIHQQAIESIGCPMGSAAAFEAQLLVEKLKQVRQQLKETETAIKDVALEFTEYSYLLTIPGFGPYISARVLASIGDPFRFENRKQLIKLAGYDLCAKRSGKTSDKAIPVISKKGNGELRYALYQAANVASARVDLFRTYFTRLIRGRERERGIKTKMRVKLAVKMLVIAWTLMKKREVFDPAHLNIE

SEQ ID NO: 139912 - protein, 374 aa, unidentified
MANHNEVFIGIDTSKLRNAVAIAEAGRNGKVSYLGEIDTSEAATKKLVASLARKYRKLTFCYEAGPTGYGLHRHIESLGHSCIVAAPSLVPKKAGDRIKTNRRDAEGLARLLRAGELTAVWVPDARHEAMRELARARDSARQDLTRKRQQVSSMLLRMGLHYPGTRTWSARHRSWLANLKLEHAEHRFVLEELLVAERQAGERIGRLEQAIRDALGNWSLRDIVPALMAMRGIDMISAVTILAEIGDLTRFANPRQLMAYLGLVPSERSTGDAVRRGPITKAGNGRARRVLVEAAWAYRHPARVGFEKQASVAAAPRPAREIAWKAQVRLCKRFRSLTRKGKKSTVVAIAIARELAAFIWAIAHEVEAASAGTS

SEQ ID NO: 139913 - protein, 434 aa, unidentified
MEIIRQLAKIDTTNKMTVAYDVSKDKLNYYSEVEGKISGSNYRDFYAVQGECKNRTLDIISNLRELKELSIKEGFSGVHIVCEPTGNYSNLLMRTARNLGNTTSYVGGEVVHKAKVIENNDNGKDDVKDPRIIYMLSKMGKEQTYRTLPPAYKALRELNRLYDQVNKRRSELRGRVHHYLVKLFSDFPMCKDFPFHTSGQALNRLYGFNPNKIAGDSFKMFSRKMTKACTIWNSSLVKIYEAAQWAILHQIPIEEQAIIEQSLQYAYEDYVTCNNRKATIRKQMEDIYSELEGVEKIIPIADEKVFQPFYIARILGETGPLSDFNHLQELFKFGGLNLRKRESGYYKGKLKMSKKGRAPLRGILGTIAFKFVKKKNIYGEYYHNRKEQEKISGTKLLANVERKILKMLWGMAKNREAYNSNKFQKCESQYGLVA

SEQ ID NO: 139914 - protein, 466 aa, unidentified
MTPPKDYCLEAPCPPTPLLPPLPVLSDALHVCNPHAAGIDIGEAEHWVAVPPGRDPQPGRRFGTFTVDLDALADWLIDCGVITVAMASTGVYWMPLFELLEARGVQVLLIDPRQAKRAPGRPKTDRLDCQWLQRLHAYGLRAGAFRPDDQVCVLRAYLRHRQRLLTYAAHHIQPMHKALQQMNLKLTQVVSDLTGVTGMAIIKAILAGERNPQHLAKLRNPHCHHDADDIAKALQGTWRAEHLFALRQAVELYEVSHQQMAQCDQQITRHLETFADKSDGQPLPPKARRHKKTNEPRFDARTPLSRLAGVDLTTIEGIEENTALILLSEIGTDMHRWPSVKHFCRWLGLCPQHKISGGKVLSRRVRPGAHRVTVALRLAARRLHHSQSALGAFFRRMQVRLGTPKAITATAHKLARLVSSLWQHGSAYVQQGLDAYEAQYRERKVTTMAKQAKALGYTLVLLAAQG

SEQ ID NO: 139915 - protein, 368 aa, unidentified
MNTLYVGLDVHKETIAVAVAEDGRHGEVRSCGTIENTPASMGKLIKRLSKPGQELHFCYEAGCNGYGLQRQIVALGHLCTVVAPSRIPRKPGEHIKTDRRDAIKLARLNRAGELDAVWVPDTAHEAMRDLVRSRADAMEHFRSCKQHLQSFLLRHGRIYSGRSSWSRDHYYWLSLQKFEHPAHQIVFQDYINAIHDAEKRHEQLVKQIEDLLPHWSMKPLVEALCLMKGINLIAATTLLSVTGDLRRFRTPRQLSAYFGLVPCEHSSGNSVKRFKLTKAGNGEGRRVLIQSAWCYRFPARVTQGKEPKLSVAEKSIRDVAWRAQLRLCKRYRRLIAIGKKAPVVCAAVARELTTFVWEMGQIVPIAAG

SEQ ID NO: 139916 - protein, 338 aa, unidentified
MQVTTIGLDIAKNVFQVHGVDQHGKVVLRKRLSRGQVLAFFANLPRCVIGLEACGGAHYWARELTKLGHEVRLMPPQYVRPYVKTNKHDAADADACCEAVQRPGMRFVPVKNEQQQSLLMLHRIRDRLIAERTGTINAIRGHMAEFGMVAAQRDAGLTALIAVIADGDDARLPALARELLVLQVEHLRQIEARIAALDGRLVRQARDDEGCRRLTEAPGIGPVIATAMVATVGNARLFSSGRSFAAWLGLTPRQHATGGKERLLGISKRGDGYLRRQLMHGARSLVRLAQGREGHPWAWINALLARRPFNVVVAAVANKLARMIWAMLSRGEAYRAAA

SEQ ID NO: 139917 - protein, 370 aa, unidentified
MQKRSKVSPNGQLVLKNGSSTSKQVWIGVDLGDRWSHVCILDAAGEVAQRVRIRTTPEAMREQFTAFAGAAIAIEASGDSPWVSRLLTECGLEVTVANAREVRKIHESNHKNDRSDAEILARMLRFDPKLLAPIHHRDAAMQADISVLRARDTLVGARTSCINTVRGLVKSEGARLPQCSSEAFVRRVAAYVPGALEVAIAPLLETIAALTTQIRAYEHRIADLARERYPQTALLTQVTGVGPLTSLGFILTLGQKERFTRSRDVGPYLGLVPRQYESGNQQSQLRITKAGNPYLRRLLVNSAQYILGRFGPDCRLRRYGERLMEHGGRNAKKRAVVAVARKLAILLHHLWSTAAVYDPFYGIEAKSNAA

SEQ ID NO: 139918 - protein, 385 aa, unidentified
MRGKSFIPGDYDVFTGLDVSKKSMSVTFTNHQGFIRSLNMPHKAEPLLHYVRKHFPDQKIAFVYEAGPTGYGLYDGLAAQAYPCLIAAPSMIPKAPGQRVKTNRLDSKALSESLRGGQLKSIHIPSATYRQLRHLTQLRDVLVSELAGMKQRIKSLLLFEGIEFPPAPAGSQWSFLVKDKLRKLPCSGTVRFKLDQLLDSLEFNEKQVLKTITEIRRFCRNDPELSQCIKYLMTVSGIGWISASQLLARIGDWRELNNIRQLAGFLGLVPTEHSTGERIDRGSITRTGDERLRSKLIQASWSAIRQDSELREFFRSVCRKHPREVASRVAIVAVARKLTVRISVVLMKQRPYEVREKVHSAPLTQEETSPQGATRRLTEPGEKNS

SEQ ID NO: 139919 - protein, 367 aa, unidentified
MMGWMAPLRHLSAKLLSDRNSSEWEPSMGEVTTIGLDLAKHVFQVHGVDAEGATVLRKQLRRAQVLAFFSRLPPCLVGLEACATAHYWGRELRAFGHEVRLMPARYVKAYIKRNKHDAADAEAICEAVGRPTMRFVPIKTADQQAAVLLHRGRERLVRQRTGLVNALRGHLAEFGVIAPQGLRNVGKLIAIVRDEGDARLPDLARQVLQVLAAQIEQLEAAVAAIEKQLMAWHKSNPVSQRLASVPGIGPIIATAIAATVVEPSGFRSGREFAAWLGLVPRQHSTGGKHRLGGISKRGNQYLRRLLINGASANLLRSKATNADPWVIGLRQRRPSLVVAVALANKTARIAWAVMHRHENYQRVAAAA

SEQ ID NO: 139920 - protein, 408 aa, unidentified
MEILYPRCAGLDVHKDVVVARVRCVSEPRVEETRSFATTTAALVELQEWLTGHGVTHVAMEATGVYWKPVWHLLEEHVELVLANAQHIRNVPGRKTDVNDAAWIADLLAHGLIRSSFVPPAPIQALRDLTRTRKQLVREIAQHTLRIQKTLEDANLKLGSVLSSIVGASGRAILTALIAGQSDPERLADLAQGTARRKRAALIEALRGRITPHHRRLLKLHLELIGALERALEAVDADVGKLLAPIRQSARLLTTMPGVNDLTAHVVLAEIGADMARFPTAGHLLSWATLCPRNDESAGKRRSTRTRKGSPWLKTALVTAAWAAVRVKGSYLQAQFLRLRARRGAKKAILAVAASMLTAIWHMLKNGVEYRDLGADHFARRDRAKAILRLVHRLNDLGCHVQVAPQAA

SEQ ID NO: 139921 - protein, 320 aa, unidentified
MKTKPTQPYVGLDVSKKVLELAIHESDYRHCYPNNPSGFAELIAELITLEPALIVIEATGGLEKPAVAAMNTAGLPIVVINPRQVRHFAKALGQLAKTDRLDARVLAHYAAAIKPPLRPIKSVPEQDLDALVGRRGQLVGMLIAEKNRRATAPNDRVRAEIEEHIKWLEGRIAALDRQLKELMQSSATWKHTNQILRSVPGFGPVVSFTLLADLPELGKLNRQQISKLVGLAPLNRDSGQKHGPRHIYGGRASVRSMLYMATLTAIRYNPVIKAFYERLIANHKVFKVAITACMRKLLAIVNLMVRNGTSWKTADTHASA

SEQ ID NO: 139922 - protein, 366 aa, unidentified
MDQTSSSAISTNTLHCALELSRNSWLLAIQFPDREQPSLYPIEGGNTEKLMAKLTAALDCWAKVSGSPPAITLCYEVGYDAFWLARFLMGRGIECLVIDPGSLQVNRRGRRVKTDRIDVKMLLRTLIAWCRGERHVWSLVRIPSIDEEDLRRSHRERGRLVRERTAHINRIKGLLFGQGIRGINVKSKYKTLAVDNLVTGDGHRLPPRLACEIARQIQRLAMVQEQIAKIERERDTAPTPCEATERKRHLLLQLKSIGPAISALLSREVYYRQFANRRQVGSFLGLTPSPYNSGAEERCQGISRAGSGHVRAIMIETAWLWIRHQPKSALTRWFVERTAGQNTRVRKITIVAVATAILDRPCARRR

SEQ ID NO: 139923 - protein, 409 aa, unidentified
MTATNQFAAHVGLDWADKKHDVCVQFKNGERTFHVIEHTPEALDVWLTELHQKVKGRIAIAVELKKGPVVYALQKYPFITVFPVHALSLARYRQAFSPSGAKDDPQDAELALELMLRYPQAIEPDNADIRLLQQLVEQRRQLVEDKRRFVNRLINSLKQYYPQPLEWFSHRGSLLLCELIIRWPSLQQLKRARRDTIRNFLNAKGGRAMALTEQRVVSIDNAIPLTTDPSVIEANALMATALATQIKVVSEIIKTYDERIETLFDTLPDAGLFKSLPGMGPCMGPRMLAALGDNRDRFNSAEEIQNYAGIAPVTERSGQKSWVHWRWQCAKFVRQTFVEWTAKTVNSSYWARLYYLGQREKGKSHQSAIRALAFKWIRIIYRCWKTRTQYDEAKYLLALEARRSPLLKP

SEQ ID NO: 139924 - protein, 356 aa, unidentified
MATYSLSALQNFIAVHQTDPFWIGVDVHKRSYHIALLRVDSKTFTFTSQASPDAFVEQLRRLNIRVAGVAYEAGPTGFSLARALQAEDVPITVAAPSKIPRSVSAGSKTDRLDCLKLAHYAAKGLIRPIAIPTAEEEAQRALLRRRHQLVDRVRQCKQRIKGLLLYLGYKETDAIKNWRTDCEEQISELPLSSEGRLTIESHLRELRFLQEELSEVARQLERLNRQPEHRAVIKSLTSVPGVGTVVATSFHLELFRPERFQRGEEVASYLGLAPTVRHSGERTPRGRLAPCGQKRLRSLLIEAAWMWRAKDAKAGELYNKLLGKTGVPQKAITALARRLAIILWRLSIEQRAYRPV

SEQ ID NO: 139925 - protein, 359 aa, unidentified
MKQQSKSSHITVGLDLGDRRHRFCALDERGEVVEEGSICNERDSLRKLAGRYHGALGVMEAGAPSPWISRFLEALGWRVVVSNPRKVRAIYQHERKSDQRDALMLARIGRMDRALLYPVRHGSEQAQQDLLRIKLRDSLVRARVALINSVRFSLKSLGYAVRNPSSERFHKVAMERLPERLQQMIALSVQALAELSTRIAVLEREINVLARTKYPQTLWLQQVPGVGALTALYFVLKIEDPQRFENVRDVGAYAGLCPRRDQSGQSGPQLRISQRGDAYLRRLLVSAARYILGPFDPQSALRAYGLMLAADGTARAKKRGTVAVARKLAVLLLSLWKSQQPYQSFPRARLNGQPEDRRS

SEQ ID NO: 139926 - protein, 428 aa, unidentified
MDQVNRNRLEEFRQLRQEIRYSDEYLIVGMDIAKDRHHAFLGTATGKTLLRRLVFSNDHEGFRRLLDQAEALRVQHGLKKVVYGMEPTANYHKPLGEYLIKLGKTVVLVCGVTVARNRESMDGRWDKNDTKDSANVADLISQGKCLYYEHPSAELRGLRELLSLKKRLKKQEHGYKVRIRNHLIAEYFPEMDRDYERLGAEGLSIVRWCLPASEMAQLDVDPFIERVRSRRITTEKRRRLEATWEKAGESIGCDAVPGVDHEAKVMVEGLRQIREMIKETEDRIEELCKAFPEYFYILTIPGFGPDVSSKVLGAIGEPDRFQSGKQVLKMGGLDLSADRSGKDSDKAIPQISKRGKADLRYALYQAALIASVKNRDVMIYYTNKIRGREREKGIHIKMRVKLAAKLLVIAWTLMRKKEAFNPVYLTAE

SEQ ID NO: 139927 - protein, 405 aa, unidentified
MFYLGIDLHRKQMTVSLRNPNGDVVLRRQVSTRWSKVEEFRQQLHQAVAADDQYVAVVEVCGFHDWLVQWLRQDERCHQVLVVQPLARSANKTDRRDANRLSELLWVNRQRLLRGQRVHGVRTVLVPSAQAQTERRLTQVRERLVRRRTQTLNQIHKILRRQNLEWEQPTKTFQTQKVRQWLQTLPLEPTDRLAMNQLLVQWQLWDEQLVAADGWIAERFQANREARLLATMPGVSMFIAVAIVSRIHPIERFPRGRSLANFLGLTPGCRSSGDTECVGSITKIGSRLVRYLLAQVIQHLLRRDGGVRAWYQRIKRRRGSKIARVAVMRRTATIMWRMLHTGEGWRAGKAGAEMPRAAGDPGKTNSLRGERSKSSAPLASASECGGLSTGSSSLLAGEEVAPCPA

SEQ ID NO: 139928 - protein, 365 aa, unidentified
MQKISTMRTSGKNIFQGQLTIGLDLGDRSSSYCVLNEAGEIILEQKLPTTPEAMQQAFGRMARSRLAMETGTHSPWVSRLLTALGHEVIVAHAQNVRLIVKSRRKDDRLDARTLARLARIDPELLSPVQHRSAKAQIHLTVIRARAGLVSARTALVNAARGLTKSYGERLRKCGTQQMNREMAKGLSQELRDALEPLLGEIESLNQRITEYDRRIEQIAKEVYPEVALLKQVKGVGTLIALTFVLTLEDSHRFRRSRDVGCFLGLRPGRRNSGMSEPQLHISKEGDRYLRTMMVQGAHYILGPFGQDSDLRRWGLKLAERGGRNAKKRAVVAVARKLAVLLHKLWVSGEVYEPLRNNQIVVSAVA

SEQ ID NO: 139929 - protein, 328 aa, unidentified
MGNRSMFVGLDVHKETIDVSIAEGARDGEVRHYGVIASDLEPLDNVVRALRAPDRRLHFVYEAGPCGFGIYRHLTKRGEDCVVVSPSMIPKRSGDRVKTDRRDSQMLARLHRAGELRAIYVPDDTDEAMRDLVRAREDAVVVGTQAKCRLKAFLLRQGRRYPGREGWTLPYRRWLTDLSFPTAAQHITLQEYRDTIDETERRIERVTEQLRQLAPTWRWAPVVAALQALRGVSFITAVALVAELGDLTRFGHPRELMAYLGLVPSEYSSGPSVRRGAITKRAIPTPAGCWRKRRGHIRGFRGLGASMRIVRRRCRRSCATSRGRPNSD

SEQ ID NO: 139930 - protein, 349 aa, unidentified
MRFYSSEHRFYCGVDLHARSMYLCILDAQGQVVFDKNLPASGQAFLQAIAPFRDGLVVAVECLFCWYWLADLCAREQIAFVLGHALYMKAIHGGKSKNDQIDAGKIARLLRGGTLPQAYVYPAGMRETRDLLRRRQYLVHKRVEAIAHIQNTNSQYNFPVFGKKLGYAANREELNIADRFSDPSVKKTVEIDLCLIDHYDTLLGDVELYLTRSAKVDDVQTYHRLQTLPGVGKILALVLLYEIHDIRRFPDVGNFLSYARLVRCAHESAGKKKGSGGKKIGNPHLRWAFSEAACLFLRQSERARRWKVKQEKKRGPAKAMGILAAKLARAVYHLLTKKVAFDEQRFWNC

SEQ ID NO: 139931 - protein, 384 aa, unidentified
MNKFSKYVGLDVHQETIAVAVADMGGEVRYMGEIVNTPEAIAKVVTRLKRGTDRLTFCYEAGPCGYTICRQLRELKQDCQVVAPSLIPKKPGERVKTDRRDALSLARLHRADELSPVWIPDEAQEALRDLTRAREDMKHLQRQAKQRLLSFLSRHGHRYTGRSRWTQPHWRWLEGIRFARPEQQIVLQEYIDTVQACGKRVASLDREVETAAHASTLWPVIEALMALRGISLLAAVTVVAELGDLTRFANAPQLMAYLGLVPSEHSSGKRERRGGITKTGNGHVRRVLIEAAWTYRHAARKTAILQRGAERTAPEVQEIAWSAQKRLCQRFRNLMARGKLKNQVCTAIARELVGFIWAIGQHVAPLSRAQCPELKINCLICAVY

SEQ ID NO: 139932 - protein, 406 aa, unidentified
MVFVGVDWSEKHHEVELQDSSGKVLKRLRVGADFKGLRLLQETLTEAAEDPAQVVIGIEATQGLLVNFLVGSGYQVLPVNPLLSARSREAEAPAKAKSDRGDAHLLTNLVRTRRQDLRPLAGDSEDAQVVRIRAHSHARLVRHQQRLRSQLRSALSKFFPAAVSLLGEEETDLRDALAVLSVASNPELARRLSINRLRSLLASHGRQRNLDVKAAQIQALLRSPQPQLNSPRMASAYGDEVRSLVRVLLGVRTELNHLEAELTADFEMHPDAEIYFSLPGLGFVLGARVLGEMGDDPTRFHNAKSRKNFAGNAPITRASGKYRAVFRRIARNRLLADSCFLWANSAISASPGARRYYDQLRARGNTHNEACRALANRLIGILHGCLRTRRLYDESRAWTTPLEEAA

SEQ ID NO: 139933 - protein, 345 aa, unidentified
MEPMYYIGLDVHKRKISYCVKDSSGRVCAEGSLPATRFDLDHWMKTLPLPWSAAMEATMFTGWIYDHLKPHAAALKVAHPLMLRAIAAAKKKNDRIDANKICDCLRCDFLPECYMASTAIRERRRTLRYRNLLVRQMVQMKIKISSLLMEAGVSYNKQRLHKAGYFRELLATNPDIDEGLRALLRQCRETVVRLSKTESALIRSLEHDRLLAERVERLMSIPAIGPITALTWALEVGDVQCFSSIKKAISYCGLCGAEKSSGSTVQRTPLSKQRNKHLQTTLIEAAKMAPRNTPELAMLYDQEKQKGNCNRATLAVARKLVAYLVAVDRRQKEFLTVERENRTAA

SEQ ID NO: 139934 - protein, 338 aa, unidentified
MEWTVAIGVDTHKEVHVAVALDVLGAKLDSQEIPTTPAGYRRLLSWAQELGVPAFAVEGTGSYGAGLVRFLEQAGVAVYECERPRRQERRRGKSDLIDAALAARKLLSGERLSVPRGGGRREDLRLLLLERRSAMQARTAALNQLSALLVTAPDHVRERLGALSGKRLARAAARQRHRPDVMNGVLRRLGQRVERLSREVADAERSLAAVLAEVAPDLLQECGVGPVCGAQLLVSSGDPSRMRSEASFAALAGTSPVDASSGKQRRHRLNRGGDRQLNWALHVVALQRVRHHPETSAYYERLLAAGKSTREARRCVKRALARHFFHRLREMPRLTLTT

SEQ ID NO: 139935 - protein, 334 aa, unidentified
MTNMETVAGIDVSCKTLALAIRTGERTGKVRELANTPSGHQALIKALKNAGAVRVCLEATGAYHLDLALALDDAGMALMVVNPKAAKNFAAALMTRNKSDAVDAGMLAQFAQTMPFTPWQRPDGSALGLRACARRLAALSKACTQAKNQLHAASQTISTPELVLADLRLTIAQGVEQITQLRAGAGALIAADGALSEIFTLLTTVTGIATASAIQIMGEIVVLPADMQAKQWVAMAGLDPRHATSGTSVNKKPRLSKAGNRYLRLALYMPALSAARHEPHVHGYYRHLIEDRGLKPIQAVCAVMRKLLHAIHGMLKARQPFDGSRFYALVATPA

SEQ ID NO: 139936 - protein, 341 aa, unidentified
MSTTDHLAPGQTAIRMDLGAIFMSMELSRTNWLLTSLSPGGGERLSKHVLRSGDVAGLRARFSQLRDKARARTGQIVPIIVIQEAGLDGFWIHRLLQGDGIESHVVDPASIATSRRRRRAKTDKIDGEALVRALLAYKRGEPRVCAMVRAPTPQEEDRRRICRERKTLTAERVEHVNRIKGLLFAQGISEYEPLLRWRRERLEELRTGDGRPLPEHLKAQIERELDRLELVLQQIKRVEAERDALSSLSDEGRPAAAVMLKRLKGIGPEFAGVLSSEALFRHFSNRRQVAAYAGLAPTPWQSGSVALEQGVSKAGNPRLRTTMIQLAWLWLRHQPHSRLTQ

SEQ ID NO: 139937 - protein, 420 aa, unidentified
MAVRTQEDEVFPNAAGIDVGASSHWVAVPNRSSDEPVREFGAMTDDLNAMASWLLACGVDTVALESTGVYWIPVFEVLEQRGLKVWLVDARQMKYVPGRKSDVQDCQWLQKLMSLGFLRAAFRPDAQVCELRAVARQRETLLTEQASWVQRMQKALVQMNIQLTEVLSDVMGLSGSLMIRDIVAGERDPKALARHRHSRVKASPEEIIKALTGNWREEHLFVLRQSLGMYDDIARHLAECDTRLQAELADLGQKKVDLGKPPRSGSQQREHFDERQILANWAGVDLTRINGLGLTAVKKILTEVGPDLSRFATVKHFCSWLGLSPGTKISGGKVLSSKTKRSLNRVRQVLKMAAMSLSRCDSALGAFYRRLCARMDTPSDNTPLPPKLSRMVYFRTHTGAVVGDRSAPPPWRGPALRHDH

SEQ ID NO: 139938 - protein, 455 aa, unidentified
MSRKRKSNPKSHQKTGASLLSCLNLNAAGVDIGATEIYIAVPGDRDPQPVRCFSTFTEDLQAAAAWLKACHIETIAMESTGVYWIPLFQILESRGFKVLLVNAHHVKNVPGRKSDVSDCQWLQYLHSVGLLRGSFRPEQAVCSVRSLLRHRDSLVQMGSSHVQHMQKALDQMNLQLHHVISDITGLTGIAILEAILAGERNPHTLAALRDRRIKASADTIAKSLVGDYRREHLFTLRQSLAAFRHYQELIAACDREIAQSLEEFESKLDPPPASPSPSNDGSKAKASEPPFDLQTHLHRIFGVDLTQVPGINVLTAQTLLAEIGPDFSHFPSGPELASWLGLCPDNRVSGGKVLSVKTRKVKNRAATALRMAALSLHRSQSFLGHFYRRMRTKLGAPKAITATAHKLARIIYHMVTTGHAYDETICVQNEVQNRQRMEARLRKQARELGLQLVAL

SEQ ID NO: 139939 - protein, 355 aa, unidentified
MSQEKYIGMDVHQATISVAVMESGGKLIMECILETKAATIIEFIRGLRGPLSVTFEEGTSAAWLHDLLKPHVSKIVVCDPRKNALLTDGSKSDRIDARKLAELLRGNQLRPVYHGDHGLRTLRELGRSYLTLTQDLTRVMSRIKALYRSWAIPCSGTTVYGARHRSEWLAKIPEPGVRLRTERFYQQLDLLRSLHGEARRDFVAESHKYPAVKLLRQIPFIGPIRSALLVALLQTPHRFRTKRQLWAYSGFAVETHDSGEYRYVRGKLLRNRERISVRGLSDNYNRDLKNLFKSTAISASARPGPLRDFYLALLAKGMRPTMARLTLARKIAAITLTMWKKGVDFDAKQLDQQAA

SEQ ID NO: 139940 - protein, 408 aa, unidentified
MPKIVYPICCGIDVHKSFIVACIATTNEKLVTNYKSKRFSTFTGDLRRLSDWLAQNNCQDICMESTGKYWIPVYNILESTCRLVLAHPKYVKAIKGKKTDKRDAKWIADIFKHDLINGSFIPPADIRQLRDLVRYRLKLTNYTTGEKNRAQNCLTVSNIKLDDVFSDVFGKTASAITDRLLKNNEPFDVTSYLTRKIKASPEEVQAAVDGIMCANQAEKLRIIRSHMDNLELCKANLESEILSIAEKFLPQIDLVLTVPGIQSFSAIAIIGEIGVDMSVFETSRHLCSWAGLTPQNDQSAGKKKTTRISRAGVYIKPLLIQCALAAIKSKKNPEIRNRYLAIKKRRGHKKAIIAVARMLLTAIYNILKKNEAYNADLYRQSDKPPLNREVTLEQAIFILQRQGYLITA

SEQ ID NO: 139941 - protein, 338 aa, unidentified
MNDSVIGLDIAKNIFHLYSIGSEQQVIKKKLKRRELLTFFANYTSSLIGIEACGGAHHWARELIKQGHEVILLNARYVKSFVVGNKNDYNDAAAIFDAVTRPNKRVVSIKTIAQQDIHMAHGVRKERVDFRTALVNQTRGFLSERGIIMAKSVNQFRKQLPEILEDGENDLTPLSRELIAEKYEQLKILDTEIKAHDRRINRLCKDNALSRRFLEVPGIGPLTATYAAADIGTGKGYQRSKDYAASLGVVPRQHSSGDKLVYLGISKRGNRHLRTLLIHGARAVLKYCNNKQDRQSLWLQQLIERRGFNKAAVALANKNARILWAMANSGKAYTPLTT

SEQ ID NO: 139942 - protein, 422 aa, unidentified
MLGVGVDWAESFHDVALGQPGKGVVAEFRIEHGPAGVACLIARCLELEPDPAEVRVVLETRHGLLVEALTDAGFSVLPVNPDLVARRRGPARKKDDAADARICCLLALDQYAELRKLIPHGQTGAELRAIARDDERAARDERRIGNRLRADLLAVFPAAIDIAGGDLGAPVFLRLLEHWPSAEALASASGGELEAFARSARHGWPGQFAGKVTAAMAEPRLPARPELARAKAGAIRLAAAQLLLLRAQRKTWERRMGELLLGAPRYGRAKTPKDPDPGKAFPGGEIYLSMPGLGDRLAARVAGEIGEHPEQFTTPNALQCYAGRAPVTRRSGRSEFTIARRLAYNRHLGEAVQQWAFCSLSRSAWAREFYDAKITAGKTHHAALRTLGNRWLEVLWHCLRLEIPYDEAIHTANRNHALKHAA

SEQ ID NO: 139943 - protein, 386 aa, unidentified
MTTATTSRIEQDMLPQPTLYLAFELGQNTWKLGFTIGVAQQPRERTLPAGALDTLQQEIARAKQRFGLPEDARVVSCYEAGRDGFWLHRYLVAHGVQNHVIDSASIEVNRRQRRAKTDRLDVRKLLTMLLRHSAGEKKVWSVVRVPSVEEEDRRQLHRELTTAKQDRTRVINRIKGLLAGHGVQLTLQGDVDAQLDQVQQWDGSPLPSALRTRLKRAWQQVGFLTAHIQTLEAERRALWRRREDPGIAQVRQLFTLRGIGVNSAWLYVMEFFAWRDFQTPKQVGALAGLTPTPYQSGQSRRELGIAKAGNRHIRAMAIEIAWAWRRFQPDSALSQWYERRFGAGSARLRKLGIVALARKLLIALWRFLKTGVLPEGAVLKTAAPRR

SEQ ID NO: 139944 - protein, 316 aa, unidentified
MDEPRPACCVGVDVSKDRLDVHLRPSDEAFAVARDGKGLENLVERLKALNVSLIVLEATGGFETTVAAALAGAGLPIAVVNPRQIRDFARALGKLAKTDAIDAGVIALFAEKIRPQARPIASEEAQTLGELVARRRQIVEMIGMEQNRRRRAADKQLAKRIDRHIAFLEKELAEVDGDIDAGVRASPAWREAEELLTSVPGVGPVTARTLIAELPELGRLDRRKLAALVGVAPFNRDSGTWRGHRMIAGGRTSVRCALYMAALVAIRHNPLIKAVYQRLIARGRPKKVAIIACLRQLLTILNAIVRDATPWTAQNA

SEQ ID NO: 139945 - protein, 344 aa, unidentified
MEVAIGVDPSKSSLTVAAVDPLGRVLGTGEFSNDPRGHRALIRWVHEHGPDRVIGIECSLSYGATLSRVLLRSGEDVREVPTTLTHRQRRRRASQGKSDMVDSVAIARIVASGEVLPSAHRLEVLADLRALVEYRDQLVRARTQVANRTHADLVNILPGYERQVPNLRAKAHRTTARSLLRGDRSVRGELVRKRLGELSRLEGEIAAMDRRIRATVQKTGTSLTSIPGVGPFIAAKILGEVGDPSRIRSKPAFAVLSGTAPLSASSGQVQRHRLNRGGNRQLNWALHYIALVQCRITPEAQAYMARQREAGKSHKEAMRCLKRQLSNVVYRHLVADARRAELAA

SEQ ID NO: 139946 - protein, 509 aa, unidentified
MARMIIGVDPHKASVTIEVVDQHGMLAATGRFPTARGGYQALMRYVKQWPTRTWAVEGAGGAGRPLALRLVRDGERVLDVPAKLAARVRVFDTGQGRKTDATDAHSIAAVAVHTRGLRELALEDEDLEVMRLLVDRRDEVSRLRVQIVNRLHRLLTELIPGGARKRDLSATQARRMLAAIRPRDPAGATRRRLAMDLVSELQAADAKLKALKTELRLAVRQSGSTLMDLYGIGPAGAARLLVDVATITRFPSKGHFASWNGTAPLDASSGEQIRHRLSRAGNRRINHVLHIMAIVQLRNDTLGRAYYRRLLTRGKTPMEALRCLKRRLSDVVYRQMLADQLAATVGPAAAGPGGHTGATTNSSADDLATPTAVSSDKSLPGPATDHATPDDEHDDELQDDVEDTPTGPVETLDLPAVVLLRRARAGAGPGLPLNSPARARRGSAVQGGPQGRRTATRSALDGGGASPYPRGAADPRAADPKNTGGEAAASSTPPPQARAEEHGSNNPLT

SEQ ID NO: 139947 - protein, 427 aa, unidentified
MKEQSRTIVGIDWSADSHTCYDLQTDKSFKITDSVEGYEKLLKNYPEAVFVIEEANNRIGDYLLINNREVYVLPPCRSKEARKYHFSSGTKSDGLDAKAIALTFKEHPSYCLKARYSKVGVKITKLVTAYNIVSKMHSQQCNRLYSLLLRYFPEYLHIMDKQYRSDTSLRILSVCPTITELKKVSNEELRKILNKENYRMTSILKNKLDRIRSEGISWEDTSCEGKLILLLVNTLLSLRKGLEVLKKEMEKTLKNSPYRIILSIPGVKAVIGSYIVKAYLTHDFKSYQEIQKYAGTVPLLFQSGRKSIMLMRKKCDNDLKGMIHMAAFASLKTCGWARNYYRRKRKEGKTYGHALRALGNILLKIAFSMLSKMKEYDETLFLNAKGIKTTQLNDTSFSETFPYPEYSQDAQLSLAATKDVVDNLIVT

SEQ ID NO: 139948 - protein, 355 aa, unidentified
MDSTKYVGMDVHTEAISVAVRNAAGKVIMESILETKANTILEFIQGLRGNVHVTFEEGTWAAWLYDLLKPHVTKVVVCNPRKNALLKDGNKGDKIDARKLSELLHLNNLKPVYHGEHGIRTLKELARSYLTISKDLGRVMNRLKALYRSWAIPCKGQQVYAPRHRSEWLNKITEAGVRRRAEYLYQQLDALQPLRQQVRRDLLAESRKQPATKLLRKIPCIGPIRAALLIALIQTPHRFRTKRQLWNYSGLGIETHDSAQYRFVRGELQRSKRPQQLRGLNKNHNHDLKNIFKSAATMATISAGPFHDFYEALLVKGRKPTMARLTLARKIAAITLIVWKKEVRFDVKHLKPQAA

SEQ ID NO: 139949 - protein, 371 aa, unidentified
MEHTRFVGLDIHKERISIAVAESGRSGAVEYLGEIANDPHAISKLCNRLGLPGKPLIFCYEAGPCGYGVHRQLTSLGHRCDVVAPSLIPVKSGDRVKTDRRDATMLARLHRAGELTSVWVPDTDHEAMRDLIRLRSVVRHIVTRARQHLQGFLLRHGRKHGGGTAWRMAYRRWLSTLAFEHPAQQIAFQDYVDAVADAERRLQRVEEQILSLLPEWNLRAVVDALQAMRGIALINAVVLVAEVGDFTRFSKPRELMAYFGLVPGERSSGETVRRGGITKTGNTHARRALVEGAWAYRMKPRIGRHKVDRIDALPKVVRDIGWKAQVRLCARYRRLSARGKTANVVNVAIAREMVGFIWSIACTIQSAPKPA

SEQ ID NO: 139950 - protein, 338 aa, unidentified
MTILFVGIDLAKSVFALHGVDEEGKAVLEAPKVVRDKLVGVVAALPPCTIGMEACSGAHHWARVFAGLGHTVRLMAPKFVAPYRMSGRRGKNDAADAAAICEAVQRPNMRFVPVKSLEQQGRLTVHRMRQAFIEQRTGMINRIRGLLSEFGIVLPLKAATVRRQAGACLEDLPGWANLAIGDALSELHRLDERIEQYDRHIAQMAREDARAQQLMKLCGVGETTATAMVAMIGNGHEFDCGRQFAAWLGLTPGQYSSGGKSRLGRITKAGDSYLRSLLVLGARAVLAAAGSKSDPISKWAKSVAERRGYWRAVIAIAAKNARMAWAVLKRGEAFELPT

SEQ ID NO: 139951 - protein, 366 aa, unidentified
MRTKKSYYIGLDVHKDSIWMAVMVDEKETPIESKEFPNHYSKIVKALALYKEKGKVQVAYEAGCLGYGLQRYLTEFGFDCRVIPPTKVVRPGLDKKVKTDKRDAALIANMLKRREGESINIPTREDEAGRDLLRLRGDFKDDLKRAKQRLLNFLLRHDKKYESNRYWTGKHRKWMAGLKFDLALDRMTYEYYIHYIENTEERIARVDEEIRKEAENERNAERTRILRAFRGIDYVTALSFITEIGDFRRFATAQSFMCFLGLVPSENSSGKKIHRGSITKTGNSHLRKLLIESSWHYTRPVKESKRLAERRVGTSEQVIRYADKAISRLHGKYYKMLFRGKEKNVAVTSVARELAGFIWGVMNMAA

SEQ ID NO: 139952 - protein, 343 aa, unidentified
MQTITTIGLDIAKSVFQVHGVDAAGRVVIRRQLKRRHVLAFFQRLRPCLIGIEACASSHHWSRELQAVGHTVRLMPPVYVKPYVKRQKNDATDAEAICEAVARANMRFVPTKTPEQQSGLVLHRTRHLFVRQQTSVINVIRAHLAEFGIVAPVGRHGVEELLGIVADPSDKRVPEVARACLAALGAQLRVLKAQILEFDRMITAWHRSSETSRRLDDCPGVGPALATALVATVADPKAFRSGRNFSAWIGLVPKQHSSGGKDRLGSISKQGDRYLRSLFVAGALAVIRYAKIHGTKHRPWLTALLARRPTKVAAIALANKIARMAWAMMAKGERYKQPVALAA

SEQ ID NO: 139953 - protein, 317 aa, unidentified
MNKNTEYFGIDISKDVFDVYGLELGHHQFANNEKGFKQFIKKLSKDSLVVMEATGYYHYCLAQYLYEKGYVVSVVNPLSVKRFIQMKLSKVKTDKSDARSICEYALNNDVPLYTAKDKNQAECLQLLRLMDTYVKHRTAMKNKLDGEQVLGIPSKAVYRSLSRTVKQLNKELALLEARLIALVKEEQQEQLRLLKTIPGIGEKAAILLVVFTDGFSKFENSKQLCCYAGITPTIRQSGSSVRGRSRISKIGNRKLRNQLFLSSFTACQYNKACRELYERIVAQGKSKKLAMLAVCNKLLKQAFAIAKSGMPYNENFV

SEQ ID NO: 139954 - protein, 350 aa, unidentified
MTNKMDYTGKIIYMGIDVHKKTYCCVTVCENEVVKKDTLPANPEDLLNYMNKFFSGAKINSAYEAGFSGFHLHRFLIQNGINNIVVHPASIEVSSRDRVKTDKRDAKKIAVQLSAQRLRGIHVPSEEQEAKRAVSRLRFCVWKLRHQVGARLKSLLFTQGLIARTDDVRISNKWITERLSEIKKGNYQPGFCYAVKTYAEEWKALTLRLKEIEKQLKLQAETQREKDIQAIYESVPGIGAIHSRELANELGDMSQFPNEKKLFSYTGLTPSEHSSGEHTRQGHITRQGRPVIRKIMIEATWVAIAKDRSLREMFDKLSVQGPKRAVVAVARKLIGRIRSCLNSGTLYKIA

SEQ ID NO: 139955 - protein, 402 aa, unidentified
MTAPARPAPVVVGGSDTHADTVHVAAISTLGREVADREFPTTAAGYRAAVAFLTSHGPVDQVGIEGTSSYGAGLARAVTNAGLQVIEVNRPSRADRRRQGKSDPLDAYHAARAVLSGRATSDPKDQSTEAIRSLHNTRRSAVKARTAATNQITAMLITAQDGIRSKYRALQGQPLITALAKCRTAVVDSVDAAVLTALKALAHRHQFLTAQAEELSTLIDALVTTANPALRAAFGVGPDTAAQLLITAGANPDRLRSEASFAALCGVSPVPASSGKTTRHRLSRGGDRHANNALYRIALSRMAHEPRTKQYVARHVAAGRSTKEILRMLKRAIAREIHRLLTHKVALPEYADLRPARQAKNITVTAAANAFNIWPTVISRIERGLQRDDDLANRYRTWLQAA

SEQ ID NO: 139956 - protein, 345 aa, unidentified
MSQQHFVGLDVSVKETAICVVDPQGRVVHRAAVESHPAIISQHLLGLGLTLGRVGLEAGPLSPWLYAGLVEAALPAICVETRHMHAALSARINKTDRNDALGIAQMMRVGLFKPVHVKTPASQQRRLLLTSRKLLQRKVYDIENDLRGQLRNFGLKVGIVGAVGFEQRVRDLVLDLPVIAAVIIPLLAARSALRVQLAKLHKMLLDEVRADPVCRRLMTAPGVGPVVALTYRACVDNPARFSRSKCVGAHYGLTPRLYQSGETARIGRVSKCGDAMMRAALYEAALVLLTGSRRRWSTLKAWGMSIAKRRGMQKAVVAVARKLAIVLHRMWRDGTDFRWSAAQAA

SEQ ID NO: 139957 - protein, 467 aa, unidentified
MTPHKDYCLDPCPPVLTPMLPPSPILSDALQVCHPHAAGIDIGEAEHWVAVPPGSDPQPVRRFGPFTADLDALADWLIDCGVTTVAMESTGVYWIPLFELLEARGVQVLLIDPRQAKRAPGRPKTDRLDCQWLQRLHAYGLLAGAFRPADQVCVLRGYLRHRQMLLTYAAHHIQHRHKALEQMNLKLTQVVSDITGVTGMAILKAIIAGERDPVTLAKLRNPHGQHSEDEIAKALQGTWRAEHLFALQQAVELYQFYHQQLTTCDQRITAHLETFADQSAGQPLPPKARRHKKTNEPRFDARTPLYRLAGVDLTTIEGIEENTALILLSEIGTDMHRWPSVKHFCRWLGLCPQHQSSGGKVLSRRVRPGAHRVTVALRLAARSLHHSQSALGAFFRRMKARLGTPKAITATAHKLARLVSHLLKHGSAYVQQGLENYEAQYHERKVKTMAKQAKALGYTLVPLAAQG

SEQ ID NO: 139958 - protein, 371 aa, unidentified
MKENSTFIGMDVHKNSIDIAIAPKGRKAQVRHYGKIDGTLAALDKVVRKLVSQGDCPHFVYEAGPCGYQIYRHLTAKGFECSVVAPSMVPKQSGNRIKNDRRDSMMLARLHRAGELTAVYVPVAEDEAMRDLSRAREDAKGDEKKSKQRLLAFLLRSGHRYSGRSPWSQAHMRWLADIKMVHPSQQIVLQEYIDTLSHCTLRLQRLTEQIRQLLPQWRLFPVVQALQSLRGVSLIVAATTVAEIGDFKRFQNPEELMNYLGLVPSEHSSGEKTRRGSITKAGNSHVRRMLVEAAWAYRFRARVSRALLKRQEGLPQEIRDIAWKAQVRLCARYRHLWAKGKVKQVVTTAIARELCGFIWAIANETDVPMTA

SEQ ID NO: 139959 - protein, 346 aa, unidentified
MKIIGCDFHPSFQQIAMLDLETGEYTRKKLGHANGEAAEFYRALAGEVRVGVEATGSTRWFERLLEELGQELVMGDATRIRKLAVRRQKTDARDAEHLLELLEQGRFPAIWVPSTEERELRQLVLHRHKLVQMRTRIKNQLQHVALNEGLQKKRQLWSQQGRRWLEELPLPPWSAQRRADLLHFLDQLTVKVDQLDQAVIEAGQQDARVRLLRTHPGVGPVTALAFVLVVGEVARFPRSKKLTSYLGLIPSEDSSGTRRRLGAISKQGNPLLRTLLVEAGQSAARYDPELRRAYQRLCRKKQHTGTAKVMVARKLAVRLYWMLKTQRPYQPARMQDSPGHSVSTAR

SEQ ID NO: 139960 - protein, 344 aa, unidentified
MSTVSQATVFVGLDYHAASVQVCALSPDGKVLLNRSCANDWRVVRGAVQKQCPGAVNVQAAIESCCGAAGLADELIGHAQWSVNLAHPGYVARMKQSPDKTDFSDARMLADLQRVGYLPKVWLAPEEVRELRRLVHYRQSLARERRNLKLRIGAMLREARQKAPSTVNPWTKAWLAWLDASAQLSPNGRHVIDCCLRRLVSLSKELAQIDRRLEKQTKDDSLVQKLLTIKGIGLITAVTLRAEIGRFDRFRNGKQLARFCGLSPRNASSGQKQADAGLIKAGNKELKSLLIEAAHRLIRCEERWTALAARLSSRGKKGCVVVAAVANRWLRWLFHRVQPSCLAA

SEQ ID NO: 139961 - protein, 340 aa, unidentified
MNNGLKLLGIDIGKNSFHLIGHDAGGHQVLRKCFNRNRLLQFAAQIEPCTIAMESCGGSHWLARKLASLGHRVKLIAPQHVKPYVTGNKNDFIDAEAICEAASRPRTHYVAVKTAEQQVLSVQHRLRESLVCHRTEAINRVHGFLLEFGIALPATKAAIAKVPELIDNSRSDLPLQLKRIMEHLLEDIRRLDAEIKACDVQIKQQLAQDDAGTRLMTIPGIGPITASALVADMGDASSFKTSRDLSAFLGLVPRQFSTGGRPVLLGISKRGDRRMRTLLVQGSRALMIRIDRREDALGQWVRNLLARKHPNKVACALANKLARIVWAVLRRGGTYNASMI

SEQ ID NO: 139962 - protein, 319 aa, unidentified
MEAPQVSFRQVVSRGCGLDVHKKVVVATIDGEGIKKQTREFSTVTSSLKELRDWLLEHKVTHVAMESTGVFWKPVYNILEPAGLTVWIVNAAHVKYVPGHKTDKKDSAWLCKLLLAGLLKPSYIPAKEQRELRDLTRYRTTLIQSNASNKNRIIRILEDANIKLSSVLSSTSGAVGTKLINKLCDGMEVTMQDIDEVYHKKLEATKEELYEACQGFVTEHHVYMLQLIRKEIHDTEHTIESLNKRIKEVLSPYENALELLKKVPGISTKSVEDLVAEIGLDMSVFPTEKHLASWAGMAPGNNESAGKKKADEQPRETSR

SEQ ID NO: 139963 - protein, 316 aa, unidentified
MNYLGIDVSKRKIDCCLIVGEKYLHRVLKNDQSGFEKLRDWLKKYTTEPVYACLEATGIYSEHIADWLHDEGHRVALANPLSIKKFAEMQLLAVKTDKQDAKTIAKYCRMTQPTLYAPPPKSERQLKALTRQVEYLKEMVVANQNRFQVSQDVTAPIIADTIAHLRQQIAQVEQQIQTHIKQSPDLKDKADLLKSVRGIGAATIPHLITLFGFKTFSTAKAAIKYVGLNPIIKQSGEKKTRFIAISKQGDKTIRTALYMPAVRASALPEWQPFVNRLKAAGKTGKQIVCAIMRKLLVYCFTVLKSGRPYDPQIQAA

SEQ ID NO: 139964 - protein, 397 aa, unidentified
MIAVGIDISKAKSTVAVIDSDGTVLASPFTMAHTQPEMEAFVSYLKGLGEPTTILMEYTGHYHYPVLKKLQDEGFPVCIVNPYQMKKYGDVEIHKAKTDKKDALRIAAYALEKSYKLVPYSSMEQKYEDLKFLSRQYSQRISYVAKLKVQLIALLDQTMPGITRILPLNSRNPEKCALLLFIKRFKSFDEIQRIGKARFLASYDVLAKKASERSASSKGLSIYELAVDSITTRGEDPYIWLSQNQCVDLLSATQNAADEIISQMRNIAETIPEYKVLRAMHGVGDRLGPIILAEIGDVHRFHSGKALNSYAGNDAPPYQSGQFESRNRHISKRGSSTLRKACYEVMQALKLTKPQDDPVYLFMLKKEQEGKPFNVAKMAGVNKFLRIYYARAMELYK

SEQ ID NO: 139965 - protein, 338 aa, unidentified
MKDIKYFIGLDVHKERTSYCVRDKLGNILTEAETATLYSELEPRLKPYLAYSLIALEASTSYYTLYQTFLKKGYRIKVANTIQLRQLIAKNDKLDAQRLAEMLRLGTLPCSYIPEERIQHLRSMVQMRHALMQEKVRCNNRIQAFLDRNGVVMPPVKAFSKKWKHALMQHLGTGNASMELRYEYNHYVYLEKTNEQADQEIIGYTKTYWKLEYNLLRSITGFGVLLPCYIIAFVHPIERFLSNRKLRRYAGVIPLSKESGDTTSPGRIPKTTSKALLRWALVQAANTIGKTNTRLGRYYRRKKNQKKKSGIAKIAVASTLVDIIYKVLTTKKPYVSTC

SEQ ID NO: 139966 - protein, 438 aa, unidentified
MKVLHERVAGIDVHKDMIKVAIRSPGDKPWTRTTEVSGFRTFYGVLQEMARELRRRGVTHVVMEASGVYTEPVYHALCEQDFTEVIVVNPAHVKALKGHKTDARDCARMAELLECGLLHGSFIPSAEQKEVRDLTRYRMKTVQARTSEIQRLHKALESAGIKLGSVLSDITGVSARLMVDALIDGERRAQVLADLAKGSLRSAGKQADLSMALTARFTDHHAMLCRLHRDQIKLADHAIAGLDGQIAGMAGRWPRQLGLLDSVPGFGEVVSAAWLAEIGPAPHRWFPSHDKLASWATLCPGNNISARKRKSGRTGDAGTYIKPMLVQAAWAAIQVRGRLQARYRRLVRRFGGDKNPGAKKKAIIAIAHTLLKIAYQVLKTGQPYTDLGADFYTRRESPEQQHAYLERRLQKLHPGCTVTVTISPPPGSPPPGTPAEAA

SEQ ID NO: 139967 - protein, 369 aa, unidentified
MRSIIYVGMDVHTTSYTLCCYSAEKDDCFAVIQVAPDFKNILKYLDQVRKNYNGEVEFLCGYEAGCLGYTLYHQLTNHDVDCVILAPSTMPQSKKREIKTDKRDAMKIAKCLAYRNYSAVYIPTEEDNAVKEYIRMRNDTKDTLKRIKQQLLAFCLRYGKRYGEGNNWTRKHLAWLKGLNFDNALLQETFQEYLTLYYQAADKIDLFDKRIEELSCRESYEEKVKKLTCFIGIRHHTALATIVETGDFRRFKTAQQYSAFLGLVPGEDSSGESIRRTGITKSGNSHVRKLLVEAAQCYSRGEVGKKSKTLLNRQAGNDPKVIAYADRANERLKRRCYKIMFRSKRNIAVTAVARELACFIWGMMTDNIS

SEQ ID NO: 139968 - protein, 421 aa, unidentified
MKKEQSEFAAYIGIDWADKKHDLCLQVAATGAREKSVLEHNPKALHAWAEGLRKRFGGAPVAVCVELTKGPVVSALMEHDFLVVFPVQPSLLAKYRNAFTPSRAKDDPTDAEFALELLLRYPERLPRLKPESPAMRSLRQLVETRRSIVDDRVRVTNRITASLKEYFPQVLGIFREKDTGVFAEFLERWPTIEAAKKARRSALEAFFREHNVRYQATIDRRIDALKDEQPLTTDPAVIGPMKLLVELLLPELKVLSDAVDRLDLEIAHCCAQLTDYKLFSALPGAGPALAPRLLAAFGEHRERFPNAAAFQQYVGVAPVTERSGNKCWVHWRYSCSTFLRQSFVEWVAQTITRSFWAKAFYESYRARGGSYQAALRALAFKWIRVLYRCWKDCIPYDESKYLMALQSRQAPLLKHAASTNS

SEQ ID NO: 139969 - protein, 432 aa, unidentified
MSKFFNLPVVGIDVSADYSMVAILAPDGAVYRKAFKIMHTSDGFSYLLKEMRKVEKEFSMKPSLFMESTGVYHLTLFHFLKNNELETFVINPLITNSNKNLGIRKVKNDKMDALTIANIAKFQNIKMSDYLDIPIFAVRSLCRDYYSLIDNRSQFKKKLSSDLRTFFPGYHNVFSDVAGVTSLAVLSKFSSPKAIVDAPKDDLIALLKENSCKSIDWCTNTYNKLLNAALSAVQIGITNNSFKVTIGINIKLLNIINEQIETLVNEIESAVKNDSTPASFKNNIALLLSFKGIGFITAVTIMSEIGDPTRFKHPKEMVAFFGIDPSVSQSGKFNSDQNKMSKRGTRFGRRALYAAALASIRKSKTGKPINSVLYQYRNKNLNGKKKKVALCAIMHKLVKYIFAVLRDQKPYEIREPKLHNQMYVTNFSRSVS

SEQ ID NO: 139970 - protein, 344 aa, unidentified
MDHYAGIDVSLECSSVCVLDASGKIVREAKVVSEPEALIGWFGSLGLGLARIGLEAGPLSQWLYAAMKEAGLAVELLETRHVSDAFKAMPVKSDRNDARKIAQLMRLGWFRPVHCKSITAQEIRAMLTARKLVQSKLLDLENSLRGILRGFGLKVGKTTRTNFVGRIEELVKGHPNLQTIGQALLRARAVLLAEFNGFEKRVRAMSRLHEKARLLMSMPAVGPIVSLTFACAIDDPSRFTSSKQAGPHFGLTPKKYQSGETDYTGRISKHGDTSVREALYEAAHIMLTKPIKRCSELKSWAMRIARRAGTNKAKVALARKLAVIMLRMLKDNVPFNPAAKPATA

SEQ ID NO: 139971 - protein, 366 aa, unidentified
MDQGITFIGLDVHKRSIVVAVREPGSGGVQEERLPHEIPVVKRWAQRWKRRSQGTLLCAYEAGVCGYALQRQLEALGVPCLVVAPSLVPRKPGERIKTDRRDARKLAEYLEGGLLTEVRPPTPSEEAARDLCRAREDAKQDRMRCRHRLSKFLLRRGRSYPAGRRSWTLAHRAWLKQQSFAEPCEQAVFDDYRLAVEQVDARIAALDRQIERLAQEPAYRAAVGALRCYRGIDTHTALGLVTELHGIERFDRASGLMAFVGLVPSEASSGDRQRRGAITKAGNGHARKLLIEAAWHARHKPAIPVALRQRREGQPPEIIAMADVAQNRLHRRYWRLVQRGKPTTVAATAVARELAGFVWAALRAVA

SEQ ID NO: 139972 - protein, 349 aa, unidentified
MLHVGLDLSRKRVDVCVVSSEGELVEHFRAPCDRDGLYGLTRRVAVYEEPIRGVVESMNGARYVHDELVRYGWEVLVADAVRVKGLAPLACKTDKVDARVLAELSFRDLVPAIWLPTPELRAERERSRWRLHLVKHRAILKNRVHSSLIAYGHQVPMADLFGVAGRRLLASLDFPEPWLGHVKASLELIDDLERRIGEIENWLRRSGADHRYLPLLLTCPGIGWITGYTIAAEIGDINRFASPVKLTGYTGLCPRVSQSGEIDCRGPISKHGPRYLRWGLMEAAIAASSHPLYRERYQRTRRRLGRQRGPKIAQIELARKLSEAIWYMLTRNQPFKPFVPAGAVLPLTA

SEQ ID NO: 139973 - protein, 334 aa, unidentified
MPTTAKGYERLLRWAEGFGPVRCAGVEGTSSYGAGLARHLRAKGIEVLEVERPKHRRRSSRQNVEKSDPSDAYSAARAVLAGEASGVPKSGDGRVEMIRTLRAARRSAIKARTQAANQLQALCVTAPEQLRCRLRGLSTKDLVSMAARFRLGDGPRDVPTATKFALRSGARRHEALSEEISELEAHLDRLVAQAAPELVALPGIGTDNAATLLIVAGDNPKRLGSEASFASLCGVAPIEASSGKVVRHRLNRGGNREANRALYMICLARMRRDGRTKEYVARRTQEGKSKREIIRCLKRYIAREVYRVLISCGARFSPKVPMDEAHIATGSNAA

SEQ ID NO: 139974 - protein, 339 aa, unidentified
MSLYSAIDLHSNNSHVAIIDDQQNRVFYRKLANDGKLIANAFAPYRERLKGIVIESTLNWYWLADLLMEKGYSVHLANPCGIQKYSGLKHADDKHDAFWLAQMLALNILPEGYIYPKEDRPLRDLLRKRAHLVRVRTSLILSLQNIVMRNHGIKIRSSDLKKLTQDPVAELLKDQEELALAGRASKETIDFLSRQIQRIETAVRSKALLKEPFSKLLTLPGVGDILGMTILLETGPIERFKAVGHYVSYCRKVPSRWTSNEKTKGKGNTKNGNRYLSWAFSEAADHARQTHEPSRNFYNRKLNQTNASVAHNALAHKLARAAYYIMRDHVEFKEDKMFR

SEQ ID NO: 139975 - protein, 314 aa, unidentified
MFIGIDVSKARLDVAIRPSAEKLSVSNDEAGIQALVTRLSEIKPALIVLEATGGLERSVSGTLGSAQLPVVVVNPRQVRDFAKALGQLAKTDRIDAEVLARFAEAIRPPLRPLPDKVSLELRALIARRRQLIEMIVAEKNRLSAASKAVRKRIEAHIRWLETELDRADKDLDHSIRQSPIWCENEDLLRSVPSVGPVVSRTLLAELPELGRLNRKQIAALVGIAPLNCDSGTFRGRRGIWGGRATVRAVLYMAALVASRRNSVIRNFYKRLRDKGKAPKVALVACMHKLLTILNAMIKHKTRWSEIIPQTSLDF

SEQ ID NO: 139976 - protein, 399 aa, unidentified
MTNETHRLGGIDSHKDTIHVAVITGVGQPVADREFPTTLAGYRRAVAWLIEHGPLHAVGVEGTSSYGVGITTELLAAGLRVVEVNRTRPAEKRKQGKSDPLDAYRAARSVLSGEASTEPKNPSIEPLRALTIARRSAVKAQQATWRQINALLVNTQPVLRDRYRDLPAAKLLAVLHDCRPDQIRDLDLADTMAALRTLARRHHTLQAEIEDLEQRMRRRATEANPALMAINGVGPAVGAQLLITAGDNPQRLRSSASFAALCGTAPIPVCSGKTSRHRLSRGGDRQANAALHHIVKVRMSHDPRTRAYRDARLAKGWTKKAVFRALKRAVAREVFHALAGHTTAPDYSDLRPARRAKNLTLTQAAEHLGVWPARIGELELGRRPNQELAARYRAWLTAA

SEQ ID NO: 139977 - protein, 361 aa, unidentified
MSESMVLVGLDVHQAQTVAAVLDPSTGELSVQRLRGEPASVVPVFLEELDCPVRAVYEAGPTGFALARVAEGRGLDVRVIAPGSIPRAPGDRVKTDRRDAKRLVRLFAAGELSYAFVPSEADERFRDLVRCIEDARKDLMRSRHRLSKFLLRRGHRFPCKAWTQPHERWLGKLRFEDAPSQATFVDYLCAVQTLVGRRRTLIEVLEQTVPETSHVETVARLRCFRGINTLTAAGLCAEVGDFARFAKPALLSGFLGVVPSEHTSDEKRAQGQITKAGPPHARRLLVEAAHHYRHQPAVRLELKARQAGQDPRVVQVAWRCQRRLHERWVHLQGRRGKRTGTVAIACARELAAFCWEAATLD

SEQ ID NO: 139978 - protein, 366 aa, unidentified
MKQVTTYVGIDAHKKDLFVAMLIGAGTTPVTWQLANEPGAVRRMVRKLERDAPGPVHVFYEAGPCGYALQRQMATDRITCDVIAPALMPRKPGERVKTNRRDARKLAELGRADLLTVVQPPTPADEAVRDLARARDDAREDLQRCRHRLSKLLLRRGLHYAGKNWTQAHRRWVDSLTWSHAAEQAVVEDYQLAIAHTEARLLELDARLAELATQAPYREPVGWLRCFRGIDTLTAMLILAELHDFRRFGSARALMAFLGLVPGEDSSGEKHRRGRITKMGNALVRRILVEASWHYQHRPDIGRALKARRTGQPARVIAIADKAQQRLCRRFRRLLAEHKPAPKVAVAVARELAGFIWAALQPPVVA

SEQ ID NO: 139979 - protein, 455 aa, unidentified
MCMQDRPVLEANAAGIDIGAREIFVAVPPDRDEHPVRVFSTFTEDLEEMAEWLVSCGVTTAAMESTGVYWIPLYDVLDRRGLKACLVDARGMKNVPGRRTDWHECQWLQFLHSVGLLRAAFRPDGEVCAVRSLMRHRGELVAMTNQHIQHMHKALTQMNVQIQHVISDITGVTGLAIVDAILDGEHDAAVLAKLRDRRIKASEEVIRKSLAGNWRAEHLFTLKQSRRSYQHYQEQIVACDEEIEKLIVAFAPRVDPAERPLPPDRKRKERGRKKKIVNPQAGQAGFDLRTESYKLFGVDLTQIPGLMAMVLTLFSELGRDMSRWPTAGQFVSWLALCPDNDISGGRVLWRGMRKVQNRAGQLFRMAAFTLHHEQSPLGDYLRRMKSRIGPEGATTATAHKIAVIFYTMVKNQVEYDASIWAQRDAERDKRFEAKLKRQAQQRGYKLVPIEEKPAA

SEQ ID NO: 139980 - protein, 299 aa, unidentified
MRKLYVGLDVSKSETAVCVRDETSRVVLATKAVTDPGAITQAIKAVDGEVAQIVMETGRASNWLYAGLLAQEIPVVWVDARQAHAVLSQMHNKTDANDAAMLAELARTGFYRAISVKSMASQRMRALLRVREVAMKARMNIENTIRGLLASFGIPMTKEQKTFAVRVLTAIENDSVVSDIVRPLVHLRADILRGLAALDRQLRVYVRNDATCRRLMTTPGIGAISAFAFVATVDDPARFRRSRSVGAYIGLTARPHQSGALDISGRISRRGDTLLRTVLYEAANSLLTRARAGNGAHLK

SEQ ID NO: 139981 - protein, 540 aa, unidentified
MGWHLPRAAAPPALCSGGPCPDTLSKVIHGRAKRASKAERSEAVNNFAAMNFASNLRPGDNGSGRKARGRTRLTCPYPARIKPRTPVDLGAFIKKSERTTPCEGHRIRSTDDKSQGPRASKCMTEPLNWEKITHYAGFDWAKDHHDVVVVNQQGKIVKDLTFEHTAEGWTKWKELVAAYPNLAVAIETNQGAAIEQLLESAVTVYPVNPKSAERYRDRKAPSGTKTDYLDAWSLGDALRVDGHGWRALKPLDPLIHELRLLCRDEVELIAKRTELVNQLQAALHEYYPAALQAFEDWTATPSWKFVQQFSTPELLHKAGRRRWEKFMHVQRLYRPELNEKRLQIFAKALEFCGSPVVTRAKSRLALAVVKLLLALEGQLQDYRAEIQRLFNEHPDHDLFGSLPGAGDKLAPRLLSEVGSDRSLFESPQALQCYVGTAPVSFQSGQTRQVHARFMCNKSFRHAVHLWADLSRRFSSWSQIYYQRLRDKGKSHASALRCLGQRWLKILWKMWQTKTTYSADFHMANQLKHGSWVLTVKSPKT

SEQ ID NO: 139982 - protein, 342 aa, unidentified
MNATRVGIDLAKNVFSVHGVDAHDKVVLKKTVTRGKLLECFANLPPCVIGMEACSGAHHWARQLRGLGHDARIIAPRFVIPYRKSGKNDGNDAEAICEAVGRPAMRFVPVKSVEQQAVLCLHRIRSGVVAERTAQINQIRGLLAEFGLILPKGRYPAQHHLPDLLEDAGNGLPGLARRLLTDLYQRILQLNQHILAYDREIEALARHSSSAQRLMRLPGIGAVSATALVASIADPGQFGSGRQLAAWLGLVPRQYSTGGKTRLGRITKQGDKYLRMLLIHGTRAVLATLGDKQDRLSCWLRELIARRGYKRAAVALAAKNARVIWALLARGEDYRPSPAAVV

SEQ ID NO: 139983 - protein, 452 aa, unidentified
MKRKKASTEAVRRATDLQIQNPDAAGIDLGSREHLVAVPVDRDTQPVKSFGCYTEDLHRLARWLKDCAITTVAMESTGVYWVPVYEILEQYGFEVHLVDARQLKNVSGRKSDVQDCQWIQRLHSYGLLSSAFRPLPEIVTLRSYWRQRKGLTDECGRLIQLMHKALEQMNVQLHKAVTDVTGKTGLAIIRAIVAGERQPEQLVRFRHAACKLGPQEFVAALNGNFKDEHVFALRQSLAAYDFYQGLLQECDQQMETYMAQLPSRTEPDTTAPHKRRKNQPYFDLRREQVRISGIDLTVAPGIDVLTAQSVFSEVGLDVERFPSEKNFTSWLCLCPNNRKTGGRIRSSRTRRNAHRLATALRLAAQSVGRSKTALGAFYRRLAARIGAAKAITATARKLACIIYRMLKYGQAYVEQGQMAYEQAYKQRSINNIRRQAHNLGFQILDVATGEVS

SEQ ID NO: 139984 - protein, 340 aa, unidentified
MDKPDLCGMDVSAKQLVVMVRRDGKSEAARSFANTKSGHQELKRYLTRQRTGVRVCLESTGLYGLDIALLLQADTRIEVMVANPRAVKDFARALMHRSKTDPLDALVLLEYAARMPFQTWQPPCTAALQVTALGRRIHALTQQCTMEKNRLHAVATTQTTLPLIVRDLRRSIASLETAIAKLSREAHKIIAANDLLRRRFLLLQSAPGIGPVSALQLLGELSLVPAHCDVRQWVAYAGLDPRQHDSGSSVHKKVGISKVGNSHIRRALYMPALTASHHNPHLQSFSLHLQTLGKCKMVALVAVMRKLLHAIFGMFKYDALFNGAKLYPAFSPKQVSASAC

SEQ ID NO: 139985 - protein, 311 aa, unidentified
MFFDVALPDGQGYRHYKFDNNQAGFSALLKVLSSESVVVMEASGPYYLRLASFLSQQGIGVSVVNPLVIRRFCQMRLSRAKTDKKDSIMLAKYGCAEKPALWQPPKEHEIVLQQMEAILANLHKEHTAVNNQLESFTSSGMLDKKLEQLLRKESAHKQGLIDQLTLEIEELAKKHYSSLLASLESIPGIGRKTAIMLLVASGGFSRFSDYRKLSSYIGICPRIFESGTSVKGKARICKMGMSGMRAVLYLCAWSAKRYNKACSELYGRLLAKGKAKKVALIAVVNKLLKQAFAIATKLTIYNENYVRKPCF

SEQ ID NO: 139986 - protein, 443 aa, unidentified
MTKSTLKIVNPNAAGIDIGSKEHYVAVPLDKTSEPVRSFGSFTDDLEAMSVWLKDNDVDTVALESTGVYWIPVHEYLEAKGFEVLLVNARHVKNLKGRKTDVADCQWLQQLHSHGLLEGAFRPKDEYCVLRGYVRQRKMLVEDQSRSKQHMQKALVQMNIQLNNVVSSITSKTGLAIIRDIVAGQRNPLKLSKHRDRRCRFSLEELMKSLKGNYRQEHLFALKQALEAYDFLQEKIDECDVQIEEYLSNLASSKSNDDTDIDSEAGREAQEQETQKEELATEEKLSKIFGVDLTKIEGISLNTTLVVLGEAGADFSKFKSSKQFAAWLRLCPGNKISGGKILNSRTLPSSNRLRTALKMSACTIQRSKTALGAFFRKIRARAGTAKAIVATAHKLAKYIYAMVTKGEEYVLKTLQEYESQYKDKVRKSLEKKAEGLGLKLVQA

SEQ ID NO: 139987 - protein, 348 aa, unidentified
MEMHQVGIDVSKEKLNVALLLAPVFSKKKTKVVPNNPEGFNLLIEWVNRQINDQRPLRFIMEATGAYHQALALFLCNHGFEVHIINPAFIKRFGESMAARTKTDEKDCVIIAHYGVNKMDLKPWVPPSPQYRALEQLLRRFDQLDKMIRQEKNRLEALGSGPADQDVSASIEKTLSYLERESEELFKKIKDHLDRHPDLKEDVKLLTSIPGIGELTALRMTAALEGGNRFVSARQFAAYLGLTPKQNQSGTFKGKSSLSKMGPCTLRKALYMPSIVACQYNPDISALYERLLKAGKTKMSALGAAMRKMAHIAFGVLKNRQTYTAFFCPILEPEVGKEANPLAVGLHS

SEQ ID NO: 139988 - protein, 314 aa, unidentified
MSATIFVGMDVSQDTVDVAVQPGTAFQVTNDESGVAEAVTQLQAVHPTLIVLEATGGLEVPLAGALAAAGLPVVVINPRQVRDFARATGQLAKTDRLDAQILARFAEAIRPPVRPVPDEQTQALAALVARRRQLIEMLTAEKNRLRVAARPIQKRLRAHILWLEKELEGLTTDLSTTMRDSPVWREKEEVLRSVPGVGPVLTTTLFANLPELGTLTRKEVAALAGVAPFPRDSGTLKGRRTIWGGRAHVRAALYMAALVATRRNPVIRAFYQRLCQAGKAKKLALTACMRKLLTILNAMVKSRTSWRESVGQPA

SEQ ID NO: 139989 - protein, 441 aa, unidentified
MAMRKKDETVVFPNAAAIDVGAASHWVAVPHERDAEAVREFGAMTDDLHALADWLLACGIDTVALESTGVYWIPVYEVLERRGLTMWLVDARQMKYVPGRKSDVQDCQWLQKLMSLGLLRAAWRPGDEVCVLRAVVRQREVLLREQASWVQRMQKALLQMNIQLVEVLTDVMGLTGQAIIRDIVAGQRDPAVLARHRNYRVKASVAEVERALTGNWRDEHLFVLAQALSMYDSLAERLLECEAKMKALLGPLERHPIALEGASKPSGKNSPRFDLRATLARWAGVDLTRINGLAVTSVLTVLSEIGPDLSRFANVKHFCSWLGLCPATKISGGKVLSARTRRSTNRVRQTLKVAAMSLSRNNSALGAFYRRLCSRMDKPRANTALAHKLARMIYFMLTRGEAYVDQGQQQYEEQQRQRSIAALRRRAANLGFAITPAAATP

SEQ ID NO: 139990 - protein, 480 aa, unidentified
MIRSVGIDLSRTGSHQVRCLDEQARPCDSFSFDSTLEGLENFEKRVFSNGDTPTIIFEPTGLAWIPMAVYLRARHPECQMVKARLQKVAALRRYLRSYTKSDRVDGLTLAKMPFIDAEQLDEAYLPPAEYHSLQRLTRQRERLMKSITIRKNRIGSIVNGYLPDLRKAFSDEWSDRARLFYRQRLNPFTVVRDGKSALETFLVSVKAKGAMTESHRVYQVCQKLAEFYEKSKPAGMIDEDFFDDLQNEIACELRLMETEEAEVERVSGRIEELYRHLHPSDHLRTIPGIGVRTAQVFLAIIGDPHRFRSQSAFANWTGVVPGARQSANSEGKGLRMTKAGPSMMKRALFQAGDIARRYDPQLAHLYYREMVQHGKTHLQAMGAVMSHLGARIMAVLREGRPYELRDSQGKLITKKEAMELIRSAYKVPEETRQARRHRKSNVGRLTGRRTREAAKAPQSGPLIPPQKTVYCGEELQSMAN

SEQ ID NO: 139991 - protein, 379 aa, unidentified
MRRVCGLDVHKDSIYMCILYENGSKIESVFGVLTPELDKLRDLLVSHHVCEVALESTSIYWIPIWNILSVDFSLKLVNPYFIKQLPGRKSDVKDAEWIATVLQKGLIRGSYVPDRMIQCLRQYERRNHELSKNIVHAEQRMDMILQRCNIRISNYVSCISCKGYQKVVNAIISGESNPKVLVTLIHKRTLNKHGRQVVEDSLNGFVSDTDRDILRQYRDERMQMEQHKSENKAKMQAICEAHYCEELELLQTLPGIKEESAANIIAEIGVDMKMFLTASAIVGWAGLKPRNDQSAGKIKSRKITHGNKYLRKILVEAAWSAARTKDSRFMKMYQRLLARGKSKQKALIAVARKLLVLIWNMLSKKEAFNPEYKRRIQAA

SEQ ID NO: 139992 - protein, 451 aa, unidentified
MSKTKPQVIDDEEHERVYERVAAVDVAKDTGMVCTRTPHPSRPGARRSTVWTVKARTGAVRALGRQLKGDGIEMVTLESTSDYWRVWFFVLEACGLAVQLVNAAQAKNLPGRPKTDKLDAMWLARLTEMGLLRASFVPPAAIRELRDYTRARTRLVRERTRCFQQLEKLLEGALVKVSSVASKLTTVSAQDMIKAMIAGQRDPRQLAALARGRMKAKHDDLVAALDGMFDDHHGELARMLLDQIAFLDDRIAQLTARAAELTAAMPAAWGVDGDGTTGPGAGISPDAPVLNAAARLAEIPGVSQDLARTIIAETGLDMSRFPTAAHLVSWAGLCPSARQSGPRTRPGKKGQGNAWLRGALGQAATGAARTATFLGERHARIARRRGPAKAQVAIARSILVIIWHLLADPAARYTDLGYGYYQARTDVDRKLRNHIRQIQALGFTVALTKDA

SEQ ID NO: 139993 - protein, 322 aa, unidentified
MERRGFVGIDVSSGRLDVAFRPGTELFQVSNEPRGIARLVRMLERRQPELVVLEASGGYEMAVLERLLAKEVPVALLNPRQVRQFARASGRMAKTDAIDAEVLAHFAEVMRPRPRRWADLETRQLRALVNRRHQLVQMVTAESNRRRLALAVVRDGFGATLRCLKLQITAINKQLAALIRQIPTLRQKAELLRSVPGVGEVATATLLARLPELGSLDRKKIAALVGVAPFNRDSGRFNGKRAIWGGRGDVRTVLYMSTLVAVRRNPSLRDFYQRLRGAGKTPKMALTACMRKLIVTLNAIVKHETHWYCPLSLSGKASPNAT

SEQ ID NO: 139994 - protein, 411 aa, unidentified
MYYVGIDIAKSFHVVSIIDDNETKVINKPFRINNDSKGFDKLVTILDSVTLDKDNFLIGLEATGIYGENLLEFIKSKGYNVKLLNPFQTSRYREQITMKKVKNDNIDSLVIALFLKDGKYSSGYVTDDEYQSLRTLYRNRASIQSDMKEIKKRILTQTTVTFPEFESFTNPFTISGLVLLDKYPTAHHYKHSSVDRIMKLFNHIQGNNFNRDKALKLLELSRESIYSGKAKDARAIAIRSSIRLLKMYQTELSVIEDEISSLLDEKDINQQTLDELPTKDSLIYNLKTIPGVSEKTIAAVISECGDLTRFPSISKFIGYLGLFPTENSSGNSRSIGHLSKRGSSLVKHALYMSAISCLIHNKQMKQLYDTKRSQGKSKKEGLIAVSRKLATIIYSIFKYNTPYNPNRVFTN

SEQ ID NO: 139995 - protein, 344 aa, unidentified
MWIIGCDYHPSFQQIALVNQATGEYGMLRLDHKSGEAEQFYRALAGQQVRVGVEATGTLRWFERLLEELKMEMWVGDPIKIRAAAARKAKTDKKDAELLLRLLLENRFPRIWMPTAEQRDARQLVLHRHRLVQNRTRAKNQLHAIAANEGLYPKRRVWSKAGQAELMALPLPPWTSRRRQDWQELLEEFNQRIRPLDMALQQQAEERPEIQLLMTHPGVGPVTATAFVVTLGEPGRFQTSKQVAAYLGLVPQEESSGKGKQRLGHITKQGNSLMRALLTEAAHVAVKEDAQWRRKYVRLTMKKNRSIAAVAIARNLAVRLWWMWKLGLDYGRIQESRSHAEQLA

SEQ ID NO: 139996 - protein, 311 aa, unidentified
MKEPERFVGIDISKEELVVAVRPTAELQSFPNTEEGLAALVGFLQPLGAHSIVLEATGGFARAAVNAMALAALPVVVVNPRQIRDFARSVGLLAKTDAIDARIIARFAEAVRPELRPLKDLETQKLEDLNNRRRQIVEMITAEKNRLVMAPPWSQKDIRSHIAWLEKRLKRINDDIDDLIKQSPIWRQKEKILTSVLGIGPVVTTTLLCGLPELGSLSARKLSALVGVAPFNRDSGHSRGRRSCWGGRAHVRAALYMAALTASRCNPVIREFYQRLRLAGKPAKVALVACMRKLLIILNAMVKNNTCWQQA

SEQ ID NO: 139997 - protein, 367 aa, unidentified
MMAQGLTYSGCIVYVGIDGHKDTYAVTCVCDKKIVKTATVQANPAGLASSLPRWFPDATLSAVYEAGFCAFVLYRALSQAGIATIVVNPASVAVAANDKVKTDRRDSKKLAIDLADGRLRGIYVPTEAEELARLLPRTRAQIVEHRATMTRQIKAKLHQFGLIAPASRRLMSNRYLREIAAWPLPAELSVRLTFLAEQWRFATRQLIEMRRLLRAQAQVQGPIDTVYRSVPGIGEVVARTLATELGDMTRFANERALFSYTGLTPSEHSSGASVRRGPISRQGSSRIRQLLVETAWRALPRDAVLQESFDRIAATRGKKRAIVAIARRLTGRIRACFPRERPMPLGRMPRSRRLAEQTGLVQPCGPS

SEQ ID NO: 139998 - protein, 345 aa, unidentified
MQIKSIGIDLGKTTFHLIALGDRFQVVIRKKFSRSQLLEYTANLPSSLIGMEAGVGSHFLGRALREQGHEVRLIPAQFVRLFVKSNKNDYRDAEAIAEAVERENMRFVPIKTEDQLDLQALHRVRDRLVARRTSVINQMRAFLLERGISFRKGPASLRRQMPEILENADETLSPAMRRRLDFLWQEWRSLQVQIESLNTELEQIASNDPSCVRLQQIPGVGPLISTAVVSAIGNGAAFKKGREFAAWLGLVPRQWSTGGKAKLMGISKRGNPYLRKMFIHGARAAVLRVKREGSSLGKWMSGLETRTARNVVMVATANKLARISWAVLASGNDYQPLHRAALLSN

SEQ ID NO: 139999 - protein, 392 aa, unidentified
MYIVGIDIGKNHHEASIVSPEGKQIGRSLRFATTHKGADSLMSFIFKNIGNSPCVFGMEATGHYWYPIYSFLKAKGYTIYVINPIQSDSLRKMYIRQTKNDSIDSFLIAEVIRFGQFGTTSMADKNILAMRQLCRYRDSVISSRTEIKLRIGTIMEQIFPEYEKQFSSLWVSTSMGILEKYLTPENIENAPIDELFEIIKDKSHNRLTRAKAISIKEAAADTFGIKIAQDAFSFQLKQLIDRMNFLDKQIEALDCQILEYYEKFDCYLHTIPGIGMIAAATILAEIGDINRFKSSSALVAFAGIDPTVRQSGEFSSTHNHMSKRGSPYLRHAIFLAATTCSFHNSPLNAYYKKKRDQGKHHLTATGAVARKLTSVIYAVLRDSKPYEPKSFC

SEQ ID NO: 140000 - protein, 391 aa, unidentified
MDSPPPRHHSATVAFEEANGSEGETMKKHSSKHDSLSSTDVELCTTICVDLAKQVFQLAGEDATGRVIYEDRIKSRQAFHDFLIRLPTTVAVLMECGPGAQAWARLLQTKGNPVRILPAQRVAEHRSGAKNDRNDAHAILRAGRDTSIASVPIKSTTALAIQALHRIRRGNIKRHTALGNQIRGLLLEHGVSMPQGDAAISQQVPRALEDASLPLPDLLRELLDELLTDWLSLGERIAALSGRLEVTAQQDKVAQRLITIRGVGPIIATAIVAKQTEPSRFASGRMYSAFFGIVPDQHSSGNKIRLGRMSKRGDGYIRSLIQGAHAVLSQLRPDSDQPDDRRLLRWLSRLGRKEAAIRLANRNLRIIWALLQSNQVYQRKPNNNPEAAMSL

SEQ ID NO: 140001 - protein, 423 aa, unidentified
MAYRIAGIDVHKKKLAVVVADVEVDDAYQFERRWFASNPEQLQRLAEWLLEQQVEEVVMESTAQYWKPLWSALERYWKPGCQNREGAGKMSGTLHLAQALSNRGRRGRKKDFPDAERLVKRLISQELTLSFVPDTEQRLWRTLTRTRYQRTRDKVRLQNQLEALLEEARIKLSSLVSDLLGVSARRMLHGLAEGETDPASLAALAHQGLRATPAELRDALGACTELNPVYRRLVRLALDDLQLIEQQIGKLDQETASLLQQHQDAVQRLAEVPGLGVDSAQQIIAEVGAKAATFPSAKNLVSWVGACPGDDETAGVNRSKRSPKGNRQMRRILNQAANAAVKHKGSIFEIVYRRFVPRLGHNKTIGTISHRLCQLIWIILHNGVRYEERGPSVCEKAKRARTSRMIRTLRNLGYRVEPAAVPA

SEQ ID NO: 140002 - protein, 340 aa, unidentified
MAGLYVGSDLHSNNNMIGLIDEQGKRVFRRRIPNDREIVRDVLSPYKGDIVGIAVESTYNWYWLVDTWMDEGYKVHLANPSAIQQYNGLKHADDKHDAFWLAEMLRLGILPEGYIYPKQERPIRDLLRKRGHLMRLRTSLVVSLQNILSRNLGRKMKVNDVKGLQQDRVTPLLEDSEDLAMAGRISKETIDFLTHQIDQIERKIEKTVRLKEAYRFLQTLPGVGKILALTIMLETGPISRFETVGDYVSYCRKVPSQWMSNGKWKGSGNTKNGNRYLAWAYAEASDFARRYYPEPRAYYQRKRQETNAVVAHSALSHKLARAAYYVMRDQVPFDSEKLFR

SEQ ID NO: 140003 - protein, 319 aa, unidentified
MTKTPIAVLGIDLGKNSCSLAGLDAAGAVVMRRKMTREGVMAFTAALPACVVAMEACCGAHFLGRVIADQGHTVRLMSPEYVQPYVKAQKTDDRDAEAIAEAATRPTMRFVTLKSEAQLDLQSLHRARERLVLARTALINQLPAVLLERGITLAKGRAVLIMRRLEEVGSEGLAVSDRTRRLVEDLLEECDGLSRRIKAYDDELAAVVRSDEQARRLSSIPGVGVINATALLAAVGDGSAFAKARDLASWLGLTPRQHSTGGRTRMLGISKRGNRYLRKQLIHGARAALPHLAAKPNAMGAWLQQLLARSHPNVVVVVT

SEQ ID NO: 140004 - protein, 346 aa, unidentified
MKILALDLGKYKTVGCDYERESGAHRFQARITTPAALEELVKEVKPDRVVIEVCNIAGWVSDLLRGMGVEVQVANTSDDAWRWRKVKKKNDRSDALKLARLSAVNQLGEVHIPMIDVRQWRALIAFRQQLVKRRGKVKNHIRDPLISEGQMLPRGARCWTQIGVAHLETLARPLSEVGINELWRGQLDIELRQLREVQQEIDVAEEKLNAIATADPRVALLRTIPGVGPRLSEAIVALLDRPERFRKAREVSAYIGMVPKQFDSGESERAGRITRHGSRVVRSLLVEVAWAGLRYNPWVRETYQRISGGKKSRKKIAIVAVGRRLLVRCWAMLRDGTSWRPPQAQT

SEQ ID NO: 140005 - protein, 356 aa, unidentified
MGKDITTWGGLTIGLDLGDLHTVGCVLTGSGAVEETFRVATTMSALGRTMAGFKPCRVVLEVGTHSPWISRLVEQAGHEVIIANPRRVRLIAENDSKTDEVDAELLARLGRVDPGLLKPIVHRGEKAQHDRILLLARDGLVRSRTQLINQVRGFAKSLGHRMPSSSTEAFPRRVREQFSEDLFPGQSVMLEMIDRLTQEIRRMNQKAEKLCKDHYPETGALRQVKGVGALTALGFVLTLEDPSRFAKSRTVGAYLGLRPRLRQSGEQQPQLRITKAGDVLLRRYMVGAAQYILGPFGPDTELRRFGLKLASRGGKAAKKRAVIAVARKLSVLLHRLWVTGEEYQEIGYGQSAQEAA

SEQ ID NO: 140006 - protein, 358 aa, unidentified
MKAQVRKIDFTDQNIYAGIDVHLKSWKVTVMAEDIVYKTFSQPPNPEILFKYLKEHFPGGNYHTAYEAGYCGYWIHDKLVSLEVKSIVVNPADIPTTDKERVQKEDKRDSRKIARSLSSGNLIPIYVPSIKTQRDRSLLRTRAMLVKDLARYKNRIKSFLYFYGISIDESFKSPQQHWSNRFMSWLESIDMGEEGGEEALNVLISECKNLRTSILEITKQVRRLSQTEVYRNRVSLLRSIPGIGLLTAMIILTELETVSRFRNIDKMCGYIGLVPSTKSSGEKEKAGDITPRGHSVLRTAIIESSWLARRKDPSLMRSYLSFITRMNENKAIVKIAKKLLSRIRFVLANNKPYICSVV

SEQ ID NO: 140007 - protein, 351 aa, unidentified
MMIIGVDYHPSFQQIAFLIEETGEYGEQQLNHSDAEAERFYRELQQRGIRVRVGMEATGFSRWFERLLAELGFELWIGDPAEIKAKRVKKRKTDREDARLLLKLMQENRFPRIWVPSPENRDLRQLLWHRHRLVQMRTRIMNQLQALAMNEGKRWKSKLWNEQGRAQLEKLPLGFWASRRRQELLQLLDRMNPTIEELTAAAVQEVKKRPEALRLMTHPGVGPLTALAYVLIIGTPTRFHCGKQIGTYVGLIPSEDSSGGKQRLGHISRQGSSLLRFLLVEAAQAAIRISPEWRRRYIHLAMRRHKSIAKVALGRRLAVRLYWMWRNGYGYSPSLEFGSYAGQPGTGHGVK

SEQ ID NO: 140008 - protein, 389 aa, unidentified
MSGEADFTVKAEPDDFKNTLFLAMELSRATWLVATFAPRLGDKIGVHAIPGGDTRRLLELIGRLQAKLRSKGACRLRTVCCYEAGYDGFWLHRVLVNHGIENHVLDPASLPIDRRAKHIKTDNIDAKRLLRAIVGLVQGDPQSCRVVRAPTPEEEDARRLHRERQRLVRERTGHSNRIKALLIAHGIRALRITDAKWCERLDRMRTGDGRQIPVRLKIEIEREWKRLKVVAEQVREVEAERDKLVKGSEPTGDICTDKMRRLVKLHGIGAEFATVLTREVFYRPFQNRRQVASYVGLTPAPYDSGDTKHDQGINKAGNTRARVIAVQMAWLWLRYQSKSELSLWYYRRVGDLKGRVRRIMIIALARKLVIALWRYVETGKVPTGAIVTA

SEQ ID NO: 140009 - protein, 402 aa, unidentified
MNAVGIDVSKSKSVVAIMRPFGEIVSTPFEIKHTASDIHSLIELINSVEGESRIVMEHTGRYYEVLAHQLLEANLFVSAINPKLIKDFDNDSLRKVKSDKADAVKIARYALDKWQNLKQYNVMDELRNQLKTMNRQFGFYMKHKTAMKNNLIGILDQTYPGVNTYFDSPARSDGSQKWVDFASTYWHVDCVCKMSKNAFINHYQNWCKRKKYNFSQSKAEEIYGKAKELVPVLPKDDITKLIIKQAVDQLNSVSTTVESLRTLMNETASKLPEYPVVMAMKGVGTSLGPQLMAEIGDVSRFTHKGVITAFAGVDPGVNESGSYEQKSVPTSKRGSSVLRKTLFQVMDVLIKTHPQDNPVYQFIDKKRAPGKPYYVYMTAGANKFLRIYYGRVKEYLSSLPES

SEQ ID NO: 140010 - protein, 434 aa, unidentified
MNTTHPYDLIIGLDRSDKKADVCLLDTRTGQRRAVIIATTPEALCEWLAALRQQHPQARVGLCLEQPAVHLVPFLEAYDWITLHPINPITLQKYREAFVTSRAKDDTKDADFLADLLLNHHAKLPVWTPEDPATRAVQQLVFHRRAIVDERTGLTNRLIALLKQYFPQAQELCGDDLWRPLATRFLLKWPCLQAVQKAKPASLKTFYYLNGSRSAKRLEERLALVQKAVPVTDQTALIESFALRVQLICRQLQLVQQAVTGFDRQIAQAYATHPDHELFASFPGAGAVLGTRLLASLGSQRERFPDAANQLQRYTGIAPVTKRSGGSCYIHRRYLCPKFHRQSFHEYAKESILWCRWAAAYYLQQRTKGNRHHTAVRALAYKWQRVIWRCWQNHTPYDDAVYEATLRKHGSPVVALFNKVDLGKSPLKHPVNNS

SEQ ID NO: 140011 - protein, 400 aa, unidentified
MNELERCRRAKGTIWIGMDVHKKSCTMTAIDDAGREISCWKMPTTPAQLNAFVRGVPAGAKIALEASTTGKAVAHWLRNARLDAHMASPRELAAIRASGVVTDERASYHIAHLFRNNYFPESYIPTVETDRIRDLTRFRIGLGRDVARIKNQVHALVSKNLLDSEISQSDMFGKAGLQKLVSLPFPDQDRSILKSHLEHLKLLIRQEEQYTDELARIGKGRPDVELAMSIPGIDFYGAIGMLGEIGDVHRFATRRKLYSYSGLVPGADNSGEQVSKHRRCKRGNAVLKFFLCNAVQGAVRASKPNSIAKFYHRKAKQIGHAKAQVAAARKLAGILWTILVSGEPYREENPALTQRKKARMELRAKAPQQPVTTEQLNELANDITAKEQVLKRLLPEDEEE

SEQ ID NO: 140012 - protein, 451 aa, unidentified
MAQKRNKVPSLPVIEPNAAGIDVGATEIFVAVPADRDPEPVRCFPTFTVDLERLADWLQQCQIRTVAMESTGVYWIPLFQILEKRKIDVRLVNAHHVKNVPGRKTDVADCQWIQHLHSVGLLRGSFRPDDEICAIRSLWRHRDNLIQLATLHLQHMQKALDQMNLQIHHVISDLDGTTGLAIMDAILAGERDPHQLARLRHPRVRASEETIMKSLVGDYREEHLFTLRQSLKAYRYYQELIQEVDLQVKQMMQRLPSKVADGEKPPKGDKPRPRKTPWRNEPPQLRNDLYRAFGVDLTEVPGINVLTAQMLLTEVGPNLARFPTAAAFCSWLRLCPDPKISGGQVLSSRTRPTKNRAALALRMAAQALHRSNTFLGDYFRRMKARMGVPKAMTATAHKLARIVYHMVTTQQEYDATIFQQHEQRRRQQKSARLRAQARELGFQLVPITSVP

SEQ ID NO: 140013 - protein, 321 aa, unidentified
MQSQNTVVYAGVDVAKATLQLHVQGQQREFNNTPKGLLQLVAQLQTVPSVQVVCEATGGYERAMVKVLHQEQIPVSVTNPARVRAAAQAQGQRAKTDRIDARGLTDYGQRYQPKATPPVSATQEQLVNLTQWLKQLIHGRALAKTQAEHHQDPFVRRQHAKLMTHLESQIEAVEKQIEALIEQDAALQQRVTCLDKIQGVGPRTAWMVLAHMPELGQLNRQEVAALAGLAPWTRESGTMKGMRCIGGGRPEVRLALYMAALSAARCNPVLRILYKRLRAKGKLPKVALTAVMRRLLTYMNHCIKALPSETAGAQTEELKAA

SEQ ID NO: 140014 - protein, 412 aa, unidentified
MKHKKMCYTYVGIDSHKDTHTAVFLDCFYEKLGEIVFDNRPSKFGKFLSDAERLKMDSTDFLFGLEDTAVYGRSLVKFFSEQEHPVKHVNAFLVAKERKNLSITQKNDSIDAECAARVLLNRFGTLPDAVPRDRFWILRTLVTRRACVVRSNTGLKYHLHGLLTAHYPNYRDYFRFIDGQTALAFFMRYPSPTTLNGVTVEDLTDFLFEASDGKFGEPKAQQILGSLESTAVELQEIRDLSVQSAIRQIQFNMQELKQLEKTLEQVLTGFNCTLTSMNGLDVVSASQMLSCIGDIGRFPTPAKLAQYAGIAPVTYASGKKDLQYANKRGNRELNSVFFTLAVRVTMTITPKNKVANPFFYEYYHRKLSEGKTKRQALKCVQRRLVNIVWTMLTNNEDYVNPPMYYLSEKPKA

SEQ ID NO: 140015 - protein, 410 aa, unidentified
MEVVNECCCGLDVHKQTVVACVIRPGNGRQPHKEVRTFGTMTADLLDLADWLSAEHVTHVAMESTGVYWKPYWNLLEGQVELLLVNAHHVKQVPGRKTDVKDCEWLADLLRHGLLRPSFVPDRPQRELRELTRYRTSLIRERAAEINRVQKTLEGANIKLGDVASNVLGVSGRRILSSLVAGTADPSILADFARGKLRSKLPQLERALLGQFGSHQRFLLAQQLAHLDGLDELIERLSTEVEERLRPVEDALDRLDTISGVGRRTAEILVAEIGLDMTRFPTAAHLASWAGMCPGNNESAGKRKSGKTRKGDAWLRAALIEAAHASSRARNSYLAAQYHRLITRRGKKKAVVAVGHTILTIAYHLLRDGAEYADLGPHHFDERDEQHVTRRLVSRLEALGYSVKLDRSAA

SEQ ID NO: 140016 - protein, 346 aa, unidentified
MAAFAALDVSKKSTSIHIVDEKGVCLWRGKTLTNPAALAEALSPFSDDLTLVGLETGSWTTWLWHELTERGFPMVCMDARQAHAALSVTINKTDANDAQGLAHLLRTGLFRKVRVKGWEDVQKRTLLRARSTMLRCVLDLANAIRGAWRTFGISLPAGTGNGGEKTFERRVVTCLTARADLAIIIGPLLEAWRAGRTQVARHERAIRAIVRSDPRCQLMMTVPGVGYLTAVGFVGAGGDPETFRSGRTAAAWIGLTPRRYQSGTINQQGRISRQGDKLLRAYLYEAAAHILTRSSKDSALRRWGLKLRDRIGFKRANVAVARKLAVVLHAMWRSGRPFEAEGCATG

SEQ ID NO: 140017 - protein, 400 aa, unidentified
MNAVGIDVSKGKSMVAVMKPFGEIVYSPFEVQHNEAALKDLAKKLLALKGETRVVIEYTGNYYTPIANILSESGIYVSVINAILIHDYKNNSLRRVKTDKKDAVKLANYAIDSWLELPRYHIEDDARMLLKNYYHQYEQYSKLHTMISNNLISLLDITYPGVNKLFKSTPREDGHEKWVDFVHEFYHSSKVISYTRSVFHKRYNSWCKKYRYRYSESKADEIYNHAKQCVSTLPNNEHSKKLIQTCVTELQLMNNTLFTIRTEMHNIAASLPEYPVVMSMYGVGTVLGPQLIAEIGNVRRFHSKKALIAYAGIDAPPYQSGDVNVKSRSMTKRGSSSLRHTLFLIMGIYLKNSPQNEPIYQYMIRKKAEGKHFKVYIMASANKFLRCYYAIVNNYLKSID

SEQ ID NO: 140018 - protein, 325 aa, unidentified
MEIAIDMGKRRSYVVMEDEGRIVKEGYVETSKESFVQFFGNVSDPKIIVEAGSTLNRVANMLEGYNITVAHPARIKLIAQSVNKTDKIDAHTIMDLYKKDYLPKSYLPPREVRDWRDLCRERSFLVGQRTAVMNKIRYQSYCLGIEFKKFTKKTIRMLKENPKLKLLVDQLESTTNVINEYKSMIENAAETNAYARLIYTIPGVGKVSALGIASEIGDVNRFRSEKNIFAYAGVVPRLYQSGSREWKGHIIKGDTFLKWMLVECVGIHTTHAKDSPITAAYERIGERSGKMKAKIAAARHLLRAIYYMLKRNQNFDSYLRGRRTY

SEQ ID NO: 140019 - protein, 358 aa, unidentified
MSHYRVGCDAHRRYSQFAVLDQDGQLCEQTRVDHERGSIQGFLENLPEGTPVALETVGNWYWIADEIEAAGCLPLLTHAAKAKILMGNVNKTDKLDAKGLARLLHLDSLPTVWLPPGEIRDERELHRTRMALSKLRTALKNRIHATLAKYGITTSDHSDIFTGTGRGWLQTSLSRLPPETGRCVAQELEALDGLQLQITQLEERIRERIALTPSILLLKSLPGVGDILGIVIDREIGSIDRFDTAGQFTSYAGLVPTVHASGGKTRFGHMRKPSSQYLKWAFIEAANVVVRHRHHPAWKTKYVCQVYDQVCQRKGHAVAVGAVARHLAEGAFWILKRQQAYRPPANRQASPKQVRGRA

SEQ ID NO: 140020 - protein, 425 aa, unidentified
MSYRIAAVDVHKKMLAVVVTDVAGEGDYQFERRKFGATPGELHLLAQWLVQQEVEEVVMESTAQYWKPVWGALERYWKPARQKREGASKMCGTLHLCQAKSNHGPRGRKNDFADGERMIKRLVAQELVLSFVPDAEQRLWRTVTRRKHQLTRAKVGFKNQLESLLEQAHIKLSSLVSDLLGLSARRMLKAMAEGETDPAALAALADHRLRATSEQLRDALGACAQLNPVYRRLLKMALEELQLIETHIEQLEREAMDLLKEHQDVVQRVAEVPGFGIDSALQMIAEVGPKAAAFRSEKALSSWVGVCPGNEESAGESKSTRSPKGNRQMRRLLNQAAQSAVKVKGSILEVTFHRLLPRLGYKQAIWAIAHRLCRLLWLILHNGVRYEERGPAVSAKSKRTRAARMIKELQKLGYRVEGGPAGKQA

SEQ ID NO: 140021 - protein, 340 aa, unidentified
MNEVITIGVDLAKNVFQVHGVDAEGAVVVRRRLRRRQVLAFFKKLPPCLVGMEACATAHYWAREIAALGHEVKLMPPRYVKPYVKRNKNDAADAEAICEAVTRPTMRFVAVKSAEQQSVLMGHRTRELLVRQRTMLVNAIRAHMAEFGIVVRTGLPQVKELLAVISDEEDERIPPLARTCLAGFARQLLSLEREIVSAERRIHAWHRTNEESRGLETIPGIGPITASALASSIANPSIFKSGRSMAAWIGLVPRQNSTGGKERMGRISKQGDHYLRWLLVAGAMTVIRHAKRRGTTDRWLATIIADKPTKVAAVALANKNARIAWALLRHGGLYRRPATA

SEQ ID NO: 140022 - protein, 391 aa, unidentified
MSSLAVRTPEPTIATPTPARSIIYLGMDVHKDSITIAVLPAEAKAPTRLERLPNDLPKLKKWIARVARDGEIRACYEASGAGYVLHRALREWGYACEVIAPSLTPKRPGVQRKHDKRDATDLARYYRAGELVVVRIPSEAEERVRDVVRCRETFQREILKSRHYILKFLARRGFVYREGTNWCTPHLKWLQHLTTDGSPLAPDDRLVFREYHALLEYKLQRREELDRKIEQLALLPSLAPMVQTLQCFRGISLHSAMVLATEIGDWRRFEHPRQLACYLGLVPKEDSSGDRIRLGAITKAGNTHCRHVLVQASWSYRHRPQTSVDLKRRQAGQPPAVITHAMKAQHRLHARFNHLSYRKRSQIAVVAVARELVGFLWAVMQDVVIPEPQSV

SEQ ID NO: 140023 - protein, 405 aa, unidentified
MEIIIEKGCGLDVHKGTVVACIMGTGIKKEIRTYTTVTNDLLRLKEWLQEAGITHVAMESTGVYWKPVFNILEDRFEVILVNARHVKNVPGRKTDVQDSEWLCRLLRSGLVRGSFIPPRDIRELRDLTRHKRKLIQAMTAEKQRVEKVLEDANIKLSSIASDTFGASGKRIIEELIKGKLRAEEMAELSKGRLRQKREDLKEALVGQVREHHRFMIKVSLKHIRAMEKILSDIERKIQDKIGRHYKEEYALLQTIPGVKGEASTLIAEMGVDRERFPSEEHLSSWAGMSPGNNESGGKKKPGSTTYGNKCLKTMLTEFAWVASKTKDTYLRSKYHSLVGRRGKKKALVALGHKILIMCYHILKYRCAYKELGVDYLDKRRKDKIARSYIKRLHHLGYEVILKEAA

SEQ ID NO: 140024 - protein, 455 aa, unidentified
MVKQKRQMKIKVKVNALEQINPNAAGIDIGAEEIYVAVPPDRDTESVRSFPTFTADLRRLVEWLKACRIETVAMEATGVYWIPLYELLEEEGFEVCLVNARHLKNVSGRKTDVLDCQWIQQLHTYGLLNPSFRPPEQIVAIRCLVRHREMLVQYRTAHIQHMQKALTLMNVRLTDVLSDITGVTGLKIIRSILGGEHNPLCLAALREPGCKKSAAEIAKSLEGHYKREHLFALKQALELYEFYDQKLMACDAELEAMYQEFDPPDNPGTPPPTPRTQKRRKNQAHFDLAPALFRLTGVDLTRIDGVDELTVQKVLAEIGTDMSKWPTVKHFTSWLHLCPNNKITGGKVFQTGVQPTKNRASAALRVAAASLKTSDSALGAYFRRMCARLGTPAAITATAHKLARIIYFMLKYRKPFHDLGANYYEQQFRARVLRNLTRRAAVLGFRLEPAAQSVS

SEQ ID NO: 140025 - protein, 398 aa, unidentified
MITADIDIFLGLDVGKTDHWACAVTKDGTKIWNKTLPNDEAKLVSVYQNLSAKGTVLVVVDQPATIGALAVAVAQHLGIPVAYLPGLSMRRIADMYPGTAKTDEKDAFIIADAARTMTHTLRSIQVSDEDEATLGMLTGFDLDLARQITQTSNRTRGLFTQIHPPLERILGPWLEHDAVLEALAAWPTPAQLKHAGKVRIDAKLKKYSARRHTAWASTIIDALEEQSVIVVGTEAAGLAIPHLARQLVSLHAQHVDVATHLETMVEAHTLYPVLTSMPGVAVRTAAIIIAETSGKTFTSAAALSSYTGLAPTTRQSGTSIKSKRVSHSGNKRLKRALFLSAFASIRFDPTSRNYYDRKRAQGKRHNQALIALAHRRLTVLFAMLRDGSLYDVPELKIA

SEQ ID NO: 140026 - protein, 361 aa, unidentified
MSESMALVGLDVHKSRTVAAVLDRVTGELRMERLRGAPERVVPAFLEELDRPVEAVYEAGPAGFVLAREAEQRGLDIRVVAPGSIPRAPGDRVKTDRRDAKRLARLFAAGELRFAFVPSEADERFRDLVRCVDDVRRDLMRARHRLSKFLLRRGVRWQGKTWTQPHERWLCTLHFEDPLSQAVFVDYLAAVQGLAQRRKTLGSVLEGAVPNSSHAETIKRLRCFRAIDTLTAAGLCAEVGDFTRFAKPALLSGFLGIVPSEYTSDEKRTQGQITKAGPTNARRLLVEAAHNYRHRPAIGENLKARQSGQDPRVAQIAWRCQQRLHQRWMHLGGKRGKPTGKVAIAVARELAAFCWEAATLN

SEQ ID NO: 140027 - protein, 388 aa, unidentified
MPRQRKPNDLSRSLIALDMDTTLIAVVELSLSSWLVAGIVPGIERQPLKKLKTDENALLALLNRWRDEAVRSGHKISRIAVAFEAGRDGFWLARWLRARGIEAHVIHASSVAVSREHRRAKTDRLDTELLKRAFVGWLRGERDHCKTAAIPTLGEEDAKRPSRERESLVGEQSRLVNRMKATLIRLGIRGFNPKLRHAEQRLGTLRTPEGEPIPANTLAELKRDMQRRRFICDQIRSIERERLERLERTPDTEPHAMVRLLARVTGIGIETADLLVHEVLLRNMRDRRAVARYGGLTGSPDRSGGTNREKGMARSGNARVRRGMIQLAWRFLLFQKDSALAQWYRRRTEHSPKARKTMIVALARKLLIALWRLAREGVIPEGVAMRPA

SEQ ID NO: 140028 - protein, 358 aa, unidentified
MPTLSNKIDFNGQHVYVGFDVHLKSWKVTIMTEKLLHKTFCQPPKPEILHQYLVRNFPGGTYHSAYEAGFCGYWIHNKLKELGIDSMVVNPADIPTTGKEKIQKDDNRDSNKIARSLRNGDLIPIHVPASSTLEDRALLRTRTNLVQDLIRCKNRIKSFLYLRGIEFPESFRSPGTHWSNRFMLWLEKIELTEPSSKATLNVHLSQSRYLRTAILETTRTIRELSENERYKSRQELLRTIPGIGYITAMTLLTELETINRFSNFDRLCGFVGLVPSTNSSGESESIGDLTPRGHSVLRSVLIESAWVAARIDPALNKSYHDYCRRMEPNKAIIRIARKLLSRIMYVLKNNKPYVCSIV

SEQ ID NO: 140029 - protein, 349 aa, unidentified
MRFYTSQHQFYCGIDLHARSMFLCIMDRTGEVLLHRNYRANPDALLRAITPYREDIVVAVECIFTWYWIADLCSRESIAFVLGHALYMKAIHGGKTKNDKIDSQKIAALLRSGMLPMAYVYPQGMRSTRDLLRRRLYLARQHAELQTHIQNTNTQYNLPYFEKRIDRRSNRTDIGTRFTDPVVRTSVEVDVALMDAIHEQILTIERQINAQVPEHDPVAVHLLRSIPGVGKTLALVILYEIHDIKRFPAVGNFISYARLVKCTHESGGKRKTSPNNKIGNVHLKWAFSEAACLFLRRNERGKLYHQRLVSKYGKAKALSIIAQKLGRTVYTMLKRRTPYDSRRFFETLK

SEQ ID NO: 140030 - protein, 353 aa, unidentified
MQKPIEGQVVVGVDTHKEIHVAAAVDWRGTLVDEKSFATTRQGYRQIESWARSLGDVLRVGVECSGSYGSGLTRHLAKNGFTVLEVTFPDKTVRRKRGKDDFIDAEMAAEAAFTGTRTVTPKARDGMVESLRMLQKTRSTAVAARRSALQMIRAIIISAPEELRDQLRGMTRMQLIRHLVATRPDSTDFKSPTGSARIALKRLAKRYVDLDDEIDELDDMIKALLEECAPLLVRCSCVGAQSATQLMVTVGDNPERLKSEAAFAMLCGVAPVPVSSGMTYRHRLNRGGDRQANSAIHIIAIGRLRTDQRTQDYVAKKLAEGHTKMEALRCLKRYIAREMYYVIKRQYELVNCS

SEQ ID NO: 140031 - protein, 340 aa, unidentified
MINNFLGIDVSKEHFDVFLSFISKKGKRETKKRKFKNDDTGFQGMMNFLQKHNVEEVKACMEATGCYSEALAEFLHNAGHFVSVVNPACIRFYAKSKLARQKNDQTDAEIIADYCQRQEPTRWTPPSSEKKKLKHLYRCSNALKDELTLVNNHLEKKERLPEEVVNVWENLAMNIEQSIEIIKNSIRELLKQHKELLKDFQLLLTIPGIGEESAIAILAEVPDIKAFINARQLAAYAGTIPRNVTSGSSVHAKPRLSKSGSRTLCKALFFPAITAKNYNPIVITFCQRLKEKGKHNMAIVGAAMRKLLHIIFGVLSSRKAFDPDHIKNYRARKLAEGLVL

SEQ ID NO: 140032 - protein, 315 aa, unidentified
MPSNVAQTVGVDISKATLDVYLHPQAIARQFPNTMAGVVDLLSWLGQRPIHRVIFEPTGAYHHRLERQLGNAGVPMVKVNPLQARRFAEAIGQRAKTDAVDAAMLARFGALDALQVRPMVSQTLSDMKELLVPRRGLVKDRVAASNRNHTHRAPLLKRLADQRLRQVERQIAAIDAALRALCQADVELKARLEILVSIPAIGEATALAMLIEMPELGAMDNKCAASLAGLAPVARDSGQHSGKRFIRAGRAHLRQALYMPALVAIRFNADMKAKYQALVAAGKPPKVAITAVMRKLLILANALLREHRNWTPKPA

SEQ ID NO: 140033 - protein, 342 aa, unidentified
MDHFAGLDVSVKESSVCIVDETGKIVREVKVASEPEALLSVLKNPAYRFKRIGLEAGPLSQWLFGALAEAELPVVCVETRHMQAVLKAQINKTDRNDARGIAQMMRVGLYRPVHVKTLRSQKLRMLLTHRKLLQSKAIAIENDLRGTLRNFGLKVGIVGTAKFEARIKELIENLPDLAVLIEPLLVVRRALREQFVILHRRLLALVRDDEVCWRLMTTPGVGPVVALTYRATVDVPARFRKSKAVGAVFGLTCSKYQSGEIERSGRISRCGDEMMRVMLYEAAQSMLRSKKWSWLKAWAMQIARRRGMKKAIVALARRLAVILHRIWVDGTKFRWTRETAVA

SEQ ID NO: 140034 - protein, 382 aa, unidentified
MILDIEVTVFPPEGGKTVGGRELVRPLIPLVEIVWSKMPRPHLTCKPVQPLGAASASPHLQGRENTVKNTVEHSFVGIDVSKDNLDVHVHPSGESFSCRNKPEAFKSLAKCLTKFKPVAIVFEATGGYEVTAAYYLCEAGFPVSIVNPRNTRNFARSMGLLAKTDRIDAEVIARFAKAIRPKLRKLPEKEEQLLKELVARRSQLLAMRTAENNRLHQARAKDVQRSIKQVIKLLNKQIGNVDEEMKRRIKETPIWQVKDDLLQSAPGIGPATATCLIASLPELGKLNRREIASLIGVAPINRDSGLFRGRRMTGGGRTHVRTKLFMATLVACRWNPVICQYYQHLLAKGKEKMKAIVACMRKLIVILNTMLKNNTRWNENLA

SEQ ID NO: 140035 - protein, 348 aa, unidentified
MDHIIRIGMDTSKHVFQLHGVNAAEEPVLRRKLRRNDMVVFFERLAPTIIAIEAAGASHHWARLLRSFGHEVKLIAPQLVKPYVKRGKNDAADAEALCEAMSRPTMRFVPVKTAERQAALMLLGLRDRLVRNRTQLANAIRGYAAEFGLAAAKGIAHLAPLLARIQSDESLPGLARELFAAHAKEYAQLQAQIDEVEGKLMAWHKTNPGSQRLAQIPGIGPIGAAMLIMKTPAPETFRSGRQFAAWIGLTPKDHSTAGKVRLGVITRAGDEGLRSALVVGATAVIRHLRNGKGRSMLSAWVEQLLKRKPPKLAAVALANKLARIAWKLMVTGETYAAKPRPVASAGIA

SEQ ID NO: 140036 - protein, 423 aa, unidentified
MTNSEIEFAAYIGMDWADQQHDICLQAADSQQLESCRIEQKPEVLITWVAQLRQRFQGRPVAIALEQSRGALIYALIHYDFLVLYPVHPNTLASYREAFTPSGAKDDPDDAQLLLELVRLHRDKLRPWKADDSLTRTISLLVEHRRKLINDRTRLTNRLRALLKQYFPQALTWAGKLGHLLAVDFLTRWPDLSKVQQAETSDVRQFYREHGCRMGEKLEERLIEINTAQSLTTDQAVITSSVSMTQAIVAQLRELFTGTAQFDQQIQNLYAQHPDAEIFGSLPGAGKALAPRLLAAFGADRERYADACDVQRYSGTAPVTKRSGKTKFVQRRRACPKFVRQSFHEFAGQSIHWSRWARAYYDQQRLRGNEHHEAIRALAYKWIRIIYRCWQQRVPYNEATYIKALELRGSPLVKLIAPEGAQS

SEQ ID NO: 140037 - protein, 405 aa, unidentified
MGESRFAGIDWASEEHAACVVDPDGRIVEGRRYRHDERGLCGLCERLHDLGVVLVAVERPDGVLIERLLDADFAVIAVHPNQLAAMRPRFSAAGAKNDNFDAFMLAELARTDRHRFRILVPDSDQTKALRALTRAREDLVEARVALANELRAQLESFWPGAARLFAEIDSPIALAFLKRYPSPADARGLGEQRLQRFLARHSYCGRRPVRELLGRLKGAADGRAGALESDARRQVVLALVSALEPLAARIAELTSEIRAALAEHPDGATFRSLFRDPKTAVCPATMLAEIGDCRDRYPTIRALAADGGQAPVTIQSGKAGHARFRWACDHRLRTAIATMADASRHHNPWAADIYDRARARGCSHQHAIRILGRAWCGVIWRIWHDHTTYDPHQHTALQRLIAPGG

SEQ ID NO: 140038 - protein, 344 aa, unidentified
MNSTTIAIDVAKSVFEVAISEQPGQVRDRQRLSRERFRRFLEERPAATVLMEACGSAHHWARHAQAHGHRAVLVPPHVVRPYVLRNKTDRTDAKGLLEAFRNEDVHPVPVKSETQQALAALHRLRSTWLATRTARINTVRGVLREFGLIIPTGAHHVVPQARTLLEEADSGVPGLLRPALAVALEEIREIEARIRAVEQQLEAAAAQTLSVGQLRTIPGIGLLTATALVAAVGDLQRFPSGRHFVSYLGLTPREDSTGPRRRLGAISKRGDTYLRMLLIHGARSVLCHAKTTTAPPPDRLRAWALQVERLRGHNKAAVALANKLARIVWAVWRHGTDYMGTPAL

SEQ ID NO: 140039 - protein, 318 aa, unidentified
MSSINKTIIGIDVSKDKLDLSGPAGHEVIANTSKAIEGYFKQALKGGPIRQVVLESTGGYERCCVRVLDKLGIPFHVAHPNAVYHFAKSKRLLAKSDKIDAGVLRLFGEECELAPTELKSREQEALERLVRRQQQLVETLTGEKLRLSGPCVEGESRRSMKRIIKCLAAEIKRIDQKLEEGIAGCEVMQEKIKRLETFKGMGHKTAVTMVLSLPELGQTGRSNIASLLGLAPMNKDSGKRKGYRAIQGGRFHARKALYMPALSATRHNPAMKAFYERLRAQGKTFKVAIVAVMRKMVITLNAMLRDGNDWQAVGFVQR

SEQ ID NO: 140040 - protein, 343 aa, unidentified
MEHFAGLDVSVKETSVCVVDDTGKIIREVKVASEPGTLLAVLKNPAYHLKRIGLEAGPLSQWLFSALAEAGLPAICVETRHMRAALKAQINKTDRNDARGIAQMMRAGLYRPVHVKTVRSQKLRMLLTHRTLLQSKAIAIENDLRATLRNFGLKVGMVGTVKFEARIKELVENLPDLTVLVEPLLIVRRVLREQIGILHRRLMAIVRDDDVCRRLMTVPGVGPVVALTYRATVDVPARFRNSKAVGAVFGLTPASYQSGEINLTGAISRCGDEMMRAVLYEAAQVMLTRTIKWSWLKAWAMQIARRRGMKKAIVALARRLAVIMHRIWVDGSEFRWTREAAAA

SEQ ID NO: 140041 - protein, 314 aa, unidentified
MARAQDYRGFDLSKAVIVENSRTGFQTFLNWVHTLMNQHEKRDVIVGMEPTGHYWLNFAYFLQSHDIRCVTVNPMHVKRSKELDDNSPTKNDVKDAKVIAQLVKDGRYSIPILPEGVYAELREGMKLHDMVMQDLHALQAQVHNWLDRYFPEFLTVFKDWTGKAALQILKMGCLPKEIAKIPSERLLWEVKKVANRAVGMKRIEQLKEVAKASIGLQTGTQMAKEELRYLLEKYEYLTHRLNELEKQLSEMVQTIPGAKEMCEIKGIGGMTVVGFFAEVGDINQYHHPRQIIKLAGLNLKKNESGQHRGKTITH

SEQ ID NO: 140042 - protein, 407 aa, unidentified
MKLYHERCAGLDVHANLIVACIRVALAGGEAEYETRSFAANTKQLLALADWLGERRVTHVVMESTGVYWKPVWHVLEGHFELVLANARDVKNLPGRKSDVNDATWLAELLAHGLVRGSFVPPAPIQELRDLTRTRKQLTREAAQHMLRIQKVLEDANLKMTSVFSDIMGASGRAVLEAIVSGEGDPERLADLTRGRLKAPRAEIVEALRGRIKAHHRFLIKLHLQQITATEATIDELESRLGEVMAPFRAAEKLLSTIPGVSETVARVIIAEIGDDMRRFPSAGHLRSWAGLSPGLNESAGKKLSTRVRRGGWLKTTLVQAAWCATRKKDSYLRSQFARIKARRGPKKAILAVAGSILTATYHMLKTGAEYHDLGPAYLDQRDKRRVTNRLVKRLRSMGYSVELTAA

SEQ ID NO: 140043 - protein, 357 aa, unidentified
MNSSKNISFTGSHFFVGFDAHLKNWKVTIRFNCIELKTFSMNPSPVELFNYLKKNYPGGIYHIVYEAGFCGFWALRKFRELGIDCIVVNPADVPTSNKEKVNKNDPIDSRKLARELENKSLKGIYIPDIYHEELRHLMRLRFRIVQNQTRVKNRIKGLLHTQGITIPLNFTGNSRWSASFIQWLKEINLNTDAGQFTLSNLILQLQQQREHNKNVLRQLREQAKQKHIAPVIRALLSVPGVGFITAMSLYTEIVDMKRFSNQEQLAAFVGLVPSTRSSDETIYNNGISFRRNKFLRPIMVEAAWTAVKTDPAMTLKYRELTKRMKPQDAIIRIARKLLQRIRHVWLNQEDYVYSLVA

SEQ ID NO: 140044 - protein, 399 aa, unidentified
MSNVRYVGLDVHKEFVVIAVADSGTAPAEVLQRVEFSAPRVLAALRKLGSLSWLKVCYEAGPTGYGLQRFLRHAGVDCLVVAPALVPQVQGTRVKTDRRDARKLAHFLRSGDLVSVWVPDQRSEALRDLERARDDARLAERRIKQQLLKFLLRHGRLFTEGRELWTKTHWNWIRRQDFEHESQQRVLADAIHTAEQAQQRLARLDEDLAECVTGWRLAPLVKNLQAFRGIQLLTAIGLAAEIGDFQRFPTAGKFMAFVGLVPSENSSGQSRRQGGITKTGNAHVRRLLIEAAWQYVGAPATISPALAKRREGVPEEVVAIANRALRRLRKKAYALTVRKKSGTKIATAVARELAGFVWAAACATEALQNTQPATTAAPVKSSSPRRSPRRGLAAAGAPR

SEQ ID NO: 140045 - protein, 311 aa, unidentified
MNNYSNTIGIDVSKATLDVHDYNVTVHHEFPNTISGFKQLVSWARKDNGRSLKGVLFCMEHTGMYSLPLAVFLTEKKIPFSMVPGLEIKKSMGMVRGKSDKIDAYQIARYAYLRREEIKEYTLPSKDILKLKSLLSLREKMVKHRVAYQVHLKELKTFFKKKDNPQLFESQEKLIKQISAQITKLEKEILDIINKDPELKRLYNLTTSVKGVGLVIAVTFIVYTNCFTAFDTWRQFSSYAGIAPFEDRSGTSRKKPNRVHHMANKRIKALLSNAASTSIQFNPEMRLYYERRIAQGKSTMSTQNIIRNKII

SEQ ID NO: 140046 - protein, 342 aa, unidentified
MTAIGIDTHKATLAACAVDELGRPVAEATFANDPAGHLAFIAWARSIAPEVTIGVEGSSSFGAPLARSAHSAGLVVREVPPYLSRVERLRTRRPGKSDPGDALAIARVTAREKNLPPIRLSDRTTELRLLLEAREDLLAESNRARNRLHAHLLTLTPGYGGTATNLVAARHRATIGRLLRGVGGVQAELARGLLLRLARLEREVKALTSRIGALVAGHPLLGLPGAGPITVARLVAEAGDTRRFRSADAFATLAGVAPIPASSGQVQRMRLNRGGNRQLNRAMHVIAVTQARFYPPAKAYVTRRIEADGKTWREAIRALKRQLVRSVFRLLVEGSEVRLEAA

SEQ ID NO: 140047 - protein, 421 aa, unidentified
MQVLFERCAAVDVGKDVIAVAVRVPGDGPDGRATHKRTFKTFYGVLREAARWLTSLGVTHVAMEATGVYSMPVYYALIEHGEFTQVLVCNAGHVKNVPGRKTDFADADWLVHLLECGLLRGSFIPPADIKAARDVIRYRTKVVQSRTSEVQRLGNVLQDAGIKIDSVASSIATKSGRAMIEALIDGERRPRVLADLALGRMRAKIPDLAMALEGRFDDHHALMCRLHLDHIGHLDAMIAKLDAQIEAMMAPFRAERDLLTTIPGIGPLAAAAVLSEIGASVTEYFPDAAHLASWVGICPGNHESAGKRHSGKRRHGNQHLQPVLVETAWAAVRCEGYLRALYHRHVMRWGGYRSPTAKKKAIIVTAHAMLVIIWHVLATGTPYDELGADYFTRRLDPERETRRLIAKLEALGHQVSLQPAS

SEQ ID NO: 140048 - protein, 411 aa, unidentified
MENIFPCCAGLDIHKKSVEACVRRLEPTGQLHHQTRHWGTMTRDLLAMADWMAAQGVTHVAMESTGVYWKPIYNILESRFTVLLVNARHLKQVPGHKSDVRDCQWIAQLLQHGLLKGSFIPPRTQRELRDLTRHRTQLVEEKTRTVNRLHKVLEDANIKLASVATDILGVSGRAMLEALMEGQEDPVQLADLAQRQLRGKIPELEKALEGHLTEHHRFLLRLLWKELVQQEELIAELDTKIEEHTRPFANEIERLDAVPGVDRRVAEVVLAEVGSDVKPFPTHHHVASWAGICPGNEESAGKRRRQRITPGNRWLKRSLVQAAWAASHTKNTYLASQYRRLAGRRGKKRALVAVGHSILVIFYHMLKERTTYKNLGGDFFDRLEPERLTRYYVKRLKDLGHKVTLEPGVAA

SEQ ID NO: 140049 - protein, 343 aa, unidentified
MELHAVGIDLGKTVFHLVGLDSSGTVVVRKRCSRTQLLAYTANMRVHLIGMEACSGSHFLGRALRAQGHDVRLMPAQYVKPYVKTNKSDYIDAEAIAEAVQRPTMRFVPIKTEEHLDLQAVHRVRERWVMRRTAVVNQIRGLLLERGLTLPKGRSHVDHALPEILTDPALRLSGSFRVLLGQLQLELEQLTTRIEQMDVVIQQTARESEACQRLTAIPGVGPVTATALVAAIGNGAGFRRGKDLAAWVGMVPREYSTGGKQKLLGISKRGNSYLRRLFVQGARVVMQYRTKQAPGLSVWLSQLLARTHQNVAVVALANKLLRMAWAVLSKNEMYRVPTLAATP

SEQ ID NO: 140050 - protein, 349 aa, unidentified
MGEASTIGIDIAKSVFQIHGVDANGTVVIRKRVSRARFLEFFADLPPCVVGMEACATAHQWARELKKLGHDPRLMPPTYVKAYVKRGKNDAADAAAICEAVTRPSMRFVPIKSVEQQSALMLHRTRDLLIRQRTQLINALRAHLAELGLVAAKGHEGLQQLVIAVTESSDERLPSNARFACQSIVAQLHAVQTQVNGLDKRIIQAHRANADSKRLDAIPGFGVILSTAVVATMTDPKAFKSGREFAAWIGLVPRQNSTGGKERLGSISKQGDRYLRRQLVVGAISIVRTARMRPDKYPWVIELLARRPAKVVAVALANKMARIAWAVLAKGETYRAPARSGNVATAAAA

SEQ ID NO: 140051 - protein, 341 aa, unidentified
MDAGYDGRQIVGIDLHRRRSVIVRMAADTGERLGTVRIDNDSMALVAEIAKAGEHPEVVLEATYGWYWAVDVLRGEGAQVHLAHPLGVKGFAYRRVKNDERDAADLADLLRMGRLPEAWIAPPATRELRELVRHRAKLVALRSGLKAQIHAVLAKEGLREPMSDLFGAAGQSLLNEVRLGAAYAARVVSLRRLIDAFTFEIDTVGRRVTAQLAADPGYRAVQALDGVGPVLAAVFVAEIGDVTRFSGPAQLGVWAGMTPLHRESDTKVHRGRITKQGNRLVRWAAVEAVQRVHRGGIGAARARIGERRGANIAKVAAGRKLLTLVYYGLRDGHLRCLSRPA

SEQ ID NO: 140052 - protein, 312 aa, unidentified
MTPSTIGIDIAKDSLEVCRLPGGESARFDNNGSGHQQLIRWLAQTPIARIVFEPTGAYHRALEQTLTAAGLPLAKVNPRQARRFAEAAGKLAKTDRADAAMLARMGMALAPQSRPPTSRMLSQLKELHFARQALIKDRTAAKNREKILTLPLLKRQNQNRQRQIEAQIAAIEAEIEARIAADPALAERLAILESIPGIAKVTACALLIDMPELGTLDGKQAASLAGLAPITRQSGRWTGRAFIRGGRASLRQALYMPALVATRFNPQLKAKYHQLITAGKPTKVALTAIMRKLIVLANALLRQRRNWAENPA

SEQ ID NO: 140053 - protein, 391 aa, unidentified
MFYIGIDIAKKNHEASIIDSSGKSLSKSISFPNSTKGIEKFNNFISEFGVTTNNCIIGMEATGHYWISLFSYIIDLGFTCYVINPIQSDAFRKMYVRQTKNDSVDSFIIAQIMRFGEFSISNFSDENTFALRNLTRYRFALVDECSDWKRKLIAILDQVFPEYSSIFSNIYGVASKELLSKYPLPEDMLSIPAEELGNLLCKCSKGRLGINKAEEIQSCARETFGIKFAKRSFSFQIKQIISQISFLEEQLKEIEIEISYLLEDICPIITTITGIGSVLGASIVSEIGNISRFERANQLVAYAGLDTRIKQSGDFSATNTKLSKRGSPYLRRSIWLAATVAAFKDPALSIYYQGLRARGKAHGTAIGAVARKLTNIIFAVLRDQKPYTPNI

SEQ ID NO: 140054 - protein, 364 aa, unidentified
MYDSMTTVTVGLDVHARSIRLAAVRADELLEERTLAYDEEAVERALRRWPALRCCYEAGPTGFGLYRFLVERGIDCCVVAPGLVPQRPGDRVKTDSRDARKLARLLAGGLLEPIYVPTPQLEAARDLVRAREDARLDRMRDRHRLSKFCLRHGRRLPTSSWTVARRSWLSEQRFELAAQQQTFDSYLHAIDLVDARIEQLERAIRETAEQEPWRALVARLRCLRGVDTLTALALVSEIGDFDRFKTAEQFMAFVGLVPSEHSSGQQRRQGSITKVGNAHVRRLLVEAAWHARRRPTVGYQLARRQRGQAAADVERAWRCQQRLYQRWQRMAGRGKPQQKIVVACARELAGFVWAIATEQPLRSS

SEQ ID NO: 140055 - protein, 340 aa, unidentified
MKQPIIKQNVGVDVSKDDIKVALSNLTTDYRVVVRSTRTFANTAQGFKQLDEWLNSKIATELAVHFTMEATGVYYEGLAFFLYQQNYSLHVVLPNYAKKYSESLGLKSKTDKLDARALARMGLERDLRLWQPVSPELLGLKQLTREREALVCTRTTAANQLHAYRHQGKPNKESIKRSQHHISFIDEQIKQIEKEIVHFINHDEKLKTKIGYLDSIPGVGLVTAAVIVAETNGFAAFDSIKQLTSYAGLDVRIQESGKWKGKSRISKRGNNHIRKALYMPSISKKTHDATTKQFYERIKEKKGIGMIALVAVERKLLGLMFSLWKNEEMYNATIWEKDIR

SEQ ID NO: 140056 - protein, 357 aa, unidentified
MNSTQQLSFANSHLHIGIDVHLKNWKVTIRMNKMELKTFSMNPSAAELLAYLQHHYPNGIYHIVYEAGFCGFGTQRFFQLHNFDCRVVNPADVPTTNKEKVNKNDPVDSRKLARALENNELCGIYIPTIEQEELRMLMRLRYHLIQQQTRTKNRIKSLLYSQGILIPIQFSGRARWSHNFILWLQSIRMHTPAGNFTLQNLILQLQQIREHNKNIIKHLRTEAKKKNIAPILSALDSVPGIAFLSAMYLFTELISMNRFPNEDHLCAYVGLVPATQSSDETVYLNKISSRKNKFLRPILIEIAWTAVRSDPAMTLKYHQLTKHRKPQDAIIRIAKKLLRRIRHVWIQQEQYVFALVA

SEQ ID NO: 140057 - protein, 357 aa, unidentified
MKYIGCDFHPSFQQIAMLDKETGEMVERRLLHTEEARAFYQELQGEVVVGVEASGNMDWFESLLAHCPHQLWIGDAAAIARQEGRKQKHDRRAAALILKLMVENRFPRIWVPTVGERDLRQLLIHRQHLVRMRTRIKNQLQHIALNQGWQKKRKLWSQAGLELLRSLKLEPWTHQRRDTLLEMLEELEEKIRPLDQAVGKEAEQCEAARRLATHPGVGPVISLATVLTMGDVGRFADSRSWVSYLGLNPSEQSSGQRRRLGSISKQGNPFLRYRRVEGATSAARGDKDLGRVYARLKARKHHGVAKVAVARKLAVRLYWMARTKKSYPEVVRTQGSQSLPVAEVKAVRLSRPPASHP

SEQ ID NO: 140058 - protein, 428 aa, unidentified
MNEQDIIRREQFCQIKSEICRSDQYLVVGIDVAKDKHHAFMGSATGKSLLRRLIFENNLAGFRKLQQRSEQIRIQNALNKVVFGMEPTGNYHKPLGAYLIRCGCHVVLVTGKAVKNNRELLDGRWDKNDDKDAANVADLVSRAKCHYYDYPPSRINDLRQLLSLRRRLKKEEHSLRMRIRNNLLAQYFPELDRFYSACETESLAIVRWFLDPTMIAGLDFDEFFSLVTRSKRGIAQKLRLQKIHRLAAESVGYPMGPAAEFEAALLVQKLEQVRLQLKKTAVLMEDYCMEFSDYSFLLTIPGFGPYIAARVLASISNPWRFDSSNQLLKMAGYDLGANRSGKKSDDAVPVIPKRGNSELRYALYQAAHIASTRNPDFIRYFTRMLRGRQRERGIMTKMKVKLAAKMLKIAWTLMKKQEVFDADHLIIA

SEQ ID NO: 140059 - protein, 430 aa, unidentified
MADTSNTTTDVHFLAIDVAKQWNAVLIETATGMKHRFKMANSAQDFDRLIQFIQSLGGRCKGALEPTGDYHRPIAHRLLMAGVDLVSVSSVAQARYREAKFNSWDKNDPKDASVILDMLKHGIVQQYVDPMIAGNHDLQELSKTYFQISRLRTRVQHSIINHHVPLYFPEMYKYWSSSRSEWWIRFMLEFPTPAHVQRLTREEFVKAAWDLVGRKVEKTQKLGEIWDMSQQSAALPHHPDSLAVETFRLSLRQLQHFNEARTSLEERAEAALLNNADYERLRTLPGIGPIIALTILAEAGDLRRFRHYRQFLKYCGLDLAKHQSGTARGREQLSKRGNARLRLAFWMAGTVAVRLRENSFKDKYDRYIKSDPGNADLKRKALTAVCAKMARVAHGMIKTNRPYQRFFEQSLPSGSIPLCRAVEAQQQVTS

SEQ ID NO: 140060 - protein, 351 aa, unidentified
MIIIGCDFHTRYQQIAMADDETGELLLERRLDHESGEAHAFYRNFSVTVRVGIEATGPIHWFERLLAELGHQLWIGDSAKIRASEVRKQKTDERDARLILDLMLAKRFPKIWVPTPAERDLRQLLWHRHKLVCLRTMLGNQLHFLAMSQGLCRKKKLFTKKGRADLAGLALGPWARRRREELLKLLDQLDPAIAELDRAVLEEAQRREDAVLLMTHPGIGPVTSLAFVLAIGPVARFSRSKKIASYLGLNPSEDSSGQRRRLGAISKQGNTMVRWLLIETVHHAVRQDPELRQDYQRLKFRRGHAVAKVAIARKLAVRMYWMLRSGAEYAQLVRRQGSPGATLVDASPSLG

SEQ ID NO: 140061 - protein, 428 aa, unidentified
MNSVVIGADPHKLSVTIEVLDGRERVLHQGRYGTDRDGYRSMLAAARQFEQRRWAVEGCNGIGRHVAQRLVADGEMVVDVPAKLAARARLFDTGNGRKTDPADAHSVAVVALRTRSLTQVRVDDELVALRLLVDRRDELGRSRTQTVNRLHRLLLELVPGGAKRFLTAAQAAALLDSIAPADVAGRVRHQLATELLGEIVVLDKKMKDSDKVLRKSVAATGTGLLGLYGIGPAGAARILGDVADVARFATRARFASWNGTAPLDASSGEQRRHRLSRAGNRRINRTLHIMAIVQIRHDTPGRAYFRRRVAAGKTPMEAMRALKRRLSDVVYRQLVADASKASPGGHLGATTTSSAADPTPTVGSSDQSLPGLGTEPTPPDHDRTYAGAGTSGSTEPAPAARARRRNRDAQTQRTTGQARRRRATETVT

SEQ ID NO: 140062 - protein, 349 aa, unidentified
MKIIGCDFHPSYQQIAMLDSVSGEIVEKALSHERKEEVRTFYAGLEGSVRVGIEASGQSQWFERMLAELGHEVWIGDAAKIRASCERKQKTDRRDAELLLRLLVEDRFPRIWVPTAVERDARQLLLHRHKLVRLRTQVKNQLQAQALNQGVQRKRKLWNEAGRKQLESLPLLPWASRRRAELLQLLDQLEASISELDRAVAEQASARPAARRLMTHPGVGPVTALAFALTMGPTERFQRGKQVASYLGLIPSEHSSGGHQQRLGHISKQGNPFLRGLLVEAAQSAVRYEPEMRRAYQRLAQRKCRALAKVAMARKLAVRLYWMLRLQVNYAQLIQGSHAGQSGTFCGRS

SEQ ID NO: 140063 - protein, 508 aa, unidentified
MKTKPTRAKPPGPTSTAAKRKLRLEKVTKAGKGRVVDVTALDHMKQINFHAAGIDLGAAENFVCVPATSTALGESPVRAFGVFTEEMDALVEWLRVCQVTSVAMEATGIYWMVLYDKLEAAGMEVVLVEPGSVKSVDGRKSDVLDCQWLQKLHTYGLLSRSFRPEAPVRRLRTLTRHRAILVECGTDHLRRIEKALVQMNLQLNLVVSDINGETGLRILDAIVNGQRDPKELVKLRDPRCRKSTVAQMEAALTGHYTDDLMFLVEQNLAGWRFFQKQMQGCDREIEKALAHIPTAKVENIPPPPPKAVPAASAEEQAAHAKRKNKSAANRGNNALTLDALSLCQQLQRICGVNLMNVCGLNLLSVLMIIAEVGTDMSRWRSAKAFCSWLGLCPGTKISGGRILSRRSRRVVNRASTILRMAALVVGRTDSWLGRFYRRKKAHLGAPKAITATARKLACVIYHMLKYRDEFVPLDVMVYETKAAEHRLRRLRRDAQAMGLELVKKEHAA

SEQ ID NO: 140064 - protein, 342 aa, unidentified
MYYIGLDVHKKTISYCVKDASGQVHQEGKIGATRRELDDWIKTLPQPWSVAMEATIFTGWIYDHLLPYAEQVKVAHPLMLRAIAAAKKKNDRIDAGKIADCLRCDFLPECHMAPTEIRDRRRTLRYRHLLVRQMVQMKNRVSGLLMETGVEYNKRRLHKVGYFRELLSDNEEVQASIRPLLKLSRETIVRLQKTEYALVSSLQRDPLLAERIKRLRTVPGVGPITALTWALEMGDVSRFRSIRQAISYCGLCGDEKSSADKVIRTPLSKQRNKHIQRVLVEAAKLAPREDHKLALVYETEKQKGNANRATLAVARKMVAYLLAVDRGGRNFVPAEEYSSTAA

SEQ ID NO: 140065 - protein, 403 aa, unidentified
MAAISAIDRASEHHDVHVADETGTVLERRRFPHTEEGVGALIGLLVDHRVELVAIERPDGLLVGRLLAAGLRVMAVHPNQLAAARGRFRAAAGKSDRFDAMVLCEPARTDAHRFRVLAPLGDETAALRSLVRAREDLVEAKVALANQLRAQLDASWPGAAGVFASIDSPIALAFIGRYPGPADARGLGPGRLRSFLARHSYCGRRSPEELLARLRGAPVAALGEAEAEARRTAVAGLAGALGQIVAEIRRLEAEIGGAVRAHPDGEIFLSFFRDPKSVLTAAGLLAEIGDDRGRYRDADSLAADGGVAPVAVESGKSRHAAFRWACDKRLRNHLGVLADSTRHRHPWAADVYARARARGQDHPHAIRTLGKAWTRVLWRCWQDGVRYDPAKHGNLRRLEGAGG

SEQ ID NO: 140066 - protein, 315 aa, unidentified
MTNIAVVVGVDVSKAQLDIAVRPEGRFAAANDEKGIATTVERLRQMQPTVVVLEATGGFEVPLASALATAGVPVVVVNPRQVRDFAKASGILAKTDLLDAQILAHFAEVMRPVPRPLPDEETQALSAIVARRRQLLEMLTAEKNRLSAAAKPVRKSLRAHISWLEREVAHTDNDLTRTIHASPVWREKDDLLQSTPGVGPVLSTTLLAGLPELGRLDRKQIAALVGVAPLNRDSGTLRGKRTVWGGRAHVRAVLYMATVVATRYNPVIRTFYQRLCAAGKAKKVALTACMRKLLTILNAMMKHRTPWHAGVIQCG

SEQ ID NO: 140067 - protein, 347 aa, unidentified
MTLVGCDLHSRDQQVAVLDTATGEVQERRLVHDGDTVEQFYTSLASPVTVGIESTGYALWFHALLQRLGHEVVVGDAAQIRAMVVRKTKTDRRDAAHLLDLLKHGRFPTIWLPDPAVRDQRALVTHRMRLMRMRTMVKNGVHAIALNHRLALGPSLFTRAGVSQLQALSLPPHTSRRRGESLELLSWLNTHIKGLDDQIEEAAHAHPDARRLMTHPGVGPLSALATVLVLGPVTRFPTSKHVVSYVGLAPAIESSAGKHRLGRITKQGNALLRYLLGQAGQAAIKRDADLKRLYYAVLHRRGRSRAKVAVARKLLVRLYVMLRDEVDYRTFLDRAPAARRKEMSATP

SEQ ID NO: 140068 - protein, 427 aa, unidentified
MAKGKIDPEPEFAAFVGIDWADRKHVWCLQAAGSAKRETGELEHKVEAVEAWVAELCQRFGHRPIAVAVEQVKGALVFLLNKYECLHIFPVPSTMTAKMREALYPSGAKDDPRDADLLLDILWQHRDKLRRLSPDNEATRRVQNLVEERRKLTAEKTAQGNRLTSYLKIYFPQMVEWFEKLDMPLVCDLLERWPTLEELQKVSTEELRTFFRQHHCHRGLRERRILAISGAIPAKGDRAVIEAKSAVVKVIVQLIRSLLQGIAELDGKIEEVAAEHPDFFIFESLPGAGAVMAPRLLAAFGSQRDRYSCADELQTYSGIAPVTERSGKRKWVHFRWACPKFLRQSFHEWAGHSIVQSAWARAYYQQQRDRGSDHHAAVRALAFKWIRIVFRCWKDRVAYDESKYLAALAKRGSPLDKLVVVGIGTSL

SEQ ID NO: 140069 - protein, 402 aa, unidentified
MNAVGIDVSKGKSMVAIMRPFGEIVSTPFEIKHTSSDINSLVKLIKSIEGESRIVMEHTGRYYEVLAHQLSEANLFVSAINPKLIKDFDNDSLRKVKTDKADSVKIARYALDKWQNLKQYSVMDELRNQLKTMNRQFGFYMKHKTAMKNNLIGILDQTYPGVNTYFDSPARSDGSQKWVDFASTYWHVDCVRKMSINAFIDHYENWCKRKKYNFSKSKAEEIYGKAKELVPVLPKDDITKLIIKQAVDQLNSASITVESLRTLMNETASKLPEYPVVMAMKGVGTSLGPQLMAEIGDVSRFTHKGAITAFAGVDPGVNESGSYEQKSVPTSKRGSSDLRKTLFQVMDVLIKTHPQDDPVYQFLDKKRAQKKPYYVYMTAGANKFLRIYYGRAKEYLASLPES

SEQ ID NO: 140070 - protein, 384 aa, unidentified
MYKHSILFIGLDTHKVFSEVAHIEDQHGAKPVHYGKINTTKAAITKLARQYQSKYPQATLHFVYEAGPCGYWIYRLLTSLGHCCYVVAPSLIPKKPGDKIKTDKRDALKLAKLLKNEDLTPIYVPETEDEAIRDLSRARETAMKDLKDAKYQLKALFLRNNITCKVNDNWSAQHLRWLTELVLPHPSQQIVLQEMIQTITERLAREKRLANELFHQVKNWRFYPVVKALQAVRGIKLLIATGVVAELGDLRRFDHPRKLMSYLGLVPSEHSSSDKRRLGSITKCGNGRARRLLVQGAHTYKHKANISTELQKRQENLPKEITDIAWQAQLRLCRRYNRLMSRGKHRNVVVIAIAREMAAYIWAIAREVVISPVNPRLRVSRVPA

SEQ ID NO: 140071 - protein, 339 aa, unidentified
MQVTTVGLDLAKNIFQVHGISENGDVVFNQALRRAQLIAFFEKLPPCLVGMEACGSSHHWARQLSKLGHDVRLIPAMYVKPYVKRGKSDAVDAAAICEAVTRPTMRFVAIKSEEQQGVLFLHRARDLIVRQRTQLSNMLRGLLSEFGIVIAQGVGSAIKFAKGVLDGDKPGIPDVAIDVLANLSNQLVALHLRVRWYEMRMRLQAKQDPRVMLLRTIPGVGPVTASAIVATAGDASQFRNGREFAAWLGLTPLNRSSGGKERLGRISKMGDRYIRRLLVTGMTSRLRQMKTHPERADPWAQALLDRKPVRLATVAMANKTARIIWAVLTKNEYYRPRTA

SEQ ID NO: 140072 - protein, 347 aa, unidentified
MQVITVGIDLAKHVFQVHGVDANDKVVFNKPLRRAQMLPFFAKLAPCLIGMEACASAHYWARELKKLGHDVRLMPAKDVKAYVKRNKNDAVDAAACCEAVRRPVVRTVPVKTPEQQAQLMQHRVRDLLVRQRTQAINALRSHLAELGIVAAQGYDGLKALLSIIADGGDNRLPENARVSLSALGAQIASCQAEIAAIEKRLLAQHRKNEDSKRLETIPGIGVIGASAIAATVPDASIFKTGRDFAAWIGIVSREDSTGGKQRLGPISKQGDRYLRRILILGALAVVKRARSCPEGYPWLTRLLARKPAKVAAVALANKMARVAWAVLTKKENYRLPELAAAAPAKGC

SEQ ID NO: 140073 - protein, 361 aa, unidentified
MAQAKTWAAFDVHVSGVVAATLDRDSGELRVQRLPGRSDDVAAFAADLPGPVRATYEAGPTGFVLARKLQGIGVDCLVCAPGLIPRGPSDRVKTDRRDAERLVRLLAAGELHRVAVPSVEAEALRDLVRAREDLRGDLMRARHRLAKLLLRHEVRFDGPQANWTQAHLGWLAGVRLSVPPSQRALEDYRGAVSALMIRREQLEAEIARALPESPWAQTAKRLMCLRGIDTLTAAGLCAEIGDFHRFRHPAQVMSYLGVVPSEHSSGQRRRRGPITKSGSQHARRLLIEAAWHYRRPPRVAGSLARRQRDGEPEILALSWKAQRRLHHVWHRMEQRGKRRTIIAVAAARELAGFCWAVATVD

SEQ ID NO: 140074 - protein, 341 aa, unidentified
MEIDILGIDLAKRIFQLHGSDKRGHALHRSKVARPALLEVVRQLRPKMIAMEACSSAHHWARQFQELGIEVKLISPHYVKPFVKTNKNDRNDAEAIVEAACRPSMNFVPVKSVEQQDIQAVHRIRELLIQQRTALINQARGLLAERGIAIARSPGAFKKALPEILEEPRGELTSFCRTLLLVALERFRAIEAQIAQADDWIESIMKQSSLCQRIAAIPVIGAMTATAMVAAVGDAKAFKSGRHLAAWIGLVPRQNSSGGKSRLLGISKRGDTYLRTLLIHGARSVLIRVACKQDARSVWLQELIARRGYNRATVALANKNARIIQSVLSGESSYRPSAVAG

SEQ ID NO: 140075 - protein, 403 aa, unidentified
MNSVGIDISKGRSTIAVMRPFGEVVISPFEVRHTDSELSELARQLKSLNGETRVVMEATGNYHAPVAKLLHDAGLYVSVINAKLVHGYGNNDLRRVKTDRKDAVKLANYGLDRWLTLPRYVPEEDTRLLLKNCYRQYRQYSKVQTVLKNNLISLLDMVFPNVNRLFSSPIRGDGSEKWVDFVAEFWHCRCVSEKSQKAFTNKYQRWCRKHGYNFSEAKAHTIHAEACGHIDVIPKSETTKLLVEQAVAQLRATSAALVALKHEMQALASMLPEYPVVMDLFGVGPTLGPQLMAEIGDVRRFYSKKALVAYAGLDAPPNDSGDVTGRHKSMSKVGASSLRRTLFLVMSVYLQNAPLDESVYQFMDKKRAEGKPYRVYMMASANKFLRIYYATVKAYLESLEHTA

SEQ ID NO: 140076 - protein, 319 aa, unidentified
MNVAIDVGKKSSYIVVEDNGEVRTEGYVPTTKDGFSTVLSGLDKPTVIVEASSTMDRVASLLEEYNADVKVAHPRNVKLIAASTKKTDKNDAHTLLNLYKVGYLPEAYLASKAVRDGRNLCRNRDFLVRQRTAVKNRIHDQAFRSGVDFTHFDRRTLKELSKVSFPLERLVSELLVLNDEIKEFNKRIADELQKNEYAKLLNTIPGVGIISAVGIASEIADISRFETSENLCAYAGLVPRIHQSSNQEWKGHISKGNTFLKHLLVQCVQVHIRRSDSWISEAYNRIKIRAGKKKAKIAAARKLLVTMYCMLKEGRKYHA

SEQ ID NO: 140077 - protein, 404 aa, unidentified
MKGPIVSIDVSKGKSDYQAFKDLNVKYTGSRSIKHNKEGFDEIVNLVREMEKKLETEVCVVYEATGVYHRVLKKVLEDNNIKQFIINPLLSAKTRKNDSLRSPKTDKLDPKSIAKTYYSHSLHNSHKQETIYHELRELSRYYEDILVHIRKDKVAFRAQLDIVFPGYDTLYDDLYGPVALAIIEKYPHPEMLQKKKINTVSKVIQNKTCHRQAVSDTMADKAIEYSKTIYSGCDKDDIEVLILQRFIKKLNEDMAEAERTIGEMIKLAQELPDFNIIKSIPGIGDNLASRIIAELGDMTRFKKKNELVAFAGLDPRISESGQNDGDHMHITKKGNKRLRCLLYLAVTCSIRLKRDDNSIKDFYIKKKQQSNPMCSKAAKTACASKLVRIIYSMCKTGELYQYNK

SEQ ID NO: 140078 - protein, 320 aa, unidentified
MSGYIGIDVAKSELVVAISGIDGVRSFPNSEHGHAEVTKWLKKLDAPPVLIVLEATGGYERGITAALGNAKLPVVVVNPRQVRDFARGMGKLAKTDKLDAAVLAEFAARVRPEVRELPTEEQEDLRELLIRRDQLKQMLLAENTRLLQAAGKRYHRRRKEIKSHVSDLEKRMRMLESDLDDTLRRSSLWREHDDLLQSAPGIGKQTARSMIGFLPELGTVNAAQIASLVGLAPRNRDSGMMRGQRHIGGGRSRLRATLYMATLAAIRTDPVVKGWYEHLLAAGKPKKVAIIACMRKLLVILNAMTKTNTRWQPQTQPLPA

SEQ ID NO: 140079 - protein, 323 aa, unidentified
MNKDIKHFGIDISHLVFDVTDSDGNYHQFKNNVTGFKKFLKHLDTSSHCVMEATGYYHYQLAYYLLENSIAVSVENPLAVKRFIQMKLSKIKTDKSDSKLICEYAKQVQLKLWQGNSKHQTECLQMTRLLSVYTKQSTMLKNKLHGEAVLGNPSKVVVASLKRSLKQVKKELEILESKLLLLVKQVHQAVLTRLKSIPGIGDKTAIMLVVLTDGFDRFKSGSELCSYAGLTPIIRQSGSSVKGRSRISKIGNQKLRNLLFMCSFNACKYNKACREIYERIVAKGKSKKLALIAVCNKLLKQAFAIAKSGLIYQDTYRSTLMKN

SEQ ID NO: 140080 - protein, 358 aa, unidentified
MNRTLYVGLDVHKDTIAVAVAEDGRGGEIRYHGAILNASDAVLRLTKTLTQNGDTPSFCYEAGPCGYGLHRHLIKLGFECAVVSPSMIPRKAGDRIKTDRRDAEMLARLWRAGELTPIWTPDAEQEAMRDLIRARKQAMDAVKTAKQQLLSFLLRHGLRYQNGKYWTQRHRRWLAEMRRFRFPHQQLAFEEYKRTVTQAEDRVASLDYVIVDAIPSWHFAPVVDALRALRGVDTTIAATVVAEIGDITRFENPRQLMSWLGLVPSENSSGNTVRRGRLTKTGNALARTMLVEAGWSYRHPPKEGHPYLKRSAHLPQHIKDIGWKAQTRLCKRYRDLSRTGKPQPRVLSAIARELAGFV

SEQ ID NO: 140081 - protein, 362 aa, unidentified
MEQVTWYVGIDWGSESHAVCVVDAAGHRREERCVDHTADAVQACLEWIMIFTGATPAQIAVAIETPRGALVDTCLARRLRVFAVNPKQLDRFRDRHTVAGAKDDRRDAWVLADSLRTDPAAFQQVHTEDPIVVQLRELSRAEEDLDAEFRRLANQLRSQVQRLVPEVLALCPGADEPWFWALLQVAPTPAAQRRLTRARVDHLLRAHRIRRWRGADVVARLQAPLFPHAPGVVEATEAQIHLILPRLEVVHTQQLACGRQLEQLLQQLRDRPREADQRGEHRDIAILESLPGVGRKVAVTMLAEAAEPLAQRNYDRLRAHLGTAPVTTASGKRRLVSMRRACNRRLAARIAVYRCRLPTACL

SEQ ID NO: 140082 - protein, 426 aa, unidentified
MKFNTQNAKITATTEKTLVIGIDVGSETHFARVFNWRGYEFSRKPLEFGNTEEGFETLRTWIMELKEKHGMDKVIPGMEPTGHYWFNLGKFLQDKGMRPVHVNPHHVKKSKEMDDNDPSKNDRKDPKVIAGLVNEGRYFYPYIPDGIYAEIRALSELQVLARSEITRLKNRIARWFSIYFPNYKDVYGNVGAVSGLMVLKEAPLPEDIVKLEVDGVNRIWRDAKLRGVGLKRARTLVTAAEHSVGSREAQEAARIELRILLADYERYTAREKELMALIEEKIGEVPYVDKLLEIRGIGLKTVIGFVAEVGDIKRFDNPKQLQKLAGYAIVRSQSGKHKGESHISYRGRKRLRYVLYEAAVSVVSHSPEFRSIHRYYTTRDRNPLKKMQSLIAVACKLIRVFYLILQTGATYKAEKMMEDIRRPAAV

SEQ ID NO: 140083 - protein, 334 aa, unidentified
MEQITTVGIDLAKRVFALHGVDAAGQVMLRRTVRREQLMEVVAALPPCRIGMEACAGAHEWARRFTALGHEVKLMAAKFVTPYRKSGKNDGNDAEAICEAVGRPNMRFVPVKSAEQQAVLALHRTRQGFVAERTAVINRIRALLTEFGIVLPQSPEVVRRQASGCAEGLPVLARRMIEDLRSHLRLLDERILAYDREIEAQARQCEPAQRLMKIRGIGATTALAIVATVGNGHEFRNGRQFAAWIGLTPRQHSTGGRARLGHISRQGDAYLRALLFQGARSVLHTAAEHQDRLSRWALSLQGRRGYHRTLIAIANKNARIAWALLAKNETLRAA

SEQ ID NO: 140084 - protein, 428 aa, unidentified
MNVDESTRIKEFRQLRKEIRGSSEYLIIGIDVAKDKHHAFLGTATGKTLLRRLIFENSIDGFEKLMAYAEAIKAQHSLEKVVFGLEPTANYHKPLAEYLTKCGHNVVLVSGVAVSNNRELLDGRWDKNDTKDSANVADLICQGKFLYYDYPSIPLRDLRNLLSLKRRLKKQEHGTRIRIRNHLIAQYFPEFDRYFGTERSEALSVVKWCLKPSKIAGMEYDDFVHLVMPHVKTTGQEKRLKTIWDLAIDSVGCEAGQALDFESRLMVEDLQRVKESIRAVEDNIANICLGFPEYSYLLTIPGFGPDVSSKVLGAIGNPLRFDNAKQVLKLAGYDLGSNRSGKTSDSAVPVISKRGNAYLRYALYQAAFIASTSNRYFMIYYTNKLRGRERERGIKTKMKVKLAAKMLIMAWTLMKNKEPFDPEYLNID

SEQ ID NO: 140085 - protein, 430 aa, unidentified
MKSNTQNAKIEAITEKTLVLGIDVGSETHYARAFDYRGIEYSKKPFKFSNTEAGFVTFKEWILDLKERHEKDKVVPGMEPTGHYWFNLGKFLQDNEMKPVLVNPHHVKKSKELDDNNPTKNDRKDPKVIAGLVREGRYMIPYLPDGVYADLRTASNIRFQLQVELTRIQNRISRWFNIYFPEYKTVYGKPDAKSGMLILKAAPLPEDILTLGIDGVNQIWRDAKLRAVGKARAKTLIEAAEHSVGSKEGAVSARMEIRMLLEDYESRNIRLREVMTLIEGLVKQIPMAEKLLEIKGVGIKTVSGFLAEVGDISRFNTPKELQKLAGLALVESSSGKHKGETTISRRGRKRLRYLLFEVAMSLVAKNPEFRELHNYYTTRRLNPLKKMQSLMAIAAKLIRVFYAMLTKGVDYDPKKMVSDIKRPAVYLQAA

SEQ ID NO: 140086 - protein, 344 aa, unidentified
MGEVSTIGLDIAKSVFQVHGVGVDGAVVIRKRVSRAKVLAFFATLRPCLIGIEACPTAHHWSRRLQALGHTVRLMPPSYVKGYLKRSKNDANDAAAICEAVTRPSMRFVPTKSEQQQSILMLHRSRQLLVRQRTMLSNAIRGHMAELGIISAKGRNGTTELLDILANERDGRIPTAARFSVDVLARQYAVLMTEISVIEKRIHAWHRSCEENRRLQEIPGVGPIVATALIAEVGDWKAFSSGRGLAAWIGLVPRQHSTGGKERLGRISKQGNRHLRWLLVAGAMAVIRYARRHGTKRMWLVRLMGHRPTKVAAVALANKIARMAWAMMVRGERFKEQNLLPAAA

SEQ ID NO: 140087 - protein, 357 aa, unidentified
MKTRLSNKQKWLNKINLTKDDDMYIGIDAHKRTLHVAFWLNGAPAIDYVMPADAGKLIKTIKKLRPAIRKIVYEAGPTGYALARTLQKSNLPANVVAPSKTPRQAAASSKTDRLDAKKLAEFAAKGLLRNVAIPTKQQEAQRQLTRLREQLTDKQRRTKLQIKSFLLQHSIDAQLSRWTKSAIERLRNLNLSEHLKYSLNTLIEQLLFTAKQIDELEHNIQQMFTQRPLTTKMKHFVTHPGVGPIIATQFATEIFNPKRFKDKTQIAKYVGLAPTVHQSGQTLRDGPISKTGRQQLRRNLIQGAWAWINNDPSAKKTYYKLVHNTGEKNKAVVAMARKLTIHLWKMACDNKPYIPNN

SEQ ID NO: 140088 - protein, 312 aa, unidentified
MDALNIGIDVSRDRLDVAANTSSMAPFHVPRDHDGLEDLIARLKPLGAARIAIEATGGFETVVAAALASAGLPVVIVNPAQVRAFAQALGKRTKTDPLDAAVIARFAEATRPALRPLPDAETQALGDLVARRRQIIAMIGAENQRLKRSSQRTAKSINRLLKALQKELTDIDQDIDDSIRRSPHWLAKVELMKSVPGIGDQIARTLIAELPELGTLDRRQIAALVGLAPWTRQSGQWRGKSFIGGGRAGVRTALYMGALVAAHHNPSLRAFRDRLVAHGKPKLVAIIAVARKLITILNAILRDNHPWREQNA

SEQ ID NO: 140089 - protein, 384 aa, unidentified
MIKHNILFIGLDTHKTFTEVAYIEDQRGAKTIHLGKILSNKAAFKKLARQLQSKYPHATLHFVYEAGPCGYWIYRLLTNLAHCCYVIAPSLIPKKPGERIKTDKRDALKLAKLLKSEDLTPIYVPEPEDEAVRDLSRARETGMKDLKDAKYQLKALLLRNNINSKVKDNWSLQHLRWLAELVLPHPCQQIVLQEAVSTITERLKRLKRLDNELTHQVKNWRYYPVVKAVQALRGVRLLVATGVIAELGDLTRFDHPRKLMSYLGLVPSEHSSGGKRRLGAITKCGNSRARRLLVEGANSYKHNANISKEMQLRQEGLSKEIIDMAWQAQLRLCRRYNRLIHRGKHRNVVVTAIAREMIAYIWAISREVVLPVVDVKLRLARMPA

SEQ ID NO: 140090 - protein, 351 aa, unidentified
MLIIGCDYHPSVQHIAWIDTETGECGERQLRHSDGEAEKFYRDLKAKGANVRVGIEATGHSRWFERLLAELKFELWAGDPAQIKATRVRKQKNDRQDAEHILKLMMEKRFPQVWVPGPENRDLRQLLWHRHRLVQMRTRVMNQLQAVALNEGVRRKKGLWSQSGRAQLESFPLAPWATRRRQELLQLLDQLTPCIAELTTAIEHEAEQSSDAQRLMTHPGVGPITALAYVLIIGSPERFGCGKQIGSYLGLIPCEDSSAGRQRLGHISKQGNTLLRFLLVEAAQAAVRGDADWRRQFLHLAMRRERKIAKVAMARKLAVRLYWMWRKGWDYQQLLKFGSHVGQPVNGHGVK

SEQ ID NO: 140091 - protein, 351 aa, unidentified
MNATTVAVDLAKNVFELALANAQWKVLERARLTRGQFERWFDNRKVDLVVMEACGSAHHWARRFKARGIEVRLLPAQYVRAYVKRNKTDAADCLALLEAGRAQDIQPVAVKSVEQQALQALHRTRSGWMSTRTRRINTLRGFCREFGLVVPEGAATGLAQIARYLADERSGLPGMLRPSMRLVLEEIRLMEARIGQLEQTLSALAKESPACQMLLSVPGIGLLTSTAMVAAVADPRSFPSGRRYSSFLGLTPREYSSGNTRHLGRISKRGDRYIRMLLTHGARSILRAATVARRAGRQIDRLKTWALAVQARTNHNKAACALANKLARIAWAVWVKHERYRAEPAPATPSL

SEQ ID NO: 140092 - protein, 427 aa, unidentified
MKEAPVAGFDISKSSSDICVLAPGNEVVWRSKMAHTSQSMAQVARRLTDMGVQYGAAPVIIMEATGHYHRIVLQFMKNEGFDVVVVNPIQSGALKNISIRKVKNDRVDAYRIALLYRLKAAKRTNLPTDLIADLRSLCRQHYDLTQDLIAYRSRLHAQLDQCFPGFAGVFSSLVNLSALSVLERFPLPSLILSASDQDIEGAILSVVTRKSAYLQKKIHALRQAARNALPIAISTPSCAVIMKNLVSMLQILKKSIREVDLQIRALIRSDAGLRTDAELPKSIPGIADYAAAVILSEIGSVSSFQSAKQLVAFCGLDPTERQSGQFTGTRSKISKRGSKYLRCILNMSAHISIQPGCKGTYANPVLAEYFQRKRQSKPYKSALCAVMHKIVNIIFAVLRDQKPFELRSPELHCQIMRDRAAKLSLAA

SEQ ID NO: 140093 - protein, 317 aa, unidentified
MSEAWFVGVDVAKDSLAVASAPAGLRLAVPNSPQGRRDLVKALRQHPVALVVLEATGGYERPVALDLVDAGFTTVVANPRQVRDFARGLGELAKTDPIDAAVLARFAQVVQPKSRPAAGPHQADLAELVSRRRQLVATLTQESNRAAMARHPDVRRSIRKVTRTLHREISQLDDAIAQLIRADETLSRKDDILRSTPGVGPNTSAMLLSHLPELGSLNRQQVAALAGVAPWDVQSGRWSGTSSIWGGRAEVRSVLYMAALTARRSNPAIRAFAQRLEAQGKAFKIVITACMRKLLVILNSMLRSNAQWQSPRVAKKS

SEQ ID NO: 140094 - protein, 351 aa, unidentified
MLHAGLDLSRKRLDVCLLDERGEVLGRDSAFPDREGLVRLAREVSGRGEPVSAAVESMNGARFVHDTLELAGWDVEIADAQKVKGLAPLACKTDRIDAWVLAELSRRDLVPSIWLPDPGVRGERERARFRLHLVRHRVMLKNRIHSALIAFGKPCAVSDLFGVAGRQLLARLELPEPWATNITTALELIDDLEVRIDACETELATRGVDHPYVALLQSVPGVAWVLGFTIASEIGDITRFASPKKLAGYTGLCPRVYQSGERDYRGPLSKHGPKYLRWALIEATIHAARHPLYAEHYQRTAARLGPQRGKKVARVELARKLGEAIWHMLTKGEPFAPARSHVVAGRTTTLN

SEQ ID NO: 140095 - protein, 319 aa, unidentified
MSGMYVGVDVAKAELVVAARPSDERWSVANDERGARTLAERLKRDAPALVVLEATGGYELAAVAALAAAGLPVVVANPRQVRDFARATGQLAKTDRIDAGVLALFAERVRPEVRPLPNEEAQELDAVLTRRRQLLEMLTAERNRLGQVAGRGRRLVKKSLTAHIAFLERELRVADTDLGAMVRASPAWREKDDLLRTVPGVGPVLSLTLLAELPELGRLSRREVAKLAGVAPLARDSGTLRGHRYVHGGRASVRAVLYMAALVATRRNPVIRAFYERLLAAGKPKKLALVACMRKLLTILNAMARSGVRWEAPNALATT

SEQ ID NO: 140096 - protein, 354 aa, unidentified
MPTHRYIGLDVHLQSTTVAVVGPSGKRIKSLVVDTTGRSLIEAIKGVPGPRSICLEEGTQSEWLAELLEPHAQQLVVFVAERSRGTKSDEVDAWLMAEKLRTGALTKHQVFKPGGVLLPLRAAVRSHRMVVDDVVRLKNRLRSLYRSRGLHETGATMFLPSKRQDWERRLPAPLATTAATLAIELDALEQLKTQAEARLETEAQRVSIVRRLMTAPAIGVVRAAQIVATVVTPHRFRTKRQFWSYCGLGIVTRSSADWTRSPDGKLVKMRTFQARGLNGQRNGQLKLAFKGAAHQICTTMPSHPLHEHFVRLVEAGTNPKLAKLTIARQLAAAVLAMWKQQQDYDPAKHSSPAR

SEQ ID NO: 140097 - protein, 426 aa, unidentified
MNANNDETQHDHAAFIAIDWADQQHVFSLQVAGQTKKETGILEQKPEVIGPWVAQLRERFGGRSVAIAVEQSRGALIHALMSYDFIVIYPLHPTTVAKFREAFKSSGTKSDPLDTDQILEIVTKHLHQLKPLNPDTEETRLLGRLVEDRRNAVDLRTGHIQALLAALKEYFPQAIELANGNLTSRLAGDLLKKWPNFEAFQQAKPSTIKGFYYGHNIRSPQVLEKVLNLAQRAQPLTTDPAIVESGGRLSQLHAQLIQTLNPLIEGYDRRIEKVFQAHPEAHLFSRLPGAGPALAPRLLSFFGTDRSHYETAQNVHSFSGIAPVTKSSGRTKVVYFRRACPKFDRQTFHEFARLSLAKCQWARNYVDYYKAKGKKYHTIIRALAFKWIRILFRCWQNRTPYSEDTYLAALKKRGSIFATLHLEQKS

SEQ ID NO: 140098 - protein, 318 aa, unidentified
MSKFVIGVDIAKKKFDIASLCDDKYKHKTFTNDEPGYANFAAWITQLFAHDQPLICMEATGAYSIPLAEFMVNQGYPVSVVNPAKIHAFAKSELSRAKTDKADAKLIARYAAKMEPKLWLPPPEKIRTLQALLRRVEHLLEMIQMERNRLDTAEEAIMDSIKSILTALETELEATRKAIREHIDQNPDLKSRRDLLMTIPGIADASIAHLLIALSEHHGFINAKQVVAFAGLAPEPRESGEWSGKTHIAKSGDPALRKALYMPALSAWRHNPVIRQFCVRLKTNGKNGKAIVCAAMRKLIHLSFAILKSGQPFDPHFA

SEQ ID NO: 140099 - protein, 342 aa, unidentified
MASVGGLDVHRRQITFDVLDTESGQVRRGQVRPACRATLRQFLGRVAGQGEVSFAVEGCTGWRFIIEELQRAGFQAHLADPAAAADARGSKRRAKTDRIDSRQLRQQLVEGRLPESWIPPEHVQEVRAKLECYHDLREEHTAWVQRVHATLFHHGVPVIEGALFTMAGRARLEAGEGLSPAARQVVGVALRVLDALQVELDELGRELGRHARRQPGCRALAAQYGVGPITAVAIWAFMGDTRRFSSSAQAVRHTGLDVTVYSSDGRRAPGHLSRQGPPVLRWALYEAACSAARSTSPDLDYYHDTKERIDHKRAAISVARKIARRSHHILRDLGDTAWQDAA

SEQ ID NO: 140100 - protein, 356 aa, unidentified
MPVRRPIAAAIYGVDLGKTRFDVIASDSAGKPVQRVKLGRDTILRFFEAASPALIGMEACPGAQWLARKLAAMGHTVRIIPAQFVKPFLKSNKNDARDAEAIAEAVVRPTMRFVEIKVEAQVDLQALHRVRDRIVSNRTQLICQMRAFCLEYGIAMRQGAGVFKIDMSRVIADEGNDLTPMMRTVLKELWDEFVLVDTRLAAVTRQVESIAQRLDAARRLMSIPGIGPLGATALLAAVGDGRQFRKARDLAAWLGLVPRQHSTGGKTTLLGISKRGNPYLRRLIIHGARSCVAHLNRERDRLGKWLDQLEQRMHKNKVIVALANKIARMVWAVLTRPGNFYERVDRLTPKRRVLRS

SEQ ID NO: 140101 - protein, 359 aa, unidentified
MATYYIGADVHSNSIEMAIQTRKRIVKRYTIPAGISAVAQVLNSLQGKRYMVIEEGPMSGWLYRNLRQKVDRFVVADPRRNKLISSDGDHDDRIDSAKLAMLLAGGYLREVYHSDDEQRVELKNWVGLYHDRIRDAVRNINKIRARCRMYGVTIPRRVLRQPEHRDVWLTKLKQPALAKQLLMLWVGYDATAKQARMAKQQLINLSRKYPVIRLWKQLAGIGTIRAVTIFAYLDTPWRFRRKNKLWKYCGVGLQRTASGTDKKGKPKPARLQLPWAANRTLKNAILGAALTAINNKQNAFRADYERMVQNGIIPSNARHTVARKLLTVMWGIWKRSCQFDLSKASLLERSEPVEECVGI

SEQ ID NO: 140102 - protein, 338 aa, unidentified
MTIETLGIDIAKTVFQLHGVNRSGRIVMRRRVMRDQLLAVIAQIDPCTIAIEACTGAFYWQRKFEQLGHQVRIISPQYVKPFVRRQKNDGNDAEAICTAARQPHMRFVPKKSIEQQDIQALHRARQRMVNHRTAVVSQIRGLLLDRGFAFGKSITRARRIIPEILADLENELTDLAREAIGELHDLLQDLDRRIASFDKKIERVFRQSEVCQRIAKVKGVGPKTATAVVAAIGDGTEFKNGRHLAAWLGLVPRQHSSGDKRVLLGISKRGSQHLRTLLVHGGRAVVRTAGNKSDPINRWVNQLRERRGYNRAAVAVANKNARIIWAVLRTGEAYGSAR

SEQ ID NO: 140103 - protein, 394 aa, unidentified
MKLVGIDVGKNSHHFCVMDKETGEFNVAPSSFSNNKEGFDFLINSLKPYSKKSILIGMEDTGHYHVALLKFLLSNGYPVALINPKTTDLTRKMEGGITKNDKLDTITICDVLDTPERKKQYRITKVDRFDLYEQRQLTRHHHNLKEELNVYCNRLQKSIDLVFPEFNTLFSSKYSIVYMNLLKTFGSAEAIASTDIRTIRKCFEIKGRGNRISLTPEKLKECAKNSIGISSEVETIQIKHLVSQITLIKEQIAEIDKKIEEFSITNNSPILSIPGISHFSGTSILAELGDIGNYSKPSQIIKFAGVAPYHYESSQYNAQHTGITKKGSKYLRKTLYQIILTVINNNPVFKKYYLLKISQGKGHRCAQGHCIRKLLRIIYHLLETGQSFDPALLR

SEQ ID NO: 140104 - protein, 373 aa, unidentified
MKNGSTLYVGLDVHKDSISVAYAGPDGAAPVHVGSIGTRQCDIDTLVRKLQSKGAALVFVYEAGPCGYWLYRYLRGKGFTCFVVAPSLIPRRPGDRVKTDTRDALTLARLARSGDLSPVYVPGVADEAVRDLARAREDALSDLNAARFRLKALLLRNDIRYTGRANWSVEHRRWLARLVFPTPAQQIVFQEYVRTVNERTELLQRLEAELLTQAKTWRFYPVVEALQALRGVQFTVAIITVAELGDLTRFATPRQLMSYLGLTPSEYSSSDRRRLGGITKAGNGHARRALVEAAKAYRHRAKVSEQIQARQQDLPKQICDIAWRAQVRLCGRYRRLLARGKHPNTIAAAIARELVGFMWAIGKAQPVPAPAEA

SEQ ID NO: 140105 - protein, 351 aa, unidentified
MTVAVDADLVVGVDTHLDTHTAAICDARGRAAGQLQVAATTAGYAELLAWASAAAAGRRLAWAVEGTRHYGLGLARYLAGEGQQVSEIDSTRHVGKRRAGKSDSIDAVRAARELLARPRPAQMRADGDREALRLLMVDRDNAVASCKTARAALASVLVTAPAQLREQLRPLPRVRRARACAELACPHDADRLTRVTHQTLIRLGQRIAALAEIAADLEAQIAAIVEDMAPGLVAAEPGLGALSAAQILLSWSHAGRIASEAAFAMLSGTAPVPVSSGRTDRHRLNRLGDRQLNRAIHVIAVNRMRHHPPTLAYVQRRQAEGKTDKEIRRCIKRYLARHLYRTLNHRTLSQA

SEQ ID NO: 140106 - protein, 411 aa, unidentified
MEQIHDRVAGLDVHRDQVAACVRTPGPRGGAQTEKARFDTTTGGLAALAEWLAGHAVALAAMEATGVYWKPVYYALEGRFLVWLCNAHHVKNVPGRKTDMSDAEWLADVAAHGMVRPSFVPPPPIRELRELTRYRKTQIDVRAAEIARLEKVLQDAGIKLTSVASKVLTQSGRAMIEALIAGQRDPAALAELAKGKLRPKIPQLTAALRGHFGAHHAIVAARILAHLDFLDETIAELDREVAARVAERYQSAARLLADVPGLERRSVEVIIAETGADMSRFPSPAHLASWAGLCPGNHESAGKRRRVATTPGNQWLRRALIESARAAARTKDSYFGAQYRQIARRRGPNKAAVAVAHSLLDVIWHMLTTGEVFTDLGADYFTSRQDKEHQTRRLVSQLEKLGFTVQLTAAA

SEQ ID NO: 140107 - protein, 394 aa, unidentified
MKKLKPNVACAGMDVHYKFSNVTFRDADGKVVSRQRLEHPDRQKLRRRLSQWPSGIPVVMEASFGWGWLSDLLEEKGMNVDLSNCFKVEKMRKARGWAKTNKKDADLISLLPFEMSDWWKVWRAPVDVRNLREQMRFRADLVGMQTQVKSRIHAVFHRHGVFHEFSDLFGAKGRRFLAELCSDNPANLPPEALAALRGHVMLVDHLRRQLAAVARVLHSQLSTTPLTTQLKTISGFGLILSHVLAAEIGRIERFRNHKSLAAYSLLAPRADDTGEEDPSHSPKGRHLGVRGNRTLKWAFIEAAHGAVRSGGRWRDMFDKVTDGGRKDRGRGYIKVARELVKVVYAVWSKGVDYQETPPARPGSEKNKQSKKNKKKQSRSGTGQLLHPMIHAVSA

SEQ ID NO: 140108 - protein, 321 aa, unidentified
MQGKAHVDAMAAVYVGIDVCKAQLDIYLYPIGERFSVANDAGGWRCLRRRLGDLTIAVAVMEATSKYHRAVHRHLDAVGICVAVVNPLRARLFAEASGALAKTDAIDARMLALMGAQLDPAGTPPISPAAEATDELVRARSAAVDERVALTNRHDITATPFLRAELLRRIRALDTHIRRLETQISRLIAADPDMAARHAILRSIPGIGPVNAATLCAGLNELGRVDGKQVAALVGLAPFASDSGPKRGHRHIRGGRPHLRRSLYMAALSAIRFNPDMKRFHTNLVGNGKPPKVAITAVMRKLLVLANALVTQNRTWSCRTA

SEQ ID NO: 140109 - protein, 375 aa, unidentified
MKEKLRFLGMDVHAETIAAAIAEPDGEVRSLGTIPNRMESLRKLIKKLGAVEKLRVCYEAGPTGYVLYWQLAELGVQCEVIAPSLVPVKAGDRVKTDRRDAEKLARSYRSGDLTAVWVPDVGSEALRDLVRAREAAKQDELRARHRLGKFLLRSGHRPPTGVRAWTHLHLTWVSQIRFAQVAQESTRLDYLHEVEHMRERVLRLEQAIVEAVKLASPALQEVITDLQALRGIAHISAVTIAAELGQVSRFAGARELMGYCGAVPSENSSGKRTRRGSITKTGNAHLRRIVVEAAWSYQRPPAIWAGLRKRQQSASQEATEIAWKAQHRLHKRYVRLAAAGKDKRKIVTAVGRELLGFIWAIGTKAEATVMHRIAA

SEQ ID NO: 140110 - protein, 413 aa, unidentified
MMKLFVGIDVSSKKLEVSMLTSDISAKPLFQGTFENDLNGATEVKKLILKLNLSQQFEKIVIGMEATSIYSFHPAYFFENDDDLAQFNTQAVIINPRDTKKYKDIFEIQKNDSIDAYYIADFLRLERYSTSLVRQEKYVALQRLTRSRFELVKSLSRSKQHFLENLYYKLNKLVVNDDLNTSVFGATMLDLLTEDFTTDDISVMPIEELADYLNSKGKGRFANPSALAKTIQKAIRGSYRLDKTIQTSIDVVLSVYLNEIRLFQKQIKLLEKSIDDLLKTFDEAQILQSIPGIGPVYSAGILAEIGQIKRFENQSQLAKYAGLAWKKYQSGSFNGDNTPMIHSGDTYLRYYLIEAANSVRRYDPVFARYYHQKANEAKHSPHKRAVSLTARKLVRVIDVLLRNHQIYQKEKVV

SEQ ID NO: 140111 - protein, 404 aa, unidentified
MWYTGIDWADEHHDALTLDEKGHQVGSLRVDHTAQGLNKLNAFLEQIIGTAPKDQMACIIETTHGLLIAFLLDAGWFVYPVNPRTVDRRRSPSGAKTDLIDAYLLAKTGRADFADLHRLTPDSEKVAELKMLTRDQTALVQMQTRLVNQITACLKAYYPVALELFGKVQQKCTLVFLQTYPTPQEARAASVDQIRALLKQCRHPQAASAALTMVEQLSQPQLQATAATVRAKSRLLLALVSQLLPLIEQIANYDKEIDTLFLTHEDHAIFASLPRAGERLAPSLLAEIGDDRKRYLDASSLQALGGTSPVLYQSGMYSKAHRRLGCIKPLRNTLHHFAWQSTQSEAWAKDYYQRKRAEGKSHTVAIRALSNVWVRIIFAMWVHRECYQTATFERAQLQHARRAA

SEQ ID NO: 140112 - protein, 300 aa, unidentified
MKLTTIGIDSAKNVFQIHGADERGTAVLKKQLKRDQVVPFFANLLPCKIGMEACGSAHYWARKLQALGHSVQLIAPQYVKPFVKRNKNDAADAEAICEAVTRPNMPAVPIKNASQQAILSVHRARQGFVKARTAQANQIRGLLAEFGIIIPQGISHIAKRVPEIIEDGENELPGSFRLLIQRLVDHLKVLDQQVGELEREIQAWHRENEASKKLAKIPGIGPMTASALVASVGNARSFRNGRQLAAWLGIVPKQHSTGGKATLLGISKRGDTYTGYPPRRPPPVVRDLRRPAPWISLRHV

SEQ ID NO: 140113 - protein, 346 aa, unidentified
MRIIGCDLHARQQAVAMLDTETGEVVSMTLKHEGNNVREFYSSLPRPVRVGIEATGSMQWFVNLMEELGTECLVGHPAEIRAAEPRKQKHDRRDADLILKLLVENRFPAIWLPSKELQDLRSLLRHRHQWVRMRTRIQNALQSIALANGLRRGTALWSHDGQNRIASLPLTPHTAYRRSELQAMYAKFEAEIEKLNQRVEEQACGRVGARLLMTHPGVGPVTALATEVFLGDPARFADSKALASYVGMIPREYSSGERQRLGGLSKQVRKDPELKRFYRRKLNQKGFGKASVAVARKLGIRLWIMLRDQIGYNEFCRRGQKQQKSSEACAGMPETPNGANSHRTID

SEQ ID NO: 140114 - protein, 369 aa, unidentified
MNTTTFVGLDVHARSIKAVALDAMTGEVRSATFAYDAAAVAEWVGSLDPAAKCVYESGVTGFDLQKKLTALGVDCVVGAVSKMIKPSADRKRKNDRNDAGFLARMLSVGNVIEVWVPDDECEAARDLVRALDDARDDLRRCKQRLSKFLLRHGLVFDETTPSGQRKGNWTAAHWAWINSINFKERADNEVLAYYVDAVRQKLEDKRRLEALVKDEASKARWRKRVDSIRCLKGIDVMSAADLVFEADEFSRFKNARSFGAWLGLTPSEHSSGESVRQGGITKAGNKHLRRVLVESAWHYLNASAHSKDLAKGQIPDPAARRHAAKGVRRLVKRREGMLERGVHKNKANVATARELAAWVWAVGCIVESA

SEQ ID NO: 140115 - protein, 356 aa, unidentified
MNNLSKLDFTGQPIYIGLDVHKKSWSVSIHSQQCEHKTFTQPPEVDTLVKYLQRNFPGASYSAVYEAGYSGFWIHEQLKEKGVPCLVVNPADVPTKDKERAKKRDRIDCRKLARSLRGGELEGIYVPGRSNLEDRSLVGTRQSMVRKQTRCKNQIKAMLLFYGIHLSEEQVKSHWSRRFLEWIEGLRMERSSGDLALQVHLAELRHLRQILVILDRGIRELAQTEEYREWVRLLKTIPGISTLTAMILLTELIDLCRRFSSLDELASFVGLIPDTQSSGETEHTGEITKRRHGQLRALLVEAAWVAARKDPALLRAFEGYCQRMRKTMAIVKIARKLLNRIRFVLKNHKPYVPAVV

SEQ ID NO: 140116 - protein, 349 aa, unidentified
MIIGCDFHPRYQQMAMLNTETGELVERRLEHENEEARAFYPSLPKTARVGMQATGYAQWFEPMRAEQGHELWIGHASEIRAGVVRKQKRDAREAAHLLRLLLEKRFPRIWLPSPAERDTRQVLRHRYKVVCFRVSVKNQLHGLAMSQGICRKKRLFTAPGREELERLSLGPWASRRGQELLGMRDRFNPLIDELDRAVQQPAVKHADAARLMTHPGVGPVTALAFVLTLGPVARFQRSKHVVSYLGLNPQERSSGDQQHTYAISKQGNTMMRWLLVEAAQTAVRFDPELPRRYQRLQFRWGARVAKVAVARKLAVQLYWLLRATASCAQMAPRQGSPRGTLVPPVGPTF

SEQ ID NO: 140117 - protein, 405 aa, unidentified
MRFIGLDVHLDFCEVAICEAGRVRSGGHVPTSPEGLAVLADSLAPDDHVALEATGNALAIARRLEPCVARVVVATRTELRAITEAKVKTDRRDARTLARLLAAGLLGGCWLPDEQTRALRRRLARRAQLVRQRTRSKNEVHAVLMRTLKGRPPMSDAFGRGGRRWLAELELPGDERETVDGCLRQIDFLDAEIAILERGIAEHALRSDAIKRLMTVPGVSLMTAATFIAAVGDIRRFEDPRKLVSYLGLDPKVRQSGIGAARHGRISKQGAAPVRQMLAEAAFVAVSTAGPMRAFYDRVRARRGSQIAIVAVARKLVVLFWHLLTQEQDYAFQRPSLTRKKLRAIELRAGAQRHPGRRDLATKNAYSQRAERARERELSQHAEVAYRRLVADWTATAPARSPAAT

SEQ ID NO: 140118 - protein, 461 aa, unidentified
MRQELVRKSERASGTNREMSSRQATERRMVKCDQNRSCAVIKGGPRVDANMNVVYERCCGIDVHKDEIACYLIIGQKRFITRRYGTLTKDLQEMAEWLKSEKCEMVAMESTGSYWKPLYNVFEMSGINALIVNAQHMKAIPGRKTDKNDARWIAKLVRHGLLKASFIPDREQREYRELTRYRNSRIEERAREKNRLQKMLEGANIKLSSHVSKIMGVSSIRLLELAMSDEELTAERIEQVRNGKCKSSAEEFLDALTGVITPLQRELFAQVLKTINEQSEQIERIEALIKKYTTEAYDEAAKAIEVIPGVGRISAEQIVAEIGTDMSRFPTAGHLCAWAGVAPGNNESAGKRKKGKSLKGNKTLKKTLTQCANNARNNKNTFFHAQFQRLVVRTGKNKAKGAVAHSILIAIYHVLSGKQFVDLGAEYYAQFNREKKIKSHLKQLQKLGWEPNSPDSASQAS

SEQ ID NO: 140119 - protein, 395 aa, unidentified
MFIVGIDIAKRSHEAIIIAEDGQVVRKAFSFRNNCTGYNLLLEQVRRLTLVKSQIVFAMESTAHYWLALYARLLKDGYTVMVLNPIQSHSLRELYIRKTKTDARDSLIIADLVRFGRCKASNVPQDKILALRELCRSRAYLVDMAADLKRKLIALLDRIFPEYESLFDSVFSKASIAVLRKYSTPQKVKNANLRKLTDLLMESSNGHFGEWKAHQLKEAACSSFGIDDSSGVYSTLLGMFLEQILSLTAQADSLEKQISVFFQEFNNPLTSIPGVGTVLAATILSEIGDITRFSSADKLLAYAGLDPSVKQSGEFKSNQNRMSKRGSPYLRRAIWLASTVAVHRDPMFQTYYEKKISEGLHYMNVIGHVSRKMTAVIFAVLRDGQPYQPILQSAG

SEQ ID NO: 140120 - protein, 558 aa, unidentified
MVLSSPFGSVAPWLAAWTLVSLRPALALGAVIPFGRVCRLSPKAGLAHAKVKNFNHDPNMKKREQSPSVPAGQIRPAKQMPLVHRHAAGIDLGNEAHFVCVPADSVPQGQSPVRQFGVFNPDLDEMVEWLKRCQVRTVALESTGVMWIPVFQKLESAGLEVVLVNTKRLKHVPGRKSDVLDCQWLQQLHSYGLLSGSFRPVDIICRLRTLMRQRQNVIASAGSETQHMQKAMQEMGVHLHVVISDVTGDTGLRIIDSILDGQRDPKELVKLRDCRIRRSTPQEMEAALKGDWRDELLFVLGQSRQAYTFFQDQLAKLDEKIIALLADIPQAPPPQGPAQDVPSVPANEDKGSPAATSNDPCPSETVATQGKRAKKVKSKPSKGGNHLPKDIRPELTKIFGTDLTLIPGLNLVNVLILLSEIGSDLKKRWRDGDAFAAWLGLCPGAKISGGKVLSSRTPHVVNRVASILRLAAVVIGRTETCLGVFYRRMKTKHGAAKAATATARKLAVLIYHLQTTGENYKEPDRRKYDEKVRKYKVMRLTHQAKELGFNLVPLEKAA

SEQ ID NO: 140121 - protein, 410 aa, unidentified
MEVLYQRCCGLDVHKETVTACLRVVSSGEVVSEVRTFETTTASLIALSEWLAENGCAHVAMEATGVYWKPVWHILDDGDFQLILANAAHVKNVPGRKTDVNDATWLADLLAHGLIRASFVPDTQTQELRTLLRTRKQLVREKSSHILRVQKMLEDANIKLDSVITDVMGMSGRAMIEALIAGESNPAKLARLANYRLRASQEKLREALRGRVTKHHRFLLRLHLNQIDALDASIVMIDEQVEAGIAPFRAAVGQVMTIPGIRDIGAQVIVSEIGTDMSRFPSEGHLISWAGLCPRNDESAGKRRSNRLRKGAPWLKTTLVQCAWAAVRKKGSYLQAQFLRLKARRGPKKAIMAVAASILTAIYHMLKDGTLYQDLGSNHFQNRSKGQQTNRLVKRLADLGYKVALTPLAG

SEQ ID NO: 140122 - protein, 390 aa, unidentified
MIYAGIDVAKDKHDCLIVDTDGTILFDSFTFTNNRIGFDDLYAKLKSCSSEMTNIKVGLEATGHFSDNLLEFLIFKGLATIVINPLHTNLYRKGLSLRKTKTDKVDAHSIVTMLRTENFKSYSQSSYHVRELKSLTRYRHSLVQDLAKTKSSYARLCQILFPELQPLVSSLHLETIYALFMEFPTAKDISQCHLTRLKKILLTSSKGRFGDEQAVLIRDAARSSIGTYSAMKALEIQQTIERIKIFESQIEQVEHKINPIVDSLNSPLLTVPGISYRMAAIIIAETENFKDFSHPEKLLAYAGLEPSVYQSGQLTSTHSKMVKRGSKYLRYALFNAAKYVCIWDPHFKAYLSKKRAEGKPYNVAVSHATKKLTRVLFHLVKTNQAFVSQP

SEQ ID NO: 140123 - protein, 350 aa, unidentified
MILIGCDYHPSWQQICWMEKETGETGEKKLEHSSGEAERYYQQLPGRALIGMESTGNCQWFLELLGRLGHEVWVGDAAQIRACDPRQQKHDRRDAALILKLLLEGRFPRIWVPSGEEKDLRQLLIHRWKLVRFRVQVKNELQHLAMNQGTTRHRKLWSRAGEKVLRELPLAPWASRRREDLFRVRGMLDEQIGSLDEAVTRAAEQNDRAKLLMTQPGVGPVTSLAFVLTMGDVHRFPRGKQVASYLGLIPREYSSGGKQHFGPISKQGNRFMRMLLVEAAQIAVRCDPQMRSEYLHRCHRKPKGVAKVAAARKLAIRLYWMLKTNTGYPEVVRVGSSSRVPLDAQAQPKG

SEQ ID NO: 140124 - protein, 343 aa, unidentified
MYNAVGIDVSKGKSTVAVLQPGGTVIRKPFDVSHTSQNLNELADYLSSLDGTTKIVMECTGRYHEPMVKALSEAGLFISIVNPHLIKNFGNNSLRKVKSDPADARKIARYTLDNWTELRQYSGMDNTRTQLKTLNSQFSFFMKQKVAAKANLIALLDNTYPGVNKLFDSPTREDGSEKWVDYAYSFWHADCVRKIGLKAFTERYMSFCKKHHYIFQQDRPEKLFNASKELVAVFPKEKTYKLLIQQSIQQLNLASEHVERLRREMNELASTLPEYSTVMGIYGVGKTYGPQLIAEIGDVSRFTHREALTAFAGVGPGVDESGQHKSKSNRASKVGSARHCFRS

SEQ ID NO: 140125 - protein, 400 aa, unidentified
MNPVVGLDVAKGESQVQAFLDQSKPYGKSFSMKHIKKELDHFLEFLKEIEEVTGQMPMVILESTGHYHSPVIQYLEEQGIPYILLNPIISYQAKKSSLRKVKTDAIDAYQLCVLYYKEDLEPHKIRGIQLLDLRNLSRQQEIVTNMYVEAKLQFHTILDQVFPEYRKVFGDLYSRVSLLILKEYPTSEAVLAAGESKLAESVIEFCPSRSGQWAWEKAKKIMDSASRNPFQKNVYQSHVINLRMYIELLFHYQGHLSDLEDRIVALANELEEYKIIQSIPGIGEKIAATIISEIGEIDRFNHPKKLVAFAGVDPSVHSSGKFTATINRITKRGSSRLRHSLYLAVLCGIRSSRNKKLKAFYDKKKSEGKPAKVSIVACMNKLLHWIYALLKRKEAFLDLA

SEQ ID NO: 140126 - protein, 345 aa, unidentified
MELHTIGINLGKTVFHLVGLNLRGEVSVRKKCSRTQLLRFTANVHVRLIGMEACGGSHFLGRALREQGHQVRLIPAQYVKPYVKTNKSDYIDAEAIAEAVARPTMRFVPIKTDDQLDLQSLHRVRERWVMRRTAVINQIRGLLLERGITLRKGRRYVDAALPGILEDADAKLSGALRMLLAQLKLELDHLDLRIDEADALIKKTARENEACQRLVAIPGIGPVTATALIAAIGNGGAFRKGREFAAWMGVVPREHSTGGQQKLLGISKRGNSYLRRLFVQGARAVMQQRTKQSSGLSAWLAQLTSRTHRNVAAVALANKLARIAWAVLARNEQYRPPVLANVAAA

SEQ ID NO: 140127 - protein, 436 aa, unidentified
MRGCRCSMIMGFTKPIEHFNLQRKKVITMNTLYVGIDVSSKSNVVYLMLPNGDKHSNFSIANSHEGSTQLVKRILSALTSHSLDTVLIGLEATSVYGDNLVYFLREDATLASFNRKIHVLNPKQVKKFHDAYNDLPKNDYVDSFVIADCLRFGRINKEVYLGDYRYKALQNLTRARFFAVQNLVKEKQRFMNVLFKKYSTMTQEKVFSDTFSTTALAVYDEFESAEALANMDLQELTDFIMEKGKNRFPDPDAVAKAIQKAARSSYRLPKTVNDSVNQVLSISITSMKALESQIKELDKAIAAQMELLPNVLISIPGIGPVYSAGIMAEIGDINRFDSQAALAKYAGLAWKQHQSGGFEAEVTRLIPSGNRFLKYYLCEAAFSLVRCDKEYSDFYHLKYKGVNRCQHKRALALTARKFVRLVFRLLKDNRLYCQAK

SEQ ID NO: 140128 - protein, 355 aa, unidentified
MLYLGIDQHARQITVSLRDENGDVIEARQVSTKPEKIHDFFQRLTAERLKAGEKFVAVLEVCGFNEWLIRMLRDYRCHKVILIQPEQRTKRKTDRRDAAALSELLWVNRKRLLEGKAIRGLRQVEIASTTDQENRRLTTLRKEAGQARTRIVNRIRQILRRHNLQWEMPTKLFPTQRAIAWLKKLVLPEIDRLDMQYLLADLEVIRQRLQELEKVITDRCGASEDARQLLSMPGVADFTATALACRVGNVKRFPRGSSLANYWGLTPGCRNSGEKSQRLGSITKAGSSMARWLLAQVTLNVLRKDARLREWFKRIKRKRGSKIARVAVMRKLATIIWHMLSKRKTYDECRAFKTA

SEQ ID NO: 140129 - protein, 430 aa, unidentified
MKSNTQNAKIEAITEKTLVLGIDVGSEMHYARAFDYRGIEYSKKPFKFSNTEAGFVTFKEWILDLKERHEKDKVVPGMEPTGHYWFNLGKFLQDNEMKPVLVNPHHVKKSKELDDNNPTKNDRKDPKVIAGLVREGRYMIPYLPEGVYADLRTASNIRFQLQAELTRIQNRISRWFNIYFPEYKTVYGKPDAKSGMLILKAAPLPEDILTLGIDGVNQIWRDAKLRAVGKARAKTLIEAAEHSVGSKEGAVSARMEIRMLLEDYESRNIRLQEVMALIEGLVKQIPMAEKLLEIKGVGIRTVSGFLAEVGDISRFNNPKELQKLAGLALVENSSGKHKGETTISRRGRKRLRYLLFEVAMSLVAKNPEFRELHNYYTTRRLNPLKKMQSLMAIAAKLIRVFYAMLTKGVDYDPKKMVSDIKRPAVYIQAA

SEQ ID NO: 140130 - protein, 325 aa, unidentified
MTMNNAFNHVIAFDVAKHSLAVHILPGDESHTIENKPKVIRKLLIAQMRRNANLGLGPLLVVCEATGGYERHLLEVCEELRVATHKAHGSRVRHFAKYLGLIAKNDPIDARVLALYGLKTENLRLHSPLAPELAALLDLRARRDQIQAMLLAETNRLEHVRHASVTRSLKEHIAILRKALAAIEAKIAAHFQASEALARKAALMRTLKGIGPGTATVLLAYMPELGTFSRAAAACMAGVAPFDDNSGKTSLPRHIEAGRAAVRKALYMAALTAIRHNRIMKSYAERLRRNGKCAKVVITAVMRKLIVTLNAMLRTGEPWRHAQTA

SEQ ID NO: 140131 - protein, 391 aa, unidentified
MIYIGIDAAKDKHDCHFVNSDGEVLLDNLRILNNLNGFNKLKQAIEQLSNGDSSQIKVGLESTGSYSANIISFLKQLNLSVTVLNPYNVANLRPATTLRKTKTDKSDARLIATATALCSPNQAYLDISYHIQTLKSLCRTRYRLIKTIQPIKNRFRRILHVVFPEFETLFNVSINSSYELLKKYPGPKAILHTRKSSLEKFLKDISMGRLTKKVDALIEIAKNSIGSYNEGDAFELQDTCDTILLLENKLANLESKVKDTMQIINSPITSIPGIGVTMGATILAEIGSIHKFDSPEKLQAFAGLAPMLYESGKYIARDTPMDKKGSVYLRNALYQATKSSYVLNSFMRSYVDKKRAQGKHFYTAMSHGMKKMVRVIFAVLKKNSNFVEPII

SEQ ID NO: 140132 - protein, 426 aa, unidentified
MRSFALDVHQSFCEVAICERGEVRSAGRVKSERAALELFAESLDPADQVVMEATGPAMEIARIIEPHVARVVVANAQDVRAISHARVKSDRFDARTLARLLDAGMLEAVWVPDEATQELRRRVARRAALVRQRTRAKNEVHATLARCLLGRSPVSDLFGKGGRAWLARQDLPAAEVETVAGCLRQIDFLGEEIEAIDARLCEWVSASPEAKRLMTIPGVGVGAAAALMAAIGDISRFSSPRKLVAYLGLDAKVRQSGESAAQHGQISKRGNAQARSVLVEAAWIAVRSPGPLRAFSERLRARKHSGVASVAVARKIACLCWQLLSKEEDYAFGRPSLVRAKLRRAELSAGAAKLPQRHGGRRISATPKEREAEREMVERAETAYRRLVDDWRSSGAKGAGVTRGRASSGPSTGQAARQASAPDPAL

SEQ ID NO: 140133 - protein, 420 aa, unidentified
MTVYLERGYNRKECQWFQTVSNTFQRSIAMIYIGIDVAKDKHDCFITNSDGEVLFKAFTIPNNRDGFDELYQKIESVTDNLTKVKVGLEATGHYSYNILGYLLDKGLTTFVINPLHTNLYRKSLSLRKTKTDKVDAHTIAIMLMSDVNLKSYSDTSYHNEELKSLTRYRFDKVKERAKLKQSISRLVTILFPELEKLVPTLHMASIYDLLFELSSASDIASVHLTRLTNLLTTSSKGHYGKDTAILFREAARTSIGSHMPAKSLELKHTIRLIRELDSEISEIESEIKSIMDEINSPILSIPGINYRMGSMIIAEIGDFSRFDFPDKILAYAGLSPSTYQSGQLESSHSHMEKRGSRYLRYALFNAAKFVCRWDPTFAAYLEKKRSEGKHYNVAISHAAKKLVRVIYQLEKSRQSYIKAA

SEQ ID NO: 140134 - protein, 365 aa, unidentified
MKIMHWIGIDDHADKWTIAHFRGNEEKPAKEFELVPDSKGYRRLVSFLKELKGEVRIVYEAGPCGFELFRRLTADGFQCQVAAPALTPRKPGEKVKTNRRDAAKLGRYLRSGELTMVAVPSAEQEWLRDLIRSRQSVQRDVGRLRKQIVQLLLRYGHRFRDGDAWTRRFWAWLKGIKLTGEYSSFVLTDKIVELEHRIEQLRRYDELIESAAAKPEYQPYVAALRTLRGVDTLSAMTLLSELGDLRRFPTAPQLMAAVGLVPSEYSTGDKTNRFAITKTGNAHVRHIAVQAAWQYQRRLTTGVKIKARRKDQLPEVVAIAEKCDARLNRRFHRLTSRHKKSTVAVVAVARELIGFIWAIGQIVHP

SEQ ID NO: 140135 - protein, 345 aa, unidentified
MKDITTLGIDLAKNVFQIHGADARGKKMLTKRVQRHKLVEHIANMSPCVIGMEACGGAHYWARRFKEFGHDVKLMSPQFVKPYVKSNKNDANDAEACCEAVTRPSMRFVPNKTVEQQDIQAMHRIRSRLIAQRTSLSNQIRGLLAEYGIVMAQGIATLRRKLPDILENAENELSMIGRELFQDLYNEFCELEERIKQYEVKVVKIAKEDERCQRIQTIPGVGKLTATAFFASVGDVKVFTKGRQLSSWLGLVPKQSSSGNKVRLLGISKRGDRYLRSLFVHGARAVVKTVPNKTDPYSLWINQLISRCGINKAVVAVANKNVRIAWALLKYETSFDPEYKRKTND

SEQ ID NO: 140136 - protein, 342 aa, unidentified
MQITTIGLDIAKNVFQVHGIDAKEKIVARKQLRRSQVIAFFKTLPPCLIGMEACATAHYWARELVKLGHEVRLMPAKDVKAYVKRNKNDAADAEAICEAVRRPRMRFVQIKSPEQQGQLMQHRTRDLLIRQRTQIINALRAHLAEFGIVAAQGNAGVNELRVIVADERDTRLPIDARASVIVLAAQLEALECVIGAIEKRIKMQHRSNEASQRVETIPGIGVIGATAIVATVADPTIFRSGRDFAAWIGLVPRQDSTGGKQKLGPISKQGDRYLRRILVVGAIAVLRRAQENSGKYPWLTQLLARRPFKVVAVALANKMARTAWALLAHGGTYRAPELAEAA

SEQ ID NO: 140137 - protein, 346 aa, unidentified
MLYVGLDLSRKRVDFHALREDGELVERGALPADPDGLARLVFRLGGHDRDVLAVIESMNGARFVHDQLELAGFEVEIADAQRVKGLAPLACKTDRIDAWVLAELARRDLVPKLWLPDPAVRGERERARFRLHLVRQRTALKNRVHATLIAHGYACPVCDLFGRAGRGLLERLELPEPWRGTLAASLRLIDELEREIDACERELRRLGAEHRYVPLLTTIPGIAWVLGYTIASELGDVSRFASPRKLTGYTGLCPRVEQSGERDRRGPISKHGPRYLRWALIEAAQHAGRHPAYRDLYQRKRAQHPGPRGSKVAAICVGRKLAEAIWHMLTRNQPFAPAGATLDLAA

SEQ ID NO: 140138 - protein, 388 aa, unidentified
MYLVGIDVSKFKHDCFIVTDNGEVVKKPFSFDNSRDGFLFLINVLNQLDKTKEIRIGLEATGHYGTNLKNFLKRNDFDFAEFNPYLIKKFGESFSLRKTKTDKVDAKLIAQVLMVVDYKTYIKHFNILSFKSLTRLRGKLVKSRSKYLVQLTNLLDVAFPEFKPFFDNRFTKTTLFILKKYKTADKIANMDKVNGFTEIKTMSRHKYKDSKLTQLVKLARNTIGTCDDYTEIQIDIILDMIFKLEEHIINVEKEIENIMSEIDTIISSIPGIGIQSAAIIVSEYEDFNRFENPGQMLAFAGLDVRINQSGTSEQHGKMVKRGSGQLRYGLMSVANALIINNYVFSEYYYKKRSEGKCHRVACSHVVKKLIRIIYHLEKNQMNFDYNKI

SEQ ID NO: 140139 - protein, 449 aa, unidentified
MSNGSGVSRGDRNRNARLARLRALVPVSNAIVGIDLADEKQVVVVTDHDSKVLARKTFKCHAWNLGTALDWAAKQAAAKGFAAVTVACEPTGHRWRVLGQLADERGMPFVCVQPMLTSWARRSEDLTFDKTDEKDAVLIARLAAQLRCYVPETVDETWGRLRHLGARRAQLIVESGRQVQQIRALLECVWPAALQTARQPFRSSTWTAAITVVVDRDGGVLARTRRLGAARWEAAVRKEIIRRGRKKPCMRIVRSMFAALSDPAGVTAHRPGALERVALVLADWLETHRRLADTEARMMAILDQLQLTELVTSIPGLSAIGAAAILAETGDPNRFATARALVKHAGLAPREKLSGTFIGRTKLTGQGRPGLRLAAWRTVWGAQRANPVYAARFTHLTTRKQNKLTVTQAQAVIAAAILRQLHAIITTGRAWDPAIATHGTRTEALPLAA

SEQ ID NO: 140140 - protein, 446 aa, unidentified
MDVLYTHCAGLDVHKKQLTACRWVPDPTGQCVEGLTEIETFGTMTIELLGLVDWLTEAGITHVAMESTGEYWHPVYNLLEGHFTVLLVKAAHVKNVPGRKTDKADARWLAKLLRHGLLQASFIPPRGQRDVRDLTRYRTKLVQERAREVNRVQGVLERANIKLASVVSDVMGVSSRAILAALVDGRADPATMAELARGRLRSKLPLLEQALSGLVRDHHQQLLAMQLTHIDFLDEQIATLNTTIAERLRALTPTETVTVPVAADEPAGGRAPHVDAAAPLTFDQALILLDTIPGVDRRGAEMLVAEIGTDMSRFGTAARLAAWAGVAPGNDESAGKRRSGKTRKGNRALRAGLVQLAHSATHTKGTYWATLFRRLAARRGKQPAIIAVAHSILVSVFSILVRHEPYRELGATHFDRLRHSQSVEHLTRRLEQLGYEVHLEPRPAAA

SEQ ID NO: 140141 - protein, 339 aa, unidentified
MKKTVKFYLGMDVSKLWVDIAVMCVVDHNKQPLAGERFDNNAAGMKALDKWLKKHKVCFNQNSLLVIENTGVYHRLVWEYCSTHNLPLYIGNATHIKYSFGIARGKNDKIDSQRLCTYAFKNADELKATPVLNPVFLKLKDMMTSRSRLLAQLNSITVYLREMKLSNSKETQAIIEEAHKAAVEGIKKSLKAVEKQIHQMVQQDAAIKNNYDLLLSVPGIGHLTAVYIICCTNNFICKITGKQLSSYAGVAPFSNTSGTSIKGKDKVHKMANKDLKKLLHMGAISAITHYPEFKDYYERKVKEGKHKISAINAVRSKIALRAVAVINSQKKYVNNYKKA

SEQ ID NO: 140142 - protein, 400 aa, unidentified
MKSGANILHLGLDVHKETIAVAIASGEGPVRRYGEIPGHLQAVDTLIKKLQKPGEELRFCYEAGPCGFVLCRHLRRKGFLCEVVAPSLIPKKAGDRIKTNARDAEQLARLFRAGELTAVRVPDETDEAIRDLIRGRLSAVFDQRRARQRLKGFLLRLGFRYPGKTSWTPAHMNYLSKLKMPHPAQQIVLEENIGAIQSAGERLERLTTQVHGQLTDWKWEPVVRALMCLRGVSVINAMTLVAEIGAIDRFNHPRQLMGFLGLVPSEHSSGSKRHQGAITKAGNGAARRALVEAAHQYRIPPRISPTLRQRQHGQSESVRQIAWKAQQRLHARHRRLSARKKKAVVVVTALARELCGFVWAIAKSVPNPIQSNATQPGAKIYVLNPRLKFKSAADRKPASS

SEQ ID NO: 140143 - protein, 404 aa, unidentified
MYNAVGIDVSKGKNTIAVLQPGGTVSRKPFDVSHTSQSLHELTDYLGSLDGSTKIVMECTGRYHEPVVKALSEAGLFVSVVNPHRSKNFGNNSLRKVKSDPADAKKIARYTLDNWAELRQYSGMDNIRTQLKTLNSQFSFFMKQKVAAKANLIALLDNTYPGVNKLFDSPVREDGSEKWVDYAYSFWHVDCVRRIGLKTFTERYRAFCKKHHYIFQTDKPEKLFNASKELVAVFPKEKTYKLLIQQSIQQLNLASEHVERLGKEMDELASTLPEYSTVMGIYGVGKTYGPQLIAEIGDVSRFTHREALTAFAGVDPGVDESGQHKSKSNRTSKVGSARLRKTLFQIMTTLLQNAPQDDPVYRFLDKKRSQGKPYYVYMTAGANKFLRIYYGKVKECLRNLEQAE

SEQ ID NO: 140144 - protein, 308 aa, unidentified
MIVQNYVGCDISKQWLDFFDEANGQFRHIDNQADAIAAYVAGLHPSRDFVVMEATGVHDRLLRHALAKAGIAFSRHNPAHTHHYAQSTRRRAKTDRLDARMLSDYGRRYQPEAEPAPRHEGERLQSLAGHRDQLVDMRARLKKLLGEAFDEIVIADLEDMIANLGTRIDALESLIAKTIREAEDTARDYALMVSVPGVSKVGALSLLAHLPELGQRSPKSIAAPAGLAPFDNKSGKLNRRSQIKGGRSRVRRALYMAALTAIRVCDRFKAFYTDLAARSGSKKLAIIAVARKLLVVLNAIIRDKTAFA

SEQ ID NO: 140145 - protein, 397 aa, unidentified
MIAVGIDISKAKSTVAVIDSDGTVLASPFTMAHTQPEMEAFVTYLKGLGEPTTILMEYTGHYHYPVLKKLQDEGFPVCIVNPYQMKKYGDVEIHKAKTDKKDALRIAAYALEKSYKLVPYSSMEQKYEDLKFLSRQYSQRITYVAKLKVQLIALLDQTMPGITRILPLNSRNPEKCALLLFIKRFKSFDEIQRIGKARFLASYDVLAKKASERSASSKGLSIYELAVDSITTRGEDPYIWLSQNQCVDLLSATQNAADEIISQMRNIAETIPEYKVLRAMRGVGDRLGPIILAEIGAIRRFHSGKALNSYAGNDAPPYQSGQFESRNRHISKRGSSALRKACYEVMQALKLIKPQDDPVYLFMLKKEQEGKPFNVAKMAGVNKFLRIYYARAMELYK

SEQ ID NO: 140146 - protein, 402 aa, unidentified
MTDAPNRYIGLDIHKEYFVAVGVNEKLEAIFGPQRVSNYQLDDWILRCLTPEDAVVLEMSTNTYQFYDALLPHVHSVMAVHSPNVAMVTNVRVKTDKKAAMALAQLHAAGLLTGVWIPPYPIRDLRSLIARRDKMVRLSTMAKNRLHSMLHRHHLVTPEKPFAPEQRTWWESLPLSANEQLLVRSDLDTLDFAQKQVEQIEECLKQESAEDVRIPLLIQLPGVAMLTAITILAAIGDITRFPSAKKLVGYAGLGTRVHDSGMTHSSGRITKAGRKDLRCAMVNAANHAVEHHVHWKKELERLAPHLGRSKAIVAIARKLLVAVWHVLSEQVADRFADPRDVASSFIRYAYRIGVRNLPDQQPALAFTRDQLDRLGVGRELKEIPWGSKRFKLPPSKLLLEKE

SEQ ID NO: 140147 - protein, 341 aa, unidentified
MTKNIYFIGIDIAAYSFVASIYQAPQKPVITKEGFENTFDGFNVFSSWMIAQNINPENCVICMEATGVYSEGIAHFLVTQGFKVSVEAPLKVKRAFDPVGHKTDPVDSRQIAEYAYRYSDELRFWQPKDEIIEKIRHLLTAREQFTKQSVAIQNAMGAYKRHLVQVSLITTSHSHILKELKKQIAEIDKELEQLVRKNPTISNMKNQLISLPGYGLLLSSSLIAITSAFSEITSYKTLAAFIGICPYQHQSGKSVYRQAHIRPFGSQYARKLLMLAAWSVVTHNADFKKYYLRKLAEGKAKKLVLNNVANKLVKIACAMIKNNSRYVSTYRSVNPMCLISA

SEQ ID NO: 140148 - protein, 354 aa, unidentified
MTSTKYIGMDVHKESISIAVMNAAGKIVMECVIETKANMILQCIDGLRGDLHVTFEEGTSAAWLYDLLKPHVTELIVCDPRKNASMREDSQNDKIDARRLAELLRIDHLTPVYHGEHGLRTLKELVRSYLTVTKDLARVKTRVKAIYRSWAIPCNGKEVYTACHRAEWLEKINELGVRRRAEFYYQQLDALRVLRQGVRRELLAESKKQRAWKQLCQIPAIGPIRAAVLLGILQTPHRFRTKRPLWKYSGLAIETCSSADHRSIHGQLQRSKKNSVRGLNQNCNHDLKNLFKGAAVIASSKPGPFQEFYAALLANGMRPEMARLTLARKIATIVLIVWKKGVSFDAQHLKPQTA

SEQ ID NO: 140149 - protein, 347 aa, unidentified
MTIVEAARGVTGGVDTHLDVHVAAALDPLGGLLGTERFETNAAGYKALLGWLGTFGDVTKVGVEGTGSYGSGLARYLKRVGIEVLEVDRPDRQKRRRAGKSDPLDAIEAAPAALSGRAKGKPKSRDGAVEAIRVLVVAKRSARQARGKALVQMRHLGYSAPEQLRCRMKGLSVPALVAEGKGLRPGRSPDPVTAATKASLSSLAHRISSLDDELAELNERIEALLVATVPDLLNLFGVGPDTAATLVMAAGDNPERLHSEGAWAHLCGVSPIPKGSGKNSGRVKAHDGGDRQANSALWRIVMVRIAHDPETQLYFERRVKEGKTTHEVIRILKRYVAREVYRYLPRG

SEQ ID NO: 140150 - protein, 309 aa, unidentified
MTAVRIDVGKTALDVVVDGAAGVVRFANSAAGIRKLVLRLEGVADARIVVEATGGYEDALLEACCDAGVWVCRINPRQARDFARATGELAKTDAIDARLLCLLSRLFADRLRRYEAPGQWQRELRDWLRRRGQVVTTLQSQKQQAALTSPAVRKLMARTIAALTRELAAIDREMRTLLKAHTTPALQSSKGMGPIFQATSLALLPELGTLTRQQIAKLVGVAPMNRDSGQLHGKRRIRGGRAPVRVALYMATLSAVRWDPTMRAHYQQLRARGKLGKVALVACMRKLLTIVNARRRDELRDAGGIAIPV

SEQ ID NO: 140151 - protein, 457 aa, unidentified
MSAPKKVKKKSINKANTQLPAIHPHAAGIDIGAAEIQVAVPCDADPNPVRTFSTFTDDLHAVRDWLKKCGVQTVAMESTSVYWIPLFQILEAAGLEVCLVNARHCKNLPGRKTDISDCQWLQYLHSVGLLRASFRPPEQICAVRSLLRHRATLARYAGSHVQHLQKALTQMNLQIHNVISDLTGVTGLAILDAILAGEREPQKLAALKDHRIKASRETIARSLHGDWRTEHLFIIQQALDTWRHYQKLIGQCDEQIQQQMASFDSKVDLHQHPLAASRLGHKKPQRNEPNFDARTELYRLCGVDLTQVPGIQINTSLVLFTELGPDFVSRFPTAKCFASWLGLCPDNRITGGKIISVKTRDVKSRAAMALRLAAQSLWHSHDYLGECFRRWKARLGTPKAITAMAHKLARIIWHLIKYRTPYDPSVWAQAVEKLKKKRLRYLQQNAAALGYKLLCAS

SEQ ID NO: 140152 - protein, 389 aa, unidentified
MQVIADQAEAPSAIRSNLGAIFVSLELSRSTWLITSLLPGGSEKMSKHSVPAGDICALLARFSELRQKAFTRTGKSFPIIVIQEAGLDGFWIHRVLQNEGIESHVVDPASIATSRRHRRAKTDRIDGETLLRTLLAYKRGEPRVCAMVKAPTPEEEDRRRLCRERKVLIAERVQHVNRIKGLLLCQGVSGYEALRRDRRQRLDELKTGDGRALPDHLKAQISRELARLELLLEQIKAMEAERDALFAAAKATMPASGPVAMLLEIKGIGPEFAAILWMEAFFRSFANRKQVAAYAGLAPTPWQSGSVDREQGVSKAGNPRLRTMLIQLAWLWLRHQPQSASLWFKERVSRNGGRFKKTTIVALARKLLVALWKYVTAGVIIEGAVMKPA

SEQ ID NO: 140153 - protein, 381 aa, unidentified
MKKATRFVGLDVHAESIAVAVAESGRDGEVRSLGLIPNRVESVRKLIRKLGGPKGLHVCYEAGPTGYALYWQLTELDVECEVIAPSLIPTKAGDRVKTDRRDAVKLARCYRAGELTAVWVPDREHEALRDLVRAREAAKKDQLRARHRLGKFLLRAGIRPTETPTWGALYMQRIRTLTFHHVAQQATMIDYLSEVDHHTARIQRLEQAIDQAIEHAPPVMREVIGALQALRGLAKLTATTIAVEIGSFTRFANAKKLMAYVGSTPSEYSTGGSRRQGAITKTGNAHVRRVLFEVAWAYRHRPGLGPALKQRQQGAPLEIVEMAWKAQHRLHRRYTALTARGKPHCKVVTAIGRELLGFVWAIATHVERNHIQNEKGERAAA

SEQ ID NO: 140154 - protein, 337 aa, unidentified
MKHLGIDVHLRSSEVCELSERGKVLDRSRIPTTESGLRSYFGRRNRCRIVMECGASTPWIYRLLRELDHDVVVVDARNIRLIAESTLKCDRVDAEILARLSRFDPALLQPVYQRSYAAQELRTRLKVRQSLVRSRAKLITTIRGSLRAHGYRLGSCATRSFVARWATLEVEESLRQTLEPLVETIAELTDRITVLQRELYAEAKSDELPVRLQEVPGVGPLVALSFVAWVDRPERFATSRAVGASLGLRPILRASGDRAHRGRITRQGDVEMRWLLVQAAHASFLAKRDSALRRWAEQLERRVGKAKAAVALARKLAIVMHRMWVTGEGYQPFPKAA

SEQ ID NO: 140155 - protein, 388 aa, unidentified
MHIVTDRPHAPTAIRTDLGAIFISLELSRSTWLITSLSPGGGEKMSKHTVRSGDVAGLWARFSQLKDKVQVRTGQTVPIIVIQEAGLDGFWIHRLLQDKRVESYVVDPASIATSRRRRRAKTDKIDGEALVRALLAYKRGEPRVCAMVRAPTPQEEDRRRICRERKTLTAERVEHVNRIKGLLFAQGITDYEPLSRKRRERLEELRTGDGRPLPEHLKAQIGRELDRLELTLQQIKSVETERDAMLSPSDEGTRAPGAMLQNLKGIGAEFAGVLWSEGLFRSFSNRRQVAAYAGLAPTPWRSGSVAHEQGVSKAGNPRLRTTMIQLAWLWVRHQPRSILTLWFHQRVALNGGRARKVLIVALARKLLIAFWKYVTAGVVLEGAETAAA

SEQ ID NO: 140156 - protein, 360 aa, unidentified
MNTVKNAVRIGIDLGKNVFHLFGVDDAGDPLLKKKLTRKQLLPYLANLEPCCIGLEACGGSNYWAREIRSLGHDIRLMSPQFVKPYVKSNKNDYNDAEAICEAVGRPTMRFVAVKTVEQQDVQALHRIRQSIVKARTAQANQIRGLLGEYGIVIPAGIANLRRHIPALLEDAENGLTARFRIWLSDLYRELRALDERVQRCTREVLVLFRADEACQRIGAIEGVGPQTATALVSAYGQAREFSNGRQFSASLGLVPRQHSTGGKPRLLGISKRGDTYLRTLLIHGARSVVHHAAHKSDPRSQWIQRLVADRGTNRAAVALANKNARVVWALLSKGDEYRGGAHRSKWSSRPNIHPAAPQV

SEQ ID NO: 140157 - protein, 422 aa, unidentified
MMGKERRWFVGVDWGSQEHVVSLYDDEGEKISQRRFAHGGTGLTDMIAWLLKASGGKPGDIHVAIETPHGPIVEAVLERGFNAYSINPKQLDRFRDRFTVSGAKDDSRDADVLADSLRTDMRAFRKLSIADPIVVELREWSRIDEETKVEHVRLTNRLKHQLWRYYPQMLELADDVGANWFLDLFEVVPTPEKAANVREKTIARILKNHRIRRFDATHVLSELRKPALSVAPGTIEAATARIRGLIERIRIINNQIKDAGRQLDRLCKNLSEPVADKDEETSPGQKTEQRDAAILDSLPGVARTVLATLLAEASDTLQRRDYHALRALCGSAPVTRRSGKSCIVVRRYACNQRLRNATYHWAQNAIQHDATSRAKYDALRAKGHGHARALRSVIDRLLNVACAMLNSGTLFNPEFASKQTTG

SEQ ID NO: 140158 - protein, 347 aa, unidentified
MITEEVHVVGVDVSKATLELGCFSLTLPASIPNTPAGFKILLKSITKCITPVHIICEATGPYHGPLVRFLHQAGIKVSVVNPRLTRDFARARGKLAKTDAIDALLLADYGRTMQPDPTAPPEEHVVLLDELVTRRAQLVEDRARERNRLEQASGPDVAASLRLHIRHLDEQIKKLLKRIAEVVEKHPSLKAKVSLLAQVHGIGTLTASVLLATLPELGTISKNEVTALAGLAPFNRDSGAFRGKRSIHGGRIGVRCAIYMSALCASRGNPILKTFYQRLRAAGKPHKVALVAVMRKLLIYLNSLLKQHSLSPASKLARKDSCYGVTLMRDLPRRFPPAWFTLLTFHF

SEQ ID NO: 140159 - protein, 332 aa, unidentified
MLNCIGIDVSKATINVHISKTNQDLLLDNNLKSFRSLFSKLKKIYKKEIEDIIFIFEPTGSYSEALRKYCSDKNIKCFIINPKQFSNYAKALGVEVKNDVEDARVLSKALHLAKEEQVKVPVFNEDVEQMKELMSFYRFTKKQTTQQQNHLESLNSKDGDKFSIRELQKSIDDSKKKELRIIEQIQILIDSTDEYRIAYENIISIKGVGQIAAIVLLHLFLKYPEANQRQITSLTGLNPIYRQSGTSIQSGYRIAKTGAGIYRGTLFMATLSAIQHDKNFKALYDRLKSKGKHSTSAQIAVMRKIILTALSLYKNNRKYDENFNTQKVSSME

SEQ ID NO: 140160 - protein, 343 aa, unidentified
MLTNNVIAIDLAKNVFQVCHISIHGEMLSNRPLSRQKMKEFLAKAKPSIVAMEGCCGCHYWGQLAEKFGHEVRIINPKKVKGYLEGHKTDHNDALAIANAAIQIGIKFSRPKSLEQQSMQSLESSRRFLSRTVASLGLHIRSTILGYGVANPRGEKGLKASVQAALDGETQIPPTVVSVLSMLWEQYKELKAQLISFEKEKNAMTRQIEPCQRLMKIEGVGEATAAMLYNTLGDGKQFKNGRQASAFVGLTPKQHSSGGKVIMIGIDKCGGVKELRSLLYLGAMSYVGRLPEKPKTQKDKWLRSIIDRIGFKRACIALANKVVRTAWAMLRYDTEYKPVLLTE

SEQ ID NO: 140161 - protein, 409 aa, unidentified
MLHGNETSTGDEVFGGIDWGGAFHQLCLIDATGTVRLQRRITHDVAGLAELDRILGAQTGGLRVAIERAEGLLVEHLLTRSVEVYCVSPKISARARERYRLSAAKSDSLDAFVLADTLRHEHRHWRPLSPPSPLLAELRAVTRDRQRVLHAQQACESQLRAIMDAYHPGPLHLFSSLDRDISLDFITDYPTPEQASRIGAARMDAFCRRHGYSGRTRPAVLVDRLRPNLLAASEGTVAGKSFGATLFTDQLRLLNRNLRAYDKKLDQLLDTHPDAAIFRSFPGIGPLVAATLISEMGEDRNRYPTPGTLLAETGLAPVTRASGRTRQVRFRYAANRRMRHAIDWWAFVATREDDWSSAVYEAGRARGHGKYRALRGLGARWMRILWRCWTDHTTYDPTRHHPEDTAQAA

SEQ ID NO: 140162 - protein, 342 aa, unidentified
MEYYVGLDVSLKQTSICIVDQAGLVVREGVVDSDPEAISAYVKSKAPDAVRIGLETGPTSTWLWTELKRLGLPVICIDARHAKAVLKMQINKSDRNDAIGIARIMQTGWFKEVHVKDIDSHSVRALLASRALLVKIKRDLENHVRGLLKNLGLVIGRAKFNVFAVRVDELIEGRPELVAAVRPLLEARNAVEQQVSELDRKVMRLARHDAHVRRFMTVPGVGPITALAFKATIDDPARFARSRSVGAYVGLTSRRHASGEVDWSGRISKCGDAMLRSYLFEAAGVLLTRVPKWSAVKAWGVRLAKRNGLRKAKVAVARKLAVILHRMWIDGTEFNWSKEIAA

SEQ ID NO: 140163 - protein, 339 aa, unidentified
MNLYFIGIDIAKDTFVASIYHRPKEPVLTKENLSNDKHGYDKLIIWLEEHRIGKSNCQVCLEATGVYSQAISYYLLAQGYRVSVESPLRVKRAFHPAGHKSDPVDSREIAEYAYRFQDELIPWKPKDDLLEKIRQLLSVREQFVKQQTAIKNAIAAYRLEQVQVSLIVKAHRETLGQLERQIKRIDKEIERLIKEDPHIRNRFDSLKSIPGFGMLLATHLLVMSDNFNRIEEYRRLASYIGIVPYEYRSGSSVHKRPRIRHYGPSASRKLLRLAAQSVATHDKTFRRYYLRKQAEGKAKALVLNNIANKLLKVACAIVRDNTRYIKEHRSIHPMYVNIT

SEQ ID NO: 140164 - protein, 353 aa, unidentified
MKKMFIGIDISKKTFDAVAIKAEGIVELMARRHEKFQNNAEGFKALLKWVRPLADGIEPGQWLFCGENTGDYGLRLANFIYAKGMDIWMETPYVLKHSSGLQRVKTDKADANKIAEYAMRHQDRFRPYEPLSDNVRQLRELFLYRHKLVQHRQAVTIRDIGKNDLVDMDKVNKFIKRQTKHVIKAFDKAIADCDKKMKELIESDNDLLNTFEIVTSMKGIGMQNAASLIVYTNNFKRFGFNARKLASYYGVAPFGKSSGTSVNTRPRVSGFANRLIKSMLTQAAQCAIRYCPEIRSYAMRLQERGKHIGIIINNSCNKMLAMLTAMVRDNQKYNPDQQQKSREMFIRNKCVLN

SEQ ID NO: 140165 - protein, 403 aa, unidentified
MSTFVAGLDWASRTHATCVIDEHGSVCAQFEINHEATGLAELRRRLTAAGVTTVAIERPSGLIVDALLEGGFTVVPIHPNVVKATRPRYRSHGGKSDASDAYLLADLLRTDGHRFQPLTTQSDDIRALRALVRGRDDLVATRVQLANQLRSLLQSFWPGAAEIFADIDSPIGLAFIQRYPTPKSASRLGPKRMAAFCSQHAYSGRRSADELLSRLHQAPAVAVGELEMAAKGELARGLARTLDHLVAQIRLLTSRIEHHIAHSDDGRILMSFPRAGRICAAQILAELGSVRARFDSDEHLAAEAGVAPVTYASGKSKAVTFRWACNHRLRAALTCLADNSRHANHWAAHVYAQARARGCDHPHAIRILSRAWLRVIWRAWVDRKPYDPTQHRAAQMLLQTATG

SEQ ID NO: 140166 - protein, 337 aa, unidentified
MKYSGIDLHSNNSVVTVTDEEDRVMVEKRLPNDLHSILEFLKPWREEIVGVVVESTFNWYWLVDGLQEAGYRVHLANTVAIKKYEGLKHSGDETDARYLAHLLRLDILPTGTILPKEQRAVRDLARKRMQLVRSRTTHILAIENITARQFGARMNSNQVKKLTDDEIDRMPLHADVALALKANHAIITAVNTQIDLLEKRLQEIIKARSTYDLLTSVPGIGKILAITILLETGPIERFADVGNFASYARCVDSVHTSNGKKKGEGNTKNGNKYLAWAFIEAANFARRYSAEAQRFYERKKAKTNNVVAIKALAHKLARACYHILKDGKPFDVARCFA

SEQ ID NO: 140167 - protein, 438 aa, unidentified
MTPPEIRDYSKEATIKGRRLDFSLGNKPRAWRLADASCRLIIVVESTVLEYGNSPETKVAKHKPYQGVGMKQRANGREKVIYAGVDYHKSSFTVAYLDRLTGVLSTRKYKTEEIGKFKEHLKNFQENGYGVRAAVETLTGVTYFTEEIRNYVEELVYVNTNRFKHILKGVNSAKNDRIDAETIAIYHEMGLLPTVYIPTRKEKELRMKIKERDSYVDMRRDVMNRLHSILLEYGIKTNKRELTTKKGVERIKEETKEKVPPSMQEMIWRYIETIEYLTQKIRETEEDIKGFIENEEEFKERVELLKSIPGIGDIVAISFISSICDEKRFENGDKVAAYLGLVPRVRSSGDNERNGRITRKGNSRIRNKIVQAARALLNSKSNNSIKRFYLKLVRRGVEKKKALIAAARKLVKVMFAILRERKKFVDFIDDKCNLCVGG

SEQ ID NO: 140168 - protein, 380 aa, unidentified
MKYTGSRSIKHTKEGFDEIVSLVREMEKKLETEVCVVYETTGVYHRVLKKVLEDNNIKQFIINPLLSAKTRKNDSLRSPKTDKLDPKSIAKTYYSHSLHNSHKPETIYHELRELSRYYEDILVHLRKDKVAFRARLDVVFPVYDTLYDDLYGPVALAVIEKYPHPEMLQKKKINTVSKVIQSKTCHRQAMSETMADKAIEYSKTIYSGCDKDDIEVLILQRFIKKLKEDMAEAERTIGEMIKLAQELPDFSIIKSIPGIGDNLAARIIAELGDMTRFKKKNELVAFAGLDPRISESGQNDGDHMHITKKGNKRLRCLLYLAVTCSIRLKRDDNSIKDFYIKKKQQSNPMCSKAAKTACASKLVRIIYSMCKTGELYQYNK

SEQ ID NO: 140169 - protein, 403 aa, unidentified
MNSVGIDISKGRSTIAVMRPFGEVVISPFEVRHTGSELSKLAKQLKSLDGETRVVMEATGNYHASVAKLLHNAGLYVSVINAKLVHGYGNNELRRVKTDRKDAVKLANYGLDRWLTLPRYIPEEDTRLLLKNCYRQYRQYSKVQTVLKNNLISLLDTVFPNANRLFSSPIRGDGSEKWVDFVAEFWHCRCVSEKSERAFTGKYLRWCRKHGYNFREAKAHTIYAEASGHIGVMPKFETTKLLVEQAVAQLRATSTALAALKHEMQSLASQLPEYPVVMDLFGVGPTLGPQLIAEIGDVRRFYSKKALVAYAGLDAPPNDSGDVTGRHKSMSKIGASSLRRTLFLVMSVYLQTAPLDEPVYQFMDRKRAEGKLYRVYMMAFANKFLRIYYATVKAYLESLEHTA

SEQ ID NO: 140170 - protein, 310 aa, unidentified
MTWIGIDVAKKKFDVFVRPSSESWTCTNDEVGIAACVQRLREANPQLVVLEATGGWEVSLAAALALAKVPVAVVNPRQVRSFARAMNRLAKTDAIDAAVLAQFAEVVKPEPRGVNDEATEALSELMTRRRQVIDMTVAEKNRLSAARNEGVRQRISHHLHVLREELKSIDEDLKQQIQQSPIWREKDALLQSVPGVGPTVSRTLLAELPELGRLNRKQIAALVGLAPFNRDSGTLKGKRTIWGGRSRVRTTLYMAAVVAMRFNPIISRFYRSLRDAGKPAKLALTACMRKLIVILNAMLRDGATWSPEVA

SEQ ID NO: 140171 - protein, 348 aa, unidentified
MTLFVGLDVSVKETAVCVVDDTGKVVCEQKVPTEPDDIVRLLASIGEDYGRVGIEAGPLSQWLVNGLTAAGLPVVCVETRHMMALLKAQQINKSDRNDARGIAQMMRVGLFKPVHVKTQMAQEQRMLLTSRKLLQRKLLDVESDLRGTLRNFGLKVGVVSTGKFEARIRKLVAGSPRLALIVEPLLAVRRVMRQQFAILHKMLLDTVRHDPVCRRLMTAPGVGVVVALTYRATVDQPQRFVHSRAVGAHVGLTPRRHQSGEIDYDGGVSKSGDTTLRTMLYEAAQSLLTQSGKWSWLKAWGMRVAQRRGMRRAIVAARRLAVVLHRMWVDGTEFRWSNRMTAVVPQAA

SEQ ID NO: 140172 - protein, 344 aa, unidentified
MNQYAALDVSMEQTAICVVDELGRVISEKKVTTCPESITTWLLAYAPGLVRVGMETGPLAVWLWNELRDRGLPIVCLDARHANAALKMRPNKTDRNDAAGLAQIVRTGWFKQVRIKSRASYELRALLSAREVLVRSRVKLENEIRGLLRTFGILFGKVQGSFSRRAAEIVAIELDAAPAIRTVIAALVQARAALLERIKDLDRAVLSAAKTSSTARLLMTAPGVGPITALSVAAAFDDVERFKRSASAGAYLGLTPRRYESGEVSRNGRISKHGNKMTRKHLYEAATTLLTRTTAFSTLKAWGLRLAKTAGFKKARVAVARKLAVILHAMWKTNTPFRWGAAAA

SEQ ID NO: 140173 - protein, 315 aa, unidentified
MEQLHFVGIDVSKDRFDIHVRPDNIERSLCNDELGFRALLDVVQQVPPTIMILEATGGFERRLVAFLLAHRLPVVVINPKRVRHFAKANGQLAKTDRIDAATLAHFAEAMQPPVRSIPDAFLEELRDLLARRHQLLDMIVAEKNRLTTASKSIRRQLLEHIHWMEKRLASLDQDLDHHIQSSPTWKAKDDLLQSVPSIGPASSRSLLIQLPELGQLNRHQIASLVGVAPFNQDSGRFRGHRAIHGGRTSVRCALYMPTLVAIRHNPSIRAFYQRLVLAGKPKMVALIASMRKLLTILNSIIKRNRPWDVSYVESN

SEQ ID NO: 140174 - protein, 328 aa, unidentified
MTTLKKYILGIDISKRHFDVALMLLNNKQKHKKFSNDPKGFEALKSWLLQFDIDRLHACMEATNIYGNKLAEYLYDLDYEVSIVNPISIKGFAQSELNRTKTDKQDASLIARFCVAMSPRLWEPEPQNVRILKALVHRVDALVDMRQQEVNRLDVAEAIVANDIQQHIELLTKQIELLRKTIQQHIDDDPDLKAQKELLLSIPGVGEKTIAVLLSNFANVQRFGSAKKMASFCGVTPRICDSGSSINKYRRMSKTGAAYIRKALFFPAMVALRYNPILQELQRRLLKAGKPKMVIIGAAMRKLVHLIYGVLTSKQPFNPEMVKKELAS

SEQ ID NO: 140175 - protein, 408 aa, unidentified
MNPLFVGIDVSSKNNVAYLMKPDGSKHSSFSVQNNLGGAKLLSERIVSALGSMQLERVVIGLEATSIYGDSLVYALREDGSLERFQRKIHVLNPKQVRKFKEAYSDLPKNDWVDAFVIADHLRFGRINREVYMDDYRYKALQTLTRARFDVIQNLTREKQRFANYLFLKCSGMAQDKDIQNTSATTIALMEHFETVDDLANADLEELTAFITETGRGKFADPDATAKAVRAAAKGSYRLPKTVNDTVNQAMAVSIASMRALKGQVKVLDKAIEQQFEIIPNTLTSIPGIGKVYSAGIIAEIGDIHRFDSQASVAKYAGLVWNRSQSGDFEAEHSRMIKSGNRYLRYYLLEAANSVRRCDSEFRRYYDLKFKEVNKYQHKRALALTARKLVRLVFRLLKDNRLYIPPEG

SEQ ID NO: 140176 - protein, 341 aa, unidentified
MKDSKTVVGVDIAKRVFQLHWIDMETAEIVSLQLKREKFLEHFANCLPCLIGMEACGGAQHWARKLTAMGHQVKLLPGKAVKPFVTGNKNDVHDARAIWTAVQQPQIKAVAIKTEEQQAILALHRMRSQLVKFRTAQVNGLRGLLTEYGEVMPQGKAGIRKGIAEVLAKLADRLPAMVIDTLREQWARIEKMDGEIATIEQRIKRWLKEDAACKRIAEIPGVGPLTATAAVAIMGDAKAFKSGREFAAFAGLVPRQTGTGGRIKLLGISKRGDTYLRTLLIHGARSVLTHARDPGPWATELSRRRPLNVAIVALANKMARTIWAILAHERTYQREYVSQPA

SEQ ID NO: 140177 - protein, 415 aa, unidentified
MEPMHQRVAGIDVHRMKHVVTVLIGREDGAVSSETREFGGFKRDMRALVAWLQTHRIQQVVMESTGIYWKSLFGHLEAAGIPALVVNAFHVKNVPGRKTDVGDSEWLAQLARFGLLRGSFIPPKDLRELRIVSRYRRKLTGMLAGEKNRLHKLLDDAGIKLGGVVADIDGVCAAKMVEGLIAGRKPEELAALGRGKVRATTDILEAAMDGELSARHRLVLDMAYDHLRYLEGKLAALDRYLLAAMQPYAWAWRLLQTIPGIDAVSAAMILIEIGDDPHRFGSPARLASWSALCPGNNESAGKRKSGKTRHGNPIVRYLLCEAANAARRTKTVFRAKYESLVIRRGHKKTIIALAHKLVRTIYFVLVRRNPYRDSTVDYEAASVAKNAPRWIRALKKYGYWPQVAAPNPPTAATAS

SEQ ID NO: 140178 - protein, 445 aa, unidentified
MHYKRLLTWIDGSSSYLSVGLDVGADFTWMSIALPNGAFIGKPFKIVHSDPRSRDLAVTKIKEAQETYSLKSRCFLESTGIYHIPLLCFLRDKGFDCSVINPIITKNSTNINIRKLHNDKFDSKKAALVGLNVSLKTSIIPDDSVVDLRNLVRDYYYFKDLQSAVALKLTAELKVSFPAYAKVFSKVTTQSSLKLLSSYPLAEDMLAASKDDIVETIRSTARFGEAYALRKYDAVIAAAQDASVFGRALPSNAVRIRLYIDTYQEYQKHLDALLKALHETVERLQDTLIYDQICLLQSLRGIGFLSAVVLIAEMGDFKLFSSPKKLYAYFGLDPAVKQSGKLNGDKVHMSKRGSSLARRVLHMVALNNVKVDKGSGTPVNPVIYDYYTRKCSGKKKPVAMGAVMHKICNIIFAMLRDNKPFEIITPEEHCQRFAAEYPDKIRKAA

SEQ ID NO: 140179 - protein, 397 aa, unidentified
MIAVGIDVSKSKSTVAILNGDGSIRAKPFDVHHVADELQALVDYIKRTSEPPTILMEPTSHYHYPLLKAFQEAELPVCLINPYQMKKYGDTELRKAKTDKRDSLRIAQYALEKSYSLIPYTPQDQKYEDLRFLSRQYSQRISTLTVAKVQLLSLLDETMPGITTILPLKSRDPDNCVLLRFIKRFKSFDVIRKMGKTRFLDSYQVLVKKTNDRFAGSKGLAIYELVLNSVTTRGENPLSAMTQDQCVDLVSTSQKAADEINLQMRIIAETMPEYKVLRSMAGVGDRLGPIILGEIGDIRRFHSGKALNAYAGNDAPPYQSGQFESRNRHISKRGNPALRKACFEVMQALKLTKPQDDPVYLFLLKKEQEGKPYNVAKMAAVNKFLRIYYARAMELYK

SEQ ID NO: 140180 - protein, 358 aa, unidentified
MRIIGCDLHARQQTIAMLDSDTGELEEKTLEHEGDTVREFYSALPGPILVGIEATGSMQWFLELMEELGIECRVGHPQKIRKAETRKQKHDRRDARLLLKLLAEDRFPTIWMPSTEQRDLRTLLRHRHQWVRLRSRVQHTLQSMALNHGLRRGRSLWSQAGQHALRALPLAPHASERRKALMTLYPRLQESIAELDRQVSEQTQQRTDARRLMTHPGVGPVTALATEVFLGDPKRFSDGKALASYIGMIPSEHSSGRRQRLGAMSKQGNALLRYLWCEAAMHAVERDPELKRFYRRKLVQKGLGKARVAAARKLGIRLWIMMRDEIDYQEFCRRGKARQESGSVRAGMPDRNSGPAEQ

SEQ ID NO: 140181 - protein, 339 aa, unidentified
MKKMLYVGIDVSKHKLDVSLTVDGAEIKSHKTIKNSASGFKVLEEWVKKHRERLECESIHFCLESTGIYSEDVAEFLYNKKIYRITISNPSIIKSFSKTLNLRTKTDKVDSRLIACFAAKMKPKETAEKTVCEKKIQKLVRYMNLLIKKKGQAKGHLESIKDEFIRNSVKKIIINYEKQIKAVKKEIENFMKSNPNIKDKQELLKSIDGIGETTAQIILIELCDENNESSKFSKKCQTAHAGLSPRQVQSGVSIKGRSFICRTGNAFLRKSLYMPTLSAIRNNSVIKKFYEKLVKKGKAKKVAVIACMRKLLAICIGVLNNNKAFDDNWISTHPAKRAA

SEQ ID NO: 140182 - protein, 269 aa, unidentified
MKCDKYIGMDVHQAMTVVVVLDADGKVILETMVPTEAAAIIRLMQSLSGPLRVTFEETTQAAWLYEVIRAHVTEVIVCDPRRNKLLEDGSKADKIDARKLADLLRAGLLRSVYHGHEATRNLKELVRAYETLSIDTQRTMARIKAIYRARGVRTAGRGVYQPKQRERWLELLPEAGIRQRAAWLYEQLEQLRPLRRKAKEAMLAESRRHRAVSLLRTIPQMGPIRSAFIVATVDTPHRFRTKRQFWSYVGLAVVTHMSSEYEMTAGRVV

SEQ ID NO: 140183 - protein, 339 aa, unidentified
MKTHVGVDLHQRFCYLTAVDASGKLFRQGQVVNEGGALRAWLRQVPGPRQVVMEASGFWPAFARAVEAESERMVMVHPQRTKAIASARLKNDRVDSATLAHLSRADLLPEAWMANRRTQQMRLLTRLRITLSQQRAKAKNQLQAVLHQEGFLKPVADVFGKKGRAWLAGLELSPAGRVVVQVWLKVVDQMDAAILQQTRELEKMAREDARARWLQTVPGIGAYSAMVILAEVGEIERFQSKRALASYAGLTPSVRESAGKRKRGGIGHHGSGTLRWIMLQVAQVAARCSPAAKAWIARLKRRKPAQVALIALARKLLTAVWALLRHGVCFDETAFAMMS

SEQ ID NO: 140184 - protein, 316 aa, unidentified
MNTKTNQSINIGVDTGKFQLDIYIRPLDIYFTVSNDDKGIKEALKVIKKHKPERIIIEATGRLEMPFIMACAKAGLPFVIANPVHVKRFAGAIGQRAKTDKLDAKLIAYYGEAIKPSLSQLKPEKMQLMSDLVARRNQLLVMQTMEKNRLQILPKELAMTIKPILTALKHQITKIEEKILKLIESCPEYQAKNTILQSMKGIGKIAAASIISNLPELGYMTNKQASALVGVAPINRESGRFKGMRKIQGGRHQVRTVLYMAMMSAIQSNPVFKAQYEKLVSAGKPKKVALIACVRKMIVILNSMLRDGVMWEAPKA

SEQ ID NO: 140185 - protein, 355 aa, unidentified
MNGLRYIGLDVHQDTVSAAVLDGAGKLLMQSIFATRAAAILDFLHGIKGTLHVTFEEGVHSAWLYDLLQRRVARVVVCDPRKNKLLKSGNKGDLIDARKLAELLRNNSLSPVYHGGMSALEVQHRTRSYTMLTEDTTRVMNRLRAVFRSQAIRVHGRKLFRSDLRESHLAQLATPGLRQRAESLYRELDALHPLRLQAKREMLVECRKHPAMKWLRSVPFLGKVRTAVLIGRVQTPHRFRTKRQFWSYCGLALETHDSAEYRVVHGQVQRKSRPAQVRGLNWNHNHELKGLFKSAATMAAFRKGIFREFYSGLLAKGIRPEMARLTLARKIAAITLKIWKEGETFNAEHIKPQAA

SEQ ID NO: 140186 - protein, 382 aa, unidentified
MQVMYQRCAGIDVHLRFLVVCLSIIEGGQRHKEIRTFRNETTDLLALRAWLLQEGCSHVGMESTGVYWLPVYRRLEGFFELVVANAQHIKTVPGRKTEVADAEWIADLLQHGLIPPSFVPDQEQQDVRDLTRMRVSLVQERSRLVNRVQKVLEEAGIKLSTVLSDVMGLSGRAILNALCAGESDPVRLARLVHRSVHATQEEIASALTCEVRDHHRFLLRELLALIDAQDRSIKHLEMEIERHLHPFEEQAKRCKKINGISRHVLYVLMAEIGTEMKRFPDAEHLSSWAGVCPGHKESAGKRLSGRSRKGNRYVRSALVQAAHGVRRSHTYLGERYRRLKKRRGSKRAALAVGHSILVIYYQMMKTGEEYQEKGEEFFVHKA

SEQ ID NO: 140187 - protein, 419 aa, unidentified
MKTWNELTHFAGLDWASDHHDVAVVDQQGKVVAELRIDHSAAGWAEFRKKMAVYPTWGIALETRSGVAVEELLQSQGTGFPIQPKAAARYRERKAPSGVKDDQLDAWALADALRLDGGHWRALASADPWIQELRLLCRDEVALIAQRTVLVNQLRAALREYYAAALQAFDDWTLPAAWALVVQFPPPEDLAQAGQRSWEKFLHVHKLWRPETVAKRLQLFARAADWKRNAAVTRAKSRLAVSLAKLLQTLARQLDDYRAAIEALFAQHPDHDLFGSLPGAGSKLAPRLMSELGEDRARFDTPQSLQCLAGTAPVSFQSGQVFRVKMRRCGNPHLRHAVHLWADCSRAGCGWAQAYYQAQREQGKSHACALRCLGHRWLEVLWKMWQDRTTYDGDLHARNQQKHGSWVIQILTQPTAKPV

SEQ ID NO: 140188 - protein, 332 aa, unidentified
MSIIGCDLHTRYQVIAMLDRETGEVTTRRLEHEGGETKAFYAGLGKPARIGIEATGYTQWFERLVADLGHELWVGDAAEIRARAVRRQKTDTRDAEHLLDLLINQRFPRLWIPTPEERDYRQLLKHRDKLVKMQTSVRNQLHFLAMSQGVCRKRRLWSARGRRELEALPLGPWASVRRQELLTFLDGLGPRIEEMDRAVKAEALRRAEAVRLMEQQGVGPVTALAFVLTVGPVERFPSSRKLVSYLGLNPSENSSGGHQRLGHISKQGNEMLRWLLVEAGHTAARLDPELGRVYQRLKFRRGGSVAKVAMARRLAVRLYWKLRNGTAGSHVQ

SEQ ID NO: 140189 - protein, 356 aa, unidentified
MTTYYIGADVHSNSTELAIEKRGKIVARYSVPTSIPAIINVLDSLQGKKYLAVEEGPMSGWLYRNLNDKLEQFISSDPRRNKLIASDGDKDDKIDAVKLASLLRGGFLREVYQSDDDSRAELKHWASLYHDRVRDAVRGINKIRARCRMHGVTISRATLRDPVSRLKWLLKKNYTPLDSQLKMLWIGYDATVQQVMFSKRQLSTLSKKYNIIQHWSQLPGIGLIRATTIFAYLDTPWRFKKKNKLWKYCGVGLQRTTSGTDKKGKPKPARLKLPWAVNRTLKNAVLGAALSAINQKDNVFKDYYERMLKNGIIISNARHAVARKMLTVMWAMWKTNTPFDEKVVCNKLNRPTVQVI

SEQ ID NO: 140190 - protein, 458 aa, unidentified
MRIIGIDLATTAKHRAIIATERSQFISPLLKFDTQLADLERLRGRALQEAAPNEELVVVMEATDINWYPIAVYFDQHGATVHVVNPRITADLARFYKRHAQSDRLSAKVLARLPLVSPDSVYPLVLSGGDYLALQRGCKELDRLTVRISAHKNRLQAIDRLGWPGLKRRVFPAPDGWVTRWFREHFYDPQTVVDAGVEGLRQAWRAADAYDQGEGWIEPLLALAQELLQLYGHSGAYVDYAALADEARREQRRLATVEADAHEMRLHVTHPRYRQLHASRNLQSLRGVGEDGAAVYTAFVGAPDRFASNRAFRGWSGMVPRSRQSGESESKGLHLSQAGPNLVKKYAYLNADVARQRDPQIAAIYYQQMVEKGQHHTQAVCACATHLLDRVRIVLTEDRPYELRDVDGTPLTPQQAQEIIAARYTVPDEVRQRNNRRARKERVEQRAARKEERRSRSR

SEQ ID NO: 140191 - protein, 328 aa, unidentified
MNETPVCVGIDVAKATLEVAVRPSGAQWVSANDEAGIQTLLGQLRALAPTLVVLEATGGYEHAVAATLATAGMPVVIANPRQIRAFARATGQLAKTDAIDAQILALFAERVRPTPRPLPDDATQALEALLTRRRQVLEMLVAEKNREMLVAEKNRLGVARASVRRDISQHIRWLERRVADLDRELHAGVRASPVWRAQDDLLQSVPGVGPVLSYTLLAALPELGTLGRKQIAALVGVAPLARDSGAHRGRRTSWGGRAPVRTVLYMATLTATQWNPVLRHCYQRLRAAGKPHKVALIACMRRLLLILNAIVRTQTPWRATPTAARATA

SEQ ID NO: 140192 - protein, 351 aa, unidentified
MEEYIAFDSHKRYTWVEHQEANTGKTRAYRLEHGTGAIRQALAGCARGTAVAIEATANWYWIIDEIEQAGCEARLVHPRKAKLMMGLINKTDKLDAHGFNTLQRNGTLPTVWIPPGGLRELRELTRTRLVLVAQRTRWKNRITATLAKWGMPPSAYSDPYGKKARAELEQQLERLPEQTRWATRQMLRQLDSLNEQAQQFEKRLEELVELTPMMQWLMTLPGVGVILAATIALEIGEIERFANAERLASYSGTTPRVHSSGDRTRHGRTRPDVNRYLKWAFAEAANSVAVHHRRNPERHVSRLYTRLRAGKGHARAVGAVARHLAEAAFHVLQRKEVYRDPSLNPRPEKGV

SEQ ID NO: 140193 - protein, 403 aa, unidentified
MNSVGIDISKGRSTVAVMRPFGEVVISPFEVRHTDSELSELARQLKSLDGETRVVMEATGNYHTPVAKLLHDAGLYVSVVNAKLVHGYGNNDLRRVKTDKKDAVKLANYGLDRWLTLPRYITEEDTRLLLKNCYRQYRQYSKVQTVLKNNLISLLDTVFPNANRLFSSPIRGDGSEKWVDFVAEFWHCRCVSEKSEKAFANKYQRWCRKYGYNFNEAKAHTIHAEASGHIGVMPMSETTKLLVEQAVAQLRATSTALAALKHEMQALASQLPEYPAVMDLFGVGPTLGPQLIAEIGDVRRFYSKKALVAYAGLDAPPNDSGDVTGRHKSMSKIGASSLRRTLFLVMSVYLQTAPLDEPVYQFMDRKRAEGKPYRVYMMASANKFLRIYYATVKAYLESLEHTA

SEQ ID NO: 140194 - protein, 413 aa, unidentified
MEVVHMHCAGLDVHKKTVVASVIVPKEDGGLYRETRTFETMTSGLLALSDWLLEHKVTHAAMESTGEYWKPIFNILEHGFEILLVNAQHIKAVPGRKTDVKDAEWIAELLRFGLLKASFVPPEGQRELRELTRFRSTFIQERATLVNRLQKVLESANIKLASVVSDVNGVSGKAILKAIVEGTSKPEEMAELAKGRLKEKRELLVRSLEGRVKPHHRFLLSELLCHLDALDESIGRFDQKIQEYCQPFEESVALIDTIPGVARKVAEVIVSEIGTNMNCFPTADHLASWAGVAPGNNESAGKRLSGKTTKGNRALVSALTQAAHAASRTKNTYLSAQFHRLAARRGKKRAIMAVGHSILVITYHLIKSKEPYHDLGGDYFDRRSSQVTAKRLIRRLQDLGYSINLDLPATVVA

SEQ ID NO: 140195 - protein, 341 aa, unidentified
MAVAGGLDLHRGQLTFDYVDTGTGESWRGRICPADRESLRGWLRRFHGVPDVEFAVEGCTGWRYVAEELQRAGITAHLAEPAETAGLRGRKRRAKTDWADARHLRDLLLDGRIPESWIPPGHVLEARALVRLYKDLLEERTSWQQRVHATLFHQGIPVVPKLGTADGQQRLDAAELSAAGRRAVQAGLRQIERLTQEMASLRRELARLSSRQPGCRALRRAHYGIGGLLSVAVWAELGDCRRFSSSDDAVRHTGLDITIYDSDGRRARGHIARQGPPVLRWALYEAALYASRPASPDYAYYCGVRDRIDGQRALLSVARKLARRCYHTLRDLGEDALAPAA

SEQ ID NO: 140196 - protein, 350 aa, unidentified
MSKHKFAAADVHAATTTFAVLDDSGKFVMETVVETKAESLLSVVKSISGAVHLTFEEGTHAGWLYDLLRPHVAELLVCDPRKNRNDSGNKSDRIDARQLAKWLRSGDLSPVYHGHDSTKTLKELVRGYENLVADSARTKNRLKAIYRSQGESTSGGDVYKNKQREDWLSKLSSTGLRSRAEWLYSQMETLDELREEAEKAVLREAGKHRPCSLLKSVPGIGPIRSATIVAHVATPFRFRTKRQFWSYSGLAVVTRGSSDWEISGEELRRRRQPVATRGLNKNHNRHLKDAFKGAVRDARAFRPHFDSLVESGMRESMARLTVARKIAATTLTIWKKGEKFVLSKAVIRSE

SEQ ID NO: 140197 - protein, 337 aa, unidentified
MSDVHVLAIDLAKRSFRVCGTDRGGAVLFNRALTRAKLMQLLGAQEPCIVAMEACATSHYWGRLAQRSGLDVRLVPPIYVKPFVKRQKNDAADAAAIAEAALRPNMHCVAVKSAEHQARAVAFRTHQCFIRQRTQLINALRGHLAEFGLVVPQGPAHLKQFIGLLGDGAAEVPDTVREIAQLYLDQIDVLTEKIEELTRKLKDATQENAEMRRLCSVPGVGPVTAGAVMAFAPDLRAFSSGRNFAAWLGLVPKQRSTGGKTRLGRISKMGQTDIRKLLIVGAMSRIRWIVRKGVTPDNWLGRLVERKPRMVAAVALANKMARIIWAIMTREQNYRMA

SEQ ID NO: 140198 - protein, 386 aa, unidentified
MHQATTFPAPERTCSRGDRAILFVSLELSRSTWVATALAPGSTEMSKYTLVGGDGHKLLELLARLKTRAEQRIAAPVKVVTIHEVGLDGFWIHRLLEANGVESHVVDPASIAVPRRHRRAKTDAIDGETLLRTLMAWQRGEPRVCAMTVPPNPSEEDRRRISRERAKLLQERVRHTNRIRGLLFGQGITNYNPLHKNRRKNLEQLWTGDGRSVPAHLKSAILREIDRLELVLRQIGEVETERDEMLQLTQPSSPAALLMRLKGIGAEFASVLYLEGLFRRFENRRQLAAYAGLTPSPWKSGSIDQEQGISKTGNPRLRTTMVELAWMWVRYQPASALSCWFRQRVGSKRGRIRRISIVALARKLLIALARYLSHGEIPAGAVMTAG

SEQ ID NO: 140199 - protein, 388 aa, unidentified
MIYVGIDIAKLNHFASAISSEGEILIEQFKFTNDADGFHLLASKLESFDKASTIIGLESTAHYGDNLVRYLVAGLYKVCVLNPIKTSQMRKNNIRKTKTDKVDTYVIAKTLMMQDTLRFISFYDLDLMELKALGRFRQKAIKQRTRLKIQLKTYVDQVFPELQYFFKSGLHQKAVYAVLKEAPSPNRIASMHMTHLATLLKTTSHGHFTKEQAKELRVLAQKSVGANDSTLSIQITQSIEQIELLDSQLKKIEEEMTDIMKFNDSVIMTIPGIGYINGGMILGEIGDIHRFSNPNKLLAFAGLDPSVYQSGNFQARRTRMSKRGSRVLRYALVNAAWNVIRNNFTFKSYYEAKMAEGRTHYNALGHCSGKLVRIIWKMLTDKVEFNLK

SEQ ID NO: 140200 - protein, 411 aa, unidentified
MIKENFIYVGIDLHKETHTAVMIDCYNQKLGEITFPNRPADFPKLVAKVKKCNTDGKTIVFGLENAYGYGRALAVWLIDKGYLVKDVNTAISHRQAKHRGAMYRKSDSDDAEAIALATLNMLDKLPDAYPNDAYWSLGQLVHRRDNIMKQRTRLVNQLHEQLCITYPSYKQFFNDISRPTALYFWEHYPSRKYLKGKSVEDLRAELVPVSHNKCSTKTCEKILDAVASDKVKNNAYQDARDMVTLSIVSDLQHYDKQLAEVDKMLEQMYKMLGCTLTTIPGVNVITAVKILAEIGDIKRFSNANKLAQFAGIAPLHLSSSGKGKDVATKQGNRRLQATIYFLAIQMVQVSSKGTPRNSVVRAYYEKRKAEGKTSQQALICISRRLISIIYGMLKHGTEYRMPVVESAGENR

SEQ ID NO: 140201 - protein, 317 aa, unidentified
MNRELKVVGIDVSKARLDVCVLPEGAASSQANDEAGIVGLVEALKRLRPDLVVMEATGGYETEAAMAISAAGLRLAVVNPRQVRDFAKASGFLAKTDAIDARVIAQFGVAIDPQVTAVPDEDAQELQAMMVRRGQLIAMRTQEKNRLALAFGTMRKPIKEHIAWLDRAIEGLDIDLTHKLRTSPAWKAKEDLLRSFKGIGPVSARTMLADLPELGSLNRKKIAALVGVAPFNCDSGTFRGQRHIWGGRARVRTALYMAAVSAIRSNPAIRAFYEHLTASGKPRKVAIVACMRKMLTILNAMAKTQTRWQPPAALQPA

SEQ ID NO: 140202 - protein, 337 aa, unidentified
MKFLPNLLLFSTTKKVSIFFTKKIQSVSSSDKIKVGLEATGHYSYNIIGFLLNKDLATFILNPLHTNLYRKSLSLRKTKTDKIDSKTIAMMLLSDVSLKSYSDISYHNEDLKSLTRYRFSKVEERAKLKTSLSRLAQILFPELEKLVPTLHMTSIYQLLEEFPSASAIASAHLTRLTKLLSKASKGHYNRETAIKIREADKNSIGSNMPAKSLELKHTIKLIRALTIDIGEIEAEISKMMDKIASPITTIPGIGNNMGAMIISEIGDFSRFSSPDKILAYAGYSPSTYQSGKLDNCYAHMEKRGSHYLRYALFQATQRVCHLDSTFFGLSGKKASRR

SEQ ID NO: 140203 - protein, 347 aa, unidentified
MRFYTKQHHAYCGIDLHARSMYICILNQDGDIMLHRNMKASPEPLLKAIAPYRDDLVIAVECIFTWYWLADLCAEEGIPFVLGHALYMKAIHGGKAKHDKIDSHKIAALLRGGMLPQAYVYPAAMRATRDLLRRRTHLMRKRAELLAHVQNTNSQYNLPEIGKKIAYKANRDGVAERFADPAVQKNIEVDLALVTYYDQLLTDLELSIVKAAQHHDANTLYLLQTVPGIGKILSLVLLYEIHDLKRFPRVQDFVSYCRLVKCAKESAGKRLGTAGKKIGNAHLKWAFSEAAALFLRNNPAGQKYLARLEKTHDKGKALTILAHKLARTVYDMLKRQTAFDMEKFLHG

SEQ ID NO: 140204 - protein, 458 aa, unidentified
MYRELIPLRQALSVELKANLPPDIPGLDPEHLLQAYLDRLTMYVGGDVADQTFTLFAVDAAGNELDHLLDVPNTPAGFDTAWEWLESLRCQHCLRITLLAIETSGVYYWAWWDFLAGRPNLARVLYNPRTTEHMTEVLSKKVRNELVDAYALAEQVRLGSTPEVVLTEDADLLSARFCSRAARDLAQQINRQKNQLRSLLRAYNPALGQVFPGAKLHHPAVYALLQHYLFPDEFVAAGVDSITAILSEHCRTAFGRDHAHQLVTLCAQTLTHPIGRPPIHQRVQQLTQDILSDQQHKQNFLKTGYTLIQDRTETELLRAASGAGISNTLALVSELGGFSRFPDGEHMASFLGLTTSKHISGTTLFESKRITKQGSPNGRYAAVNLALHLKRHVPKYQQMYERITNRKPPHKGHFVALVAIARDFIANVLYDMWRNQRPFFEKVEDYRAYRQTHPRSKD

SEQ ID NO: 140205 - protein, 335 aa, unidentified
MNEFWIGIDVSKRKLDVACLDVRDKIKSRVFTNDAAGHAALKSWLIERGARIETTHICLESTGPYSEPPAIVLADASWKVSVVNPARPKAFAETTGVRNKTDKSDAALLARFCAKLAPDLWTPPSIEQRKLRALVDRLQALKDMHLQESNRLEGQELLGQESSVKSIHEHLAWLDARIAELKREIDDHIDSNPTLKHDAELMTSVPGVGNTTVAKVLAYVGDLRRFSSAKALSAYIGVTPRQKQSGTSVRGRTMISRAGHATLRSALFMPAMVALQHNPTIKAFGERLGNNGLARKAVVAASMHKLVHLLYGVVRSGLPFDPIRARPRVDTQVSI

SEQ ID NO: 140206 - protein, 377 aa, unidentified
MSMTRPILYVGLDVHADSISIATADASRDGEVRHYGTIPATLRALDSVLTKLGHPGTELRVCYEAGPTGFVIARHLTKKGIACLVAAPSLIPSPKGNKIKTDCRDSIKLTRLHRAGELTAVHVPDATDESIRDICRARTDAVDDKRRAMCQLKAFLLRHGHGIADKTPWSEARMRTLRSIALQLPAMNIVLEEYIQAIDTAHQRIARLEHQMENVLATWEQAPVVRALMGLRGIRLVSAMILVSELGDIHRFAHPRLLMAYLGLVPSEASSGGKRRVGGLTKTGNAHVRWLINESAQHYRLPPRVSPDLSKRQEGIAREHRAEVQKISWKCQQRLYDKGRQMAGRLKIRQKVQIALARELCGFVWAIMKAVQPVTAR

SEQ ID NO: 140207 - protein, 379 aa, unidentified
MKNSRYLGLDIDSEKIAVAVAEPGGEVRSLGAIPNREDSVRRLVKKLGPASRLRACYEAGPHGYSLYWQLSKLGVRCDVIAPTLVPVKSGDRVKTNRRDAEKLARCYRSGDLTAVWVPDAAHEALRDLVRARETAKKDQLRARHRLGKFLLRRGLRAAAGVKSWTTKHLLWVKTLRFEHVAQEVTFLDYLHEVEHAAERVTRLDQAIDQAIESAPTEMRALIAGLQALRGIKKVSAATIVAEAGPLSRFARPKQLMGYSGMVSSENSTGSSVRRGAITKTGNAHLRRIVGEAAWAYQYRPAMSPVLKKRQEGLSEEVKEIAWKAQHRLCSRYRRLMAKGKLRQKVVTAVGRELLGFIWAIGMQVENEQRDRTKEHRRVA

SEQ ID NO: 140208 - protein, 348 aa, unidentified
MKYYCGLDVSLNKTAVCVVNQDGTIFREGEIPSEPAAISQWLEKLGLPIERLGLEAGGLSPWLCHELLASRWPVICIETRHAKAAMKAQQVKTDRNDARGLAHIMRTGWYREVHVKSHDSQELRMLLNNRRFLLGKRIATDNEIRGSLRTFGLKLGKVTPATYERRIRELVGDNERFQACIFPMLEVRRVLIEQCKKLEKLILDTVKEDETCQLFMTIPGVGPLTALAFKTFVDRPQRFHKSKSVGAALGLTPRKYASGEVDYDGHLTKCGDAFVRAHLFEAAKSLLCRSSKSSELKSWGLRLAKRSSKKKACVAVARRLAVIMHAMWRDGTVFQPSQANDEVVAAAA

SEQ ID NO: 140209 - protein, 377 aa, unidentified
MKYVGIDLHKKTISACVVVKERGKKKVAARKRLECKDEAGIKSWFSELGKFEVVVEATASYEWFVKLVEPLAQRVVLAHPKKLRIIAESKRKSDRLDAQVLAEFLADDAIPLAYRPGPRVREHRRLVRWRNFIQRRITSVKNKLRHILAAYNADVPHLFTAEGREHLTTVKLSPSDRFVSEQLVAELEQHQERLVTANRRLREFAANAPLPEREARAVLDSIPNVGPVTTDVILAELGDWRRFHSQAEVVSYAGLAPGFRESAGKAKQLGITKEGSRLLRWVMIEFAWRMVGSSRKWGGHYHRLEARIGAKKAIVAIARRLLGMTFALLRTGRKYALALESPPPASCRSKSPRDTSPSELACLRGQPRQASSLGAGG

SEQ ID NO: 140210 - protein, 328 aa, unidentified
MEQQVENVAGLDVHRDSVVACARLGRVERPKTMKKSFKTTTAGVGELARWLADLEVTRVVMESTGVYWKSVYYGLEGLFGEVWLVNAHHVKNVPGRKTDMADAEWLADVAAHGMVRPSLVPEPAARELRELTRYRKVQVSIRAQEVQRLDKLLQDAGIKISSVASSVLGKSTRAMLEALITGERDPAILADKALRRMRPKIPALTEALAGRFGAHHAAVARAILAHIDFLDSNIAALDQEVATRLGPFRAAVELLKTIPGVGQTTAEVFVAETGGDMSRFPSAAHLAAWAGLAPANDESAGKHRPVGSRKGARWLRRSFIEAAKARCV

SEQ ID NO: 140211 - protein, 317 aa, unidentified
MDTNETNTYIGIDVSKATLDMAVDDRPDVQQYANDEDGIATLTEWVMLQEASLVVVEASGGWEMDVVAALAAAGLPAAVVNPTRVRNFAKALGQYAKTDKIDARVIARFAAVVKPPVRPLKTGEQARLSAVITRRQQVIDILTQEKNRRVTTRGEMRERLEEHIHWLQAELDDLNDLLQKLVAHCAIWQAKKAIMMSVKGVGVVTATVLLADLPELGTLNRQQIAALVGLAPLNKDSGRKRGRRHIFGGRKAVRSKLYMAAVSASKHNPVIRPFYERLLAKGKLHKVALTACMRKLLVILNAMIRDMQPWQPRPTMA

SEQ ID NO: 140212 - protein, 343 aa, unidentified
MRTITTIGLDIAKSVFQVHGVDAVGQVVIRRQLKRRYVLTFFQKLPSCLIGMEACASSHYWSRELQALGHTVRLMPPAYVKPYVKRHKNDAHDAEAICEAVTRPNMRFVATKTPEQQSCLTLHRTRHLFIRQQTSVINAIRAHLAEFGIVAPVGRHGVEQLLTIAADANDKRLPEVARACVTALGAQLRMLKTQILEFDRMITAWHRSNEASRRLDDIPGVGPVLATALIASIADPKVFRSGRDFSAWIGLVPKQNSSAGKDRLGNISKRGDRYLRSLFTTGALAVIRYAKIHGTKHRPWLTALLTRRPTKVAAIALANKIARMAWAVMAKGERYKEPAALAA

SEQ ID NO: 140213 - protein, 386 aa, unidentified
MQKLNDLSRSLTALEPDGTLIAVIEMSLSSWLIGGILPGVERQPLKKLAVDESALLKLLHRWREEAEKAGHRIGRIVVAFEAGRDGFWLARWLKARSIEAYVIHAASVAVSREHRRAKTDRLDSELLKRAFLGWLRGERDHCKMVAIPSIMDEDAKRPNRERESLIGEQSRIVNRMKAALIRLGIRGFNPKLKRAAGRLDGLHTPEGEPIPPNTLAELRRDMERRRLVSNQIRRIEQARLQRLEQEPDDGPHAMVRLLARVIGVGIETADMLVREVLSRNMRDRRAVARYAGLTGSPDESGRKCREKGLARSGNARVRRGMIQLAWRLLMFQKNSALAQWFRARTENARGTRKTMIVALARKLLIALWRLVHEGVVPDGIVLRPAQ

SEQ ID NO: 140214 - protein, 332 aa, unidentified
MNYYIGIDISKATLQIYIPINDENISIENTKKSLKSLYSKLKKYYKKELQQLVFIFEPTGSYSSLLKHFCSEKNIKAFIVNPRQSSNFAKALDNRNKSDIIDAKMLHKFHVMAKDGDIVVPVIDKAQESLGAMMGYYKLLQKQRNALSNHLEALEAKEGNSSIKKKLKKEIDKLKLQEKEMIKEMKNLILSDTKLVQSFECIISFKGVGDISAIALLHLFISYPKANRQEITALSGLDVIETSSGTSVHRRSRISKRGNALYRGILFMPILSSVTNNIYLKSFYDRLKENGKHSTAAQIAVMRKVILITHSLYKNNQKFDDDIYEKRVGWNR

SEQ ID NO: 140215 - protein, 470 aa, unidentified
MKSTAKKNKSQLNSHLSSEEIAAMSKKAFEEATAITWRLAEVRRCLTQNDKISLVDDKTLVIGADIGSEKHDIRAFDNRGREFSRKAFEFTNDEAGFVLAKEWMVTIRKTYHLHKIMVGMEPTGHYWFNLAAWLIKEGITVVMVNPHHVKKSKELDDNLNRKTDKKDPKVIAGLVHEGRYSIPYLPEEVYAELRNLNTLRSMNTEEKTRFINRLDRWLSIYFPEFRTVFKDVTGTGSLFLLEKAPLPEDIVSLGADGINKLWREAKLRGAGYSRALKIISAAERSIGCREGLNTARQEIRWILDGLKMYLEYDRDYLAQIEALSKQIPYVDNMLEIKGLGIRTIVGIFAEIGDISRFASVKPIQKLAGLALVEDSSGKHNGQTIISRRGRKRLRYHLYQAALSLIGHNAEFKEVYKYYLTRKENPLKKMQALMVIACKLLRVLYTMVTRGIKYDPGKLLGDIHRTQETAA

SEQ ID NO: 140216 - protein, 359 aa, unidentified
MQRKHNKLDFTGQDIFIGLDVHKKHWSVIIYVKEIEHKRYTQPPEVDILKKYLEKHFPGGNYYSVYEAGYSGFWIDRELKEAGINNIVVNPADVPTSNKEKRRKTDEVDSKKLVRALLQGQLKGIYVPDEESDYDKRLTRQSEFLTKKMTRCKNQIKGLLSQFGIQIGDEETLKHWSKSYIERLKQLSDENKNLWRSLCIYIEELEFLKNLKLTILRDIRKLSLTSKYKTDCELITSIPGISTLSAMIILTEITDIKRFTNKNQFCSYIGYTPDERSSGEISRILGLTYRKNAHLRRIITEAAWIAMRKDPALLLKFNEYVNKRKIIKAKAIIKIARKLACRIRHVLISRQKYELGVVV

SEQ ID NO: 140217 - protein, 415 aa, unidentified
MNQIFEYLVGIDWASDSYEVCVVDGGGNVLGKERFEHSGDGIRQCIDWLLQLAGGDSSAVAAAIEVPHGAMVEGLIENQLAVFAINPKQMDRFRDRYTVAGAKDDSLDAFVMADSLRTDQRCFHRVELNEPSILRLRELSRMQQDLQTECNRVANQLWEQLRRYYPQMLNLTSAANEVWIWDLLEAAPLPGAASRLKLGTVKAILQARRIRRITAEKVLEQLRQPALRLAPGAAEAASEHALLLLPRLRLLHQQEGDTAKRVRQLLEEWKAAPEGEGREHRDVEILLSLPGIGPVIAATMLAEAWQPLRERDYQALRNYAGASPVTRRSGKRKVVVMRYACNERLRNALYHWSRTSMQKDARAKQHYGELRRSGHSHGRALRGLADRNLAMLISMLKSNQLYNPARRVAVLAQAG

SEQ ID NO: 140218 - protein, 420 aa, unidentified
MSDDVMIAVDPHKASNTAAVLDPVTKTVIEVARFANSVDGYSRLAGFAARWEHRRWAVEGCHGAGRFLAQRLVADGELVLDVPAKLAARVRVYSRGHGRKTDRHDAVSVGLAALDGTGITMVTGDDALVSLRLLCDRREELAAQRTQAVCRLHRLLAELTPGGMRRELSANKAQALLARIRPANDVGRVRVHIARDHLADIRALDARLKFIAAQIAALVTASGTGLTGLYGIGPVIAGRILAEVGDVARFATKDAFASYNGTAPIDVSSGDQIRHRLSRAGNRRINHALHMMAVTQIRNPDTPGRLYYERKRLEGKTGNEALRCLKRRLSDLVYYQLIADRHGTIGTCGSPTTPPPTRSTSISPATRSREARTTIQAPTPPGTEGFIALDWKDDRLVGIEILDASTRLHHDLLEEAEINS

SEQ ID NO: 140219 - protein, 314 aa, unidentified
MSQSVFVGIDVSKATLDVATSHSSQVEQFANDTKGIKRLVAALSPKAPELIVLEATGGYELAVAGALADAQLPTVVANPRQVRDFAKSIGRLAKTDAIDARVLVLFAQRVQPQVRTLPDAQLIQLRALLTRREQLQEMLQMEQNRFELATPAVQKSLRTTVSCLERQLRKLDKQTDDFIHGSPLWDEQLELLQSTPGVGPRLACTLVAFLPELGQLNRKQIAALVGVAPLNCDSGQHRGQRHIFGGRAQIRSVLYMAAMSAINHNPVIGAFYQRLKAQHKPGKVIVVACMRKLLVMLNAMMRDGRPWQAAAALG

SEQ ID NO: 140220 - protein, 341 aa, unidentified
MKVSTLGIDLAKNVFQLHGVDHEGHTILRKKLTRAKFVQFVIQLEPCLIGMEACSSSHYFARLFTRYGHEVKLIPPQYVKPYVKTNKTDAADAEAICEAVTRPNMRFVQIKTEEQQAVLALHTERGILIRERIACANSLRATLAEFGITIAAGQNHLTRELPAILEDGENGLSPFVRTSIYRQSKHNRELEEQVKQVEEALASWYRTQEACQRMAKIPGVGMLTATYVVAAVGNARQFSTAKQFASWLGLTPKEHSSGGKQQLGGISKRGDGYFRYLLVHGARALTAWVNRNGAVEENSWLQGLLERKHYNVAVVAMAAKTARIMWSMLSHNTEYQPRQLA

SEQ ID NO: 140221 - protein, 371 aa, unidentified
MNHVTSIGLDVHARSVTAVALDSITGEVRSQKFGYSPAEIAGWILQLDSPKAVYESGVTGFHLVRELREMGVDCIVGAVSKMHKPASDRRKKNDRNDAEFLARQLMAHNIVEVFVPDVETEGARNLSRALEDVRDDLTRAKHRLTHLLIRWGYAWNEFNEDGKRRGSWTHAHWEWIRGIELPDAAARESLDYYISEVRHIESQKKAIEKRVAQCASRPRWRDRVEALRCMKGIETVTAFALTVEAGVFSRFDSARAFASWLGLVPSEHSSGERASRGGITKAGNSHLRKLLVEASWHYARATKERKRSLYDESVPASISNHAAVGVKRLVERRRHLSCELRKRPVVANVATARELACWIWALGRMSEGALA

SEQ ID NO: 140222 - protein, 345 aa, unidentified
MELHTIGIDLGKTVFHLVGLNLRGEVAVRKKFSRTQLLRFTANIHVELIGMEACGGSHFLGRALREQRHEVRLIPAQYVKPYVKTNKSDYIDAEAIAEAVGRPTMRFVPIKTDDQLDMQSLHRVRERWVMRRTAVINQIRGLLLERGITLRKGRHHVDAALPLILEDADANLSGAVRLLLAQLKLDLDQLSVRIDEADAVIQKTAHENEACRRLVAIPGIGPVTATALIAAIGNGGAFHKGREFAAWMGVVPREHSTGGQQKLLGISKRGNSYLRRLFVQGARAVMQQRTKQSSGLSAWLAQLTSRTHRNVAAVALANKLARIAWAVLAKNEHYRPPVLADVAAA

SEQ ID NO: 140223 - protein, 337 aa, unidentified
MKVVRIGLDIAKTVFQIHSVDQQGKTVLKKALSRGEVLGFFANTPVSLIGIEACASSHYWARELIKLGHDARLMAAQFVSPYRKSGKNDANDAEAICEAVGRPNMRFVPVKSEEAQAVLAVHRVRSLTVSERTALVNQVRGLLGEFGIVVGQGIAQARRLLADIGAGGRQLPILARETLGELQDRLRALDERILAYDRKISALAKACEPARRLMAIEGVGPVTATALVASVGNASAFKSGRQFAAWLGLTPRQNSSGGKTKLGTISKRGDVTLRTLLIHGTRSALRLTAGKTDRKSVWAEALKERRCANVAAVALAAKNARIIWAMLSRGTEYPAAS

SEQ ID NO: 140224 - protein, 348 aa, unidentified
MAMLADTVELVIGVDTHKDTHTAAVVQAVSSAMLAQVTVPATPAGYRQLLKLAGQHQGQRVWAIESTGGYGAGLTRFLQAHAEQVLELDRPKRVARRHGAKSDPLDAIRAAREALGRDQLAQPRAAGHRAALSVRLAARRSAVQAATDAQRQLHALVVAAPDSLRGRLRGLTTPRLVATCGRLRQQTTWDVETAATAISLRALARRIQLLNAEIADHTSAITTLVRAWRPDLLSRTGVGPIVAAIVLSAWSHAGRCRTDAAFAMLGGAAPIPASSGQTVRVRLNRSGDRQLNQALHLVVLTRLRYDPATRAYAQRRRAQGKTNREIRRCLVRYVARQLYRLLEAQPAL

SEQ ID NO: 140225 - protein, 365 aa, unidentified
MDLSEVRFVGLDLAKRVFAVQLQAADGRDLGCRTLARDELAPFFSSLPPSVVAMEACAGAGYWCAVLSAQGHTPLPLHARAVARLRMGPKNDKKDAALILLAAHLPDARAVLVKSRDQIAALSLHRMRELILRQETACANQLLGFLLEMGSVRWMTALALRQASDDEVGAEVEDMPAEMQFTIRSSLTRLRAAHEENLAIKKALLRWHLNHARSITLASIPGIGFGAATALTASIPEPPPWTSGRAFSAYLGLVPIQHSSGDKTRLGHIGRGGDQYLRRALFLASRSAAMLCYRKAEGPSSLVSLLNRKPFNVAVSAHAARLARTSCQMLIDGTQFEETAAWRLTPFRGKVHTAAGRRGEAPHDS

SEQ ID NO: 140226 - protein, 423 aa, unidentified
MMKLKYSICCGLDVHKNVIVATIVTTNKDGISEYLQKSFSTINSDIQKFHDWLIENNCYHVCMESTGKYWIPIFNYLENDIEVCLTHPKYVKAIKGKKTDKKDSKWIADLYKFDLVRCSFIPPKDFRQLRELARYRFKLVCMKSSEKNRIQNCMTVSNIGIASILSDPFGKTATEIMSYLLEHTSESMDEKAVRKLIKKGAKAKSDEIIEAIKGYNIETDQAKKLELARAHLDYLDDMITQTEVELYVRIKPYYEFVEFVSSMPGMTELSSTIILAEIGINMDIFDDVKHLCSWCGLSPANNESAGKKKSVRIAKAGAYLKPMMVQCALAAIKNKKEPYFAIKYGRIKKRRGHKKAIIAIARMMMVCIYHMVSEKKPFSPTDYEELMDPQNHVERVVLNENNVFAYLESLGYDSSQLVKRNDY

SEQ ID NO: 140227 - protein, 306 aa, unidentified
MSEITRALIARVGVDLAKQVIQVHAVDASGRCIVARAFKRDQFFAWCAQLPAGCMVAMEACSSAHYWARKLRALGLDPRLIAANFVTPYRMEGKNGKNDATDAAAICEAASRPSMRFVPIKTCEQQGVMSLHRVREGLKEERTACINQIRGVLTEFGMVFGKSPKVLRAVLADVIEDASNELSTLARLVVQRAFEHWRELDDHMRWCDRQVGQHVRASPAAKRAAKVTGIGELGASALTAGVGDFTQFKSGHQFGAWLGVVPRQASSGGKIRLGRITKRGDDYLRTLLIQGAVRAHERRQTRRPDR

SEQ ID NO: 140228 - protein, 412 aa, unidentified
MDVFCGIDWAEDHHDIALTDRDGTLLARRRISDDAAGLASLLALLAEHGDTPEDPVPVAIETPRGLLVACLRATGRKVYPINPMAVARYRDRHSIAGRKSDHGDSFVLASVLRTDLHAHRPLPADTELAQAIAVLARAQQDAVWDRTTAHNKLRSHLREYFPAFLAAFAGARDGITRPEARTVLAAAPTPADAARLTLAQLRALLRKAGRSRGIDAEATRLRDAFRAGQMRQLPLVEAAMGRQARALLGQLDAACAAADDLERAAVESFNLHPDAGIITSFPGLGPLTGARVLAETGDDRSRFQDAKGLKAYAGAAPITRASGKSRSVTHRKVKNNRLAAAGYTWAFSALTASPGARRHYDRRREDGDRHAAAQRNLFGRMLGCLHHCLATGQDYDEATAFPDPRKNLPQAA

SEQ ID NO: 140229 - protein, 413 aa, unidentified
MDVLHPRCCGLDVHKSSISACILLREAGRVQKHQRRFGAMTQELQELAEWLRQFGVSQVAMESSGVYWKPVWNILEGQFTVVLANAQHIKNVPGRKTDQKDAEWIAQLLQYGLLRPSYVPCEIIRDLRDLTRMRASLSQEASRISNRIQKVLEDANVKLASVATNVLGKSGRAMLEDIISGEDDPEHLASLALGHLRVKIPQLRLALEGKIRSHHRFLLRRLVDQIQFVEHEIGLLDERLEEIAQQRPELSQAVARWDTIPGIDRVAAWALLAEIGDNMAQFPTAEHLASWAALCPGNHESAGKRLRGTTRQGSPWLCRMACQCAWAAARTKNTYLSSQFRRLAARRGKKRAIIAVAHTIIVIGYHLQKNQSNYEDLGGNYFDRIHSDGLKRYLVKRLQQLGHKVTLEPMEAA

SEQ ID NO: 140230 - protein, 342 aa, unidentified
MNNVAIAAIDLGKHSFHLHAQDDRGHEVYRKKFTRAALTQYLANLGPCIVVMEACGGAHFMAQEVAKLGHTPKLIAPHLVRPYVKSNKNDFADAEAICEAATRPTMRFVSPKTQAQQALAMLNSMRDSFIKDRTATVNRIHAALLEVGISLAPGFKSIKDLPALIETSSFSGAIKKILMALHEHFNYLDGKVKALDKEVECQAAEDDLASRLMTMPCVGPITSSALAAELGDGKQFKCGRGYAASIGLVPKQHGTGDKTVLLGISKRGDRNQRRLLIQCARVYLIKLEHQKGALADWVRQLLVSRHHSNLVVCALANKLARIAWAIAAHHTEFDAGPGAMNA

SEQ ID NO: 140231 - protein, 468 aa, unidentified
MGHNRSRSRQPGGKKFKHPSLLKRINRNAAGIDCGSEAHYVAVPLERDPEPVRSFKTFTADLHRLADWLGACKIKTVAMESTGVYWIPIFEILEERGFEVVLVNAQHIKNVPGRKSDVLDCQWIQELHSVGLLRGSFRPAAEIVSLRAYLRHREKLVQSAASHIQRMQKALVQMNLQLHNVISDITGVTGMHILRDIVAGVTDPMALAAHRDPRCRASQDEIAASLTGNYRAEHLFVLRQHLELFDTFQQQIQACDTEIECLLHKLAARQRKSKTPIPSPRCKLRFYDNEPRFEIRDPLYRLAGADLTQIDSIGPFTALKLIAEIGTDMSRWPTYKHFTSWLTLAPKNKITGGRLISSRTQPSANRAATVLRMCAMVVGRTSTALGAYYRRIAYRIGKPKAITATARKLAILVYRTLKGELDYADPGASAYEEQHRERTLRNVRNRAKRLGFGLVDLETGELLQGAVS

SEQ ID NO: 140232 - protein, 368 aa, unidentified
MKTTLYVGLDTDSKHIDVGLAEPLPQGEVRYWGKLANEPASVDRLVRRLQKDGRELIVCYEAGPCGYGLYRQLSCKPGVRCQVVAPSLTPRRPGDRVKTNRRDCLSLTRLLRAEELTAVWVPDPAHEAMRDLVRARSAARGDLNRCRQRIGGFLLRQGMRYAAGKPWTKRHRRWLGQVELCEPAHRLMFGELLDALDQAQARHDRLIEHIAERVPHWSLAWLVEAIQALRGYRLIQAVTVAAELGDPRRFSSPRPLMAFLGAVPSEHSTGDSVRRGGITKTGNGRARKALIEAAWTYTRPIRTPAPRHHAPAVRAIAEKACHRLSGRYRRLLARGKLPVVAVTAIARESLGFIWAIAHAAGPEASRPS

SEQ ID NO: 140233 - protein, 345 aa, unidentified
MTNIVKQVVGIDVAQKELVVSFGRMSHDTGIDIFAFKTFANSEKGFKALLTWVDKLAEKGIPVRYVMEATGVYHEKLAYYLTDNQQQLSIVLPNKISNYFRTLDVKTITDKTASQAICRFGLERRLETWQKPKKVFKDLRQLTRERDQLVADRTVLKNQLHAEKAEAFPNESSIKRVTKRIQLINKQELEIKEEIAEIVKGDAELGKKIATITSIPGVGKLTAVIVLAETNGFELIRNKKQLVSYAGLDVVVKDSGTSIKSKPRISKKGNRFLRKAMHLPALSAMKLNEQQKAVFIRLVSKHGIKMKAIVAVQRKVLELIYILYKTDKIYDKDYTNDATKQAINS

SEQ ID NO: 140234 - protein, 370 aa, unidentified
MSVYVGIDVHRKRSQVAVVTGDGTVELNKNVVNGSEPMLRLIGDLPPGTPVAFEAAFGWGWLAALLEDYGFEAHLVHPLRCKAIASARLKNDKVDAATLAQLLRADLLPEAWIAPPAVRQLRALLRHRAGLVRLGTQQRNRIHAVVADFGFDRSGSYLSGPGRGWLAGLDLPPVSREVVADCLAVIDGLAPVIDRIDGELRQHAKADPRVKTLTTLPGVGQFTALVMLAEIGDITRFPTARKLASWAGLTPTVRGSDRTVRHGHISKQGSAWLRWVLNQAAQTAKRSPEFSATYAAIAKRRGKKIATIAISRKLLTRAWHLLAADQAPGPASPDASMATAAHPQTGRVTKPRARSHLRHEPASGRARSSD

SEQ ID NO: 140235 - protein, 480 aa, unidentified
MRLHDFAPLRLQRCSSNPLAKGMNMSNLRIKKKSKKFKAADLPVELKHVNLDAAGIDIGSDRHLVAVPAGRDDVTVREFGAFTPDLHALADWLEKCGVTTIAMESTGVYWIPLFEILEQRGFEVKLVDARKSKNVSGRKSDVLDCQWLQTLHTYGLLTGAFRPADEICVLRGYMRQKEMLVQSSSMHIQHMQKALQQMNLLLHNVVTDITGVTGMTILKAIIAGERDAKVLARHRDSRCRNSVQTIAKSLVGNYRQEHIFALTQAVELYEIYQAKINDCEVAIARFLTTQARQTEDEPPPSQKNIPPRQRIRAGVDLRSRLFKLTGVDLFSIPGLGADTLLTILAEVGFDMTPWKTEKHFASWLALCSGTKISGGKVLDRKTKRSTNRAAQAFRLAASSLARSNTALGAFYRRIRARIGAPQAVTATAHKIAITFYSLLKNRTTYVEIGQNAYELKFRERRFKAIQKQALAMGYQLIPAA

SEQ ID NO: 140236 - protein, 352 aa, unidentified
MNRAHQDWAGQTLYAGIDVHKAKWVVTVRTREVQLKTFVTEADKEILLKSFRHLYSGATIEAVYEAGCFGYHLADFLNANSIKTIIVAPHTIPVAPGQFVKTDTIDSRKLAAELAKGTLSGIYLRPREDLFDRGLLRKRVQLVKRRIQLQHQIASDLRFYGLDSHITVRAYWSRWLLADLKALSFPNEYYREAFQMLVTDYTMIQGQILQLDRLLVIMAESDKYRDRVKLLRTIPGFGLLSALTFIIEIGDIKRFSSAEKFASYLGLTPSEYSSGEQIHRGCLTGMGHSSLRALLVQIAWMSIKKDPVLLMKFQRLCGGKSKCRAIIPVAKSLANRLRRILLFNEPYVIGVA

SEQ ID NO: 140237 - protein, 364 aa, unidentified
MKIVGCDLHARQQSIAMVDTETGEFTEKRLMHEGNAVRDFYASLEGPVVVGIEATGAMQWFLELLEELGIKCRVGHPAKIRAAETRKQKHDRRDAEVILDLLVMKDRFPDIWMPSTEQRDLRTLLRDRHQWVKMRTRLQHTLQAIALNHALREGRALWTAAGQGALQGLALPPYTDQRRDELLSLYTQLEKRIQQLDKQVETEAQQRPRARRLLTHPGVGPVTALATEVFLGDPTRFATANQVASYVGMIPCEHSSGKKQRLGKLTKEGNSLLRYLWVEATLHAVIKDAELKRFYRRKLIQKGMGKARVAAARKLGIRLWIMLRDEIDYEEFCRRGKLPQKGKAHAGVPDFNSGPARVVTGLTE

SEQ ID NO: 140238 - protein, 364 aa, unidentified
MAVSGLSPKELTKEAPNIMLHVGLDLSRRRLDFDLLCEDGSRIERGAAPPDADGLRGLVRRVDVYQEPVCAAIESMNGARFVHDRLEELGWQVELADAQKVKGLAPLACKTDRIDAWVLAELSRRDLVPAIWLPSPTVRQERERARWRLHLVRHRTALKNRVHATLIAFGKPCPVSDLFGSRGRQLLARLDLPDPWAQTVSASLSLIEDLDVQITDCERELRVLGADHEYVPLLMSAPGIAWVLGYTIAAEIGDINRFASPTKLCGYTGLCPRVNQSGEHDHRGSITKNGPKYLRWALIEAAVHAVCSPVYRERYQRTATRLGRQRGKKVARVDIARKLAEAIWYMLTRNQPFAPAGATTPLAA

SEQ ID NO: 140239 - protein, 350 aa, unidentified
MIIIGVDFHPGSQQIASVDTDTGEFEEKRLAHREEAEKFYRDLASRGAQIRVGMEASGYARWFERLLAELQIELWIGDASEIERKRARKQKTDREDAQHILQLMLKDDFPKIWVASWENRDLRQLLWHRHRLVQARTRIMNQLQAVALNEGLQCKKRLWRASGRQQLESFRLGPWASRRRRDLLELLDRLSPTIAELSQAIEQEAEKCPEAQRLMTHPGVGPLTALGFVLIIGPAERFQCGKQVASYLGLVPLEKSSGKRRRLGHITKQGSSIVGFLLVEAAQAAVRGDPQWRSKYLRLLMRRGRKTAKVAMARRLAIRLYWMWRERQDYQQSRSFGSHAGQPGNRDGVH

SEQ ID NO: 140240 - protein, 346 aa, unidentified
MGMDISVLGVDLGKNVCSVVGLDASGAIVMRRKVRRETLIALAEKLAPCVVGMEACCGAHHLGRVFAAHGHDVRLMSPEYVHPYIKAQKNDDRDAEGIAEAATRPTMRFVELKSQDQLDMQTLHRSRDRLVGERTALINQLRAILLERGMVAPQGKRKLEQFLSVLMDEQGGAGLSQRMIVLVADARAQWAELDRRIAAFDAEFVRWVKDNEEACRLTTIPGIGAIVASALIAAVGQAESFDRGRDLAAWLGLVPRQFTTGGRPKLLGISKRGNKYLRRQLIHGARAALPYVVKRDTPLGRWAKDLSSRAHRNVAVVAFANKLARIAWAVLRRQERFAATGMPMAA

SEQ ID NO: 140241 - protein, 411 aa, unidentified
MTYKVAGIDIHKKVLMVVVTDAATEEWEFESRRFGTAASEREHLVAWLQQRGVQEIVMESTAQYWKPIWLDLEPHFNQLHLAQARSNRAPRGRKHDFADAQRLTRRLLAGELILSFVPDAEQRGWRTITRAKVQLVRDRVRLQNQLEALLEETRIKLSSVVSELLGLSGRRILQALAEGQSDPAELAKLGDFRLRCSKEQLADALRGQWQPLHRQMLQLFLQRLELLDRQVQQLDRMAAETMLPYEDAVIRLAEVPGFGPDSAQQTIAEVGAQAQSFASVAQFASWAGLCPGRQESAEHNYSSRSPKGNPFLRRILTQAAQAAVKKKGSHFQIVFRRWLPKLGYPAAVWAIAHKLGRLVWKILHDRVRYIERGPESDPSVQRRRAHKMVQALRRLGYKVEISSLNPHHAQG

SEQ ID NO: 140242 - protein, 391 aa, unidentified
MFYMGIDIAKFKHDFCIIDEDTGDVIVPPRTITNDKDGFQEMLEILTNLHCSQKIKIGLEATGHYGTLIKAFLTSNGYKFSELNPLQVSRFHSQTSLRRTKTDKIDCQVIARYLMAIGSKTYQPQVYHLEALKSLTRLRETLVHQRSRCLVKLTNILDITFPEFKKFFAAKLRSETALFIIRKYKTPSRIAKWTDEDITLVHNVSRKIPISKLLEIKKSAVDSIGIAPKYLLDELPSILNVYETVNKEVSKLEEKIKSIIFELNPPSLSIPGMGPISLATILGEFGDFSRFPSAEQCIAYAGVDVGISQSGTKYHRGKMVKRGSSHLRYALMNVVRTVCIHTPTFREYWVKKKVTGHKFLRVADSHAAKKLVRVIYYLETHNTKYDPSRCK

SEQ ID NO: 140243 - protein, 318 aa, unidentified
MPSSKTGIIGIDVSKAQLDVAVVPAGETTQFANTDVGIEELVAWAQTCQPQLIVLEATGGLELLATGRLTASGLAVAVVNPRQVRDFAKATGRLAKTDRIDAQLIAQFGEAIKPVPRTLKDEATQQLSALLVRRRQLVDMLTAEKNRLSRALQSRIQKDVQQHIAWLEKRIAKTEKELGAAIKASPIWRVKEEILTSAGGVGPVLATTLLCRLPELGGLNRRQISALVGVCPFNRDSGTMRGKRSIFGGRADVRAALYMSTLAATRFNPPIKLFYDRLIRAGKLPKVALTACMRKLLTILNAMVKHQQKWDPQLSQST

SEQ ID NO: 140244 - protein, 342 aa, unidentified
MEKHTTIAVDLSKTVFEIAVSDYPGRVCERRRLTRGQMVRFFANRPPATVLLEACGSAHHWARTLQQLGHSVRLLPVHHIRRYVLRDKTDAADAFALLEANRNEQILPVPVKTVAQQSLAALHRIRSGWMQTRTARLNALRGILRELGISIPKGARHVLPALKASLSDPDNPLPLSLHPTLLAVAAEIRAFEEKIKDLERQLTAAARSCPSATRHLSIPGIGLLTATALSAFVGDLSRFRSGRRFASSLGIVPREHSSGLRQHLGAITKRGDPYLRTLLIHGARSVLLAASRAKHPDRLQTWALRLQNRRGHNRTAVALANKLARIVWAVSTHQTEYRRTAA

SEQ ID NO: 140245 - protein, 363 aa, unidentified
MFNTVKYKIMNYSHFVGLDVGKKTFDASLMSAAEKELSHKSFDNTPEGIQSLLDWIAGYHLSLSKLLFCAENMGSYVTELSVSSVSMGFSLALVCPLTIKKSIGLQRGKNDRIDAKRIANYAVLHYRKLELYKLPNKDLVRLRGWIIIRDNLVKQKVSSIKLLETFSQMAKLADVTESISFLEEQLKSIKEKILEVEEDMEQLIAASTSLYTNYLLLRSIKGIGIINAIVLLCVTDNFQRFDTPRKFACYCGVAPFEHTSGISIRGKTQTSSLANKEVKVYLTRAAITAISWDPQMKAYYKRKIAEGKHKASVINAVRAKIIARSFAVIRRQTPFVTLAVLYRKSEIFRNSCIVAIHSLNSAN

SEQ ID NO: 140246 - protein, 364 aa, unidentified
MMQEANIMQSSITMSKESKKRSSDLAAKLLKYSVGIDMGKAEFVACVSSINFEQRFKVIASRKFANTGKGFNLFFSWVKQKTRLEERIVFCMESTGVYYENLAYFLADAGCCVSVILPNKSKNYLKSLGLKSKNDKIDAQGLAQMGAEQNLEPWRKPKQLFIELRSLTRQRQNLQENRTALSNQLEAFQNAKYVSPKVVESLKSLIDSIDTEVIKLEKEIKTLMEQDQEIHQKMKAICVIKGLSLISLATIVAETLGFAQFTNQRQLTKYAGYDVVENQSGKHVGRTRISKKGNSRIRRILHMPAFTAITHGEKPFVALWNRVYERTKIKMKAYVAVQRKMLVLIYTLWTKGGTYDPEHLVMQS

SEQ ID NO: 140247 - protein, 400 aa, unidentified
MQQSRSCGWAGVDVGKGHHWVCLIDEAGTTVWSAKVVNDEGAILEAITAVLARAELVVWAVDVTGTMSGLLLALLAAHGQQVKYVPGRTANQMATAYRGEAKTDARDAYVIAETVRHRGDLSEVEVSTALVTELRLLVAHRSDLVADRVRMVNRLRDVLSGYFPSLERAFDYAHSRGALVLLTGYQTPAAIRGRGQARLAAWLVNRKVRSADQIATDAVAAAKTQHTIVPGQDVAASIVADLATQILAIGARISDLDARITATFRAHPQAVIIESLPGMGPILGAELVAAAGDLNAYPTAGRLASAAGLVPVPRDSGRRTQNLHRPRRYSRKLRRVFYLSASAAMMREGPNRDFYLKKRGEGLKHVQALIALARRRVDVLWALLRDNRVFQRVPPGVKTA

SEQ ID NO: 140248 - protein, 334 aa, unidentified
MEKDYYIGVDISKRTIDVAIYVKSQAKKRAFPHETFQNTAEGFKDMKRWLRKQSVVLSKSLFCMEATGNYTYELCLFLEQLGAAYSVQSPLHLKRSFGLTHGKNDKVDASRIAYYAYLHREDIKLSKLASESVRKLKSLIAERKSLVVEIARCKAQLKETGENAPSPGTIKRTEALQLFLENQVESIEEEMAQTIETEEQMRTNYNLLLSVDGIGIVNAINTIIATHNFEMFDNARQYASYIGVAPFEHTSGTSVRGRTHVEPGAKMLKADLTGAVRSCINHDKEIRKYYDRKMAEGKAFGIVANAIKFKLLLRMFAVIKRGTPFVRKPDFIYS

SEQ ID NO: 140249 - protein, 383 aa, unidentified
MKAVCGLDVHKDSIFLCILHSDGELFEQVFGVLTFQLEEMRKLLQKHHVFEVCMESTSIYWIPIWRVLSPHFTLRLVNPYFIKQLPGHKSDVKDAQWIAECTLKELVRGSFVPPEIIQQLRQYDRRIFDLNAEIVRKVSKVDGVLQRCNIRLSNYVSNIECKSYRDVVRRLSEGVTNPNELMKLVHGRIVNRHGAETILASLTGVVSQAEIDVLRQLHEEIDIAESHRNECLQRMLEICEKHFPEELERLQKIPGIKERAATSLIAEIGTDMSKFETANHLASWSGLRPRNDESNKKIKSRKITHGNVYLRNTIIQCAWAASRQKDCFFSRFSYHQTIVRRKNKMKVIVAVARKLLVAVWHVLHDKTDYVDFKPDREESANNG

SEQ ID NO: 140250 - protein, 393 aa, unidentified
MPTMTYPTTVGEQADIEVTGGVDTHKDTHTAAALDASGRLLGHREFAANAAGYAALLAWLGTLGQLVRVGVEGSGVYGAGLARFLQVAGVELVEVDRPDRKTRRRQGKSDPVDAEAAARAAQAGRAGGVPKTRGGKVDALRALRVARRSAVAARADAQRQIKALIVTAPDALRMTLRGLGDRDLIAQCATRRPDRAAAGDPTVATTLALRALARRHQQLSVEIDELDALIGPLVTAINSTLMGLSGVGADVAGQLLVTVGDNPQRLRSEAAFAMLCGAAPLPASSGRTHRHRLNRGGDRQANAALYRVVLCRLRWDPRTRAYAQRRTAEGMSKPEIIRCLKRYIAREIYTALLNPRPSSVPAITSTPPEESPEESTCSARSAARTNDVDTDKR

SEQ ID NO: 140251 - protein, 405 aa, unidentified
MSELEKDLVFAGVDTHKDTHTLCLLDHMGRAIGTFRFAADAKGYDALAGKIGGPATCVGVGVEGTGSYGAGLTRRLLELGYCVYEVMVPGRARRKPGRPKSDPADAEVAARQVLARANLSKPKDQSGWTEELGQLMIARDRLVQATSAMINAAKSLIVTAPEDLRRSLEGLSRKNLRSALSTLDPAAGGIVLALGSLGKAWDLQDREADAIEERMKRVLEANAPALLAIYGCGTVSAAALAVAGGGNPERLKSEAEFASLCGVAPLLASSGKTERHRLNRGGDRRANRALYQIAVTRMSYDQRTKDYVGKRKRDGKSKKEAIRCLKRYIAREVFRALRNPLEIKGPSWKDLRPARQALGITLVEVGKALDVGFQKVSYAETGRLMNVRFLEEYDAWLKSQAKRES

SEQ ID NO: 140252 - protein, 312 aa, unidentified
MIHDTSYVGIDVSKMQFDVHIHPGAQSLRCGTSPEEIAQLVQRLARLGPVAVGLEASGGYEGRLADSLHAAGLEVHVVAPARVRGFARAIGQLAKTDRIDAAMIARYLMAVRADLTPYAPDPARRRLRALSAHRRRLVAERSGLVSQLDTIDEPLVRDLIETRLMTIGDDVATLEAAIADLLAGTPALRQCHARLRQVTGVGPVLATALLADMPELGQVSSKVAAALVGVAPYARQSGQSDRNGRCAGGRKHLRDIAYMAVLSAIKVKDPVLGGFYQRLRARGKPFKLAMVATVRKLITILNAIARTDPAFA

SEQ ID NO: 140253 - protein, 356 aa, unidentified
MEIVDAMDIQRRQITVRWQDMSTGEIRRRRIIPAARGPLREWLSQFEGRDAHIALEATTGWRFVVEEMQRIGVTPHLAEPAETSVRRGPKRRAKTDDKDCDHMVDLLVQERLPESWIPPEHILELRARVRLRKALLDERRQWQQRIQAQLYHQGVPPGIGLSTLQGRARLAEAKLSPAGRQVITVGVAMLDALDDQLRPLDVQQRSFAKSQPGCRALMGLYGVGGLTSVTVLAELGDCRRFSSSDDAVRYAGLDITVYDSNGKRPPGHLSRQGPEVLRWALYEAAQSAARKTWPDYAYYLKSKDRIHHNRACLAVARKLCRRAYHILKELGDTALQPVEAEIDSAPASSGRVEVAA

SEQ ID NO: 140254 - protein, 364 aa, unidentified
MKKISTTTAKAFRKMEKLTIGLDLGDRSSCYCVLDERGELVLEQKVSTTPKAMEEVFGGMPRSRIALETGTHSPWVSRLLSELGHEVIVAHARNVRLIGESRRKDDRLDAKTLARLARIDPQLLCPVKHRSAKAQAHLTVIRARAGLVRSRTALINVARGLTKSYGERLRGCSPRNLNKRAEGLSVELRTALGPLLEEIESLSERIREYNQRIEGIAQEHYPETALLKQVKGVGTLVALTYMLTLEDPHRFSKSRDAGCYAGLQPGRRNSGQSQPQMRISKEGDAYLRGLLVQSAHHILGPFGADSDLRRWGLKLAERGGKNGKKRAIVATARKLAVLLHRLWVNGEVYEPFHSSSRRVLVAAA

SEQ ID NO: 140255 - protein, 390 aa, unidentified
MDVLYQSCAGIDVHQATVVVCILHGPLTSTRPKREMAQFDTTTKGLKACHDFLSQFHVEAVGMESTGVYWRPVWHELCDDFELILAQPAHMKAIPGQKTDKKDAHWIAQLTRIGLLPRSFVPDETIQELRELTRQRKHYVESRNRETNRIHKILQSGGIKLTTYIEDIMGASGRNLLQLLIDETPITPRMIHQSVYTSLKRKVPQLLEALDGYFSAHHRFMLGQSLEIYDFYQKQIDCLEERINGYLNLYERPVEILDSIPGIDLITASVIIAEIGVDMSQFPTAGHLASWAGLCPGNNESAGKKRSTKIRHGNSYLKRCLCQAVFAAKRQKGSPLAERYYQIQSRRGPQKATIALAHQLLKIAYILLKENLTYQEFVLQKKATRDEPVA

SEQ ID NO: 140256 - protein, 312 aa, unidentified
MIGIDVAKAKLDLARSDGPDILTVANDEPGIAQIVRTLNAARPALIVVEATGGLEQPLLTALLDAGLPASLVNPGNVRHFAKALGILAKTDAIDAKVLVAFAQHAEPRLAEKREKNRVDLDALVTCRRQLTQALTDQNNQLATTHSNFARRALESVIANLKRQIGKLDKQIRKIIDGDVEMKFIDRLFRSVPGVGDVVSATLLAEMVELGRLSRAQAGALVGVAPFNCDSGRHRGKRSIRGGRTTVRNTLYMAALTAMRCNPVIQRFAKRLEEAGKKSKVVIVACMRKLVSILNAMVRERVEWDQLKIVRKA

SEQ ID NO: 140257 - protein, 311 aa, unidentified
MTKDIIGIDISKTTLDVHCLTDSAKAQFSNNKTGYSLLQKWLKGYNLTCIVYEPTGSYHRAFEEAFVQRFPLAKVNPLQARRFAQAHGTRAKTDQVDARMLAVMGQALSVKPQAPTSKEQRNLKELQVARQALIKDRTRALNRLDTLTLAVLKRQMKARITQLKNQLNQIDKVIVELLQNTPNTSRAHSIICSIPGLSRVSAAALLTEMPEIGTLNEKQVASLAGLAPMTRQSGQWRGKAFIQGGRKHLRVSLYMPAVVAARHNPDMKQFYERLIKAGKPPKLAFTAIMRKLILLANTLVKQNREWTPKRT

SEQ ID NO: 140258 - protein, 429 aa, unidentified
MSGEEVLIAVDPHKGHNTLVVLDPVSRRPVEEAEFANTHAGYREMVRFARRWGQRRWAVEGCHGAGRYLAQRLVATDEVVLDVPAKLAARVRVFSQGHGRKTDRDDAVSIGLAALNAAGVQAVHSDGAMVSLRLWCDRRDELVSLRTQAICRLHRLLAELTPGGSSRELSATMAAAMLKLVRPKDDVSRERKALALQHLGDVRSLDRRIKGARDRIAAMVDANGTGLVNLFGVGPLVAGRVLAEVGDVSRFPTKDHFATYNGTAPIDVSSGEQVRHRLSRSGNRRVNHAVHIMAVVQIRNPKSEGRAYYERKRTEGKTAKEALRCLKRRLSDVIYRQLVADHYAKLVPCASPTTGRPTPSISTSPTRSSRVATPRPKPSRRPASKPGSPSTGKRAASSALRSSTPTLSSLPTSSSRPKTLRKKVISTSS

SEQ ID NO: 140259 - protein, 351 aa, unidentified
MNIMGCDLPSRYQVVAWVHEETGEVVTRRLEHENGEARKFYASLPRGTMVGIEATFPAHWFERLLGECGHELRVGHAAKIRASVVRRQKTGTRDAEPLLELWLANRFPRIWVASLAERDLRQLLVPRMKLVRMRTAVKNQLPALAISQGVCRKQKLWSVRGRAELDNLALLPWASRRRQDLIATLEQLNGSIGELDGAVEAAAQQREEAVRLMTHPGVGPVVGLAFVLTVGQVSRFPNSRHLVSYLGLNPSEHSRGGRQRLGAITKQGNTMLRWRLVEAAQTTARYDPELRRVYQRWKFRRASGVAKVAIARRLAVRLYWMLRAQVDCAQLVRMSGSPSSGVAPKPSESIV

SEQ ID NO: 140260 - protein, 344 aa, unidentified
MVTFGVDAHKRTHTIVAVDDHGTPLGQTTIGTTSKDHLGLVRWAARFGAERRWAVEDCRHLSRRLERDLLGAGEQIVRVPPKLMAHVRDSARTYGKSDPIDALAVARAAQREPDLPAARLDGPERELRLLVDHRESLVAERTRLICRLRWHLHELDPGWEPKARSLDSQRTLDAILRRLAGQTGLVARLARELTNRCADLTVSINALKVEIAELAQRLAPALLAIPGCGALTAAKIVGETAGVERFKSRDAYARYNRTAPLPVWSANKARHRLSRTGNRQLNAALHRIALSQARWHPPAQALIERRRSGGNSGREATRILKRRLSDAVFQALQTDQFEHSSLAA

SEQ ID NO: 140261 - protein, 408 aa, unidentified
MDVIHARCAGLDVHKKTVVACVRVTEPGAVRHEVRTFGTTTSGLLALADWLRAEACTHAVVESTGVYWKPVWHVLESEVAMLLANAATVRNVPGRKSDVSDARWLADLLAHGLLRASFVPPAPIQELRDLTRTRKQLVREVTAHTQRIHKLLESANVKLASVLTDVLGVSGRAILEALAAGETDPERLADHLHARSRGKRAAVVEALHGRVRDHQRFLLRQHLRMIATLEETITAIEGALAVALAPFRGAVARLVTIPGVSATVAAVIVAEIGTDMGRFPTAGHLVSWAGLCPRMDESAGKHRSRRTRKGAPWLKPVLVQSAWAAVRVRDRYPRAQYLHLKSRCGAMKAIVAVAASLLTAAYHMLRTDQDYRDLGATHLTEAARRRIAHRLTQRLRHLGYEVNLRPAA

SEQ ID NO: 140262 - protein, 380 aa, unidentified
MKKELYLGLDVHKDCIITAVAEEGRKGEVRETGALSNDLHSVEKWIGRLRKTHGKEVILRACYEAGPCGFGLARRLKQLGVECEVVAPSLTPKRSGERVKTDRRDARKLARLLRAGELTAVYIPEATDEAMRDLCRARSDAVDDRRRSRHRLKGFLLRHGYRYQGKSSWSAAHERYLRELVLPHPAMKVILEEYLQGIATAGERIERCEEAMGDLLEQWRLAPAVRALMAMKGFQSVAAMILVSELGEVHRFGHPRQVMAYLGLVPTENSSSDRRRQGHITKCGNAHARWLLVECAQHYASPPKVSKELSRRQQGQSHEVRAISWRAQDRLHHRYTRLLARRLQRNKAMVAVARELCGFIWELLRTQPCYQTQSQIGLKS

SEQ ID NO: 140263 - protein, 375 aa, unidentified
MPTRILYIPYMRLLVSGVGETVRWRFVSNEWRAAMRMYAGLDIGGKRTAICVIDGSGKTVWRGTVDTHPEMIDGALQRFKGSLDKVGLESGPFTPHLFRSLEAIGYPMICMDARRAADAIKSRRIKSDKGDAWALAEMLRTGWFSSVYVKSVDTHRLKALLGARDQLVKLKRSLGNQVRGLLRPFGIKLPSRAGGRKFDEAAYLATRNDPILHAAIRALLESLASIEGQQARLDDELDELAKRNEIAWRLMSVPGVGRITALAYMAAIENVERFRRTRDIGAYLGLTERRYQSAETDVGMGISKQGDAMARHYLYEAANVLLTTVKKRFALRNWGLRLVKTIGPKRARVAVARKLAVLLGRLWKDGAHFEAAVAA

SEQ ID NO: 140264 - protein, 343 aa, unidentified
MTKDTMIGVDLAKSVFQVHGASMTGQVRFCKKLTRVQFLRFMGDHPPAVVVMEACGSAYYWSREMVRLGHETKLIAPQYVKPFVKRHKNDAADAEAIVIAAQRPEMRFVEPKSEEQQAHAILFRGRERLIRQRTALVNALRSNLYEYGHIAPKGIGQIKRIEAIIEEPNSDLPDLMREECRDLLEQITEKTGRIETKSERLKGLAAEADTARRLQTMPGVGPLTALAIEAFAPDMKTFKRGRDFAAWLGLVPRQYSSGGKQRLGRVSKAGQADIRRLRIIGAMSRLAWHGRRSIPEGSWLDRMMARKPRMLVAIALANKMARAIWAMLTKKEDYRNPAWAAVT

SEQ ID NO: 140265 - protein, 387 aa, unidentified
MSKNKGRVIGLDVHPDSFAGAVLEGSDPARAKVLSSSTRVELERLEQWALRQTKAEDTLVLEASGNAFAVAARLRAIGREVEILDSHRAGKVGKVYCANDRVDAVKIARIYLSALSPIVWQPDQKTLERREVFSAYQAVVKESTRAKQQLRSMLNEHCVRLEKGFRLCHPRAITRLLKLREWTPARSMLLQQLHSTLVAARARRTLLRRHMAQEIAAEEALLRLTRLCGINLITLYGVVAAVGDVRRFTHSKKLVAYLGLNPSVSQSGNFQGSGALKRHGRGALRALLIQSGKKLLEVNNPLQKWGLAVAARRGRNKAAVAVARKLCVALWHLMMGHAIGTLERLDTLQTKLSKFATEIGPAALTAFGYNNRADFVQKKLYVLRSYP

SEQ ID NO: 140266 - protein, 359 aa, unidentified
MRIIGCDLHARQQALAMLDTETGELVNLMLWHEGNEVREFYSQLPRPVLVGIEATGSMHWFLNLMEELGIECRVGHPATIRAAAPRKQKTDRRDAELILQMLVEKRFPAIWLPTKELLDLRALVLHRHQWVRIRTRIQNALQAIALANGLRRGPSLWSYDGQAKIAFLSLLPHASYRRSMLQEMYRKMEEEIENLTQRVAEQAGQRCGARLLMTHPGVGPVTALATEVFLGDARRFVDGKALASYVGLIPREYSSGARQRLGGVTKQGSPLLRFLWCEAGAHAVRRDPELKRFYRRKLVQKGLGKARVAVARKLGIRLWIMLRDEIDYQEFCRRGQKQQSGAACAGKPEVAYGAKSPAD

SEQ ID NO: 140267 - protein, 340 aa, unidentified
MKKVSTIGLDLAKNVFQAHGADASGAVIFRKKLRRAQVLEFFATQPACTVAMEACGGSHFWGREIGNYGHRVRLIPPAYVKPFVKRQKNDAADAEAIREAAQRPTMRFVAVKSEAAQGAAVVFRTRDMLVRQRTQIINALRGHLAEFGLIVAQGPAHVAKLIMAVQDPKQPLPEAARPILCVLVDMLGLLDQRIKLLDIAIARRAKEDEVARRLMSIPGVGPVIATAVAALAPPAETFKRGRDFAAWLGLTPLQHSTGGKQRLGATSKMGERTLRRLLIIGASSVVRWAARKGAPAGSWLASMIARKPAMLVRVALANKMARVIWALMAKGGTYRAPVVA

SEQ ID NO: 140268 - protein, 429 aa, unidentified
MSSRETVQPEVKFVAFVGIDWADQKHVWCLQKAGSSQRESGELEHKPETVEAWVGELCRRFGPGPIAVAVEQVKGALVCMLRKYECLHLFPVPSTMSAAMRKALYPSGAKDDPRDADLLLDLLVQHRDRLRHLQPDNEETRRVQNLVEERRKLVEEKTAQVNRLIGYLKIYFPQLLEWFGRLDTKLVCEFLQRWPSLEELKKVPPAELRKFFQQRQGRHHELTEDRIQGIVQAMPAIQDRAVIEAKGAVVQVIAQLVRSLLEGIANLDRKIAEAAGAHPDFFIFESLPGAGAALAPRLLAALGSQRDRYGSADEVQKHSGIAPVTETSGKRKWVHFRWACAKFLRQSFHEWAGHSIAQSVWARAYYQQQRERGQDHHAAVRALAFKWIRIVFRCWQDRVAYDETKYLAALAKRGSPLNSVLLAATATAV

SEQ ID NO: 140269 - protein, 435 aa, unidentified
MEEVEDEPLFCDRVAGIDIGKATVMVTIRVPSEARAKGRQQETREFGTTRRELLALADWLRGWQVERAGMEATSDYWKPVLFTLEQEGFDCLLYQASQVKALPGRPKTDKLDSVWLARITEQGSLAGSFVPPEEIRRLRTHTRCRRKLVQMRTAQKERCEKLLEDAHLKLSSVISDIHGVSGRDMLRAIAAGERNPKVLAQMARGVMRSKIARLEQALDCSFFTGEHAFILTMMLDSIDSLTAQAGVLDARIADMCQPYQRQLEQLDEIPGFGITTAQDLIAEIGTDMNVFPTAGHLASYARQAPRVKESAGKRKGKNATGRGNPYIGGALGEASISAGRTQTFIGEKYRRLTRRMPKRKAQVAIMRSQLVIAHALLSDPDARYQDLGPDYYERKADIRRRARNHARALERLGYKVTLEAIDPGTGELHLIATAG

SEQ ID NO: 140270 - protein, 366 aa, unidentified
MKKTSTVQALQSEDFKEQKLTIGVDLGDRWSFYCVLDEAGKIVLEQKLPTTPEAMKQTFGKIPRSLIALETGTHSPWVSWLLTELGHEVIVAHAQKVQLITKSNRKDDRHDARTLARLARIDPELLGPVRHRSVQAQIHLTVIRARAELVSARTALVNAARGLVKSYGQRLPKCGTQQVNWELAAALSTELRDVLEPLLKEVESLNERIKEYDERMEKIAKEVHPEVSLLKQVKGVGTQIALTYVLTIEDPHRFLKSREVGCFLGLRPGRRNSGESEPQKKISKEGDRYLRTMMVQGAHYILGPFGQDSDLRRWGLKLAARGGQNAKKRAVVAVARKLAVLLHRLWVSGEAYEPLRNSQKAIRAVA

SEQ ID NO: 140271 - protein, 360 aa, unidentified
MEQITRVGVDLAKRVIQVHAVSATGRVMSVKALARDKFMAWCVQLPPGCLIAMEACSGGHHWARKLRAMKLDARLIAGHFVGPYRMQGKCGKNDANDAAAICEAAGRPHMRFVSIKTIEQQAQLAVHRLREGYKEERTACINRIRGLLAEFGLVFPQSPEALRRELPNVLEDADNELPGVARLALQRAQLQWVELDDHIAWCDERIAVHVRSDEQAQAAVQVCGIGPVTASALAASVGDFKQFKTAAQFGAWLGLVPSQNSSGGKASLGGITKRGDEYLRTLLVQGAKSAVMTAHKRSDRISQWLVQLTARVGWQKAVVALANKNARILWAVLAKGKPFDPNHVSVKPQGPATIGTTLAA

SEQ ID NO: 140272 - protein, 347 aa, unidentified
MEKASQAEVQVFVGIDVSARELSVAVQCGIKEGIAITTFRNQAAGHKALLAYLLRAKGRARVCLEASGNYSLDLAFTLQAHPQVEISVVNPRRARRFAESLGERSKTDPVDARVLCEYALRMPWVPWVPPSLAALRLRSITRAIEDLVAMQVQEKNRQHALLASDALPALLIRELEQHLRYLKLRITRLRREALRLIARNPELNRRFHLMLTTPGLGETSSLQILGELAVLPETLDARQWVAFSGLDPKQFSSGTSVEKKPRISRGGNRHLRRALYMPALVATRHEPFMRDFYQRLLRRGKAPLQGVVAVMRKLLHALFAMFRRDEAYDGSKLCPVEFARHTAVVCV

SEQ ID NO: 140273 - protein, 384 aa, unidentified
MKKVNSNVACAGMDVHYKFSNVTFRDASGKVVSRQRLDHPDRKQLAERLSRWPTGIPVVMEASFGWGWLSDLLEQAGQDVHLSNCYKVEQMRKARGWVKTNKKDADLVSLLVFEQSDWWKVWRAPPDVRNRREQMRFRGDLVGSQTRVKSRVHAIFHRHGIFHEFSDLFGGKGRKFLVELCLYNSANLPPGALLALRGQIKLLDHLRRQLADVARILHKQLLKTPLTMRLKTVPGFGLILAHVLAAEIGKIERFKNQKSLASYSLLAPRADDTGEDDPSHSPKGRHLGLRGNRTLKWAFIEAAHGAVRSGGKWRAIFDRATDGGKKNRNRGYIKVARELVKVVYAVWAKGVDYQVIPPGRPGRKSNKKKSRSETGQLLHPMVHA

SEQ ID NO: 140274 - protein, 345 aa, unidentified
MTQCNVIAIDLAKDIFQVCIMTANGKITFNKAMSRAKLKEWLIKQQRSLVAMESCGGAHYWARLAKSLGHNVIPIPPKQVKPFRTGQKTDANDAIAIAVASRAANIKPARVLTIEEQGLQSVGKMRDLLDKQKLQLSNQVRGLLLEFGIIINKSIKNFKARIPEILEDAENQLPMPMRHSIAKLWALYSRLEEDFQVMNKGLIELTGQDKDCKKFMKLEGVGPITSMRLKIQLGSGEHFKSSRQVSACIGVTPKQHSSGGKIQLGSVGKSSCDKPLRSCLFLGARAVVAKLKNRPAKTEKEKWLKALIERRGANCASMALANKNVRTAYALMKNNTDYSPVLLAA

SEQ ID NO: 140275 - protein, 412 aa, unidentified
MHYYVGIDIAKSFHVACVVNQDDKVIKKSLKFNNDESGFDKLLLLLNSIDEVSSFTIGMEATGIFFENLYLYLSEKGFNVILLNPYQTNRFREMDSMKKVKNDNIDALMIAALIKSGRYSKAYVSQDTYQSIKSLYRHKNSLLEEMKKHKRQISTLLAVVFPEMEQVIRDPFNVTGLALLEKYPTAKHYHHASVDRILKTFRGIKGNNFNEQKAQKLLELAKSSIYQGNGVDERAYVIKSHIRVIKLLQEELKELENEMLKLFNQVPQLDNNEEQEVMDIIDNLRTIPGVSDKTIFALIGECGDLSRFKNNSHFIGYLGLYPTLEQSGNKLVYGPIAKRGAKLAKKALYQASIAAIRHNEELNKLFRDKVSQGRAKKEAVVIVARKLAHIILAIYKNNVAYNPKRVFMASAS

SEQ ID NO: 140276 - protein, 375 aa, unidentified
MTMMHHRQIRYIGLDVHKATISAAIAEESGAPTSYGRIPNDPAAIRTLMTRLGGPQVELRVAYEAGPTGYALHRQLAKMAIDCMVVAPSLIPKQAGNKVKTDRRDALKLARLLRSGDLTPVWVPDEAHEALRGLVRARADAKADQLRAKHRLSKFLLRQGCWPPSGVRNWSKRYFTWLHQLEFEHLPDRVVFADYLAEVTAAAERINRLEAALHQCAQSSSQVALIRALQAFRGIAFLSAVTLVAEAGDLRRFRTAPQFMAYAGLVPSESSSGGKQQRGSITKTGNSLLRHVLGEAAHHARHAPRVTTRVKQRQTDLPAEIVELAWRAQIRLHTRYRHLSGRIGALKALTAIARELAGFVWAAGQMFQEEVPTAA

SEQ ID NO: 140277 - protein, 370 aa, unidentified
MGKHRLAFVAFDSAKNKHAVAIADGGRGAEVRYLGEIDNSPDAVRKLVAKLTRQYERLHFCYEAGPTGYGLHRQLTELGHVCDVVAPTMIPKRSGDRVKTNRRDSVALVKLLRAGELRAIWVPDNVHEAVRDLTRARETAMVDLKTKRQQLLSFLLRHGRSFPDRNWTKTYERWLAKQTFAHPAQQIVFQDQLEAITAAQVRLAALEQQLREIVPTWTMAPVVAAYQALRGVSFLVAITFVAEVGDVRRFATPQQLMAFLGLVPSERTSGDTVRRGSITKTGNRRARRVLIEGAWTYRFSARVGETLRTRLKDLPLSVRAIAWKAQVRLCARYRRLIARGKKAPVVTTAIARELSAFLWAIGQQVAPQTG

SEQ ID NO: 140278 - protein, 482 aa, unidentified
MKPKPQEKTKTATGDPTQPHWNQMNRKQQLETMRKIQSEDLSLEMVHPDAAGIDIGNESHYVAVPPKRDSQPVRRFGCTTAELKAMAEWLKQCRIRTVAMQSTGVYWIAVYDILEEAGLQVYLVNARETKNLPGRKSDVQESQWLMKLHTYGLLRNSFRPAQEIRRLRTYWRQRNDLVRSAGRHIQRMQKALTQMNIQLANVLSDVSGMTGQAIIKAILGGQRDPHKLAEFRDPRVKASEEQIARSLEGNWEEDLLFVLKQEQDGYEFCQKQMAECDRRLEQYLREREDRSQGVSLPEEKRKERLKKKKGNAPQFGLRADLFRMTGTDLTLIDGIDVMTATTILSEAGWDMSKWKTEDHFVSWLRLCPDNRISGDKIIGKGRLPTNNRISIALKMAASTLRLSSTYIGAQFRRLRTKLGAPVAIKAMAAKLARLVYRMLRYGMKYVDQGAEFYEAQHRQRQISHLKWKAAKLGFQIIDAPAA

SEQ ID NO: 140279 - protein, 350 aa, unidentified
MSIVADHHGFVIGVDCHAKNHVYSIATARGDILATRQFPTTAAGMGRAISWVGRTTGGDMSALFAIEGTATYGANLSRLAARAGYTRVEAPWTGKSSKGKSDEIDAGKIARATLACQIDQLRDPRADGIRGALAILLASRNQIQTAKTSAKNQLTALTRFHDLGIDVRKTMSMKQIRAIATWQARDTGDIAVFYARREAIDLAQSILQLEKKAATNQAEILALVRQSEAGPLLEEKGYGPISVAQIFVSFSHAGRIETEAKFAALAGVNPVPASSGNTVRHRLNRGGDRQLNSALHTIALTKMRTDEQTKAYVARRRLEGKTDREIRRCLKRYLARHAYRTLNHTPPTQP

SEQ ID NO: 140280 - protein, 376 aa, unidentified
MTKGTRFVGLDVHAATIAVAVAEPTGEVRGLGTIPNEPEAIHKLMRRLGPAEQLRVCYEAGPCGYTLYWQLTRAGISCVVIAPTLIPVKTGDRVKTDRRDAEKLARSFRSGDLTPVWVPDAAHEALRDLVRAREAAKKDQLRARHRLQKFLLRHGQRPPAGTAAWTEKYRRWLSTVRFDAPAQEATRADYVAEVEHVRERIGRLDRALDEAVEATPAAMRAVIDALQALRGIAKLTAVTIVAEVGRLSRFERPRQLMGYSGAVASEHSSGPRVRRGAITKTGNAHLRRIVVEAAWSYRHRPAIGPTLRQRQAGQSAEVTAIAWKAQERLHGRYRRLLARGKVKQQVVTAIARELLGFIWAIGVAVEGQQQPDGRAA

SEQ ID NO: 140281 - protein, 330 aa, unidentified
MTQSLSSGPIFIGIDVAKAKLDLARSDDPRILTVENNLDGIRQILETLGDLKPAVIVVEATGGLERPLLDALLDADLPAALVNPGRVRHLAMGLGILAKTDAIDARVLVEFARHAAPRLSEKRSKNKVDLDALITCRRQLLHVRTEQTNRRGATSSKPALKAIDAVLLTVDKQIRKLDGQIKDLIEGDDDLYRQDKMLRAVPGVGAVLSTTLLAELEELGQVDRRQISALVGVAPFNRDSGNTTGIRSIRGGRTTVRCTLYMATLAAMRFNPVIAAFARRLTGSGKKGKILIVACMRKLLCLLNAMLRDNVEWHELDVVRRAHALGGGAK

SEQ ID NO: 140282 - protein, 369 aa, unidentified
MRQYTPETIWVGLDVHQASITAAILYGDNPDPEIVRLPGDLNPTRRLFRRLAENGVPRACYEASGAGYVLQRALDHDGFHCDVIAPSLIPSLPGDHRKTDRLDAIHLARMYRSGNLTAVNVPGVDQEAVRHLVRARLFMRRQITRSKHRIMGILRTTDHRFTGTKTYWTKKHRIWLAQLRRQITGPLEIVLSSEMQMLEYLESSQVALDTRISEVAQQSPWREPVEALCCFRGIKTLTAMTIVSEIGDIKRFRSPRQLMGYTGLVPSERSSGERQRRGPITRAGNRYLRRVLIESAWHYSKKAGSTLILQRRRMGQDPGVVGIAVKAQHRLQRRYQHLSRTKHTNKAVTSIARELSGFVWAMLWEVEGR

SEQ ID NO: 140283 - protein, 359 aa, unidentified
MTEFKKPKARRIVGGVDTHADTHHAAVVLMNGRRVADREFSATRAGYADLLEWMRSFGRLQAVGVEGTGSYGAALARHLSDAEVKVVEVNRPDRQQRRAKGKSDPLDSYSAAEAVLADRARAVPKSGNGLAESIRVLHLIRAGAVKARTACLNELQALLVTAPAELREQLGGLKKARLADACSRLRPSADLADPAQSVKVALRHLAGRYRALSAEIDATYDQLKTLVEQARPELPAIKGVGVETAAQLPVTCGDNPERLSSEGSFAALCGVSPVPASSGRTRRHRLNHGGDRQANRALYVVVLSRMSCGPPTRAYVERGTAEGLSKREIIRCLKRYVARQLYKVIVRPQAPAAESPVLS

SEQ ID NO: 140284 - protein, 391 aa, unidentified
MQVVADRAEAPTAIQTDLRAIFVSLELSRSTWLITSLSPGGGEKMSKHSVQAGDIAGLLRRFAQLKEKARARTGRDFPIIVIQEAGLDGFWIHRVLQSEGIESHVVDAASILTSRRRRRAKTDRIDGETLVRTLMAFKRGEPRVCSMARAPTPQEEDRRRVCRERRTLVGERVRHVNRVKGLLFAQGVFGYEPLRKGRRERLEELRTGDGRPLPVHLKAQIIRELDRLEVVLEQLKAVEAERDALLKPGTEEASPTAMLTRLKGIGPQTAAVLWSEGLFRQFDNRRQVAAYAGLAPTPWQSGSIDHEQGVSKAGNPRLRTTMVELAWLWLQNQPTSALSLWFHERVRRLGGRMRKTTIVALARKLLIALWRYTTAGGVIEGAVMKAAPATI

SEQ ID NO: 140285 - protein, 477 aa, unidentified
MAKKAKTLPALTLLPILPHETLSIGVDVGKFKHVAGFLSRTLLERHEHFEGCPTFSFEQSREGFRAFVDRIHSYVPLEQATILLEHTGHYHKNVEQYLLELDMTVYRIHVQKRAAGLLKTDKRDALGLANTLYTQLELGAQVPDKMQLVRRAIPPTKAAAQLQSLIQHRYELSQASTRYRNKLTAICDEIFPEWIQGFHDPNLPTSLAFRERFPTPLAIATASLAALHELRARNFPSDAQLLHLQQLAQETIGVKDRDRQHGLLLEQGLLIKELRLIQDHLEVLQTEMSAIVNNCREGQRLLSLPPIGGIQAATIIATVGNIANFEKASELKAYFGWAPKRNQTGTSFDRTTLSKRGVRPMKQMLFLMAVRATTLDGEWAKIYQRLLPRMATYDERTKDYRGKLKVIGRIAGQMAAMIFALLKTDQELVSRVSPGQELPPPMLYDPETHRKHREGNSRSLKPDTQPRKIIQLPREPS

SEQ ID NO: 140286 - protein, 349 aa, unidentified
MTLYIGVDFHPHQQTLAWCDMETGEIRTRDLPGDPETVRQFYSSLPESATVGIEASARARWFENMLFETGHKLFVGNPVLIRKRATSRHKNDRRDAELILDLLLRKEFPALWRRPPESDSVLEMMHLRQSLVRQRTQVYNRLQALAHDVGLPKGRIRTKSFQNLLKSVPMNEVPSIRRDQLFSLVGKLDEQIGELDQWLTKKVDKDRSVQLLLTQPGVGNLTALVTVHTLGDVSRFPKLSKQIAAFAGLDPVEKSSAGKTRFGSISKAGSRLLRYQLGLSAQIACRSDVKLKSFYKRLAKKKPKPVAKTAAARKLLVKLAIMLRDQITAEEFDRRGRTVGNARGTTDLK

SEQ ID NO: 140287 - protein, 367 aa, unidentified
MSNRNSARPETTWVALDVHRDSITSALLRPGHEVPVVDRWFHDETRVRRFVKGLDALSSVRLCYEAGPTGYGLARLLEQLGVHTEVIAPSLIPITPGAKVKTDKRDARRLVQLYRSGQLTSVHIPSEAEEAIRDLCRTRADLVIDRTRCRHRLSKFLLRHGEVFRDGKPWTQMHAHWLMTRHFDDRALAQTYGHYRAIVEDLDAHLAAVEADLKCYLETGPFAEPVARLAAYRGVSELGALTLSAEVFDWRRFPRATSLMGFCGLVPSEHSSGEVKRRGQITKAGNTHLRTQLIESAWSYQHRAHVGRVIEQRQQRCSVETVSRAWRAQVHLCGKFRRLAEKKSSRNIVATAVARELTGFLWAEMAA

SEQ ID NO: 140288 - protein, 372 aa, unidentified
MENTITYVAMDTHKKDHKVALHYPGQEEILRFAFKNTARDIKKIVNKIKKQAPADIKFCYEAGVCGFTLKRRIEALGCECMVIAPSLTPIKPGDHIKTDRRDALKLLTMFKAGLLTEVHAPNAEQEAARELTRCRQTAQENLKRIRHQLLKFLTRHGYVYTNGNHWTQKHITWLRDLQFDQLLLADVFDNYFTQMNHCLQRLDSLDKQVKILAESNCYKEIVGFLRCFHGIDTLTAITIITEIFDFARFSSPGQLMSYLGLTCSEDSSGQKQRKGPITKAGNKRVRRLLVETSWHYRHPCKLSKTLRMRRKNQPQWIIDIADRAGQRLRKRYRHLINNGKIPCKATVAIARELAGFIWSVFNEYEMRNTKAA

SEQ ID NO: 140289 - protein, 448 aa, unidentified
MIEGNEEEGYSPFLRLFIPTTNKEETTMNRVRAKRVRGVGEGTLIVAVDIGAANNTGYCTTLDGRSTKSFRFDNTKEGFEKFWWMAVASKNRFGCDEVLVGYESTGPYAEPLVHYLAKKQVKIVQVNPMHTKKMKEVNDNSPLKTDDKDPRVIADIIRLGRALTIVVPEGDAASLRRLNNARERHVGEQTALLNQLQQLVFLIFPEFKTVLKNMKSKTAQYILKRYTTAERIGTLSKEALGEEMRKQSMGKFGIKEAESLIGLARETVGIKEGLGGIFLDIRHILMQLEAEGRFLSEIEVKMRATLERIPCSVRLLSIKGLGIVSVAGLIGEVGDFSKFSTQSEIMKLAGLDLYEISSGRRKGQRRISKRGRSLLRKILFYAAIQMIRKNGIMYEYYARLTGRGMERMKALIAVSRKLLRIIHAIVRDNRDYVEQYHASERRVIKMAA

SEQ ID NO: 140290 - protein, 339 aa, unidentified
MTTPVYILGIDLSKARLDCATLPDGQSLQFANSPAGFAAIIELLAGQRAQGWEVLAVVEATGGYERALVAALCAAGLPIAVVNPKRVRAYAKALGIRAKTDRLDARVIARYGLMVRPRPSETRDRDRLELAELLAYRDQLTGEIVARTQQKRLYTSPALLSRAETALASLRREQRELEREIARMLTERETLEGTAALVLSVFGVGTVAAASLLAFLPELGQLDEKEIASLAGLAPMAHDSGQHRGRRHIAEGRSKVRRVLYMAVVAGLRRNAGLRTVYDRLIKAGKPGKVAMVACMRKLLVWLNAMVRDGLPWQPDATKRRQAANEDTAAPAAERPRAA

SEQ ID NO: 140291 - protein, 418 aa, unidentified
MNEDGNTRGTRRYVALDIHKHYCVVAGVEREGRVMLQAVRVEHADLEGWLKKNLLSTDQVVIESTTNAWHVYDLLSPLVERVVVANPIQVKQIAQARVKTDIRDTLILARLLAANLVPEVWVPPAHVREMRQLLSQRRQLVETHTQIVNRMHSVAHRHHLKHERGQRFNEKTTSWQKDKVLSGMEQFQLELEMENRAYIEKQIQRISREVTKMCHQKPWAQSMTYLMQLPGLGVITAMTVLAAIGDIHRFACAKHLASYSGLTPGWEQSGTKNRGKGVTKEGRKELRWAMVEVAQRAVKSDPVWKHRFQEMQKRMHRNQAIVAIARRLLELVWYVLTRRQPYRHFSHERIAYKYLTWAWQMDEAARDGLTRQQFARYYLMRLGIGHDLTRIALDPKHPRKLASEAELLILRPELQKTE

SEQ ID NO: 140292 - protein, 312 aa, unidentified
MANLVYAGIDVGKDKLFVNIHLDSQVRDFPNTHSGLERLSRFLIKNAVNLVVMEASGGYERLPASDLRARGLSVAVVNPTYVRRFAQGMGSLAKTDTIDARLIAHFASVKQPKPQQAKTVEEEELAALVERREQLVSLLSVEKNRLSKASDYSKASLQISIQFLTGQVASIETEIKALMAKSPERLARMRCMCSFIGVGDITAVTLLTEMPELGMESGKHIAALAGVAPINRDSGKMKGKRRTYGGRARVRRTLYLAALSASRHNPIIKAFYERLLAAGKEKKVALVACMHKMLTILNAMLKKGELFNPEYS

SEQ ID NO: 140293 - protein, 403 aa, unidentified
MNAVGIDVSSRKSTVAVLRPLGEVVCLPFDVTHDIAGLASLAEKLKAIDGETRVVMEHTGRYYEAVAKALHEAGFFVCAVNPLLIKEYGANSLRRVKTDKADAIKIARYALDNWADLRDFTPMDAIRYDLKTLNRQFQLASKQRTASANNLIALLEQSFPGIRKCFDSPVRSDGTQKWVDFAHSFWHVDCVRKQPFAAFCERYRKWCKRHAYLFKQSNAEEVYALAKRAVVLTPKSKVVKVLVQEAANQLSSISRSVEVYRAEMDRLAAMLPEYPVVMAMYGVGKSYGPQLMAEIGDVRRFERKQALIAFAGIDPMPNQSGDKNVRSNKSSKRGSPYLRKTLFNVIRTYLQCAPQDEPVFQFLNRKRAEGKPFYVYMLAAANKFLRRYYAKQRRRNLLAAASI

SEQ ID NO: 140294 - protein, 343 aa, unidentified
MQEITTIGLDIAKSVFQVHGIDASGAVIVCRQLRRSQVLPFFRKLPGCVIGVEACATAHHWGRELVALGHEVKLMPARYVKPYVKRNKNDAADAEAICEAVTRPTMRFVAVKTREQQSVLMLHRTRQLFVRQRTALINAIRAHMAEFGIVAGIGRNGVEKLLELITRGEDDRIPPTGRACLMALAAQLVLVKRQILEADRRVLAWHRTSKTSKRLEAIPGVGPLIATALVASISDPTVFRSGRDLSAWIGLVPKQSSTGGKERLGSISKAGNRYLRSLLVVGALSVIRRAKQLGYTRHPWLVRLMERRSVKIAAIALANKIARIAWAMMARNESYRTPLPTPA

SEQ ID NO: 140295 - protein, 356 aa, unidentified
MNNRKYIGMDVHQASISIAVSDAAGKVLMECIIETKAATVLEFIQGLRGSLWVTFEEGTSAAWLYDLLKPHVTKVVVCDPRKNALLKAGNKNDRVDARKLGELLRAELLTPVYHGESGVRTLRELSRGYLAVSKDLTRVMNRLKAIYRSWAIPCAGQQVYSPRHRAAWLEKLREAGVRRRAEQTYQQLDFLMEIRKETRKELLAESRKHPARKLLEQIPRLGPIRVALLIALLQTPHRFRTKRQLWNYCGLGLRTRSSGEYRYTGGQLQHARKPPALRGLNVNHNHDLKNLFKSAATQAGTCKDDPLGEFYQNLLARGMEPPMARLTLARKIAAIALKIWKKGECFDPAKLKQQAA

SEQ ID NO: 140296 - protein, 429 aa, unidentified
MKIIYPRVCGIDVHKKFIVAVICISESVEPVYLKKRFSTFHNDLIRFRDWLIQNDCQNVCMESTGKYYIPVYNILESHISNIVVANPKWVRAVKGEKDDDKDAKWIADLFKLGIVKSSFIPQKDFRILRELTRYKYKLVNMRSSEKNRYQNALTSGNCKLDMVFTDVFGKSTSNIIDLILSDNPYTDEDILSKVHKNCKASPDMILNSINGTDLTPVQKSRIELVNNHIKQLSSNIQRLDKLIDLMIEPYEDYISFLCQIPGVSRNSAITILSEIGVDMNQFTSTRRLTSWAGLTPSSNQSAGKKKSVRISRAGVYLKPCLVEVAHATVKDTNHPYYANKFNKISKRRGKKRAYIAIARKILVAAYHMLLTGEIWNPADLAEVETPVEQRIKYVKNNLKSDIKQLLDIGLTVEELTLMIQQNANNIATQ

SEQ ID NO: 140297 - protein, 429 aa, unidentified
MNNSFSVAQLIVAWVGLDWADQKHDICLRASGSAEVERTVVEHQPEALHSWVADLRRRFPQGQVALALEQSRGSLFYPLMNYEFLVLYPLPPKALADYRKALYPSGSKDDPTDAQLLLEFLRQHPERFRPWVADDVQTRQIALRSEHRRPRVDDRTALTNRLTALLKGYFPEARGWAGDLAAPRAWDFLAQFPSLERAQRASRLEVLKLYRAHTRRTPEQLEELGEQIRTALPLTTDRAVIATSGLMVQTLVEQWRVVQAGVERLEHQLRDLFAAHPDHEIFPSFPGAGKARAPRLLAAWGSDRQRFAGADNRPCFAGPAPVTVRSGKSQWVHRRFAGPSFLCPTFHEFAAPSRLRSPWAKAYYQQMCERGADHHAAVRALAFKWIRIMFRCWQDRTPYDEARYQQALERRGSPLATTLRRLAASPARA

SEQ ID NO: 140298 - protein, 382 aa, unidentified
MPTLVIGLDPHKASNTIAVLDAEETLVARRRFENTADGLVAMLDAVSGWSERIWAVEGANGIGRSVAQRLVAAGEMVVDVPAKLATRVRVYSTGHGTKTDDTDAVAIARAALHSRRLRMVRPDDENVALKLLSDRRHELVGSRTQSVCRLHRLLRELVPGGMPRALTAERAEALVTGLEVSDPASLMRVELALDHIEDMKRFDRRIDDVTLKIHAAVKASGTTVTRIYGVVGAVSAGLILGEVGDISRFPTRNHFASDTGTAPVAVSSGDQNRHRLNRAGNRRLNHAIHIAAIAQIRYDNPGRAYFRRKLGEGKSRREALRCLKRRISDAVWRQLQLDRETDQHQDRSWPRWPSSRGDFPSYRSPDTPRQNGQPKKVKTMPA

SEQ ID NO: 140299 - protein, 334 aa, unidentified
MENIALIGIDLGKNSFHIHCQDRRGKAVYRKKFTRSKLIEFLATCPATTIAMEACGGSHFMARKLEELGHFPKLISPQFVRPFVKSNKNDFVDAEAICEAASRPSMRFVQPRTESQQAMRALHRVRESLVQDKVKTTNQMHAFLLEFGISVPRGSAVISRLSTILEDNNLPLYLSQLLLKLQQHYHYLVEQIKELESQLKRKLDEDEVGQRLLSIPCVGTLTASTISTEIGDGKQYASSRDFAAATGLVPRQYSTGGRTTLLGISKRGNKKIRTLLVQCARGFIQKLEHQSGRLADWVRELLCRKSNFVVTCALANKLARIAWALTTRQQTYEA

SEQ ID NO: 140300 - protein, 360 aa, unidentified
MSFNGTSVGLDVHALSVVAHAFDEETGRVERARLCPDHGEILDWLHQLRGPVRVVYEAGPTGFGLARALADAEIDCVVAAPSKLIRPSGDRVKTDARDAAHLARLLRLGEITAVTVPEADVEAVRDLIRAREDARADLMRVRHRLSKLLLRQGRVYSGGKAWTGVHEIWLRRQRFEDSHTKAAFDHHFDAVLTATAARDRLDEQIIDVAASPRWADLVDRLGCLRGISALSGLALTVEIGDWTRFTGSSIGAYVGLVPTEYSSGATRVQGSITKAGNAHVRRLLIESAWHHRAAYRNPGPTMRARWAKVDPALKARGHAGNRRLHQQWCRFNERKKPHVVANVAVARQLAGWCWSLATLT

SEQ ID NO: 140301 - protein, 438 aa, unidentified
MRRVGIDIALRAAHKAAVYEDGERLGRPFSVAQTKEGIDELVRRATDSTTEPVEFVMEPTGLAWLPLAAELSRRGHRVYLPKPQKTHALRKFLAQFAKTDAVDACTAALVRHVDQRTAELRVPSAAQTTLRLMVKQRSRLVVDAAKEKSRIFTWVLLANPHVGRSLGQDPTSKLANAFLRERLDPLDVLARGKSALRRFVEKHARGALKETQLEALWQACERACALFDALRISGKLPFDYAELQLLVDQALDHISFLETQIAQLDARIAATYRQLDPTRLLEREVPGFGPTIASAVEAFAGDVERFGSVKRYAAFFGLVPRTKQTGMAGEKPRQALTKGGQNLLKKYLFLAAETARRQDPELAATYERALARGKHHYSAVIIVAHKLVRRVYALLRARAAGVADVSYQMRRPDGTALPQEQARADLGLDLPPRGRRDA

SEQ ID NO: 140302 - protein, 348 aa, unidentified
MIAIGIDVHKRKCTIAEQGEGGELKMRPSIENTREEWLEFLQELPPDAEIALEVSTSGYFAMSVLEAAGWKDRAHWVHTAGIDTLRRQKTDRLDARRLARKLSVADREPLPEAWFPPPEIRELRLRARQRCWLAVMRAQVRNRTQSLLQQHGLRSGRNPFTPRGQAWLAKQQMPAATRESLEQLGRLNTFLQQEVETSEATLAESTKKISEIARLRSIPGLGRILAAVVWSEIGDLTRFASADALVNYTGLVPSLYQNGEISRPGPITHQGSVWLRWALLTGVNAALRGRSPFAERYRRLKQRKPANVAKTAVARSLARCVYGVLKYECNYQEERWGRKLGSFVEQQA

SEQ ID NO: 140303 - protein, 418 aa, unidentified
MNMNDSILVGLDWADQKHDICWRDIDTGETQIKVLKHTPELINEWVCDLISRYPGKRIAVCLEQTRGPVVYALMGYDAVDIYPVNPSTMSDYRKAFSPSGAKDDPGDAALMLELLELHPESLKLLKPDTEDTRLLRSFCEDRRKAVDMRTALCSSMRSRLKGYFPQALKLVSEQLFAELTCAFLMKWPSFESVAAARPSTIRRFYYAHQSRSEKCIKERLELVTSSRSLCSDTAVVNSSVIWIQMIVKQIRLLNREIQCYDRRIKELFSNHDDKFIFEKLPGAGQQLAPRLLVAFGTDRDRYEKSVEVSNYFGISPVIVRSGKQKWVHWRWHCPKFIRQSVVEFAGKSIVYSDWARIYYEEQIKRGKGHHAAVRALAYKWIRVIFYCWKQKVAYDEKTYTASLSRHGSWIADRLKKTA

SEQ ID NO: 140304 - protein, 359 aa, unidentified
MESTIATVSQSQVTIGVDTHKQFHVAHAVDALGRSLGAQRIPANTAGYRRFVSWARSLSELVMVGIEGPGHYGAGLARHLRAEGIAVTEVGRPKRQRRARYGKSDDADAAGAAAIVLAGEALGAPKTADGAAEMVRVLRVARTSVIRARAKAYTALQDLLVTAPAGLREQLAGQYKGHLLQACERLPEPEILATPTDAITIAIRSLAARCRELDAEADRLAHHLDTITTTAAPRLRAVHGVGPDTAATLLAAIGDNADRISSEAAFAKLCGVCPLEASSGKTIRHRLNRGGNRDANRALHVILVVRLRRHQPTRDYMARRLTEGKTKTEVMRCLKRYIAREIFHAVRPSSQATKIVART

SEQ ID NO: 140305 - protein, 404 aa, unidentified
MASEVAEETADQDVFGGVDSHADTVHVAVISDNGGHLADAEFTTTAAGYAAALAFLSAHGHVRAIGVEGTASYGAGFTRAARSHGHQVIEVNRPDRAQRRRIGQSDPIDAYAAARAALSGRAQAAPKDETVAGIRALHNAARSAVKARTAALNQITHTLITAPENIHTRYGQLKGTARTDALARLRPTGDAVHVAVLTALKSLARRVKELTAGHDALTRALDSEVTTHNPGLRAAHGVGPDTAAQLLVTAGGNPERMRTEASFAALCGAAPLPASSGRTNRHRLSRGGDRAANAALCRIALVRMSSDAHTRAYVARQTAAGRTKKEIIRLLKRAIAREMFRCLTTTVTTPGIADLRPLRQTKNITLTAVAQHFGVWPTTTSRVERGLTRDDDLAHAYRDWLQAA

SEQ ID NO: 140306 - protein, 352 aa, unidentified
MGIVVALDVHRNQITYKALDGDTGELRRGRIAPATRSELRAWLGRFAGDAVEFVLEGTTGWRFVVEEIERAGHRAHLADPAETAARRGRKRRAKTDNADCDLQLRLLLAGELPESWIPPVQILELRTLVRLRKTLIDQRSAWQQRIHAQLFHQGVPAGLRLRTEAGREALRRAELSPAGRELVALGLRMLEVFDLELAPLDQRLRAFARRQPACRALIERLYGVGPVSATAILAELGDCRRFSSSDDAVRHAGLDITVYQSDAKRAPGHLSHEGPELLRWALYEAAVSAARAGSPDHAYYLQVAQRLGHTRACLSVARKLCRRAHHLLRELGEQALAPIEQPADEETIAAAA

SEQ ID NO: 140307 - protein, 355 aa, unidentified
MTSVKYIGMDVHTESTSIAVRNSLGKIVMEGVIETKANTILQFLDGLRGDLRVVFEEGTWATWLYDLLKSHVTEVLVCNTRKNAVRKGSKSDRIDARKLAEQLYMNNVKSVYHGEHGLRMMKELARSYLTITKDLVRVMNRLKALYRSWGIPCAGTEVYAPRYRAEWLAKISEAGVRRRAEHYYQQLDALWPLRQEARRDLLVESRKHKIWKLLRRIPAIGPIRAAILIAVMQTPHRFRTKRHLWTYSGLGLETYDSAEYRTVRGQLERSRKQATVRGLNKDYNHDLKDIFKGAAMRASTAAGPLRDFYDNLLAKGRKPTMARLTLARKIAAITLIVWKKEVSFDANYLKPQQAA

SEQ ID NO: 140308 - protein, 408 aa, unidentified
MEVVYGICCGLDVHAKSVVAGLIRQGRRQIRTFGAMTGDLLELRDWLASEGCTHVAMEATGVYWKPVFNILEGAVDVTLVNARHVKAVKGRKTDVRDCEWLADLLRHGLLKASFIPPKEIRELRELTRHRAGLVCELTALSNRIQKVAESGNIKLGQVAARAMGVSGREMLTRLSQGVTDPQVLSDLARGRLREKKEDLQKALEGRLTQTQRWLLAELLRRFDEAEAALERVEGRIDQELKQAEEPSIREAIVLLDGIPGIGKTTAEAIISEIGVDMTRFPTAGHLASWAGMCPGNDESAGKRRNTRTNPANRYLKGAMVEAAWAASHTKDTFLSALFRRFVRRMGKKKALVAVAHRILVIVYHVLAKRLPYKEVPVNPVRNDSERQQRRLIKKLETFGLKVTVQKAA

SEQ ID NO: 140309 - protein, 310 aa, unidentified
MDATFVGIDVSKDRLDVHVRPSGEAFAVPRNGKGLSELVERLRSIAPALIAVEATGGFETIVAAAIAGAHLPLAVVNPAQVRYFAQAVGRRAKTDPIDAAVIAHFAEAVKPEPRELPDEAARLLAELVSRRAQLIEMVVAERQREKRASSVRVRKSLARHIAALEKELPVIDRDIDTMVRGSPLWREKEDLLVTFPGVGNTIARSVLADVPELGRLDRRKIASLIGVAPFTRRSGKWKGKSMIGGGRPAARSAIFLAALSAIRCNPVLRAFYQRLLAQGKPKMVALIAVARKIVTILNAMLRDKKQWQPA

SEQ ID NO: 140310 - protein, 351 aa, unidentified
MDYRVYCGVDFHARQQTISCLTTEDGVVSTHELKHQNKAALKAFYAQFRRPVLVALEASGYSPWFEQMLEELGHEVWLGDASEIRRRARRRQKNDRRDAELILDLLLHDEFPRIHRPSVKSREILRMLRYRHKLVQMRTIIKNSLQALSIQSGLSLRARLFTGAGLDQLRSLTMSPVMQYQRDQWLVALEALNQHIVAATNWLGEQAADDARVQRLRTHPGIGLLTGLALVHTLEPVIRFRNQRKVAAYVGFDPQERSSGEKKRYLGISKAGSRVLRYLLVEATHTAIKRDPDLKRFYLRLLHRHGKAKAKVAAARKLLIRSYILLRDHIDYAEFGRRAVAARLARLASKA

SEQ ID NO: 140311 - protein, 422 aa, unidentified
MARNRRKQSKIGFHEGLEQNREDAAGIDVGSEELWVDVGRKKDSEPVRRFETFTADLNAMADWLVAKGIKTVAMESTGVYWIPACQILEGRGIEVFLVNAAHAKNVSGRKTDMVDCQWLRTLHSYGLLPASFRPAAEIGVLRAYLRHRQMLIEYAAGHIQHMQKALAQMNLQLAHVVSDITGVTALRIIRAILNGERDREKLAELRDPRTQASPETIAKSLEGNYRVEHLFALRQSVGLLDYYQTQIQDCDREISAQLKTMESRVDPVEHPIKKARSRKKKTRNQPAYDCREQAYRISGVDLTQIDGISESAALTLIAEIGVDMSRWETEKHFASWLTLCPNNKVSGGKILQRSTRKSESRAKDTLRLCGQSLLGSSSALGAYCRRMCGRLGQPKGITAAAHKLALLVYRLLKFSYCHSHPS

SEQ ID NO: 140312 - protein, 315 aa, unidentified
MTQTNITTAGIDTSKLKLDIAIHGRTERWQVANALPGWRALAANLAKAGVTRIGIEATGGYERGVVEHLRAAGLTVLVLQPMQVKAFGRVHLRRAKNDTLDAVLIAACAATLDQPRIAPDPRLTELAGYLTFLEQAEEDIARFKTRLEHIDEPQLRRLVTSDIKRLKARKAAQLRDIAKRLRVHDDLARRLDLVLSIPGIGERTALALIIRMPELGRISREEAAALAGLAPFDDDSGKYKGQRHIAGGRGRLRRSLFAAALPAAFRWNKALIDLYARLIAKGKVHNAALIACARKLLIYANTVVQRGTPWNEKAG

SEQ ID NO: 140313 - protein, 331 aa, unidentified
MVETKRFVGIDVAKAQLDVAMGPNGESFSVANDETGISELLRRLEPADLVIIEATGGLEVPVASALATAGIAVAVVNPRQVRDFARATGRLAKTDRLDAQVLARFGEAVKPEVRPLKDEQAQALEALVNRRRQLVGMLTAEKNRRANSPKVIHQSIDEHIRWLEKRLSGLDDELAGLVHETPIWRERDELLRSVPGVGKVLSTTLLAHLPELGALNRKQIAALAGLAPFNRDSGSLRGSRCIWGGRAQVRRVLYMAVVAAVRSNPVIKNFYAQLRARGKYPKSALTACMRKLLVILNAMLRSKLSWQTPAPASSTATLSPLLGAVPQHGCC

SEQ ID NO: 140314 - protein, 429 aa, unidentified
MEEVTDEPLYRDRVCGIDIGKAEMYATVRVPSEANPARRASETRGFATTRRGVLALADWLRSWQVPCAVMEATGDYWKGPFYRLEAEGLECVLADARQVKNLPGRPKRDPSDSRWLATCFERGAVTSCFVAAPEFRIIREHTRYRRDLTAERTREKQRAEKLLESAAIKLSSVVSDLHGVTGRDIMDHLIAGERDPRALAQLARARARRKISELEAALEGAEFFTAELAALLARMLARIDRLNADIDEITTVVEALLGPYEEQLAQAESMPGWQRRSAQDAIAETGTDMSRFPTGGHLASWAGRTPLDNQSGSRKGKAKSKKGNRYLGAVTGETAVSAGRTQTREGARYRRLSRRRGKAKACVAVGHTQMKVYHKLLSNPGMRYQDLGPDYYDNRASTRRRIRALEKQASDLGYALVPDLTACPEVTEP

SEQ ID NO: 140315 - protein, 395 aa, unidentified
MFIVGIDIAKRSHEAIIIAEDGQVVHKAFSFRNNCTGYNLLLEQVRRLTLVKSQIVFAMESTAHYWLALYARLLKDGYAVMVLNPIQSHSLRELYIRKAKTDARDSLIIADLVRFGRCKASNVPQDKILALRELCRSRAYLVDMAADLKRKLIALLDRIFPEYESLFDSVFSKASIAVLSKYSTPQKVKNANLGKLTDLLMESSNGHFGEWKAHQLKEAACSSFGIDDSGGVYSTLLGIFLEQILSLTAQADSLEKQISVFFQEFNNPLTSIPGVGTVLAATILSEIGDITRFSSADKLLAYAGLDPSVKQSGEFKSNQNRMSKRGSPYLRRAIWLASTVAVHRDPMFQTYYEKKISEGLHYMNVIGHVSRKMTAVIFAVLRDGQPYQPILQSAG

SEQ ID NO: 140316 - protein, 467 aa, unidentified
MTLTLGIDIAVRAAHQATLSRDGKTVWRGRKFMTRPDELERVWADVGAEDPAELTVVLEPTRNAWIVIAEWFRRRGAKVVMVPTTQSADLRKYYSKHAKNDRIDSELLARLPLLHPDGLREYSGQGPADPLRRLVKQRSTMVKRRTAVYARLDALIELLGPAWYAVLGSNYGNAALQFLARYAHPHAVIRFGQARLARFLIARSGGNWRDEHAAGLIAAARETLALWNVKGADGMDFAELSADVAHEAEQALFLTRQIKEIDERIANLYADADPHGIVASAPRGGPHHQRVIAGRLGDPHRFTSLAAMRADTGLVPRVSQSGVVKTESSITKAGDPLLREMLYAAADQARKVDPQFAAKYHRLMAGDRHHDSAICHLATMLITRIAACMRNGTPYQLRDIDGTAITESEGRTIVKHRHQLDPRQRDHVRHKLMRERRKKAGQESQKSPSAPTSQPAKPKPTTSPQVA

SEQ ID NO: 140317 - protein, 343 aa, unidentified
MQEISTIGLDIAKSVFQVHGVDAASNVIVRRQLKRRYVLAFFQKLSPCLVGIEACASSHYWSRELQALGHVVRLMPPAYVKPYVKRQKNDAADAEAICEAVTRANMRFVATKTPEQQSCLMLHRTRHLFIRQQTAVINSIRAHLAEFGIVAPPGRRGVERLLEIAADANDSQVPEIARTCIAALGAQLRTLKAQILEFDRRITAWHRSNETSKRLDRIPGVGPALATALVATVADPKVFRSGRDFSAWIGLVPKQRSSGGKDKLGSISKRGDRYLRSLFTAGALAVIRYAKIHGAKHRPWLTSLLTRRPTKVAAIALANKLARMAWAMLAKGERYKEPIALAA

SEQ ID NO: 140318 - protein, 414 aa, unidentified
MAVPAERDPQNVRRLGTTTPDLEELAKWLKQCGVTDVAMEATGVYWIAVYQLLERRGFNVLLVNARQIKNVSGRKSDVLDCQWIQRLHTYGLLGGSFRPADAYCVVRSLVRYRDELIAGRTTQIQHMQKALLQMNIPLRAVLSDICGESGLAIIEAILQGERDPVKLAALAHRRVKSSREQIAKALVGDYRTEHLFVLKTARELYHTHQEKINQCDRELAAALEQLPERVNVQERPLAAKPKGKKIDSALRESLYRKLGVDLTAIESIGTTVALTVVTEVGPDLSAFGTEKHFCSWLGLSPDHRITGGKILSSHTRRVANRLSDALRLAATCLEHSATALGAFYRRMKRKLGAPQAITATAHKLARIIYRMLRYAAYAVPGIGGSMPGSGICRVERFAPDFTAFPTSSVRHSPA

SEQ ID NO: 140319 - protein, 312 aa, unidentified
MQDILEICCGLDVHKESVVACLLKGGTDVKPEATIRTFSTLIPGLVELKSWLENENCRHVAMESTGIYWQPVYNILEDAFDGTMVLIVANARHMKNVPGKKTDMKDAEWIASLLRAGLLRGSFIPSQAVRELRDLTRYRKSIGEEIVAQKNRIEKHLQSCGFKLSNFLSDIFGVSGRAIIDHLARYGNISAQEVESYVQKRAKAKLNEIKLSVNGRMNNHQMDFLKMLLKRLDESYEHLNSIVERINNEVQVFKEQVKQLDGIPGIDMIAAASIIAEIGVDMSAFKTSQHICSWAGLSPGNNESAGKKSLHA

SEQ ID NO: 140320 - protein, 399 aa, unidentified
MEVIYPRCCGLDVHKQTVVACLVTPGPNGIPCKEVRTFSTMAEDLAALAAWLGEAGCTHAALERTGVYWHPVWDALEERIALLLVNAKHVKAVPGRKTDVRDCEWLADLLRHGLLRGSAVPDRPRRELREVTRYRSALVQERAAAVNRLQKTLEGAGIEPAAVATDLTGVSARAMLAALAELARGRLRAELPELRRALDGHFGAHHRFPVAEIPGHLDEPDERIERLDAEIQERQRPLAATVARLDAIPGIGRRAAELIPAELGSELSHFPSARHCAAWAGLCPGNHESAGQRRSGRTRKGNSYLRAILVECALAAGRARTSYPAAQYRRLVRRLGEEKAAVAVAHTLLVIISHLLTTGAEYHDLGYDYFDRLDRDALERRHVRGLERLGYRVALEKIA

SEQ ID NO: 140321 - protein, 344 aa, unidentified
MARSFAHYRLFVGIDIAARTCAVSWMRPSAQPTRAITIKQTPAGFADLQRQLLAVEPDPHAILIVMEATGTYWMRLASSLVAASFAVSVINPAQAHHFANALLKRSKTDATPAQTLTELGARLQPERWTPPPQVHTELQQRLVHRDGLVAARTQFRNQLHALVQQPVVIASVRTRLETLIASLTAEIATVEQEIAAALQQDEAWAAAAARLATISGFGTLTVAWILTTTINFTLTATPEAAANYAGLAPQLRQSGSSVRGRPRVGQGGNAHLRRALYMATLSAVQHNPVIAAFYQRLCAAGKPRKVALCAAAHKLLRIAWAVVNTNQNFDRAYATRRCAEQAPG

SEQ ID NO: 140322 - protein, 475 aa, unidentified
MNIKGTKKKNQVVTANIFEQQELLKKAEVIKENLTASTWRELETNGKFDKNKKLSFISDDMLILGCDVGSETHYVRAIDTRGRELSKSAYSFNNDYEGFQSAKEWAVKIAAEHDKSQIVLGLEPTGHYWFCLATWMIANGISVVQVNPYAVKQTKEVEDNSQLKDDRKDPKLIANLVKDGNFGMPYLPEKIYAELRRLSMFRDQLNEDRIRTINRMHREMKIYFPEYKEALGKVDGAFSLELLKEAPFPDELTALGEEGIRQIWHAAKLRGRGYSRAREILQYAKASVGIKDGSIASKAAVKWFVQKIMELDVELAVIENQINQKCQEIPHTGNVLEISGIGENTLSDILAEMGDISRFDDVKEIQKLSGLGLVACSSGKHKGETKISHRGRKRLRYWLFQAAKSAVAHAEEFKELHMYYTTRADNPLKKMQSLIVIACKLLRIIYTILNTGTKYAPKKMLMDIRRPENKEAIVA

SEQ ID NO: 140323 - protein, 318 aa, unidentified
MTVPACFVGIDVAKATLDVAVRPSGEHWSAPNDDAGIRTLVERLRPLAPALLVREATGGFESATVAALAAAGLTIVVANPRQVRDFARATGQLAKTDVLDAHVLALFAERVRPEPHPLPDAAAQALDALLTRRRQLLEMLTAEKNRLGFAAGPIRRGITQHITWLKRRLVDVDHDLEQTIQASPLWRAKDDLLRTVPGVGRVTSRTLVGELPELGRLTHKQVAALVGVAPRARDSGTLRGKRMVWGGRAPVRAVLYMSALVATRYNPVIRAFYQRLRAAGKPAKVALVACMRKLLTILNAMVRTNTIWRAPLGVGATS

SEQ ID NO: 140324 - protein, 380 aa, unidentified
MDTASFRDDGPGTKGPSGPNGIDVPKWSFDTHHLRNGGSEMNATTYGLDVAKHVFQMYWVEAETGEIVNRRFGRDELIRFLAQRPAGRVALEACGSAHWWARKIKALGHEVVLLHAKFIRPFVQTNKTDASDARAIWTAVQQPGMRTVAAKTEDQQAMLSLHRMRALLVKFRTMQVNQLRGLLYEFGATFRAGRAAGLAEIRARTAELEDALPGTMMCCLQDQLRRIEELQRDIDLLEKRIGVWQKQDAACHAITAVPGIGRLTATALVATMGDAKSFRSGREFAAFLGLVPRQSGTGGKVRLGPMSKRGDPYLRTLLIHGARSVMYNAKAPTPWQRDIQARRPANVAAVALASKIARTAWAILARGQEYQRDYVSVRPA

SEQ ID NO: 140325 - protein, 411 aa, unidentified
MQYFIRKEGMPMLSIGIDVSKGKSTVCGMKPGGEIVYTPFEVQHTREGMSELVSLLRGSGEEVRAVLESTGSYHCPVVAALLENGIFVSVVNSLRMKRFCSQSIRKVKTDRIDAMQIALYGLAYWQELQPARLPEDTYRELQLLARQYYQMTSILIKAKVDFNAICDQVLPGMQELMNDHAGRHKLSDFVLQYCHTTHILEMGETRFRKDYCKWAEKKGYRNCERMAAHIFATAQNGIPVLPNAPSTQIVITEAIRVLHTVEASRDAILTQMQALAKTLPEYSLVREMPCIGDTLAPRLIAEIGDVRRFHSKRALIAYAGIDAPPYQSGKFCANNRHISKRGNRYLRKTGYEVMQSYAMHKPANDPIFTFIEKKRSEGKCGKLAMVAGLNKFLRVYYGKVTELYRSLPAIE

SEQ ID NO: 140326 - protein, 411 aa, unidentified
MQVVYSRCAGLDVHKKSVVACVITPNDSRGWHKEIRTFSTMTKDLLNLCDWLTSHDCTHVAMESTGEYWRPVFNILEGNFEVILVNARHMKAVPGRKTDIKDAQWIAELLQHGLLRPSLIPPIEHRDLRDLTRHRSNFIRERVNLVNRVQKVLEAANIKLASVASDVMGVSGRAMLAAIVEGNSTPELMAGLAKGTMTKKHDLLVSALEGRVRPHQKFILAQLLAQIDSIDSSIELFDQQIEEYCHPFEAAVELVDTIPGIARRTAEIIVSEIGTDMSRFPSAEHLAAWAGVAPGNYESGGKKLSDSTRKGNRVLRTILVQAAHALARTKTYLAAQFRRLAARRGKKRAAVAVAHSILVIAYHLISRQEPYKDLGADYFDKQRPESVKKRLIKRLEKLGYQVNLEPVPVAS

SEQ ID NO: 140327 - protein, 367 aa, unidentified
MMGWMAPLRHLGAKLLACRISSEWEPSMGEITTIGLDLAKHVFQVHGVDADGTTVLRKQLRRSQVLAFFSRLPSCLVGLEACATAHYWGRELAALGHEVRLMPAQYVKAYVKRNKNDAADAAAICEAVRRPTMRFVPAKTADQQAAVLLHRGRERLVRQRTALVNALRAHLAEFGVIAPQGLRNVGKLIAIVRDEDDARLPDMARQVLQVLAAQVEQLEMAVAAIEKQLMAWHKSNPVSQRLATIPGIGPIIATAIAATVVEPTAFRSGREFAAWLGLVPRQNSTGGKTRLGRISKRGNQYLRRLMINGASANLLRSKATKADPWVIGLRRRRPSLVVAVALANKTARMAWAVMQRKENYQRMAAAA

SEQ ID NO: 140328 - protein, 353 aa, unidentified
MHATTVGVDLAKNRFELAIRVGDDQPLRRERLSRQRFARFFGNFPPSLIVMEACGSAHFWARTLQAQGHEVRLLPAQYVRAYVRRNKTDAADAAALLEASRSPDLRPVPVKSVEQQQLQQLHRVREQLKSTRTGRINLLRGILREFGIAVPVGLARGRTAVREALEIADNGLPDLLRPMIAESLQEITALTERIARIEATLTALTRTDPVVQRLLELPGVGLLGASALRAAVGDIQRFPTGRHFASWLGLTAREHSSAETRRLGRISKQGDIYLRTLLVHGARSALCTAARAHSQGRPLDRLRLWALATEQRRGRNKATVALANKLARIIWATWRYQRPFAGDWPTRLEATPG

SEQ ID NO: 140329 - protein, 427 aa, unidentified
MAKVEHTSDARVLVGIDISKHRHEVLIAAPGKTRRRRLTITNSTDDFMRLIAILREYGLPVRIGFEATGNYHRVLMYHLGIAGFDLKLVSSVALARTREALHNSWDKNDPKDAQVILHMLQIGAVQIFQDPMMAGTNDIQELSKTHDAVSRTKTELWHRILTHYLPLYFPEADRFHRSSRTDWFLAFLEMFPSPHMISALTKEEFTKAAWVVVGRKVEKTLMLSDIYETAKASAGLPVSPGSDAIRMFRMMLAEGRSLIRQRNAIEDRAVELLGDRPDYQLLRTIPGIGPINALTILAETGDLRRFHHHRQFLKFCGMDLATVQSGMFRGRSKISKYGNARLRRTLWLAGQTAVMKKANSFRDKFERYIAKDRHNPDLRRKAYTAIAAKMARTIHAVIKSGEPYRPFFEGTSPGGRTPLCRAVEAAS

SEQ ID NO: 140330 - protein, 402 aa, unidentified
MYTVGIDISKGKSMIAVMRPGGEVVLRPCEVHHTGHDLTLLCDKLKSLGGETRVVMEATGSYHLPIAWLLDHEGFYVSVVNPVLIHGYGNNSIRRGKTDRKDALKIAGYGLQYWNELPRYMPQDPARQLLKTCYRQYQEYSKISSVFKNSLISLMDLYFPGVNDLFTSPVRPDGSQKWIDFVAAFRHCDCVRGLSERAFITRYQRWCAKHGYQFSPDKAKKIHAFASNCVAVSPNSESVRVLVDTAVSQLRTNLISLAVVRARMQALASSLPEYPVVMSMFGAGPSLGPQLMAEIGDVRRFHSKKALVAFAGIDAPPCQSGQVNFLSRSIFKRGSPALRRTLFLVMNVINMCSPAEDPVYQYMAKKRSEGKKYQVYMMASANKFLRRYFASVNAYLDTLGST

SEQ ID NO: 140331 - protein, 345 aa, unidentified
MLYIGLDVHSKWMTVAGLDPATGECFRWDRVSNDQASVAELFGNLNGPLSGVMESGTNSWAMYRELLPFFGWLVVADPASLWDRRRDRKAKTDHLDAMRLAQMLYRGEVKPLYIPDERTQDVRILVRGKVRISRWVTRLTNEIGSMLRSWGYVGSRSLLTKSGKRDLDRAELPKHSARVLELWRELLETAQKIEDELQVAIEEEAVGDKDCGLLQTIPGVGAFTALLIKAEIGDVRRFERSSQLISYVGLSPRTYQSGDSCRYGRLGNWGNRWLRYAIGLLAQRVAHSRKNGALKTTYWRVQFRNHRNAAKMAVARKFTRAVHQMLTRGEAWNESKARSREVLAA

SEQ ID NO: 140332 - protein, 343 aa, unidentified
MQSISTIGLDIAKSVFQVHGVDAAGQAVLRRQLRRRHVLAFFQKLSPCLVGIEACASSHHWSRELQALGHTVRLMPPAYVKPYVKRQKNDTTDAEAICEAVARPNMRFVPTKTVEQQSCLMLHRARHLFIRQQTAVINSIRAYLAEFGIVAPVGRRGVEQLLEVVADTADRRLPEVARACLAALGSQLRALKAQILEFDRRIMVWHRSNATSKRLDAIPGVGPALATALVASIADPRAFRSGRDFSAWVGLVPKQNSSGGKDKLGNISKQGDRYLRSLFTAGALAVIRYAKIHGTRHRPWLTGLLARRPTKVAAIALANKLARMAWAMMARNESYKDPAALTA

SEQ ID NO: 140333 - protein, 451 aa, unidentified
MSKRKQVEGLAIVNPNAAGLDIGSAEIWASVPADREGETVRCFGTYTTDLLDLATWLETMEIQTVAMESTGVYWIPVFEVLEERGLQVLVVNARHIKNVPGRKSDIKDCQWIQRLHSYGLLSGSFRPQAEIASLRAYLRHRDGLIEHRAAHIQHMQKALLQMNLQLTQVLSDITGETGLAILRAIVAGERNPYTLAKMRHGNCAHSIADLVKALTGHYRPEHIFALKQALALFDAYTEQLRECDEEIERQFENYKPDLPNDLPPLPPNPKPGSHSKNGPDYDARALIYRKVGVDLFAIPGMNAVLVQTILSEVGMDMSRWPTAKQFCSWLGLAPHNGISGGKVLYSHVPKTHNRAGQAFRLAAQAVSRGKSVYSEFYRRVRARSGPAQAIVATAHKIARIFYYMLLRRQPFQSMDIQEYYRRQREKDIQRLSRNAARLGFQIQPVTAGNML

SEQ ID NO: 140334 - protein, 363 aa, unidentified
MHSITNTELSSHEGTRCQFNGSKADIKLGIDVHQDFYVVVEQVGGTNPKPPQRFAKQAFLHWAAKLKQSGVEVHAVYEACGFGFSLQRQLSALGINCYVVCPQKLDERNKRVKTDGLDAKALCLKLDRFVQGNRDALAMVRVPTEEEERSRAIHRQREQLVGARKRLEAQGRSLMVNHGLEPVQNWWKPRTFASLPVPQWMSELLLNSQPILLALQEKIGALTLQLQSAAAPNQPRGLGKMTSVVIDREIGDWHRFNNRRQIASYTGLCPGEYSSGNTRLQSCVTKHGNPRLRAALVELAWRLVRFQPNYKPIVKWRQILAKGALATGAARTKAIVAVARQLAVDLWRVRTGRCKPEVLGLVS

SEQ ID NO: 140335 - protein, 409 aa, unidentified
MVGIDVSKGRIDWRACSLGLWGSPHRVAQGEPGFLRLEQHLLTAAEAGQEVWVALEPTGPYGLCLQQWLLERGWMVVLVNPFHVKRTREVHDHHPGKDDCKDPGVIADLVWQGSSRRVRRIGGPYAELRVGFGEWCSLAKRRTALRNEAQALLEVWFPELGRLFADPLSKSVQALIGRYDSPAALLQAGQRSLHATLTAGTHGQGGRYAEAIWRGAQASVAVRDGQESRVRALRDLLEQLACVERQQECLRGDLARWLEQTEEGALLRRVPGVGLLTASGLLGECGPLAEFHSGRALEKFVGLNLYRISSGKRHGQVHLAKRGRAAVRALLLQLAVAQTRTGRLGHAWAQQRKAQGHSSRQTQVALARKMLALLYALARDRACFDVSRWSAEAKTADGEPTLQGAPPEA

SEQ ID NO: 140336 - protein, 351 aa, unidentified
MDKIYIGVDFHARQQTICYLKTETGELVIVELKHEDKEQVRAFYRQFQEPIAVGLEASGYSPWFETMLEQLGGEVWLGHATEIRRRARWRQKNDRRDAELIWDLMVHHEFPRLHRPAVQSREILRMLRYRQKLIKLRTMTKNSLQAIALQAGLAKGRQLFSAAGQEQLQAAVMSPVLHWQREHWLALLKPFNQQLLETMVWFKEQSKDDLSVRRLRTHPGIGLLTALCLLHTLQPVSRFRNARKVAAYAGLEPVERSSAERQHFLGISKAGSRMLRYLLVEAGQTAVRYDEDLKRFYQRLAERRGRPKAKVAAARKLLIRAYIMLRDEIDYAEFRRRAVAARLARRGQRPT

SEQ ID NO: 140337 - protein, 338 aa, unidentified
MTIVMGLDQHRGQITSEWIDTETGEVQRSRVAPADRAAVRKFLQRFRGGELEVALEATTGWRFVVEELRRVGAVVHLTEPAETAARRGNKKRPKNDRADARHLRELLMIKRLPESWIPPDHILDLRARVRLRHELSEQRGEWQQRIQAVLYHHGCPQRRSLMVGDGRDWLAAQPLPATAREQVMVALAMIDALERQRAPIDKELRAYARRQAGCKALMGHYGIGPLVAVTILAELGDCTRFSSSRHAVRYAGMDITVYQSDQHRAPGHLRRQGPPALRWAMFEAAQSASRRGSPDLDYYGQAAERLGHNRACLSVARKLLKRSYHTLRELGEEALQPA

SEQ ID NO: 140338 - protein, 354 aa, unidentified
MSSTKYIGMDVHTESISIAVRNSLGKLVMECVIETKASTIVQFIDGLRGDLRVTFEEGTWAAWLYDLLKPHVTEVLVCNTRKNASRDSSKSDRIDARKLSEQLYMNNIKSVYHGEHGLRTLKELARSYLTISKDLTRVMNRLKALYRSWGIPCAGKEVYAPRHRAEWLGKISEAGVRRRAQHYYQQLDVLRPLRQEVRRDLLLEAKKHKAWKLLRQIPGIGPIRAAIVIAVMQTPHRFRTKRHLWTYSGLALETHDSAQYRVAEGHLQRSKKPATIRGLNKDHNHDLKDIFKGAATRVSSSRGPLRDFYENLLAKGRKPTMARLTLARKIAAITLIVWKKEVRFDANYLKPQAT

SEQ ID NO: 140339 - protein, 346 aa, unidentified
MQHTTIAVDLAKSVFEIAVSHRPGAVAERKRLSRTQFARLLSQRAPSTVVMEACGTAHFWGREAEARGHRVVLLPPHAVRPYVLRNKTDGADAKALLEAVRNEAIRSVPIKSVDQHVLGALHRLRSAWLATRTARLNTLRGLLRELGFAIPVGAREVVPFVYALVSEADAKLPEALRAVMTEAAREIAELETRIQAVEHQLQALARESALVFRLRTIPGVGLLTATALVAFVGDVHRFPSGRHFASYLGLTPRESSSGLQRHLGRITKRGDPYLRMLLIHGARSVLLHAKKAKQCDRLRRWALQREQARGHNKAAVALANKLARIAWAVWRRERAYGSPIEGTPTA

SEQ ID NO: 140340 - protein, 455 aa, unidentified
MPKRTTGDQPEFRAVNISAAAIDIGSKMHMAAVNPDCADMPVRAFGTFTKDLHDLADWFKACGVTSVAMESTGVYWIPAYEILEQRGFEVFLVNARYAKNVPGRKTDVSDAAWLRQLHSYGLLRGSFRPDAEIATLRAYLRHRERLVEYAAAHIQHMQKALMEMNLQLHHVVSDITGATGMRIIRAIVAGERNPDNLATYRDVRCHSSLETIRAALVGNDRQEHVFALSQSLELYDVYQEKMLDCDRKLEALIAALGNKGAKPVGKLSKPRIKTKQVNTPAFDVRTALYGVLGVDLTEIHGLGPSLALKLIGECGTDLRAWPSAKHFTSWLCLAPGNKISGGKVLSSRTRRSSSRVAALLRLAATTVGRSETALGAFYRRLSLRAGKSKAVTATARKIAVLFYNTLRHGMSYRDPGADQYEQQYRIRVLANLQRRAKSLGFVLQAIPGDPNPAVS

SEQ ID NO: 140341 - protein, 387 aa, unidentified
MYFIGIDISKFKHDCAIIDEAGDTVTASWSFANNCEGFSLLKQLLDALDGQKKIGFESTGHYGHNLKLFLETNNFSFMEFNPLLVSKFVRSKSLRNTKTDSLDAVSIAQYLMTVEYKPYPPSFYHMDQLKSLTRFRDSLVRQHSRQLVELTNILDKVFPEFKPFFDGRFSATALYILTHYQSPEKIANMNAKSYEALRKKSRGKFSMVKFAQLKTLAKNTVGRSDAFLLKQMEITIYIENQLDAKIDEIESQILECIRALNPPILTIPGIGELTAAIILSEYGNINKFENPAQLLSFAGLEPGYYQSGLAEHQGHMVKHGSSHLRYALMNACLPLITYEPVFAEYYAKKRAEGKPHRVALTHVAKKLLRVIFTLQTKNISYDPTLIR

SEQ ID NO: 140342 - protein, 338 aa, unidentified
MSIVMGLDQHRGQITAEWIDTETGEVQRTRVAPADRAHVRKWLERFRGQELEVALEGTTGWRFVVEELRRVGAVVHLAEPAETAGLRGPKKRAKGDRADARHLRELLMVKRLPESWIPPAHILDLRARVRLRHTLSEQRGEWQQRIQATLYHHGCPQRRSLMTGDGREWLAAQPLPATAREQVTVALAMIDGIETQIAPIDKELRAYAHRQAGCQALMAHYGIGPLVAVTILAELGDCTRFSSSRLAVRYAGMDITVYQSDQRRAPGHLSRQGPPALRWALFEAAQNACRQGSPDREYYREAAERLGHNRACLSVARKLLKRSYHTLRELGEEALAPA

SEQ ID NO: 140343 - protein, 409 aa, unidentified
MELMYPRCAGLDVHKDTVVACVRIAESGRAQARVEKRTFGTTTKALMDLATWLEDEGVTHALLESTGVYWKPVWHVLSSSVELVLGNAKYLRNVPGRKSDVADAAWLADLLAHGLVRGSFVPPEPIAELRELTRTRKQLVREQARHVQRIQKVLEDANIKLSSAVTDVMGKSGRAMLDAIVAGQTDPQALADLGDRRLKASRTDLVEALRGRVTAHHVVLLKLHLDQYDALDRAIVELDGHIEQDLRPFRDAADRLAEIPGISEVSAAVIVSEIGVDMKRFPRAGHLVSWAGLCPQMDESAGKRRSTRIRKGAPWLKTLLVQCAWAATRKKDSYYRAQYYRIRARRGPKKAIVAVAASMLTAIYHVLGGSTFTDLGADYFDTRNEGATVRRLQRRIKDLGYDVEVRKAA

SEQ ID NO: 140344 - protein, 409 aa, unidentified
MLFVGDDWAEDHHDVELVDEAGTILARRRLPEGQVGVMRLHALIAEFLPDPRDDLNPAPQAVIGIETERGAWVAALVAAGYTVYAINPLSVARYRERHSTSGAKSDAADAHLLAEIVRVDRAHHRAVAGDSALAEGIKLAARTHQNLVWERTRHVLRLRSTLRDFFPAALQAFSELDAADTLEILAAAPDPDTAARLPRRKILTALTRAHRRSPEARADQIVAAFRAAELRQPPPLQAAYAATVSAQVALITTLNTQADALEQVVAEHFGQHPAAEILTSLPGVGVTLGARLLGEFGDDPDRYVDAKARKAYAGTAPLTKASGTKKIVMARYARNKRLGDAAQQWAFSSMRGSAGAKTYYQQLRARGTGHQAALRQLANRWIGILHGCLKHGTTYDEQTAWRHILNTAA

SEQ ID NO: 140345 - protein, 413 aa, unidentified
MDVVHPRCAGIDISKRDAKVCVRIQGHDNRRTTSTVTTWGAMTNQILALREHLVEQKVTCVVTEATGAYWKPFFYLLEDAVPVMLVNARDARNMPGRKTDVSDSAWLADLGAHGLLRGSLVPPEPIRQLRDLTRARTAITRDRARQVQRIEKILEDAGIKLSSVATDIMGVSGRAMLQALIDGRDDPAVMADLAKRRMRSKIPALTEALTGRFTPHHGFLIGMHLNLIDEYANSLAELDARIEETMKPFRAARELLVSIPGISTTVAEVFIAETGADMSVFPTAGHLASWAGTAPGSNESAGRVKSTKTRPGNRYLKNALGIAALAASRSENTYFSAKYKRIATRRGPMKALVAVEHAMLVAAWNMLTNGDFYRDPGADYFTRRIPAKTKARAIGQLESLGYRVTLEPLADTA

SEQ ID NO: 140346 - protein, 393 aa, unidentified
MYIVGVDVAKRSHEATVIDANGNTIKKAFNFRNDADGFQKLMSALEAVSTNPSDFIVGMESTSHYWLALYSNLQRRGYTVHVFNPIQSSALRDMFIRQVKNDARDCFVIAEVIRFGRYTEGGMPPSDIYELREMCRARFYIVDMVSDLKRKVIALLDQVFPEYETLFTDVFGQTSSELLRNCATPEEILAIDTEKLTELIAIPSRKRFGRQKAEQIQTLAENSFGILLNYDTMGILIKQHMEHIRFSEQQVADLDARIAALFAQFDTPITSIPGIGPVLGATIISEIGDISRFSSAAKLAAFAGIDPTVKQSGEFVGSRNHMSKRGSPYLRRALWQAASVAVHCDPAIKEFFAKKRAEGKPYMNAIGHVTRKMTSIIFAVLRDNKPYYIAPFE

SEQ ID NO: 140347 - protein, 350 aa, unidentified
MVVVGADVHKRTHTLVAVDEVGRKLGEKVVKATTDGHLQAVRWARTQFGIELVWAIEDCRHLSARLERDLLTAGQRVVRVPPKLMAQTRASARTRGKSDPIDALAVARAFLREPDLPVASHEEVSRELKLLVDRREDLVGQRTSTINRLLWRVHELDPDRAPKPRSLDLAKHRRLLGDWLQTQPGLVAELARDELADITRLSEQINALTKRIGERVRAIAPALLSLPGCAELTAAKIIGETAGVARFKSEAAFARHSGVAPVPVWSGNTAGRVRMTRSGNRQLNAALHRIAVTQIRLEGPGQTYYRHRLTEGDCSSEALRCLKRRLARIVFNHLRTDQTNRQKPCQPAAA

SEQ ID NO: 140348 - protein, 343 aa, unidentified
MTFYVALDVGLRMVSLCIVDEAGEVKLEKSLPSEIEDIVACLRDFGEEIACVGLEAGTLTQWLTYGLRAAGFKPVVLEARHVQAALAAMRNKTDRNDARGIAQILRTGWYRPVHVKSIESHYTRTLLAARKALLRKCIDLENEVRGLLKVFGIKLMPGLRHGAFDRAVREPIEANGALRHALVPLLDVRLEIYKAFLEMDRRVKALAQADQICRLFMTAPGVGYIAALTFKSAVDDPSRFKRSKTVAAHFGLTPRRYQSGERDNPGHISKAGDTEVRSALYAAANIIMTRSTKPSTLKAWGSRLARSKGRKRALVAVARKLAVILHTMWIDGTEFCMQAQEAA

SEQ ID NO: 140349 - protein, 387 aa, unidentified
MSEIFNPHAPATAYDHNTTIVAVLELSGKNWLFGAVAPGLSRRTRRSLEARNVEAVVRALEQAKGESAKARFEVARIVVGFESGRDGFWIARALQQRGIEVYVMHAASIAVERRGKRAKTDRLDVDLLLTTLIGWLRGEPGRCTMAPIPSEEEEDLREAGRRRETLVHARLKVENQIASLLIRHGIEGFKPRLKNAETRLCELRTFDGRSLPANTMNSLRLLLAQHRLLSAQLKEIEEARQRVVNVAKPDRLQRMIQALAHVVGVGVETATVLVHEVFSRSFKDRRALGAFVGLTGTPYNSGSSKTEQGISKNGNARVRRMLSQLAWRWLGHQPESALAQWFNARLGGAKGRMKKVLIVALMRKLVIALWRLAETGEVPIGARLAAR

SEQ ID NO: 140350 - protein, 377 aa, unidentified
MTKVCFVGLDVHAETIAVAVAEPDGEVRSLGVIPNRAESLRKLVRKLGPPTGLRACYEAGPTGYVTYWQLAELGVKCEVVAPTLVPKKAGDRVKTDRRDALKLARCYRAGDLTAVWVPDAAHEALRDLVRARGASKKDQLRARHRLSKFLLRQGRRPPEGVKAWTQKYMTWVKSDVHFEQPAQEATLLDYLGEVEHAAARVERLDQAIDKVVAFVPCAMKAVIEALQALRGIARVSAVTIACEVGDFSRFEKATELMAYAGVVAREHSSGERTWRGGITKTGNAHLRHVVVEAGWAYQHRPAVGGALKKRQAELPQDVKEIAWKAQHRLHGRYHALIGRGKSKAQAVTAMGRELIGFIWAIGTKAEKQAREQGRLAA

SEQ ID NO: 140351 - protein, 343 aa, unidentified
MQTITTIGLDIAKTVFQVHGVDAGGQVIVRRQLKRRYVVPFFQKLSPCLVGIEACASAHHWSRELQALGHTVRLMPPAYVKPYVKRQKNDATDAEAICEAVTRASMRFVPTKTPEQQSGLVLHRTRHLFIRQRTSVINAIRAHLAEFGIVAPVGRHGVEELLTVVADPSDKRVPDIARACLLALGDQLQSIKKQILEFDRLIRAWHRSNEMSMRLEAAPGVGPVLATALVAAVADPKSFRSGRNFSAWIGMVPKQHSSGGKNRLGNISKQGDRYLRGLFVAGALSVIRYAKVHGTKHRPWLTALLTRRPTKVAAIALANKIARMVWAMMATGERYKEPVALAR

SEQ ID NO: 140352 - protein, 336 aa, unidentified
MPLYCGIDLHSNNHVLCVIDDKDRRLLETKLDNDVLRTIEALSPYQKRLKAVAIESTFNWYWLADGLMEAGFQVELVNTAKVVQYSGLKHTNDRYDAFHLAHLMRLDILPTGYIYPKAERGLRDLLRKRIQLVQDRTRHLLRFQSQVQMHTGESVPANRIKTQKYRLPVIGDSNVQLALHSQLVLIRALSAQIKQLEQSILSQVEPVASFKWLKTVPGIGDILAEAILLETGDITRFKGPGNFASYCRCVDSRRESNGKKKGENNRKNGNRYLAWAFIEAANFAVRYSDPAKRFYLKKEKATNAIIARKALAHKLARSCYWVMRNQEAFNQDRIFH

SEQ ID NO: 140353 - protein, 381 aa, unidentified
MRTVCGLDIHKDSIFMCILDEQGKKSERKFGVSTREIKGLCNTLKSHYVSEVCMESTGIYWKPVWHLLEKDFRMYLVNPQFLKQLPGRKSDVKDAQWIATALLKGLVRNSFVPDSMIQQLRLYGRRINELNKDIIRCEQRVDMILQSCNIRISNYVSNIDGKSYQKVVGALLEGERSADKLVKLIHGRTLNKHGRDTVRDSLEGYVQQADIDLLKQYMEALKMHQAQKQTCLIEMVKLCKKHYDRAFTLLQSIPAIKEQSAAIIISEIGTDMTLFATAAALVSWAGLRPRNDESAGKIKSRKITHGNKYLRKALMEAAWGASRTRGSIFYNKFWRLRQRGKKQQKCTVAIARHLLVIIWSLLSRDEYFDKEYMQKLSTGVA

SEQ ID NO: 140354 - protein, 437 aa, unidentified
MFHPSDDYYQVLMEEQVMEQATPFAALIGIDWSDAKHDICLVETATGTQELSVVKHTPECLNEWARALRARFGGAKVAICLEQSRGSLIYALLKYDFLVLYPINPQTLSRFREAFTPSRAKDDPTDAGYLVELLIYHRERLKAWTPDSEKTRTLQLLVEHRRRLVGDQTRLSNRLTALLKGYFPQVLEWFPDIRTEMVCDFLLRWSSLDALRGVRRQALLKFMQEHNSRRTETTERRLDAIKAAVPLTTDKAVINSSVMMVKALASQMKTTLSAVKEFDREIEALCCAHEDFELFACLPGAGKVYASRLLTAMGSNRERWATAAELLCFSGVAPVIERSGKSSWTRWRYFCPKFTRQAFVEYAGESIRHSAWAQAFYVAQKEKGKSHQAAVRALAYKWIRIIWKCWQTREKYDEARYVECLRKKGSKLVADMASAEA

SEQ ID NO: 140355 - protein, 408 aa, unidentified
MNAAGIDVSSRKSTLAVLRPFDEVVRLPFDVAHNTEGLASLAEQLKALDGETHVVLERTGRYYEPVAKALHEAGLYVSAVNPLLIKEYGANSLRRVKTDKADAMKIAKYGLDNWVELREYIPMDMIRQQLKLCSRQYNLYMKTVVSLQNNLISLTDKTFHGVNELFSSPERADGHQKWVDFVMTFWHCDCICRVSEKAFTERYQKWCKRKGYHYSEEKALDIYAGSCGHFTTLPKNDNTKLLITTAAQQLLAGKMTLAALRAEMTRLAKHLPEYDTVRAMYGVGETTAVQLMAEIGDVRRFPRRSSIVGFAGVDPAVDQSGKHEAKSTPTTKRGSPHSRKTLYQIICTYLRKAPADESVYQFLDKKRAEGKPYFVYMTATQNKFLRIYYARVKACLEAFDAQQNSAQS

SEQ ID NO: 140356 - protein, 341 aa, unidentified
MKSQVAGLDLHKSQSYITVMDGNGQILGEESLESSAESILNYLGRFGKPEVVFEATRNWYWLYEALQRKGYKVTMAHPKKTKAIGEAKIKTDKIDSHTLAHLKRADLIPESYLAPLETRERRELLRHRVFLVRERAKVKSKVRTLLSKLNLNCPYSDVLGKEAIGWLKERREEMPQVFTGKLDDLLQLGGNLSTIIQVVEKKVGNQAADDRIVKLLVTIPGIGEFSAMVIKAEIGTIYRFPDADHLASYCGLVPSVSSSGNYTHRGSITKEGNRWLRWILVEAAGKLKKKSPHFKDFYYRILSKKTKQVARVATARKLAVAIYYMWKREEPFKEPEPRSTG

SEQ ID NO: 140357 - protein, 400 aa, unidentified
MNAVGIDVSKGKSTVAVLRPFGEVVASPFDVIHNDNDLKRLVKLIRSLPGESKVVMEYTGTYFEPIAQFLHNNGIFVSVVNALLVHDYGGNSLRKVKTDKKDALKLASYALDRWTELDEYVPADEQRKILKLLNRQYNQSIKIQTTMKNNLISLTDSVFPGINRLFTSLERQSDGHEKWVDFLHAFPHKDCVAKLYLSTFKAKYKSWCSRNKYRYSESKAEKIHSYAKSVIAVLPLNESVKLIVTQVVSQLNTILETAFSIRTEMNRIASSLPEYDTVMSMFGVGKVYGPQLIAEIGDTRRFRNRRAITAFAGLDAPPYQSGQLDVSSRHISKRGSAALRKVLFQITEIFILSKPKNEPVYQFIIKKRSEGKHYYSYRIAAANKFLRIYYAKVNQVLNAT

SEQ ID NO: 140358 - protein, 441 aa, unidentified
MSNIVNPNAAGIDISTKEHYAAVPEGRSKESVRCFQSFTRDLHELANWLKECKVETVAMESTGVYWYHLYTVLLDYGFEVYLVNAYHVKNVPGRKSDVSDARWLQQLHSFGLLKGCFQPDNLTRSLRNYVRQRKQLITQMSREVQRMQKALEQMNIKLNNVIRDIQGKTGMAIISSILDGERDPQVLAQYRDPRIKASKEKLIKSLEGNWREEQIFNLKQAYSHYFFLQGQLVECDEECERLVNDMSDEDIRKKELKSGPKQKNNPDFNVSQHLYNALGVDVTQIYGMKSITTLTVFSETGPGLKEKFPTEKQFLSWLNVVPDNKITGGKVISSKVKRKKNKAGLAFRDAANSLWKANNPLGEYLRRKKAISGGRQAVVATARKIASIYYKMVTEGVEFDPQVLKFKTQEYLNRRLRYLEKSLQKTKMLLADSKVFGEIVI

SEQ ID NO: 140359 - protein, 377 aa, unidentified
MHSENIAAYIGLDVHKETLAVAIAAPERLGEVRYYGTINNEAQAVRRLFQKLQGLYGNILSCYEAGPCGFGLYHQLTAMNIKCQVIAPSRIPKSPTDRIKNDHRDAISLARLLRAGELTPVWIPDLTHEAMRDLIRARAAAKRDSRVARQRILSMLLRTDKRYAGKLWTGKHRTWLANQSFSQLSQQIAFQHYCQSLEQIEDRILQLDQEISRLLPEWSLCNLVCQLQALKGVGQLTAITLVAELGDFSRFSSTKQLMAFLGLVPGEYSSGNSIRPRGITKVGNSELRRLLYEAAWSYRTPAKVGAWLIYYRPDSVTQYSKDIAWKAQQRLCSRYRSLTAKGKKSQVAITAVARELTGFMWDIALAAQSSFSQQKQN

SEQ ID NO: 140360 - protein, 359 aa, unidentified
MKELSKVGMKTVGLDLGDRYSHFLVLDEDGQVLEEGRVATRESALRKRFSGCERMRIALETGTHSPWVSRLLKDCGHEVIVANSRKLRLIYENRRKSDRVDAMYLARLARLDPQLLWPVEHRGPQAQKDLALLRSRDALVEARTQLINHSRGLVKSIGQRLPSCNSEAFVRKVLGAIPESLKTGLLPVLEMITSLNDQIKALDRRVEALANQVYPETKLLRQVTGVGPITSLGYVLILEDHRRFSKSRAVGSYVGLTPGSRRSGNSDPQMHITKEGDTLLRRLLISCAQYILGPFGPDTDLRRFGLRIASGGGKNAKKRAIVAVARKLAVLLHHLWRSGEVYEPLYQQTRKAARLEKIA

SEQ ID NO: 140361 - protein, 356 aa, unidentified
MTRIAQLEPTRVTVGVDTHRDVHVAVALDQLGRRLGELELATTRAGYQRLLAWAERFGAVEAFGIEGTGCYGAGLARHLRARKVLVIEVMRPNRQTRRRKGKSDPTDAEAAARAVLSAEAAGSAKAGDDLVEMIRVLRVARQTAIKARTQAINALRSLLVTAPPELRDELRALSTSRLVGKAARLRSGPLDSPLTASKLALRHLARRYQALEAEITSLDTQLAQLTAAASPRLLEAFGVGADTAGALLVAAGDNPERLRSEAAFSMLCGSSPINASSGKTNRHRLNRGGNRQANAALHRIVLVRMRYHQPTRAYVDRRTSEGKSKREIMRCLKRYVAREVYTALTQPGEQKLARAA

SEQ ID NO: 140362 - protein, 364 aa, unidentified
MDNVTHVGLDVHKESTAVAILRPGDREPDHRVIQSTPEAYRKLFSGLGTERITACYEAGPCGYEPYRLLDSIGVPCDVIAPSLIPRRPGVHVKTDRLDARNLARLHRAGELTPIRVPTLGEEAIRDLIRVREDLKEDRRRSIQRLKAFLLRRGLRFPGTSRGWSVAHERWASVVRLSEPHAQAALAHLVAAYQSRQVQLQAVDRQIAEAALAPPLAVPVARLRTLRGIDTLSAATIAAEVCDFRAFARAPAFMGFVGLVPSEHSTGERTRRGSITKAGNAHVRRILVEAAWAYRHRPAIGYELLRRQQGQLPEVIAHSWAAQIRLCGQFHKLVASGKESTVAATAVARQLAGFVWGVMTEHYAA

SEQ ID NO: 140363 - protein, 430 aa, unidentified
MTRQELTPTDAILVAIDVSKVRNDVLIEMPGKTRLRRLVVPNTKVEHDRFVDMLLGIGKPIVAGFEATGNYHRPLAFRLLEAGVALRLVSSVALARTREALHNGWDKNDPKDAQVILHMLRIGATQTYADPLVTGINDIQELSKTHEIISKAKTELWHRLLTHYLPLYFPEVARFAGNSRSDWFLAFLERFPTPASITAYTKQAFIDAAWDVVGKKVSKARLLGDIYETACSSIGLPVPTDTASIAMFRMVIAEGRSLIRQRDEIEEKADAALAANADYQRLRQIPGIGPINAMTILAEAGDLRRFSHHRQFLKFCGLDLATHQSGQFRGQTRLSKFGNARLRRAFWIAAQVAIRQRDNGFRAKYERYIAKDRDNPDLKRKALTAITAKMARTTHAIIKSGSDYRPFIEAPVPSGRTSLSRCREGASATL

SEQ ID NO: 140364 - protein, 341 aa, unidentified
MSNAGTYIGVDLHKKTCFITIMNQAGKIKKQTEISTDTDKVAKFFSKHTDASVAVESTMNWIPFYENLESLGCSVVLSNPLQTKAIAAARIKNDKVDSKILADLLRTNLLPTAYIQPREIRDLKELVRQRVNYVEIRTRIKNKIHSVLFKNNLKHDFTCLYGKAGMIWLKELELRDIYRQEMNRYLTTLDLLDRQIAEMSDQIMATAKTDYDCKLLMTIPGVSYFTALVVKSEIGDINRFASAGKLCAYAGLIPSTYASAEKIRHGRISKRGSKWLRKALIDSVTSGSKHPSRLGFFYRKLKKSKGTGKAKVATARKLCTVIFAMLSDKQPFREFVPVKQR

SEQ ID NO: 140365 - protein, 376 aa, unidentified
MNNEGLVYKKAFVIENSMEGYKKLLSAIQAAKEFFNEDKVRIGLESTGHYSRNILYFLTTNNFEVMFINPLLTNMDRKASSVRKTKTDEIDAKAICTFLIRNQNDFKPYTLSSYHIDELKVLVRQRKSLKKQMNRLTNQLRAYIDQAFPEYYKVFKNILSKASLTLLTNYASISEFKRVRVHTLAELIKKNSQGRHGMNKAELIKGLIKTSIGIDSESLSLSIKQLVSQIRLIELQVEDITNLLEHHIEESKTTLLSIPGIGIQTGAIILAEIGDINRFESDDQLLAYAGLDPSVYQSGNYSGSFKISKRGSSILRWAIFQAAKIAVQHDSIFMNYHNKKLAEGKHYLTSIGHVTKKLLRVIRSILKNNSIYTVSN

SEQ ID NO: 140366 - protein, 371 aa, unidentified
MNEPITSYVGLDIHKDTVAIAVANAGRAAPRFVGTINPSLAELCKALRRQRCSPADTLVVYEAGPCGYGWARYLNKQGWRCEVIAPARIVRSPAERRIKTDRRDALLLARESRAGNLVNIVVPDAGDEAVRDLARAREDAVAARLKARQQLKAMLLRHGRHYTGKSSWTAAHERHLTQIRFEHPAQQIAFDEYRSAVKDAAERIERLTQALRERCESWRMNRVVKALMCLRGFEYIAAITLIAELGDLNRFDHPKALMAYLGLVPSEYSSGNSRHQGPITKTGNRHARRILVESAWTYRFNPRVSRTIEIRQQGQPKAIRDIAWKAQLRLTYRFRKLNAGRKMPQNKCLIAVARELAGFVWDIVRHVEVAA

SEQ ID NO: 140367 - protein, 316 aa, unidentified
MTRNHIGVDLSKDFLDVCDPRRGAARVPNRPEEVSGWVAGLGPDDVIVFEATSGCDRVLRRAVQAAGIPGVRLNPLHAWHFARSLNLAKTDRVAQNARFQRDAAMLARLGAERQPEPDPAPDPAREDLRALGQRRDQLKRMEVQEKNRRAACPLEAVAAGIGEMLAILAAHIERIDKAIAEHVSRHPGLKSADRLLRSIPGFGAVAAVTMLAHVPELGTVSRRAAASLGGLAPRARDSGRRRFIGDGRRHVRRVLFMAAMSLMHRPGFLADFIARKKAEGKPGKLILIAVARRLLTIANAVLRTGIPFQPNTRPAT

SEQ ID NO: 140368 - protein, 411 aa, unidentified
MDAIIERCAGLDVHQATVVACVLIGEAGRKPRKEIRTFSTLTRDLKGLRDWLKELGVTHIGMESTGVYWKPVHAILEGHFELIVANAHHIRNVPGRKTDVKDAEWLADLVRHGLIKPSFVPPPPIRQLRDLVRLRRSVSEALTTEQNRTLKLLETANIKLASVVSQVFGVSGRAMLKALIENTATPQEMADLAKRKLRRKLEPLALALDGRLTEHHRYMLAFHLRRVEAIEADLRALDERIEEKARPYQAQRRLLRQIPGVDDRIAVAIIAEIGIDMTVFGNAKRLAAWAGVCPGNYESAGKKKSAAARKGNIHLKTTLVQAAVCAARTKGSYYKDKYHRLKARRGSLRAAMAIAHKILVAVFHMLAKTIPFQELGETFLDQQARTRTTRNLVRRLNNLGYDVLIRPKVAA

SEQ ID NO: 140369 - protein, 412 aa, unidentified
MEVLHPHCAGLDIHKDTVVACVRHMVDGAVKREVRTFKTTTKDLMALSEWLSAEGCTDVAMEATGIYWKPVWHILADGDFKLMLANAAHVKNVPGRKTDVNDATWLADLMAHGLIRGSFVPDEPTQEMRNFLRTRKQFVRERTSHVQRIQKTLEDANIKLDSVITDIMGLSGRRMIEALIAGETDPFALAGLAHRRIKASQAELEAALRGRVSDHHRFMLQLLLQHIDAIDAAIGQIDQEVDAHVEPFRTAIQILSSIPGISDLSAEVIVSEIGIDMNRFPTEGHLISWAGLCPRNDESAGKRRSTRMRKGAPWLKTTLIQCAWAAARTKGSYLQAQFQRVRSRRGAKKAIGAVAASVLTAAYHMLKNGTLYEDLGSDHFDRRAKGKQILRLVSRIQNLGFAVQITPIGAAT

SEQ ID NO: 140370 - protein, 403 aa, unidentified
MKHVIAFDVSMGKSYMVIYNAQKQCVFESEIKHSKPDFEKLQEKIHKLTDETGESPEIVFEATGIYSRQLERFMQDNQYTYCLLNPLEAKLQCDSLRIHKTDRSDAHRLALTHFTVTRRVSTGTDNLFYQLKSLSRLYSELDGELSMIRSRMHKVIQLTFPELERMFTSRSDLFLNFVQLFPHPDCVLGLSKTIIKNRIRANTNKKISNITAEKKAIQILEIAKTSYPAVSKNDVLCDQLKLYARRYQELLHQKECCINKMVYVAEQRAEYDIIRSLPGIGPNTAVRLMAEIGDITRFNNNKQLNAFAGIDIRRFQSGKTFFKDKINKRGNKHLRKLLFLIIQNMIKQRRYGQNHIVEYYDKLKTQPYNKCHKVASIACVNKLLKLLFYLITHNMYYDYRLTA

SEQ ID NO: 140371 - protein, 356 aa, unidentified
MEILNQSIGVDISKSELVAYFELMYKDQSTKKVGQRKFDNTPSGIKKFVQWIVKKSVDGILLQVVMEATGRYHESLAYHLVDAHYRVCIVLPNRIKHFARSLNQFSKTDSIDAAVIARYGSCQVLEAWQPASPLMRRLRELTRERQDIIKMRTQVTNRRFAMRVSARPQTDILERLGLQLEFFNAQIAQIETQIAELKRKDSVLSEQINRLVSIPHIGLVTASIILAETGGFQLFENRNQLIKYAGLDIVERQSGSSIRGKSKISKRGNSHLRGALYMSALGAISKPGVFQDTYQRCLERHGNGNKALMAVQRKLLLVAFGLHQSQQMYDSEIHYLRCQNEVGGPKSPPTVARLVT

SEQ ID NO: 140372 - protein, 411 aa, unidentified
MPKIVYPICCGIDVHKSFVIACIATTDKNLVTTYSKPKRFSTFTSDLRRLADWLAQNNCKDVCMESTGKYWIPVWNVLEQTCEPVLAHPKYLKAIKGKKTDKRDAKWIADVFKFDMLHGSFIPPAKIRQIRDLVRYHIKLTSYTTGEKNRAQNCLTVSNIKLDDVFSDVFGKSASAIITRLLENDEPFDVAPFVDRRCKTPIDQIQAAVDGVMCAEQAEKLRIIRSHMDSLELCKANLESEILTVAQPFMPQVDLVATAPGIQAFSAVAIIGEIGVDMSMFETSRHLCSWAGLAPQNDQSAGKKKTTRVSRAGVYIKPILVQCALAAIKSKAHPEIKNRYQALKKRRGHKKAIVAIARILLTAIYNMLKKNEPYNAELYRQSDKPPVQREVTVEQAIFILQRQGYLVTNVK

SEQ ID NO: 140373 - protein, 358 aa, unidentified
MQSKIKQSNWFDNQNIYVGLDVHKKQWTVSIYTEEFEHKTFTQPPMAEALYSYLNRNFPGAHFHSAYEAGFCGYTPHRKLCALGIENIVINSADIPSSFKEKYVKTDHIDSRKIARELRSGSLRGIHVFDPIHEELRTLSRIRFKLVRDQRKCKNRIKSFLMYYSLEIPQEFDNNNWSHAFLDWMKEINMNSEAGKIGLNTLLDDYLTKHIQLLDVTKKIKRLIKQGDNTLYMLLRSIPGIGPLTAIALLVEIGDINRFKHLRHLSSFVGLVPYTKQSDENEYTSGIHFRCNPYLRPLLVEAAWMAVRADPVLLKYYQQHIINSKPSKVIIKVAHKLLNRIRYVMKNKQRYTINTVEE

SEQ ID NO: 140374 - protein, 424 aa, unidentified
MAEQNLAACPEPKFAAYVGIDWADQKHDWAWQPTDGGPKRMGQLAHTPDAIHTWVGQVSAAFGDQPVAVALEQSRGPLLYQLMKYPNLVLYPVHPSTLASYRQSWRPSGAKNDPSDTGLLLDLLQRHRDKLRSLQPDTVATRTLQFLVEERRQWVDDRTCFGHRLTACLKLYYPQVLDWFDDVTAPITLDWLERWPTLEQLQRARPATIEQFLKEHGRRDADKVHQQLQQIQPARPAVTDAAVIDSCRLNLQTLVGQLKPLREAIAGYDRQIESVVQAHPDFVIIDSFPGAGLAMAPRLIAALGTQRDRFDSASSLQCFSGIAPVTSQSGRQCWVHWRWACPKFVRQTFHEWAQHSMKKCEWARSFYQRQRDAGKSHHAAVRALAFKWLRILFRCWKDRVPYDEAKYLRSVRDRLVPKNLLKTI

SEQ ID NO: 140375 - protein, 341 aa, unidentified
MAVAGGLDLHRGQLTFDYVDTGTGESWRGRICPADRESLRGWLRRFHGVPDVEFAVEGCTGWRYVAEELQRAGITPHLAEPAGTAGLRGRKRRAKTDWADARHLRDLLLDGRIPESWIPPGHVLEARALVRLYKDLLEERTSWQQRVHATLFHQGIPVVPKLGTADGQQRLDAAELSAAGRRAVQAGLRQIERLTQEMASLRRELARLSSRQPGCRALRKAHYGIGGLLSVAVWAELGDCRRFSSSDDAVRHTGLDITVYDSDGRRARGHIARQGPPVLRWALYEAALYASRPASPDYAYYCGVRDRIDGQRALLSVARKLARRCYHTLRDLGEDALAPAA

SEQ ID NO: 140376 - protein, 400 aa, unidentified
MMTPDDIDVWVGLDVGKSAHHAHALDHDGNTLYDKPLKQDEKAIRTMLGKLSKHGRVLLVVDQPNTIGSLPLTVARNMGIAVAYLPGTAMRRTARLLPGDAKTDRRDAHVIAWAALKLPETLRDAGPDDETLAALKLLAGHDEDLAHESTRHVNRLRSLLLQTHPAFERALKGERITRDATLALLERYGGPMGVKRAGIEDVKDWAKSNGLRAGRIIDDMFKAIGEQTVTVPGTLMAETIIPSIAHDIKTIRDRRREVGRQVEKLLEDHPLLTVPASMPGIGVRTASNILLGIGGDIANFKSSAHLAAYAGISPVTGQSGTSIKGERPSRRGNKRLRNALWQTAFVASTKHPPSVAYYKRKREQGKHHNAAIICLARRRCDVIYSMLKNGTLYQEPALVA

SEQ ID NO: 140377 - protein, 380 aa, unidentified
MNRTYYIGLDVHKETIAIAYACGANREDATYHGQCGGSVPTAEKTLRKLAEKLGIEFRDLKICYEAGPTGFVLARRLIRLGLDCVLMSPSKTERKPNEKIKTDKRDACKIARLFRNGDITVVRIPPALDEAVRDVCRARTDATDDLSRSKQRLSAFLLRNGFNYTGKSKWSAAHMRYLRELVMPHDAHKIVLEEYMQAIDTGIARVARLVDKMKQLLAGWEWEPVVRALMAFRGFQEVAAMTVISELGDLRRFKHPRALMAFLGLVPGEETSGAKRRQGSITKCGNSHCRWMLVECAQHFRKAPKIGSALTTRQEGQGKAVKELSWRMQNRLHKRYVRLKARGIKENKAIVAIARELSAFIWELQVKLNLPIPAAAPTGQ

SEQ ID NO: 140378 - protein, 381 aa, unidentified
MKKGRSNNSKVAACCNTTNKPLMERPMKPTNQMKYIGMDVHKAMTVIAVLDNGGKPLAEAVIETKGSTILDFFKSQRGTLHVALEEGTQATWLYDLILPQVAKVIVCNPKAIVRHGNKADKIDARLLAELLRTDALKPTDRGEQSIRGVKELALSYIAVVRDGARVKNRLKAMFRGRGIECNGTGVYSPDERKDWLAKLDSPALCSRADRQWQELDWLQRLSEEAEKELVTEARQYAATRILRSVPGIGPIRAAMILGVAGTPHRFRTKKQFWGYCGLGVVTATSSEYQLVDGRVCRSKKRPLLRGLNNNYNRAMKEVFKGAAKTVAAGVWKSRFEDMIVKGTPASLARLTLARKSASITLAVWKKGERYDHRKLKTMHAA

SEQ ID NO: 140379 - protein, 372 aa, unidentified
MDEGIKVFVALDVHKDSIVIGAAQAGSRVPARQVGRTAHEVNKLLKALAKLGTPSEVHVVYEAGPTGYGLQRALAARGYRCQVIAPSLIPRRAGERIKTDGRDCLKLAESSRSGDLRAVWVPDPAHEAIRDLSRARDDAVTARTQARHQLRSFLLRHDRRYPRKTAWTAAFHRWLATLNFGPDGAQTAFIEYQLAVQAADQRVERLTQALIGSIAGWRFEPVVQALQALRGVAAVSAIGLVAEIGDLARFEHPRKLMGYLGLVPSEHSSGERTARGSITKTGNAHARRLLVEAAWNYRFKPRIGVQAMRRQQTLTSDIQATAWKAQLRLSRRFAALDARGVQRNKVCVAVARELAGFVWAIGRQAMNTTPIH

SEQ ID NO: 140380 - protein, 401 aa, unidentified
MKRLSGGIDVGSESHHITILDEEDNVLYNQKVSHKLSEFAESIKLFKQIEKQEGGKLSFALEGKNGYSAPLDRILLDQGFTLYNVDNFKLKRFREAFAGEWRDDQRDSLMLSKMLKLKEHINSPREKVFIKIEKPSLLTESLKLLSRHQQTLIDEKVRLINRLGKKLLEVCPQILKLGKLKNKKIIAVLAKYPDFSKYKRITLCSLLKIKGIGKKGAFFLLKRLNNIEYMPGLTDIYQTIIFSYAKRILELQKEIEDLDKKLDEIGEESKEVKHLKTIPGVATKLASRLIGEIGDINRFPAEKQLAIYCGIACVDNNSGKVTKARAVYKANKICKQALITMAGGSIRFSFQCKYYYLKKRAEGKSHNHTLRCLARQLIKVIYKMLTEDRDYIVRKELKKVA

SEQ ID NO: 140381 - protein, 355 aa, unidentified
MNATTVAVDLAKNVFELALADGNGRVIERHRLTRTQFERWFDNRKVDRVVMEACGSAHHWGRWLEARGIAVKLLPAQYVRAYVKRNKTDAADAAALLEAARAADIKPVAVKSIEQQALQGLHRLRSGWMATRTRRINTLRGFCREFGLEIRVGAVQGLAAIARLIADDRSAIPALLRTPMRLALEEIRLMEARIEHLERELAQLARQSPACEALTSVPGIGLLTSTAMVAAVRDPRSFDSGRRYASFFGLTPREYSSGEHRYLGRISKRGDRYIRMLLTHGARSVLRAATAAQRQGRKLDRLRTWALQVQERTNHNKATCALANKLARIAWAVWVKHEKFQSTPAHPSMAAEVAT

SEQ ID NO: 140382 - protein, 282 aa, unidentified
MTKQLPAVNVGVDVGKSQLDLYLLERDRALSVPNEEQAIASLIRALSRYRVERIVIEATGRLEQPFVRAALAAGLPVVVVSPLKIRRFADAIGQLAKTDAIDARLIARFAATVKPLARPASSANAQAIKDLVVRRRQLVSLRTMEKNRRQVMPQELKASIDRITKTLDRELKKLEQLIDHAVDQHAPSRHKRELLTSMPGIGHSVAATLIGDLPELGSLNRREIASLTGVAPFKSRQRQAPRQTPHPRRARSLSNRALPQRDGRDPLQPGHQTLLRTLTQHR

SEQ ID NO: 140383 - protein, 350 aa, unidentified
MSLVAEVVDAVVGGDTHRDIHALEMTAPTGATIATLEVDNDDSGYAQVLAWIAEHAPGPRVILGLEGTRSYGVGLARAAQAAGLVVVEVQRPRRSARRRGKSDAIDARLAALHTLGLDAERLPTPRHDGDREAMRILLSARHESAITRTRQINRLRALLLTGDDQDRTMARGALTDTRLGQIARRRGRATDLVEVRVRRAEARRLATAIAQAGREMRANRQSLEQLVAGFAPELLDKFGVGPVSAAQAIVSWSHRGRCRHEAAFAALAGASPLPASSGRTIRHRYNRGGDRALNRALHDITLTRWRACPRTHDYIAKKRSQGKNDGEIRRSIKRYIARELFRALEASAAP

SEQ ID NO: 140384 - protein, 346 aa, unidentified
MTIVEATRTVAGGIDTHGEFHVAAALDDVGGLLGAESFEANRTGYEALLSWLESFGTVAKVGVEGTGSYGAGIARHLARAGIVVIEIDRPNRQARRNAGKSDPLDAIEAARATLSGKASGRAKSRDGWVEALRVLLVAKRSARAARVKALAQMRQLTYSAPDQLQARLKGLAISQFVTAAQGLRPTRSPDAMTAATKASLCALGHRVADLEAEIAELDAMITPILETNAAELLGVYGIGIDTAASLLVAAGDNPERLRCEAAWAHLCGASPLEASSGKVTRHRLNRGGDRQANRALWHIVITRLASDPDTQAYMERRLKEGRSKREVIRILKRYVAREVYRHLPRE

SEQ ID NO: 140385 - protein, 427 aa, unidentified
MPLFAGLDVHKEEIEAALINETGAVVLRHRFACERSAIESFAQKHLTKACVALEATTHCWAVAALLEPFCQEVVVSNPLKTRAIAEAKVKTDKVDAEVLAQLLRSNFLPRVWTPDQSTRQLRSRSTERANLTADRTRQKNRIHSLLHQRLIHSPCDDLFSKRGRAWLSSLELEPEGALTLQRYLQQLDFIEADIAAFDQRIAVDSYQNPQVKLLLTLPGVDIIVAQTLLSALGDIERFPNPDKAAAYLGLVPSTYQSGNHCYHGRITKQGASHARWLLVQAAQQVARHPGPLGVFFRRLAKRKNRNVAVVATARKLVTISWHMLKNNEPYRYAQPKTVDAKLSRLRVKATGQKKKTGERKGLKRAASYGSGVRTRAVKSIDTLYEAENLPPLPPLKAGEQAMLAAHGVSAYAESIHQARRVARKSKT

SEQ ID NO: 140386 - protein, 344 aa, unidentified
MDHFAGLDVSVKETSICIVDDAGKIVREVKVASEPEALLAVLKNPAYHFKRIGLEAGPLSQWLFSALAEAGLPVICVETRHMQAVLKAQINKTDRNDARGIAQMMRAGLYRPVHVKTIRSQKLRMLLTHRKLLQSKAIAIENDLRGTLRNFGLKVGMVGKVKFEARIRELVENLPDLAVLVEPMLIVRRTLREQIVILHRRLLAIVRDDEVCRRLMTTPGVGPVVALTYRATVDVPARFRKSKAVGAVFGLTCAKYQSGEVDRNGRISRCGDEMMRVMLYEAAQSMLRSKKWSWLKAWAMQIARRRGMKKAIVALARRLAVIMHRIWVDGTEFRWTRERATAAA

SEQ ID NO: 140387 - protein, 342 aa, unidentified
MTAIGIDTHKATLAACAVDELGRPVGEASFTNDPAGHLAFIAWARSIASDVTIGVEGSSSFGAPLARSVQSAGLVVREVPPHLSRVERLRTRRPGKSDPSDALAIARVTARESNLPPIRLPDRTTELRLLLEAREDLVDESTRARNRLHAHLLTLAPGYGGTVANLVAARHRATVGRLLRGVGGVQAELARGLLLRLARLEREVKALTSRIGMLVARHPLLGLPGAGPITAARLIAEVGDVRRFRSADALAALAGVAPIPASSGQVQRMRLNRGGNRQLNRAFYFIAVIQSRFHPPAKAYVTRRMEVDGKSWREAIRALKRLLVRPVFRLLVEGAVLQLEAA

SEQ ID NO: 140388 - protein, 358 aa, unidentified
MADKVTEATVVGGVDTHKDLHVAAVVDQNNKVLGTLYFATTRQGYRQMLAWMTSFGALKRIGVECTGTYGSGLLRYLQNAGLEVLEVTAPDRMERRKRGKSDTIDAECAAHAAFSGIRTVTPKTRNGMIESLRVLKTCRKTAISARRVALQIIHSNIISAPDELREQLRNMTRMQLIRTLGSWLPDASEYHNVTNVYRISLKSLARRYLELHDEIADLDVMIAAIVDELAPELIKRNAIGYESASQLLITAEDNPQRLRSESGFAALCGVSPVPVSSGKTNRYRLNRGGDRAANSALHIIAIGRLRTDDKTKEYVARRVAEGHTKMEAIRCLKRYISREVYTLLRNQNRQVNSIPITA

SEQ ID NO: 140389 - protein, 316 aa, unidentified
MNKVAKTYVGVDISKKYLDVSLYPSNESFRENNDKEGVNNLLKKLKKYNLEIIACEASGGYENLFAKLCTKANEKIRIEDPRRIRDFAKAKGIKAKTDSIDASVIASFASTFPVEYEKQNLSGKHLELQELVKYRDRLKKSLSSEKMRLGGPVYSFSEKYIKKHIVFLQKQIKMLNTKIEAIINSIEELKEKSILIQTMPGVGKDTAISLISYLPELGTLGPKKVASLLGVAPFNKESGQYRGVTKIKDGRSKPRSALYMAALSSSRHCPVFMEFYNRLVEKGKPKKKALVAVMRRMAVVLDAMVANKTEWIDKTI

SEQ ID NO: 140390 - protein, 318 aa, unidentified
MDVHTTNFTFCCYTADSDRGFAVAQTEPDYRQVIKYMERVQKQRGEECKFVCGYEAGCLGYSLYHQLTRCGVDCVILAPSTMHQEKGKRIKTDRRDAENIARCLAFSLYSPVYVPTTEDDAVKEYIRMRDDIKADLKRVKQQIIAFTTRHGFAFDGKSYWTQKHLKWLETLVFEHPLYKETLQEYLILYYMLDEKVAVYDTRIEEMSHLEHYEENVQKLCCFRGVAAHTALSLLVEVGDFQRFRSAKHFAAYLGLVPGEHSSSDKQIRTSITKAGNTHLRRLLVEAAQSYNRGAIGKKSAALKARQGGNPAEVIAYAD

SEQ ID NO: 140391 - protein, 320 aa, unidentified
MRNAVGLDISQNTFDAAAIVNGQRKQALFDNSINGFENFKAWLDGFDCELHICMEATGNYFEDVADYIGQFYIVSVINPYKISEYGKSRFHRTKTDKQDARLIAEYCHTAMPKDLPVRQKISIGHYRLKRLLALYDQLKTQKTAQKNRLKVAKDEFVRKIHHAQIQELDQHIQQVEAEIQAITNGNQDLKTVSEGLQTIPAIGKLTAAILTNYLLSGDFKTANQFTAFAGLNPQQKESGTSVKGRSSMTRYGNRRLKSALFMPAMVALNRNYFPDFVKRLNAKNKPKMLILGALMRKLLVVAYHVYKTQKPYNPERYKSA

SEQ ID NO: 140392 - protein, 366 aa, unidentified
MKKISTVAIEGIQVFKQNQLTIGLDLGDRTSHYCILNEAGEVILEQELPTTPKGIEKVFSRIPRSRIALETGTHSPWVSRQLTQLGHEVIVAHARNVRLIGESSRKDDRLDARTLARLARIDPALLGPVRHRSAKAQIHLTVIRARAALVSTRTALVNAARGLTKSYGARLPKCGTERMNREITKELKPELREALNPLLREIESLNERIAEYDTRIEQIATEAYPEVARLKQVKGVGPLIALTYVLTLDDPHRFRRSRDVGCFVGLRPGRRNSGMSEPQLHISKEGDRYLRTLLVQGAHYILGPFGQDSDLRRWGLKLSERGGRNAKKRAVVAVARKLAVLLHKLWVSQEIYEPLRNNRQAMARVA

SEQ ID NO: 140393 - protein, 326 aa, unidentified
MISRLNVGSDISKKWFDAHALLKGREAFTARYPNDPRGHRLFIDELRSFGARKVHVCMEYTGGCERALAVACREAGFVVSIVDGAKIAKFRGSFSSTGAASDRKSACLLARFCRERRPEEWFPAPDEFRKLRELVRHRESLVEARSQWKCRASNEVEDPLVHAQRRALIETCDAMVKEVEREIGEHVEAHGNLAEAVRLLRTIPGVAATSAVRILAEMGQVENYSSAKELALAAGLVPIVVGSGQKAPPGKLAVYGNKELRNSLYYPSLVGKRFGTGVGPFIARVESRSRFKMTAVVAGMRKLCHVVYGVLSTGQPFDPQKMTMIA

SEQ ID NO: 140394 - protein, 405 aa, unidentified
MDIIVERGAGLDVHKQREVACVMGVGMKKEVRTFLTVTNDLLRLKAWLKDHHITHVAMESTGIYWKPIFNMLEDTFDVILVNPRHVKNVPGRKTDVLDAEWLCKLLRSGLVRGSFIPPKPVRELRDLTRYKRKLIQTITAEKQRVEKVLEDANIKLSSIASNTFGASGKKIIEELLKGELGPDQMADLSKGRLRKRKEELKEALVGNVEEHHKRMIRTSLEHIDAMEEIFSNVEQKIQEKIERHFKEEFELLKTIPPVKDSASVIIAEMGVNMDLFPTEAHVSSWAGMSPGNNESAGEKRSGATTHGNLYLKTILTEFAWIASKMKGTYLWSKYQSLIGRKGKKKTLVAVGHKILISAYQILKYRVPYKELGANYLDDRKKARIAKSYVRRLKSLGYTVTVTEAA

SEQ ID NO: 140395 - protein, 350 aa, unidentified
MNATTVAVDLAKTVFELAISDEQGRRVERKRLSREGFAQFFVNRPPCRIVMEACGAAHHWARTFQAQGHEVKLLPPRHVRPSVRRNKTDRADAAALLEADRCGDLLPVPVKTVDQQGLQGLHRVRSAWMAARTDRINTTRGLLREFGFDLPLGPTAVLTQAPIWLADPESPISLPLRTALTELIAEIRTLDTRIAAIEQQLREQAQLRPEVQRLMTVPGIGLLIATAWMAAVGGMTAFRDGRQLAAWLGLTPRESSSGQRRHLGGISQRGDRYLRMLFIHDARSALLAAMTQDRTGKKPLTRLPRWAVDLAARVGHNKAACALANKLARIAFAVVRQGRTFNGDFVSVAA

SEQ ID NO: 140396 - protein, 377 aa, unidentified
MGDYSEAFVGLDTSKLRNAVAIAAAGRGGEVRFFGEIENTPAATAKLVRKLSVKYKRLTFCYEAGPTGYGLHRQIKDLGFECVVVAPSLIPKRPGDKVKTNRRDALSLAKLLRADELTPVWVPDGRHEAMRDLTRARETAMLDLRTKRQHVSAFLLRLGRPYPESRKTWTKAHVSWIASQKLEHPQQRLVLEEMMLAIRQAQERLARLEQAIAATVPEWSLAPVVTALMAMRGIDLVSATTLLAEIGDLSRFRTPTELMAYLGLVPSENSTGDTVKRGPITKAGNRRARRMLVECSWSYQHPPRVGQAKQPKVDAAPPAVREIAWKAQCRLYRRYRTLIRKGKLKTVAIVAVARELAGFIWAVARAATTAPVAAAPA

SEQ ID NO: 140397 - protein, 410 aa, unidentified
MAERFVGIDVALREHRIAVLDRDGEAVGQSFTIAASHDGVATLLRTLAARAATAAQTLIGLEASGHLWENLEAALVGAGYRVLVLNPLQTRRYRDVVRRKAKTDDIDAHVIAGLLRSGAAQASYVPDEQIQSLRELARLRARLLADRQDYLRQLIAQLDVVLPEHRTALGDLLSARARGILAQFPTAPHLAQASPRAIRRAAEDAGTRGFALEDAIAVRDAARQSLYSGKAAAARAQVVRTLVSQLERLTSAMDEVDRAATTLLPPSEPGTGPSDAELLQTIPGIGPQTAATLLGELGALTRFTDARALVAYVGFYPVIHESGDHAAPPRLSRIGPRIARHSLYLAAFNAVRHSGEWRTIYLRKKAQGKTSKQALVVVAVKLLHAVYAMLKHREPYNPSRLLAAPATIGS

SEQ ID NO: 140398 - protein, 458 aa, unidentified
MSKNSKKKKRAAAGKAAKKMERFELLNPHSAGIDIGSMLMVVSYTDKEGMINLREFDSFTSSLYELAELLQKEGVEKVVMEATGPYWEAIYNILEKHGMEMFLVNPSHYRNVSAQKTDINDAQWLHQLLAHGLIRNSHIAPELYRELRQYLHEREIYQNHKSDSLNRMQKTLTLMNVKFQHLISDVEGVSGMKLLRAISSGISDPQTLLARIDVTKLKASPEDLLSSLQGDYKQHYIHILSNTLKSYDFFKEQMLAYESHIEQTLRELLACNGEQKTAIQKKTRMVRKNQYSFNLKDYLLGIFGIDLTEVEGLDEIGLLTILAVTGTNMKKWPTAEHFASWLNLSPRPKISGGKVIGYEKRASNNPATQAFRLAAHCLWQSKGPMGQQYRRLAATKGSKKAIKAIARKLAVIFYHMVLNKQAFDATKVQPDLEQQKARKIARLQKEAAKLGLTIQKAA

SEQ ID NO: 140399 - protein, 350 aa, unidentified
MLIIGCDYHPGFQQIAFVDTATGECGERRLNHTEGAEQFYRELRTCGLEVRIGMEASGHARWFERLTAELGFELWVGDAAAISTKRVRKHKSDRQDAELLLTLLVENRFPRIWIPNCENRDLRQLLWHRHRLVQTQTRLRNQLHAVALNEGVRLKKRMWRPKGRAQLESLVLMPWATQRREDLLQLLDQVDTRIVELTAAIEQEAVKRPEVVRLMTHPGVGALTALAFVLIIGTPERFPRSRELSSYLGLVPTEESSGERRHLGHISKQGNTLLRFLLVAAAQITVRSDPDWRCRYLHLAMRRERAVAKIAMARMLAVRLYWMWRNGWDYAHLPKLGSHAGQPGNRLGRQ

SEQ ID NO: 140400 - protein, 416 aa, unidentified
MWNKLAEKRSVIKSDMLVVGVDIGKYIHVARGRFPDGTFTRPLSFTSDYQGFTRFLTHVIDWQHQAVCTDVIIGLESTGVYWESLAYWLVDRHYRVVQVNPLHVHRSKELLDNTPTKTDDKDSLLIADLVAQGKYLSFVMPRGVFAELRQLASARARLAVERTTQINCLHGLVSLVFPEFSSLYRDLSTKVARRLLYHFPTPQAVCTHTVAAMARRARKAGGIRLHEDKLALLKERAQTAVGIREGQATLVMALRDTLEALDALDRRIAGFEAQMASFLSQVEESRYLLSLHGVGTVSAAVVLGETGGLSRYGSAEAVLKLAGLNLCEISSGMHKGNRHISRRGRPLLRQTLYFIALHHTQEGTPLYEHYARMVNRGVPKPKALVALSCRVMRIMYALVRDHRCFTDQTPDKTQAA

SEQ ID NO: 140401 - protein, 386 aa, unidentified
MKTVAGLDVHKDSVYLCILRENGEKIERVFGVLTPQLDSMRDFMAENKVSEVAMESTSVYWIPIWRVLVDSFELKLVNPYFIRQLPGRKSDVKDAQWIAECVMKELIRGSFIPPPLVQQLRLYDRRIFEINAELVRKYSKIDAILQRCNIRLSNYVACTDCKSYKAVVKQISEGVTSPQELLRHVHKRIINKHGEDTILAALTGVVSDAEIDMLAQYVAESALLEDNKNKCIEKMREICNREFKEQMKNLQEIPGVSERSALTVLAEIGPDVNAFPSAKHLVSWCGFNPRNDESNKKIKSNKITHGNRFIRIASVQCAWAASRTKDCYFSKFYAFHTQVRKKFKLKVVVAVARKMLVCIWHILKFNVPYKDFAPRKPAVEDCTQLA

SEQ ID NO: 140402 - protein, 407 aa, unidentified
MRLFAGDDWAEDHHDIEVMDEAGKVLVKRRLPEGAAGMTQLHALIGRFLPEDADGAEVVIGIETDRGPWVAALVAAGYVVFPVNPLQASRYRERHGVSGAKSDGGDAHMLADMVRTDSHQLRPAAGDSPEGQGIKVVARAHKTMIWDRTRATQRLRSQLREYFPAALAAFEDLDAPDVLELLGKAPDPDRARRLTRAQVAAALKRARRRDIAGKTDAILAALRGEHLGQPAALTAAYAATARSLIAVITTLNAQVKILEDQVRDHFGRHPDAEIYLSQPGIGAILGARVLGEFGDDPCRYVSAKARKNYGGTSPITRASGKKKVVAARFIHNDRLIDALMSWAFASLNASPGARAFYDEQRAKGLDHNDALRRLANRLVGILHGCLKTRTPYDQATAWSHRESSLAA

SEQ ID NO: 140403 - protein, 347 aa, unidentified
MSMLADRVDYVIGIDCHKERHVAAVADRLGGLQATLSVTSDAQGYRSLLKWADKNAGGRRVWAIEGAGSYGAGLSDWLAEKQEWMVEVDRPKRPKRKAGIKSDELDALRAAKDALAAKRLAEPRRRGGLEAVRVLKISRKQAVQVSAVAVVQLKALVVSAPEGLRARLRHLSGAELVATCAGLRNQPSHSAEWAATLFAMRSLARRAQAAAADAAALDRELSVAVKAQAPPTLLGEVGVGTVVAAELLSVWSHKGRLHSEAAFAMVAGAAPIEASSGQLIRHRLSRSGDRQLNSALHTVVLTRWRHDERTQVYIARRRAEGKSDREIRRCLKRHIARHLFRLMEAAA

SEQ ID NO: 140404 - protein, 447 aa, unidentified
MRIVYQRCCGMDVHKDSITACLLLIDEVGEFRTESRRFGTMTRHLKEMAAWLASEGVQAIAMEATGVYWKPIWNILEAEKKFELLLVNAQQVKQVPGRKTDQKDSEWIAELLQHGLLRASFVPPVEIRHLRDLTRMRARIRQTLASFANRIQKVLEDANIKLGSVASDVLGVSGRHMLKALMAGEQDPQRLANLAQGHLRKKIEPLQLALQGHFTDHHRLQLKLLLEFVEFGEQQLSHLDSEIQLLLNKVHAEPDLPGPAEGTVAEAEASPPQPTSPLQTAVELWDSIPGIDQLAATTLVAEIGANMDQFPSAHDLASWAGLCPGNNESAGKRRSGKTRKGSVWLRRALCQAAWSASRTKNTYLAAQYRHLIVRKGKKRTIVAVAHSMLIIAYYLLKRQCTYQDLGPDYFNLRNEDAITHRLVKKLTGLGYHVTLEPARAEAGSETA

SEQ ID NO: 140405 - protein, 425 aa, unidentified
MNYKQNEKINQVKESTLVVGIDIGSTTQYARAFDWRGIELGKVFTFSNSREGFEAFKAWMQHLQDKYRKSDVIVGIEPTGHYWFDLGAYLEDEGILLVMVNPYAVKQTKELDDNSQSKNDRKDPKVIAKLVTEGRYSAPYTPDGVYADLRIMVANRKRLIREMTQIKNRFARWFAIYFPEYTDVFGDYEAQSSMLLLKKVCTPEAIVELGAEKINQIWRDAKLRAVGMKRATTLCETAKRSIGLKKGSSAARYEMKLLLEDYEYKKAQLDSVMEEIESLCKKIPESEQMLAIKGIGVITVAGFLAEVGDVRRFESPRQIQKLAGLSLRENSSGKHKGQTTISKRGRSKLRAVLFNAAIPLIAKNPEFKSLHEYYTTRANNPLKKKQSVIAISCKLIRVFYAILAKGVTYDAQKLISDIHRQPQVA

SEQ ID NO: 140406 - protein, 406 aa, unidentified
MIFVGIDWSEEFHEVELQAGSGRVLKRLKLRVDLAGLTRLQEVITDAAEEPSQVVVAIEASHGLLVNALVASGYRVYDINPLTAARARQGESPAGSKSDAGDAHLLANLVRTKRQDLRPLAGDSEQAQAVHIRARSHVRAIRHQQRLRNQLRSSLAKFFPGALPLLGDEPEELRDALAVLTLAANPVQARRLSLNKLRASLARHGRQRNLDAKAAQIQEQLRQPQPELSSAKVLSAHSDEVRYLVRSLVQVRSEVALLEEQLAQDFEEHPDAKIILSLPGLGVVLGARVLGESGDDPTCYANAKARKNYAGNAPITRRSGKWEARNRRVARNRWLADATFLWARSALSAPPGARRYYDQLRARNKTDNVALRALANRLVGILHGCLRTRYLYDESIAWPGVLEHAA

SEQ ID NO: 140407 - protein, 430 aa, unidentified
MKSNTQNAKIEAITEKTLVLGIDVGSETHYARAFDYRGIEYSKKPFKFSNTEAGFVTFKEWILDLKERHEKDKVVPGMEPTGHYWFNLGKFLQDNEMKPVLVNPHHVKKSKELDDNNPTKNDRKDPKVIAGLVREGRYMIPYLPDGVYADLRTASNIRFQLQAELTRIQNRISRWFNIYFPEYKTVYGKPDAKSGILILKAAPLPEDILTLGIDGVNQIWRDAKLRAVGKARAKTLIEAAEHSVGSKEGAVAARMEIRMLLEDYESRSIRLQEVMTLIEGLVKQIPMAEKLLEIKGVGIRTVSGFLAEVGDISRFNNPKELQKLAGLALVENSSGKHKGETTISRRGRKRLRYLLFEVAMSLVAKNPEFRELHNYYTTRRLNPLKKMQSLMAIAAKLIRVFYVMLTKGVNYDPKKMVNDIKRPAVYLQTA

SEQ ID NO: 140408 - protein, 348 aa, unidentified
MAVTIVEDRCAITGGVDTHADVHVAAALDRIGGLLGVREFPATAAGYAGLLGWLAGFGTVALVGVEGTGSYGAGLARHLAAAGVRVVEVDRADRQDRRRAGKSDPLDAVSAARAAQSGRAGGAPKGRDGAVEAIRALMVAKRSARNERTQAINQARSLIVTGPDDLRARFARHTVAALVAELAALRPRPGDVPGYATRIALRELGRRAEFLDAQLKRLDELIIPLVAARAPSLLALHGIGPDTAALLLIAAGDHPQRLRSEAAWAHLCAVAPIPASSGKVRRHRLNPGGNREANHALWRIVLTRMSAHPATRAYVDRRTKEGLSKKEIIRCLKRYVAREVYPHLRAGG

SEQ ID NO: 140409 - protein, 286 aa, unidentified
MNNTIVGVDLAKDVIQVCVYSNQKVRSNTEVTPSDFIEWLAKTKPVRIVFEACGTSNFWKQKSTELGHDAQLISAKLVDTVRQNQKNDKNDALAIVQAALLPDIKFIAGKDRTQQQMQSIMRLRELSVKQKTALHNQLTALLLEFNIRTSNKNGGLRGAVESTLEDAENGLSDEFRKAIHRAWIQYIEVVKSISVYDTCLEKSIKESPECQKLMAIEGIGIINAINLYNILFCSEDGVFKNGKDAAACIGLTPVQHSSGGKTKLGSIGKHVRNSTLRSQLVTGAFT

SEQ ID NO: 140410 - protein, 391 aa, unidentified
MIYVGIDVAKDKHDCFIVSSDGEVLFDVFTIQNNMDGFEDLLFKIKSAEKDSGNVKVGLEATGHYSCNILGFLKNKGLTTIVINPLYTSLSRKSTSLRKTKTDKVDARTIAGMIMSDVSLKPYSDKLYHNEDLKSLTRYRFDKVMQRAKLKQSVSRLVNILFPELETLVSTLHGKAVYELLLEFPSAQHIASANLKHLTHLLNTSSKGRFKRVTADEIREAARKSISSYLPAKSLELKHTIKLIRELTSEIAEIEAEIKKIMDAIDSPILSIPGIGQNLGAMIIAEIGDFSRFDNPDKILAFAGCSPTTYQSGQLYSSHAKMEKRGSRYLRWALLNAAAYVCNWEPTFAAYLQKKRAEGKHYYVALSHAAKKLVRLLYHLEITGEVYQATA

SEQ ID NO: 140411 - protein, 351 aa, unidentified
MTNYKLGCDVHKRYSQIAVLDEVGQVCQQDRLNHSPEILQEYFGQFPEGTPVAFETVGNWYWIAEAIEAAGCEPLLTHAAKAKVMMGNVNKTDKLDAKGLATLLYLGKLPTVWIPDAALRDERELLRTRMALGKIRTGLKNRIHATLAKYALVIQESDIFIGKGYEQLKRKLLQLPVQTFTSVQYQLELLEQTQKHIDLLEKRIHQAVRETPAMQLLKTLPGFGLIFSAHVATETGTADRFPDAEHYVGYAGCVPKVSSSGGKTYHGHLRKEANHYLKWAFIEAANVIATNRNRPSWRNKHVIQLYERIRQRKGHAVAVGAVARHLAEAAYWMLKKNQPYREPTTALPRQA

SEQ ID NO: 140412 - protein, 453 aa, unidentified
MKDDRSVPPARRKSARTALTITHPNAAGIDIGSTSHFVAVPADRDDQPVREFPSFTVDLHALADWLAACHVDIVAMESTGVYWIPLFELLESRGFTVLLVNARHVKNVSGRKSDVLDCQWLQQLMSYGLLRGAFRPAEQVSVLRALTRQRTMLLRTQARQVQHMQKALTQMNVQLANVIADVVGVTGQLILRAIVAGERDGRTLAQMKHRGIHASVDEIARSLQGNWRDEHLFALKQALAGFDFVGTQIDECDREIEVQLGRLQTHDRALEKSKKHGRTRNEPKFDLRKQLFRMCGVDLTRIDGIEVTTALAVISETGADMSRFPTAGHFASWLGLCPGTRITGGKVMSGKTQRNANRAAQALRLAAAALRSSKSALGAYFRRLCARMDKPKAITAAAHKLARLIYTMLTKGEEYVDLGQEYYEERYRARVLHQLEQRAQRLGMTLVANERPA

SEQ ID NO: 140413 - protein, 348 aa, unidentified
MQSTSALPVIGMDIAKNVFQIHVVDVETGEIGRHKLKRERVTAFFANRQKSLVAMEACGGAHHWARTLQALGHEVKLLPAKHVRPFVLRDKTDARDAQGIWVAAQQLQIKAVPVKSEQQQACLALHRMRAQLMKMRIMQTNALRCLLYEFGIVLPEGHRILLDRIQGELGKAQERGRLPAVVVLSVQEQLKRIEGLQADIDQLDKRLASLAKHNQQMQALLAIPGIGPLTATAVVSTATDITSFESGRQFAAWLGLTPRQTGTGGKTRQLGISKRGDAYVRTMLMHGARAVIARSRHGGWIESLLQRRPYNVVVAALANKLARTAWAVLAKGKAFDPLQWNPTEITPA

SEQ ID NO: 140414 - protein, 389 aa, unidentified
MRFYTKQHQFYCGIDLHARTMSLCILNQEGEMLVHRNMPAGPDPFLKTIAPYREHLVVCVACICTWYWLADLCAREGIPFVLGHALSMKAIHGGKAKNDNIDAQKMAVLRRGGMLPQAYVSPAALRATRDLLRRRMHLMRKRTELRAHIQHTHRQYNLPEIGKQLAYKANRDGVAARFPDPAVPKRLEVDLALIDHYDHLRRAVALAVRTTAKQHDAHPLSRRRTVPGIGEIRSLVLLYDIHDLQRCPRVQAFVSYGRLVKCAKASAGKRSGTSGTKIGNASRTWACSEAAVLFLRAKPAGQKSLARFENKHGKGKALTICAHKLARAVYDMLQREGVFDLATFLQREGRSVGEPAASLGHDGRSLATVLSNDALPASTNAHEHRGPLP

SEQ ID NO: 140415 - protein, 336 aa, unidentified
MIHVGVDLHRTFCYVTALDANGKVLHQGRINNQRQAIERYLSGWQEPLRLVFEACSFWPAFVEAVEGRVAELYMVHPQRVKAIASAKLKNDRVDSLTLAHLLRADLLPLAWLADRETRQRRTRTRARIELGRMRTRLKNRMHALLHQQGLRCPYSDVFGKKGRQWLAAAALGAAEREAMAAYLAVLDSCEEQTRKSQNLLIMENRADDRVRWLSSIPGIGEYGANIILAEIGDITRFDRKALFSFAGLVPRVRESADKSWHGPITRAGSSRLRWIMVEAAVTAVRSSPGARAFFEKLCRRKPRHVARVALARKLLGAVYALLRDGVCFNEQMFATM

SEQ ID NO: 140416 - protein, 347 aa, unidentified
MLIIGCDFHPGFQQVAIFDNRTGEMEEKRLQHRAEAEEFYRGLAGQEVRVGMEACGHYPWFERLLQELGQELWFGDAAQVRASVVRKQKTDRRDAEHLMHLLIEDRFPRIWVPSLEVRDVRQLLVHRHKQVQARTRTKNQLQAMALSHGVQKKYKLWTKAGRAELEQLPLLPYAAQRRQKLLAELDAGEAEIGELDRRVGEEARQRPEAVRLMTHPGVGPVTALAMVLTLGPAERFESGKQVGSYFGLIPSEESSGGKQRLGKISKQGSSFLRFLLVEAGQTAARYDPQLKRFYRRLASRKNRGVAKVAVARKLATRMYLMLREGWTYAQLNQAVMSVSPSHSVAGE

SEQ ID NO: 140417 - protein, 436 aa, unidentified
MDAHYANRLRWFRQFKEHINASKSTLVVGIDIGKDKHHAFFGTPAGRTIHRRLIFENSFEGFYELLFYIKRYVCAEKLQDVVIGVEPTSVYHKPLSEYLINMGYSVVYATNSAIKKNRAILDGRWDKNDTKDSANVADLVSRGRCHFYDLPDMNLRDIRSLLSLRKRLKKQEHRCITRIRNNLVAQYFPELYRAWYSCQQENLAIVRFCLSPQKIAQLSFDDFARMVTRKRRGLRQYRRLRHIHEVAQQSIGCRLGSSVAFEAQLLVESLEQVRQQVGEIEEQLYGICESYKEYELLQTIPGFGPFVSAAVLGAIGFAQRFENAKQLLRLAGLDLNALRSGKRSQSAVPVISKVGKADLRYALYQAAKVATSLTAEFKAYFKRLLKGREKEKGIKTKMRVKVSAKMLVIAWTLMKTRQPYKAGLLLIDEPVQPRGR

SEQ ID NO: 140418 - protein, 388 aa, unidentified
MMAIGVDPHKSTHTATAVDPSTNRSVASIRIEASLADYARMLRWARQFEQRRWAVENAEGLGRHLSSWLLARGEQVVDVPSTATARVRQLSRGGGRKNDQIDAAAAACVAALQGDGRPLAAEGITDALALLDESWMNLAQCRVRLVNQLHALLRELLAGGAPKDLSATAAGELLRRVRPAGDVERVRKQIAVGLVTQIRSVDALLKSNAKQISELVAASGSTLTDTVGVGVGAITAGRLIGRTGRADRFPSSASFTNYAGAAPIEVASAQRARHRLSRSGDRQLNAALHTVAITQVRTPGSRGHAYYNAKIAQGKTAREARRCLKRRLADHIWRTMITDERRVAANPGGHPGATLQSSAAGSTPTASSSDRSLPGPARRDSTTPCPAA

SEQ ID NO: 140419 - protein, 371 aa, unidentified
MEKASTFVGLDVHKNSIVVALLAPGRDTPLEWKVVNEPGAVHRLIRKLEREAEGGLLCCYEAGPTGFVLKRQMDRAGIACQVIAPSLIPVKPGSAIKTDRRDARKLAELLRAGLLTEVKPPTEDEEAVRDLTRSRDDAQRDLTRARNRLSKFLLRRGCVYAVDRKPTWSQKYRSWLRALTFERTADQVIFEDYLLSVEQVEGRLEALTERIEHFAEQEPWRERVQALRCFHGINTVTALALVAEIHDPRRFAHPRRLMSYLGLVPREYSSGMRERRGGITGAGNRHVRRLMVEASWHYRHKPVVGRALRQRRREQDPKAIALADRALRRLTLRQRRMLYQGKHPNLVNIAVARELVGFVWNVLHTRATAQA

SEQ ID NO: 140420 - protein, 403 aa, unidentified
MERYAGIDLASEEHRLSIVDGEGGQLEQRRIGHDEQGIAALCRRLRALGVGRVALERPDGLVVERLLDAGLTVVAVHPNQLAAARDRYRVAGGKSDGFDSYVLAELCRTDMHRLRALEPDGDETKALRALTRTREDLVQARVALANQLRAQLEAFWPGARRVFSELDSPIALAFLERYPSPVDARGLGEKRLQGFLARQGYCGRKSAAELLARLRAAPEGRAGELELEARRAAVLGLVAALKPLVEQIKLLTSQIAGALRDHDDGAIFLSLFRDPKSVVTAAELLAEIGDCRNRYPSAEALAADAGMAPVAVESGKRKVACFRWACDKRLRNAVACLADSSRHRHPWAHSVYQSALARGHDHPHAIRVLGRAWLRVIWRIWQDQSPYDPARHGNLQRLLAAGG

SEQ ID NO: 140421 - protein, 480 aa, unidentified
MRFGSKRTLRCRLVTRLNYKAFAESESCLLAVRQNRTTNVITNSTPSFAAHIGLDWADKKHYWSMKTADGKCSRGELEASPEAIDLWIAELTVRFGDQPIAIISEQSRGALITNLGKYAHVYVRIVDPARLNYYRKSVSPSGAKSDPVDADLILDFALLHPDRLRCLDPDTVETRSLQFLTEHRRDLVNLHTSQVQLLTHWLKLVFPQILTLFNDVSAPLVCDFLQRWPRLSVLRKVKPATLLKFFHQHNCRSEERNQDRIEQLGRAVVATSDEALLRSADLMIATTIRVLTSLRQGIEAFDAEIKAVYAIHPDRAIIESLPGAGPALEPRLIAALGTDRTRFRTAQDLASFTGIAPVTESSGNSRWVHWRWSCPKFTRQTIHEWAACTVRLPGWAQDHYHRQRDKGNGHHAAVRRVAFKWLRILYRCWRDRTPYSEERYLAALRTRGVTPSTPSKSVQKAPSVQLKSCGDFSRPATVSY

SEQ ID NO: 140422 - protein, 360 aa, unidentified
MAKARSLVGLDVHAAKIVAAVLDAETGELTFFGFSGETEKAAAFCAGLPRPVRVAYEAGPTGYGLARELAKRGVECVVAAPSKIPRGSGDRVKTDRRDAELIVRMLMAGKLHAVRVPGAEEEALRDLVRAREAVRVDLMRCRHRLSKLLLRHGIRFEDGDAWTDRHRQWLATVELEWPAAQATLLDCRGAIDQLAHRRDGLERQIIAIVPDSPWREQVGLLRCLRGIDTLSAVGLCAEVGDFERFARAEQLMSYLGLVPSESTTGQQRRLGSITKTGSGHARRLLVEAAWHYRPRPNLGKALTERQADQPPAAVAVSWTAQKRLHRTWQRLEQRGKRRTIIAVAAARELAGFCWAITQIE

SEQ ID NO: 140423 - protein, 341 aa, unidentified
MKSTTIAVDVAKEVLEVAVSVRPGQVSEQKRLSRAAFMKFCTDQPPATVLLEACGSAHYWGRRLQSLGHRVVLLPPHATRPYVFRNKTDRTDTRGLLEAFRNEDIHPVPVKSVSQQALTALHRLRSTWLATRTARLNTVRGLLREFGCTIPVGAHHVLAKTWDLLADPESGLPDALRPGLAAACTEIRDLEGRIRVVEDQLQALADQTPAVARLRSIPGVGLITATALVAFVGDVQRFPSGRHFASYLGLTPRERSSGLVRRLGAISKRGDVYLRMLLIHGARAVLWAAKKRPTPDRLRAWALHLQTLRGHNKAAVALANKLARIVWAVWKHDVDFREEAA

SEQ ID NO: 140424 - protein, 383 aa, unidentified
MAEVADRGDGTFHVVADKRHNAAHHAVAINRSGKRLFDKALPNDENKLRSLISDLKQHGQILLVVDQPATIGALPVAVARSEGVLVGYLPGLAMRRIADLHAGEAKTDARDAAIIAEAARTLPHALRTLKLADEQIAELSMLCGFDDDLAAQTTQASNRIRGLLTQIHPALERVLGPRLEHPAVLDLLQRYPSPEKLASLGEKKLAAQLCKLAPRLGKRLAADIAQALAEQTVVVPGTNAAAVVLPRLALQLITLRKQRDEVALEVEQRVLAHPLYPVLTSMPGVGVRTAARLLTEVACRAFASAAHLAAYAGLAPVTRRSGSSIRGEHPSRRGNKALKRALFLSAFAALSITDIKCQRCGSAWQKLCTALSGLLKNPSLTAK

SEQ ID NO: 140425 - protein, 335 aa, unidentified
MQSAKLVVGIDVGKEWLDVCYPNGKKEHVRNIKSRRTKVVKKAAALGAIVCFEATGPYEEPLADECLARNVRAVRLDAWGTRRFAESQGRIEKTDKIDCEMIRDYALSLKDEKLHFIKQRSDAQKRLKKGVRTRRNLKKARNIIANQFEDDLDPETAKHLRNALKSIDRNIKRIEEECAAAIASDERLKDLDRRFREVKGVGPCLSRTMLAECPDIGEFNDKSIAKMCGNAPISHESCTIKGKARPKRGRSELTKALYMAAVSASRNNHVLREFYQRLVANGKARKLALTAVARKIAVLLNTIAKYPDFKPAQDPKDIAKANRAKRGRGRPRTTA

SEQ ID NO: 140426 - protein, 359 aa, unidentified
MYFSGLDAHLRYVTVAVLDRLGGVALETTVPTREPDRLLAVLAPFRPLEVVVETCPFWPWIYDLLVPAGIGFHLAHAKALRAIATAPQKSDAVDARLLARMLLSGLIPEAYPRSADQRELLRLLRHRTALVRFRTRLAGRIHSQLHQQRLSLPREKLLRRATRAWLEATAWPRLTVEQRAIVTTHVELIDHLTPLIRALERRIAAAAAGDATAPLLATIPGIGPYRSLLLAAELVPISRFPRAEQLVSYAGLAPVTRSSGGHTHHGSIPPAANRWVRGALVSAIPSLVRYAPTSPVTVAYEQLKARLGWWVARVAAARKLARVVYVMLTRRTPWHGVPAAGDVRDEVQNSHVAPTTSFC

SEQ ID NO: 140427 - protein, 353 aa, unidentified
MSNIKYVGMDVHKAITVIVVLNERGQFESRAQVKTKAEPLGDFFRGLSGKVELVFEEGTHSAWLYQLLKPLVAAVTVCDPRYNKLIEDGNKSDDDDAQTLAQLLRLGAVKAVYKGDQQQQQLKELCRAYDNLVEDTTRSQNRLKALYRGRGIECDGHAIYGAESRTEWVAKLPDEATRFRATALLDQIAALTTLRKQAKQRLVAQARKHPDYALLMKLPGFGSVRVAQLLAIVGTPQRFRTKRQFWPYCGFAVTTRSSADYQIVGGQILKQRQKVSTRGLNRNHNPRLKQVFKSAALTALRYEPIRTYYERLVERGTRPELARLSLARKLAACALTIWQRRTEFDFKQAFAEH

SEQ ID NO: 140428 - protein, 333 aa, unidentified
MHYVGIDVSKRSLDVCLLAEGSKGSRKTKTLSNGQDSAQNLAKWLILQKCELSQTHVIMEATGIYHEYLACGLHQMGILTSVINPCRSREFAKAMGIFTKTDAVDAYVLAFYGCLKQPEAWTPPEEEVRKLRALLQHRDSLLNDKLRIDNRLNTLKTTEAVQEVMDSLSLVNQYLKSEVARIERLISSHIAQHPGLKRDLKLLMSVDGIGKQIGWNMLAVLRGNNFKSAEQLAAYLGVVPVERRSGTSVHGRARLSKIGSSNIRAKLYMGALTAISKNSHIKALYERLLAKGKMKMSALGAAMRKLVHLCYGVLHTQQPYDEKYKAKIINFSS

SEQ ID NO: 140429 - protein, 342 aa, unidentified
MEHYAGIDVSLECSSVCVVDANGKIVREAKVASEPQALIAWFGSLGFGLERIGLEAGPLSQWLFAAMREAGLAVELLETRHVRKAFEAMPVKSDRNDARGIAQLMRLGWFRPVHCKSMSAQETRSLLTARKLVQSKFHDVENSLRGILRGFGLKVGKTTGQKFAGRIEELVTGHPHLQMIAKALLAVRAVLRTEFAAFEKQTRRMVRSDMQARLLTSIPAVGPIVALTYASAIDDPARFKSSKQAGAHFGLTPKKHQSGETDYTGRISKIGDASVRTALYEAANVMLTKPVKGCSQLKSWAMRIKRRAGMSKAKVALARRLAVIMHRMLADGTPFNAAAAAA

SEQ ID NO: 140430 - protein, 376 aa, unidentified
MTKILFVGMDVHADTIAVAVAEQDGEVRSHGVIPNRIESIRKLVGKLAPVKRLRVCYEAGPTGYALYWQLAALGVACEVIAPSLIPRKPGERVKTDRRDAEKLARCHRAGELTAVWVPDADHEALRDLVRAREAAKKDQLRARHRLGKFLLRHAQRPPAGVKAWTKKYLEWVHAKVRFEQPALEATLADYLHEVEHAAERIVRLDKAIDEAVGQAPLEMRAVIEALQALRGVAQTTAATIVSELGSLSRFPSPKKLMSYAGLTPSEHSAAIAFQRGAITKSGNAHLRRVLVEAAWAYQHRPDVSGFLLRRQKKLALSDEVKRIAWKAQLRLSGRYRKLTARGKTKNETVTAVGRELLGFIWAIAVETEAHNEAIAA

SEQ ID NO: 140431 - protein, 349 aa, unidentified
MIWIGVDAHKRIHQAVAIDERGIVGERGIATAAQAWAELLAWARQWPERIWAVEGASYLGRGLAQDLAGGGERVREVSGRVTARRRAGMVRRGKSDRLDAHAVAVVLREEQDRLPRVFADDEETAWVQLWSRTQAELTKDMTRLVNRLHDLLLLCDPEYQTKLPALTTKAGIAAARTYVAPGTGTLARERERVIRQTAEQLALRDAQDRELRAPLERASRSTFRALRQIEGVGALISCAIVAEVGRPRAGFGEEQLAALAGVSPLEASSAGGPRHRLNRGGNRRLTMLFHQIVLTQARMYAPAQAYLARRRGEGRTAREARRALKRLIVRRVFHALSDRFAASLERVAA

SEQ ID NO: 140432 - protein, 343 aa, unidentified
MKLSRVGVDLAKNVFQLHGVDRHEKVVWKRRLSRAKWLPVLLEQVEPGCEIGMEACAGAHHWARELESRGYIVKLIPPQFVKPYVKSNKNDANDAEAICEAMSRPGMRFVTVKSVAQQDIQATHRIRSELMSQRTAKANQIRGLVAEYGLVAPRTLYALRAAIPDWLEDADNDLTDHFRSLLHGLWLDLVALDDRLRELDRAIEQLANSNPMTRRLQQLRGVGPMVATALIATVGDAGQYHKGRQMAASLGLTPRQCSSGDKQRLLGISKRGDVYLRTLLVHGARAVVSQAKHRDDRLSRWVTGIAQRRHPNVAAVALANKTARMAWAMLRNETDYDPDFTVS

SEQ ID NO: 140433 - protein, 391 aa, unidentified
MIYAGIDVAKDKHDCFITNSDGELLFKSFTIPNNREGFETLFQKIQSVSDDLTKVKVGLEATGHYSYNLLGFLLDKGLPTYVINPLHTNLYRKSLSLRKTKTDKVDAHTIASMIMSDVNLKSYSDTSYHNEELKSLTRYRFDKVKARAKLKSSVSRLVCILFPELEKLVPTLHMVSVYSLLSEFPSAHAIASAHLTRLTNLLSESSRGRYGKDTAICFRDAARSSIGSHIPAKSLELKHTIRLILELTSEIDEIEAEIKTIMDEINSPILTIPGISYKMGAMIIAEIGDFSRFDSPDKILAYAGMSPSIYQSGQLDNCYAHMEKRGSRYLRYALYNATKYVCHWDESFGTYLAKKRAEGKHYNVALSHATKKLVRTIYAMEKSGQAYTNAA

SEQ ID NO: 140434 - protein, 342 aa, unidentified
MEISTVGLDQAKRVFQVHGVDALGKVVLRRRLGRADVVRFFAALPPCVVGMEACGAAHHWARELRKVGHEARLMAPSYVKPYVKRGKKNDAADAEAICEAVQRPAMRFVAVKSEDQQGALMLHRARALLIRQRTMLVNALRGHLAEFGIVAPQGIRNVKMLVALVADEGESRIPDVARPALRALAGQIAALGEPLGKIEAALLAWHEANEASRRLATIPGVGPVVASAVAATVGDGRQFRSGRHFAAWLGLVPRQNSSGGKDKLGRISKMGDRYVRSLLVIGATARLRYARASGAVDAAWINRLLERRPARLVTVALANKMARTAWALMAHGGVYRPRPTAA

SEQ ID NO: 140435 - protein, 414 aa, unidentified
MEKERINIYHKRNTCFVGIDMHKDTHCAVVIDCWMNKLGEINFENRPSRYPAFVEDVRKICGTKEIVFGLEDTRGFGRNLAAYLVGRKFEVKHVNPAYTSAVRLANPIIYKDDSYDAYCVARVLRDMVDTLQDAKHEDIFWTIRQIVKRRDLIVKSNVMNKNQLHSQLAYSYPSYRKFFAIIDSKSALCFWENYPSPEYIWNTTPEEIYHTIKPVHQALKIQRIHEIISMIERDGDTRKDYQPERDFIVRNIVKDIRHNKELIAEIDDELRKLIPLTGYKLHTMPGIDLVTEAQIISEIGDINRFPDSDKLARFMGLAPVQFSSAGKGKDQRCRNGNRALNAIFHFLAIQMVAVSASGKPRHPVFREYFEQKVKEGKNKPQALVCVARRLVRIIYGMMKTKTEYRPYEKVDDKN

SEQ ID NO: 140436 - protein, 427 aa, unidentified
MKHDNAIKYQQFCQFKAEIRGSRDYLIVGIDVAKDKHHAFFGMATGRTLLRRLIFNNNREGFERLIERSRQLQLEQSLSKAVFVLEPTGNYHKPLAHWLTEHEEPVVLASNKSIADNRQSLDGRWDKNDNKDSANAADLASQGKCQYLEQPEDDIVELRTLLSLRKRLKKEAHRLRMQIRNGLVAKHFPEFDRLWGSCLIENLAIVRWCLDPQKITAMPFNDFVRLVTTRDRGQQQVKRLSSIYAVAGVSIGCPMGEAAGFEARQLADRLAAKGEQLDGVMKRIEQVCRRFVSYRHLRSIPGFGPYVAAVVLAVIGDPNRFRGRRQVIRLAGLDLNAKRSGKYSDTAVPVISKRGNADLRYALYQAAQIATYHDQRFRALFIRYLKGREKERGIKTKVRVKLSAKMLVIAWTLMKDNTDFDPSLLIV

SEQ ID NO: 140437 - protein, 460 aa, unidentified
MKHSTHEKNSHKHKNTLGFIDPTVAGIDIGDKVIHVAFPDSSGSAYVEEFETTTPALHEIARKLRNAGVVTAVMEATGVYWVPLYDILESLEFKPILVDAKSVKNVPGRKSDVADSQWIQTLYSSGLLRAAFRPPRERLKLRTYVRHRATIVKNKQQALLRIEKGLQLMNVKLSTAVSEIGGVSGMDIIRAIVKGERDPVKLATLRNHSCKKPEQIFIDALTGNYQEEYVFVVAQALEQFDFSNKQLEECDKKILSELETYPTVTASPPPKRDKDKNKSRKFSARRKPNRNDVFFDVRTILWQKSGRDFTALLGIEANSALTIFAELGGADVSSFENVKKFTSWLKLCPGNNISGGKRRKSKKQPCANYISQTLRMSSLSAKKSKTALGAHIRRISGRTDKPRGIKAGAHKLAQMLYYMCRDGWLYFERGEDYYEKAYADRCIKNLHKRAKDLGFKLVAA

SEQ ID NO: 140438 - protein, 388 aa, unidentified
MMADPSATPIEATTRPDAGRLFAALELGKSRWLVTVDAPGSDKLSRHAVAGGDGAALLDLLARLRTTAERRTGRPVEVLVIQEAGLDGFWLHRLLERNGISSHVVDPASIAVNRRHRRAKTDTIDGEMLLRTLMAWARGERRVCSMVRPPSPEEEDRRRLTRERATLLKERIQHTNRIKGLLYGQGIIDYDPLRKDRLARLDALETGDGRPLPERLKAEIRRELERVELVASQIAAVERERDALIEAPSEAAGPGTPAAALARLKGIGGELGALLWLEALFRRFDNRRQIAAYAGLAPSPWQSGGTEREQGISKSGNRRLRHAMVELAWFWLRHQPDSALSAWFRERVGPGRGRVRRIAIVALARKLLVALWRYTTQGVVPQGAAFKA

SEQ ID NO: 140439 - protein, 430 aa, unidentified
MNCNTQNAKIKSITEKTLIVGIDVGSETHYARAFDWRNIEFSKKPFAFSNDEAGFASFKAWLEDIKEKFGKTIVLPGMEPTGHYWFNLGKFLQDNEMKPVLVNPHHVKKSKELDDNNPTKNDRKDPKVIAGLVREGRYMIPYLPDGVYADLRTASNIRFQLQAELTRIQNRISRWFNIYFPEYKTVYGKPDAKSGMLILKAAPLPEDILTLGIDGVNQIWRDAKLRAVGKARAKTLIKAAEHSIGSKEGTMSARMEIRMLLEDYESQNMRLQEVMVLIEELVKEIPMAEKLLEIKGVGIRTVSGFLAEVGDISRFNNPKELQKLAGLALVENSSGKHKGKTTISRRGRKRLRYLLFEVAMSLVAKNPEFRELHNYYTTRRLNPLKKMQSLMAIAAKLIRVFYAMLTKGVDYDPKKMISDIKRPTVYLQAA

SEQ ID NO: 140440 - protein, 425 aa, unidentified
MEVIHPRCCGLDIHKESVVACVRLALGDKVIREVRTFETTTSGLLLLLAWLTELGCTHVAMEATGVYWKPVWNILSDGDFELVLANAAHIKNVPGRKTDISDAAWIADLLAHGLIRSSFVPEQEIQELRELLRTRKQLGRQQSSHIKRLQKTLESANVKLDSVITDIVGKSGRAIIQALIAGETDPVKLAALADRRIKASAQELREALRGRLTNHHRFLLHLHLQHIEFADAAIQDIDRNVTALISRMDQEVEAGQTRASFQSLISLLITIPGIDVLAARIVLSEIGPDMSRFPTAGHLLSWAGLCPRNDESAGKRRSNRLRKGSAWLKTLLVQCAWAARRKKGSYFNAQFYRLTGRRGPKKAACAVAASLLTTIYHMLKDGTQFADLGADHFDRRSKEVRVKRLVVQLAKLGFDARLTPLAQAA

SEQ ID NO: 140441 - protein, 429 aa, unidentified
MRTESTPGARGPVFCGVDTHADSHWLCVLDWRGRRVLSRRFPADAAGYEALAGAIAAAGEPACVAMEGTSSYGAGLTRHLASLGMPVREALSPAGTQRRRPGQGKCDESDAERAARAAMSGSKLGTPKSQDGWVDGVRCMLAARSGAVKARTSAINTARSLLTTAPEGLRSRFRGMAGPRLMEELPSVRAEGALGAALGALADLWAAARDAALDMERAIEASLEENCPALLAMYGCGPVSAAKLAVAAGDNPGRLRSEASFAAICGACPIPASSGKTVRHRLNRGGDRQANSALHEIARQRVMRDPETAEYAERARARGKSDREVMRCLKRYVAREAYRALMRPHEIRRPEDASGLVAARRAARVSQVRAASILGTSEKYISMLERGQRELKPIRRAYEAWVEAGLPLNWDRQAFEAERKMDSKKHLAK

SEQ ID NO: 140442 - protein, 375 aa, unidentified
MGDHSEAFVAFDTSKLRNAVAIADGGRAGEVRFLGEIENTGAATAKLVRKLAAKHQRLTFCYEAGPTGYGLYRLIKSLGHECIVVAPSLIPKRPGDRVKTNRRDALSLVKLLRAGELTAVWVPDRHHEAIRDLTRARGTAALDLRRKRQQMSAFLLRQGLHYPENRHTWTKAHMSWLASQKLAHAEQRLVFEEMMLAMRQAQERIERLEQAIRAAVPDWSLAEVVTALMAMRGMDLVSATTFLAEIGDLSRFQTPRELMAYLGLVPSEQSTGDKVIRGPITKAGNGRARRMLVECAWSYQHPPRVGKDKQEKVAAAPRAVREIAWKAQCRLHKRYRALIRRGKLKTVAITAVARECAGFIWAIGREITTAQGAAR

SEQ ID NO: 140443 - protein, 361 aa, unidentified
MKRHPQYFISKSPRRGSKIGTTIGIDLGDVWSHYCTINEEGEVIDRGRFRTNPSGVDKRFRDLEPIRIAMEVGIHSIWISEQIRDLGHEVIVANVRELRAISHSDRKSDAVDAEKLARYARLDPEILRPIAHRTVAQQETLTLIRARDVLVRLRTGAVNSVRGLAKPCGYRLPASSTLCFAKRCLAMMPSGLAVALSPLLHQIADMTVKIKEYDRAIKKLTETEFPETQALIKVYGVGNLTALTYVLTLGNKERFRRSRDVGCYLGLRPKRSQSGDSDPQLGITKAGNGYLRQLLVECANHVIGPHGKDSTLRRWGLSLGAHGGSHARRRAVVAVARKLAVLLHRIWITQEAYVPFHAATV

SEQ ID NO: 140444 - protein, 392 aa, unidentified
MIYVGIDIAKDKHDCFITNSDGEVLFKSFTISNNRDGFETLFQKIQSVSDDLTKVKVGLEATGHYSYNLLGYLLDKGLPTYVINPLHTNLYRKSLSLRKTKTDKVDARTIASMIMSDVNLKSYSDTSYHNEELKSLTRYRFDKVKERAKLKPSVSRLICILFPELEKLVPTLHMASVYALLSEFPSAHAAASAHLTRLINLLSQSSKNRYGKDTAVMFREAARNSIGSNMPTKSLELKHTIKLIQELTSEIDEIEAAIKQIMDEEIQSPILTIPGISYRMGAMIIAEIGDFCRFDSADKILAYAGMSPSTYQSGQLDNCYSHMEKRGSRYLRYALYNATKYVCHWDKSFGEYLAKKRSEGKHYNVAISHAAKKLVRLIFAMEKSRKAYLPTA

SEQ ID NO: 140445 - protein, 441 aa, unidentified
MHMVCVPADRVTPAPVEAAGPPANVRSFGANSCDLTAIADWLAECGVTTVAMESTGVYWVPLFELLESRGFEVWLVEPGQLSRCGARPKTDVLDVQWIQRLHSYGLLRASFRPPDSVMALRGYHRQRQMQIRYAGSHTQHMQKALEQMNVKLTEVVSDITGLTGQRIIAAILAGERNPAELARLRDPKCKNDATTIARALEGTWRPEHLFALRQAYELYRFHHQQIADCDTIIQAELAQLPNRAGDKSFTAKPRRCGRKPNDLGFDACEPLFQALGVDLTRIEGIEVGTALIILAEIGVDVSRFPTEKHFASWLGVCPRQQESNKTQKKRSPRKGKNRVAIALRMAAQSLGRTQSPLGLFYRRIKSRIGGKGAVTATAHKLACLVYRMLKYGTEYVQQSLQEYERKVRGQMERALQRKAAALGYQLIRTLAQAAEPVQAPT

SEQ ID NO: 140446 - protein, 351 aa, unidentified
MPRKSSVCTVTAIGIDMGKTTLHMVGLDSYGAIVLREKVSRGRIASRLANLPPCLIGIEAGMATHYVARELAALGHEVKQVPPAYAKPFRQGHKNDFRDALAVAEAVQRPTTRFVPPKSNEQLDLQALHRVRSRLVSQRTAVINQIRGFLLERGIIVRQGLRFLRQLLPDILAKRTDVLSPRMVRILSDLAGDWRQLDDRIETVTDEIETLAKADDSCRRVMTVPGIGPIISSAMVAAIGNGSAFSKGRDYSAWLGLVPKQMSTGDRTILGRISKRGNSYLRMLFIQAARVILLRPANWPKHGFGAWLVRAIQRLHPNVLAAALANKLARIAWTVLAQERSYEARVTKAEA

SEQ ID NO: 140447 - protein, 347 aa, unidentified
MSIFAGIDLHSNNAVCGIVDESGRRLERKKLANKLGAIDQFLRPHKERLKQVAIEATYNWYWLVDGLREEGYPVVLANPAAMHQYEGIKHTDDVSDAFFVAELLRLGVLPTAHICERKLRPFRDMLLRRMLLVHHRTSLLLSIKSLYARNTGQTLSQGGVKRLDEEDLPEMFKHPADQFIAGEQLKVVNQLNESIGLIEEAVEACADKLPCYERLKTLPGVGRILALTITMETADIGRFASAGNYASYCRCVGTERESNGKSKGQNNSKCGNKYLSWAFVEATHCARRSDPACRKFYDRKKTRTNTMVATKALACKLSKAAWHIMKNDQDYDAKRVFPFLKEKEASS

SEQ ID NO: 140448 - protein, 313 aa, unidentified
MPSPMDFGVDVAKDTLQIASAQSPTELSLSNRRSSISAWLAKLPRGSRLAMEATGRHHLLLAELAHAAGMIVYVLNPCDLRHYARAVGLRGKTDRVDARLIARYLLREQAELHPYVPPTPVQREIDQLLRRRATLVNTKTRLQLSLRGMASYAADLRRVLKRLEALIAKFDQRLRQLATHQADAQRRVESTLGIGPLLGVALTNTFERVPLHNGDAAVAFVGFDPRAKDSGQFKGRRRLSKRGPAELRRLLFNGARSASKTKLWHPLYERYRNRGLSATEATVILARKLLRIAFSIYRHGTTFDPARLRSCLT

SEQ ID NO: 140449 - protein, 405 aa, unidentified
MDDQSQWPVFAGVDWGGEHHQLCIVDRSGRRLTETRLRHDVAGLAELHRHLARHGARLPIAVERAEGLLVEQLQMAGHVVFPVSPRIAARARERYKVASVKDDRFDAFVLADTLRYEHQRWRPLAVPSPLLAEIKALTRDRDRLLETQQATEHQLRMILEAYHPAPARLFSSVDRQITLSFVLDYPTPAIASRVKTTRMDGFLARHHYTGRVPAQVLTERMRANLLSGAPGTVTGKSFSAQSFTRLLQLLNSQLADYDDAIAAAVAEHPDGLIFASFPGVGPVLTGVLLAEIGEDRTRFPEPAALLAEAGLAPVTRASGRSRSVRFRYAANTHLREAAMWWAFNSLKTSPWAASAFRQARDQHGQRYHRALRGLAARWMRILWRCWTDHTLYNPERHHSAHPVAA

SEQ ID NO: 140450 - protein, 341 aa, unidentified
MEVTRIGLDIAKNLFQVHGVNHHGKTTISKQLRRAELMAFFAQLPPCLIGIEACAGSHDWARRLKALGHDARLMAAQFVSPYRKGGKTGKNDKTDAEAICEAVGRPNMRFVPVKTVDQQALLSVHRVRDGAITERTALVNQIRGLLGEFGVVVPQGRERLQKALPSLLEDADNALPSLFRAVLAELAQHLRGVNERIDQYDRLVAAQAQAMPQARRLMHMPGIGPVSATAFVASVGDARDFASARQFAAWLGLTPRQYSSGGKSRLGGISKRGDGYLRRLLVHGARAVLRTAAGKEDRLSRWAAGIQARRGDNIAAVALAAKLARRVWAMLSKDQDFCPAV

SEQ ID NO: 140451 - protein, 435 aa, unidentified
MTTTNRLQVGIDFSQKKADLSLLFPDGQPLEPHVSFANSLPGYSLAKQLLLDTLDEYAFDSIDVSGEATGYFWLPFFLQLAADPDLAPHDLNLFLLNPRWVKWFKKCFAEDDKCDQRDPFYIAERTRTRRPSATWSPPDCLPLRFYTRLRFHLVQNLAREKCYFSAFLFLKASSYRRLKPFSDVFGATSRLVLTQYPSLDQLAALPVENLALHLQQLSGNHLPDAFDNARKLQQVARESFSLNDTLAVPVQRILDLTLEHIRFLEAQIDQVNGWIATELESYPVISQLATIPGIGPVFSSGIGAEIGGVQRFLQGQKWDRKRKRYRPRNLRDAEDAVAKIAGLWWPRADSGDFEAEDRRMAKSGNRYLRYYLIQGADRMRRHIPEYADYYARKYKEATKHHHKRALVLTARKSVGLIVGLLHRNEPYRSKEDRRT

SEQ ID NO: 140452 - protein, 342 aa, unidentified
MQVATIGLDIAKNVFQVHGIDAAERVVVRKQLRRRQVLEFFKALAPCLVGMEACATAHYWARKLMKLGHLVRLMPAKDVKAYVKRNKNDAADAEAICEAVRRPTMRFVQIKSTEQQGRLMLHRARDLLMRQRTQVINALRAHLAEFGIVAPQGRQGVKELLLIIASGEDERLPVDAHASLVVLAAEFTAMQTMIGSIEKRIMALHRLNEASRRLETIPGIGVAGATAIAATVPDPTVFRSGRDFAAWIGLVPREDSTGGKRRLGPISKRGDRYLRRILVVGAVAVLRYARQNPEKYPWLTQLLARKPFKVVAVALANKMARTAWALLAKGGTYRAPALVAAA

SEQ ID NO: 140453 - protein, 354 aa, unidentified
MNQSSTITAGLDLGDRYSHFCLLDTESGEVVEEGRISTNPKAFQRRFSGCEPMRVAIEAGTHSPWVSRLLKRCGHEVLVANARKLRLIYGEGRKNDRLDAENLARLARLDPRLLSPIEHRGEASQAHLAIIRSREALIEARAKLINHVRGTVKSFGSRLPRCSSPTFHKKVGAHVPESLRPALEPLLKTVASMTARIQEYDRELEVLAEESYPQTKLLRRVHGIGTLTALTFVLTLEDPSRFGTSRAVGAYVGLVPSKDQSGERDPQKLISKQGNGLLRKLLVGSAQRILGPFGEDSDLRRHGLKICERGGKNAKKRAAVAVARKLSVLLHRLWVTGEVYEPLYKSNRFEVKAA

SEQ ID NO: 140454 - protein, 366 aa, unidentified
MKKISTVQAFGNEIFREQKLTIGVDLGDRSSAYCVLNEAGEIVLEHKLPTTQEAMKQVFGSMPRCRMAMETGTHSPWVSRLLTALGHEVIVAHAQKVRLITKSRRKDDRLDARSLARLVRIDPELLGPVKHRSAQAQLHLTEIRARAVLVSARTALVNAARGLVKSYGERLPKCGTQQFSRETTSGLSAGLREALEPLLQEVESLNERIQEYDRRIEKMAKQTYPETTLLKQVKGVGDLIATAYVLTIEDPHRFRKSRDAGCFVGLQPGRRNSGESEPQMRISKEGDEYLRTLLVQGAHYILGPFGEDSDLRRWGKKLSARGGKNAKKRAVVAVARKLAVLLHRLWVSGEVYEPLRNSQKTMNAAA

SEQ ID NO: 140455 - protein, 314 aa, unidentified
MAKQRERIIVGIDTAKDELEFYRNDTEQGGAFANEPGEVDRFLETLPEETEIAIESTGRLHELLVLRALELGVLVYIISGFQLSRYRDAVGQRAKTDRSDARLLARFLEREGENLRPVTPRSSEEKRLWQLLRRRASIVHHRTALQQSLRETDAGFPTPNVLLDAFKHYIAVLEREALRLAKALGWREDLARLQSTPGVGPISALGLLLAFRHAPFRNADAYVAFMGLDVRVRDSGKMKGKRRLTKKGEPELRRLTFLAGRSGRRTHAPFKEYFDRMLERGYSKIAADVAVGRKIARIAFALLRDEKSFDTAGA

SEQ ID NO: 140456 - protein, 358 aa, unidentified
MKTQVREKMSYKGQPVYVGLDVHKKTWKVATCTMHTNPGPWTITIERPFVQKLKEHLDKHYPGADIVCGYEAGFCGYWIHDELNAVGLKTTVLHPADIPTTDKERDQKEDRSDARKIAKALKNGDVKGIYVPSAQAQWDRSLVRERYSIAKNSRRIKVQIKSHLALYGIEIPEEMEGRHWSRNFITWLEKVRDERQDGTLELQIGRLHLMRDLQLKADRDIRSLCRKERNKEVFMVLISVPGVGALTSMLLRTEIVDMKRFSSFRRLCSYTGFIPTKYSSSDKEAPGTITSRRNKHLRTALIESSWVAIKYDSELMLKYEEYRKRMNAQRAIVRIAKILLRRIRYVWMNMQPYKKAFA

SEQ ID NO: 140457 - protein, 347 aa, unidentified
MNYYAGIDVSLECSSVCVIDGSGKVIREGKVASEPEALIAWFGSLNLPLERIGIEAGPLSQWLYASLRKEGLAVELLETRHVKAALSAMLVKTDRNDARGISQLMRLGWFRPVHCKSVEAQEVRALLTARKLVQSKFYDLEMSLRGILRGFGLKVGRTTPRRFAGRVRELVAGHHSLEAIAEALLSVHEVLLCQLGGFEKRVREIARHDARVRLLMSTPGVGAIVGLTYVAAIDDPARFTSSKSVGAHFGLTPTKYQSGETDVTGRISKIGDASVRTALYEAAHIILTRSIKSSGLKSWAMKLAKRAGMKKAKVALARKLAVVLHRMLAEGRKFVAANASGCARAVV

SEQ ID NO: 140458 - protein, 416 aa, unidentified
MVDERQWYAGIDWASESHHALLTDGEGRKIGERVFKHGGEGLAEMAAWLMAISGAGEAAQILIAIEVPHGPVVETLIERGFRVHAINPKQMDRFRDRFTLAGAKDDSRDAEVMASALRTDPRCFRLLAVADPIVVELREWSRIAEDLGAERNRLTNRLREQLWRYFPAILQLEDDLGAEWLLDLWQTVPTPDKAVRIREGTIAKILKRNRIRRFDAAHVLDVLRQPPIQVAAGTIEAASAHLATLVARVRLVNQQLKQAHQRLDTLIARLIPTEEAEPGQRKQHDVEILASLPGVGRIVLATLLAEAFDALQRRDYAALRSLTGVAPVTKRSGKSCIVIRRQACHDRLANAMYHWARVAVQHDAKSRAKYAALRSRGHSHGRALRSVADRLLNVACAMLKSGTTFNPSLIAQKTSC

SEQ ID NO: 140459 - protein, 484 aa, unidentified
MPQGIVQREGEEMARAPRRQGGGQPRQRRSSRGRPAQLEQLNLNAAGIDVGATEHWVAVPADRDAQPVQRFGAFTADLYALAEWLRQCQIDTVVMESTGVYWIALFAVLEERGFDVKLVDAHYARQVPGRKTDVKDCQWLQELHTYGLLRGAFRPEDEVCVLRRYLRQRSMLVAMASRTVQHMQKALEQMNLKLTEVVSDITGKTGMTIIRAMLAGERAPQLLATYRDKRCKHDQATIAKALTGHWRAEHLFALQQAVEQYDFIAQQLRACDGHIEGCLQAFVPDVEIDAPQAPSARPWRSSRSNPLSFEVQAYLEAMTGVDLTQIDGIDSLTALKVLSEIGRDMTRWPTSKHFAAWLGLCPGNKLSGGKRYRMRSKPSANRAATALRLAAQGVANSHSALGAYYRRRRARLGAPKAITATAHKLARLVYSMLRYGTAYVDAGQQAYEHQYRDRVLTTLQRKATAFGYQLVHVEDIDGGVASML

SEQ ID NO: 140460 - protein, 351 aa, unidentified
MPQKTDAVVASTIGIDTGKNTLHLVGLDDQGTIVLREKLSRSRIVSRLANVPRCLIGIEAGMGTHYVARELIALGHDVRQVPPVYARPFRQTHKNDFRDAYAIAEAVRRPSTRCVPVKTDDQLDLQALHRVRSRLISERTAVINQIRGFLLERGIPIRQGLRFLRQQLPEILAKRIDVLSPRMIRIVEDLSGDWRRLDERIDCVTEEIEVLAHGTESCRQLMTVPGIGPIIASAMVAAIGNGVAFAKGRDFAAWLGLVPKQMSTGDRTILGRISKRGNRYLRMLFMQGARVILLRPANWAKHSFGPWLTAAAKRLHHNVLATALANKLARIAWTILTERRSYETRVIADAA

SEQ ID NO: 140461 - protein, 426 aa, unidentified
MARQRKGEKHMTKSRQWFAGVDWASSKHDVTLTDDSGKIIGRRIFEHSGTGLAQMADWLLRESGATAAAVHVAIETPHGPVVETLLERGFNVYSINPKQLDRFRDRFTVAGAKDDRRDADVLASSLRTDGKAFRILAPADPAIVELREWSRMADEHGRDLRRYVNRMRDQLQRYFPAFLALEGDDDAAWKLALLELASTPAMAACLPRAKIARLLKAHHVRCHDADAVRAILRAPGPAVSEATIAAARAHVVALLKSIRLAAAQLKEAHAQLDRLTAALAEPEESTSGQTVQRDAAILRSSPGIGRIILATLLTEAPQAVRERDYHALRCHGGIAPVTRQSGKRRYVVRRFACNRRLQNALYHWARKAIQEDPRSRAKYEALRARGHSWARALRGVADRLLYVACAMLKAGTLYDVNNGSEAIKPA

SEQ ID NO: 140462 - protein, 404 aa, unidentified
MKGPIVSIDVSKGKSDYQAFKEMNVKYTGSRSIKHTKEGFDEIVSLVREMEKKLETEVCVVYEATGVYHRVLKKVLEDNNIKQFIINPLLSAKTRKNDSLRSPKTDKLDPKSIAKTYYSHSLHNSHKPETIYHELRELSRYYEDILVHLRKDKVAFRAQLDVVFPGYDTLYDDLYGPVALAVIEKYPHPEMLQKKKINTVSKVIQSKTCHRQAMSDTMADKAIEYSKTIYSGCDKDDIEVLILQRFIKKLKEDMAEAERTIGEMIKLAQELPDFSIIKSIPGIGDNLAARIIAELGDMTRFKKKNELVSFAGLDPRISESGQNDGDHMHITKKGNKRLRCLLYLAVTCFIRLKRDDNSIKDFYIKKKQQSNPMCSKAAKTACASKLVRIIYSMCKTGELYQYNK

SEQ ID NO: 140463 - protein, 417 aa, unidentified
MKSARATLPEEPANGRTGGIDWARDDHAVSVVDARGREILRLTVEHSAAGLRQLCDTLARHRVEEVAIERPDGPMVDTLLDAGITVVVISPNQLKNLRGRYGSAGNKDDRFDAFVLADTLRTDRARLRPLTPDSPATAALRATCRARKDLIGHRVAVANQLREHLNRVFPGAVGLFADLDSPISLKFLRRFDSQDRADWLSTKRLAAWLASVGYCGRVDPAVLHARLTAAPRGATGDQGAAAAHITRALLATLDTLVEQIKALTEQITEQLDTHTDAHIFTRLPRSGTVRAARLLAEIGDCRARFPTPESLACLAGVAPSTRQSGKMRAVGFRWACDKQLRDAVCDFAGDSRRANVWASDLYNRAIARGHDHPHAVRILARAWLYIIWRCWHDGVAYDPTKHRALQALLQPHQQPAA

SEQ ID NO: 140464 - protein, 352 aa, unidentified
MSATTAQNAIAVVGIDIGKNSFHIVALDDRGAIVVRQKWSRGQIEARLANMPPCLIGMEACVGAHHLSRQLKAFGHDARLMPAKYVRPYSKGQKNDFRDAEAIAEAVQRPTMKFVTTKTADQLDLQALHRVRERLVSQRTGIINQIRAFLLERGIAVRQGQRFLRTELPRILATPPDVLSPRMARAIEGLAGDWRRLDQRIEELSSEIEELARRDPACDRLMSVPGIGPIISSAMVAAIGTGDGFSKGRDFAAWLGLVPKQISTGDRTILGSISKRGNRYLRVLFVQAAWVTLVKVSPNKWQGHGLKPWIEAAKKRLHHNVLAVALANKLARIAWSVLARGRGFEANKLQAA

SEQ ID NO: 140465 - protein, 311 aa, unidentified
MSEKALFVGIDVAKKRLDVAVNPSGETRTFPHDHKGLSALTTYVQSLAPALIVMEATGGYHKTVLSTLAAEGLPAVAVNPRQIRDFAKATGTLAKTDRIDALVIARFAEAVRPEVRPLRDEEAEKLQALITRRRQLIEMLTAEKNRLAMAPQWTRKDIRAVIQMLERQLKRIDDHLKDLIDQSPLWRQKDQILQSMPGVGPVLARTLLAELPELGTLNRRQVAALAGLAPFSRDSGQFRGRRMIWGGRAHIRTVLYMSAVAAARFNPVIRAFYQRLREAGKCFKVAITACMRKILITLNTMIKNNTCWKYA

SEQ ID NO: 140466 - protein, 342 aa, unidentified
MSRYLGVDLHRNCFTVCTQLETGRQFLRTLKLEALPRFVSRLRPDDEVAVEVTGNTRLFRDAVAPHVARVVVVNPSQFHVIRKSVKKTDEHDARALALFLSKDMLPEVRMKDQEHAELASLSQTRDTLVKSRTALKNKVNNLLSARGVNLSKESLASEKGLQKVLGMYFGSTVDVELRVLVDQIRSLSQSIDELERAISEQGPKLPGYENLKSIKGIGDVGASVLLSVIGDVNDFDDEGKLAAYFGIVPRVSNSNETQHSGRITKQGSKLGRTVLIQCALIAKRYSDYLARYYERIKARRGTGKAIVALARKFLGIIYQTLKNDWVFEDFPNFILVDQETSA

SEQ ID NO: 140467 - protein, 353 aa, unidentified
MATALMIDVVAGVDTHSETHHVAVLDSVGRLLGTREFRAQPAGYVELASWVGSFGRVVVIGVEGTGSYGAGLTRCLRDHQIRVIEVNRPDRRTRRVRGKSDPIDAESAARRALSGVEKVVPKDTSTVVESIRVLRVARTGAVKSRTAAYNQLKDLIITAPEPLRSSLRGKSLHRVSQEVARLRPDSTQLAAPLQATKSALRSIAVRVGALNSEIAELDKHLKTLVAAAAPCTLALRGVGIEHAAQLLITAGGNPERLRSEAAFAALCAACPIPASSGKTSRHRLNPAGDRDANRTLYMITISRLRYCARTRAYVERRQADGLSKREAIRCVKRYIARQTFHTIRADLAAKANP

SEQ ID NO: 140468 - protein, 354 aa, unidentified
MNESTGFDFKGQSIYVGLDVHKKSWTMSIYDKSMHLKRLTMPPDPEKLCAYLKRMYPLVRYHVAYEAGYSGYWIHDQFKRMGVDCIVVHPGDVPTTDAERRNKTDVRDSMKLGKELQKGNLQGIQIPNMSRREDRGLIRQRRNVLKMLTRTKNQIKSMLAFHGILIPESYDKRFWSKSFFSWLHHVELTQVSGKETLSSLLRTYDFAWEQFVYLNSQIGQLSQSDRYKEEVDLLCSVPGIGKLGAMIWLTELGSMRSFSTFDALVSYIGLVPRERSSGETIRTGSLNRRGNSYLRTLLIEISWTAVRKDPALLLTYQGLTKRMTGQKAIIPIARKMLRRMRHVLLCREPYKIGH

SEQ ID NO: 140469 - protein, 343 aa, unidentified
MQTITTIGLDIAKSVFQVHGVDAAGEVVIRRQLKRRSVLAFFQKLPPCLVGIEACASSHHWSRELQALGHTVRLMPPAYVKPYVKRQKNDAADAEAICEAVTRANMRFVPTKTLEQQSCLMLHRTRHLLIRQQSAVINSIRAHLAEFGIVAPVGRKGVTELLHVVADPSDKRVPEVGRTCLAALGDQLLGLKRQILEFDRMIMAWHRSNQTSKRLHYIPGVGPMLATALVASVADPGAFRSGRNFSAWIGLVPKQHSSGGKDRLGSISKQGDRYLRSLFVARALAVIRYAKIHGTRHRPWLTALLGRRPTKVAAIALANKIARMAWAMMAKGERYKQPAALAA

SEQ ID NO: 140470 - protein, 420 aa, unidentified
MKVVYQTCCGVDVHKSFLVATIIKTTSGVEPSYQKKRFSTFNNSILQFKEWLVKNQCRDVCMESTGKYWVPVFNLLEDEINITIANPKWVKAVKGNKDDTKDSKWIGDLFRLGLVPGSYIPCKPIRILREFTRNRYKLTSCRTSEKNRYQNALTVCNVALDSVVSDIFGKSATSVIDYLIEQPDNSINHEEIASRLLRSLKRKSDSVIESIEGYQMTDSQKYRMCLIRAHLDYITSTINDIDTMLNSLIAPYENAVQLLCTIPGVDRNSAITVISEIGTDMTPFSNSKRLCCWAGLTPDNNESAGKKKSVRITRAGVYLKPALVQVAHAAVKSDKSPYYKQKYERIMKRRGKKRAIIAIARMILTAIYQMLSTGEAWNPTDLFKIDMPEPMKEKQKEKAIKQAMKLLIREGKISESQLAS

SEQ ID NO: 140471 - protein, 344 aa, unidentified
MDHFAGLDVSVKETSVCIVDDTGRIVREVKVASEPNALLPVLANPAYRFKRIGLEAGPLSQWLFSALAEAELPVVCVETRHMQAVLKAQINKTDRNDARGIAQMMRVGLYRPVHVKTLRSQKLRMLLTHRKLLQSKAIAIENDLRATLRNFGLKVGMVGTVRFEARIKELVENLPDLAALVEPLLVVRRVLREQIVILHRRLLAVVREDEVCRRLMTTPGVGPVVALTYRATVDVPARFRKSKAVGAVFGLTCAKYQSGEIDRSGRISRCGDEMMRVMLYEAAQSMLRSKKWSWLKAWAMQIARRRGMKKAIVALARRLAVILHRIWVDGTEFRWTREQATAAA

SEQ ID NO: 140472 - protein, 329 aa, unidentified
MQELSTQKCDWILGIDVAKAKFDIALLLPTGKFKSKVFENEASGFSKLDAWLGKQGVARMHACMEATGVYWEALAEHLVDAGHQVSVINPARIKAFGTSQGVRTKTDKVDARLIATFCQRISPAPWQAPPLPVRALRALVLRRQALDTMRTQECNRLQVAHPAVRDSIDTIIAGVNEQMAEVERKIRELIRHDPQLREQFKLLLSVPALGEKTIALLLSYFSEYQRFDKANQASAFVGLNVQHRQSGTSLNAKPRLSKIGHSAARRALYMPAVVAMSKTAWGQAFAARLRAAGKPPMVIIGALMRKLVHIAYGVLKSGKPFDPSLHRLT

SEQ ID NO: 140473 - protein, 393 aa, unidentified
MSLDHHFAEPTAIRTNLGAIFVSLELSRSTWLITSLSPGGGEKMSKHGLSAGNIAALLARLSELKQKAFARTGQSFQVIVIQEAGLDGFWIHRVLQSEGVESHVVDAASIAISRRRRRPKTDRVDGEALVRALLAYKRGEPRVCAMVRTPTPEEEDRRRLCRERKTLTNERVQHVNRIKGLLFCQGISGYEPLRRNRRQRLDELKTGGGRPLPPHLKAQITRELDRLELLLGQIEAVEIERDALLSAMKPDGMNADAVRSPPAMLINLNGIGPEIAAVLWSEGLYRSFANRKQVAAYAGLAPTPWQSGSVAREQGVSKAGNPRLRTTLLQLAWLWLRHQPQSALARWFHERVRRNGGRLRKSTIVALARKLLVALWKYVTAGVVIDGAVVRAA

SEQ ID NO: 140474 - protein, 416 aa, unidentified
MNAVGIDVSSRKSTVAVLRPLGEVVCLPFDVTHDIAGLASLVEKLKALDGETRVVMEHTGRYYEAVAKALHEAGFFVCAVNPLLIKEYGANSLRRVKTDKADAIKIARYALDNWADLRDFTPMDAIRYDLKTLNRQFQLASKQRTASANNLIALLEQSFPGIRKCFDSPVRSDGTQKWVDFAHSFWHVDCVRKQPFPAFCERYRKWCKLHAYFFKLRNAEKVYALAKSAVVLTPKSKVVKVLVQEAANQLISISRSVEVYRAEMDRLAAMLPEYPVVMAMYGVGKSYGPQLMAEIGDVRRFERKQALVAFAGIDPMPNQSGDKNVRSNKSSKRGSPYLRKTLFNVIRTYLQCAPQDEPVFQFLNRKRAEGKPFYVYMLAAANKFLRRYYAKLRDYFASLDTLQPVAPIPTILKATL

SEQ ID NO: 140475 - protein, 316 aa, unidentified
MSKPKRFVGIDVSKGSLDVAVRPDKTSWTASNDEEGISALADRLRELKPTLVVLEATGGLQIPLVAALGQAKLPVVVVNPRQVRDFAKATGRLAKTDAIDADVIAHFGEAVRPKVRPLKDAEAQELTDLLARRRQLVEMLTAEKNRLGTARKRVRKDIQAHIAWLEKRLKDVNADLSKSIKKTPAWQQKDEILQSTPGVGPVLSVTLLAGLPELGSLNRREVAHLVGVAPLNRDSGQYKGKRSVWGGRADVRSVLYMSTLAAVRCNPVIRAFYQRLTAVGKEHKVALTACMRKLLVILNTMVKTGAAWRCDYTPGS

SEQ ID NO: 140476 - protein, 342 aa, unidentified
MKYIGCDFHPSFQQIAMLDKETGEMVERRLLHTEEARAFYEGLQGPVIVGIEASGNTHWFESLLASCRQQLWIGDAAAIARQEGRKQKHDRRAAALILKLMLENRFPRIWVPTVEERELRQLLMHRHHLVRMRTQVKNQLQHIGLNQGWQKKRKLWSEAGLELLRNLKLGPWTQRRRDTLLEMLKDLEEKIRPLDQAVAKEAEQREAARRLATHPGVGPVIALATVLTMGEVNRFADSRRWVSYLGLNPSEHSSGQSRRLGSISKQGNPFLRQLLVEGAITATRGDKDLARTSARLKAKKHHGVAKVAVARKLAVRLYWIARTGKSYPEVVRMQGSQSHPRG

SEQ ID NO: 140477 - protein, 347 aa, unidentified
MKRIAVDLAKSVYQVAESVRSGQVVQRKRLNREAFRRYIQEQTEPVEWVMEACGTAHYWGRVAQSLGHRVKLIHARYVRPYRRRNKTDRNDCDAMLEAARCKDIYPVPVKPHEQQLLQQLHGLRETWKKSRTQRINLLRGILREAGIEAPASTAAFIRAAHALVDRPELAPLRHQLHIVLAEINLYEQCMAECEQQLKRWHADDEVVRKLDEVSGVGLLTASALTAAVGKPERFASGRQLSAWLGMTPNEYSSGERRRLGRISCKGNIYVRTLFIHGSRAALLAAQRCQARTPEKLTELQRWAVETAARIGHNKAAVALANKLVRICWAVWCHERRFNGNWQSTKPA

SEQ ID NO: 140478 - protein, 372 aa, unidentified
MKKDSKRKPRSPQGGASKRSQTGRTIGMDLGDKTSRYCVLNQVGEVVQEASVATTPTALVQLFGAAAASRVALEVGTHSPWVSRLLSRLGHEVIVANPRQLKLITESSRKNDKVDAKTLARLARIDPELLRPIRHRGEKAHMHLIQIRVRAGLVEVRTALVNTLRGLAKSMGDRVPQCDPDALDQTRLQELPPPLRTALEPLVEQIESLTDRIQECEGKLEQIARSEYPETTLLKQVFGVGTLIALTFVLTVEDRERFSKSREVGCYVGLRPRRSQSGQSDPQLRITKEGDRYLRQMLVQGAHRILSPRAPDTDLKRWGRKLCERGGRNAKKRAVVAVARKLAILLHRLWATGEVYEPLRNANLVPPEKRAA

SEQ ID NO: 140479 - protein, 314 aa, unidentified
MATDAAVFIGIDVSKEWVDVAVRCTGETWRVSQGQEGVDTLILQVQPLNPQCVVMEATGGYEMPLSTALAAAGIPVAVVNPRQVRDFARSQGRLAKTDRIDAAVIAHFGEVSGLTAQPLVPAAARELEALVSRRRQVIQMRTAELQHRQRTLPVIQHRIDRIVAALEEELHDLDSELTQRLRESPLWREREELLRSVPGIGSVTVFSLMADLPELGSLDRREAAAIVGVAPLNRDSGKFRGSRRGWGGRAHVRAALYMATLVGVRHNPVLRAFYERLVLAGKAKKVALTACMRKLITILNAMLKHHTTWNPQNA

SEQ ID NO: 140480 - protein, 410 aa, unidentified
MEVLHQRCAGLDVHKDTVVACVRLAEAGKVRHEVRTFPTMTRELLALADWLSGHGCTHVAMEATGVYWKPVWHILSDGEYELTLANAAHVKAVPGRKTDVNDATWLADLHAHGLIRGSFVPDAATQDLRGLLRTRKQLVREQVGHTQRLQKTLEDANIKLDSVISDVVGVSGRRMIEALVAGETDPAALAALAHRRLRASPEALCEALRGRVTKHHRFLLALHLRQIDALGDAIATIDREVEASLAPFRTAVRLLSTIPGISALSAQAIVAEIGQDMGRFPTAGNLVSWAGLCPRNDESAGKRRSTRLRQGAPWLKTALVQCAWAAVRNPASYLQAQFHRLRSRRGAKKAIIAVAASMLTAIFHMLTDGTDYHDLGHDHFDQRAKQQQTRRLVARLEHLGFTVNIEPLAT

SEQ ID NO: 140481 - protein, 351 aa, unidentified
MSRKTTSFEAVATIGIDIGKNTFHLIGLDKKGAIVLRQKLSRGQVNIRLANMRPCVIGMEACVGAHHLGRQLKTLGHDARLMPARYVRPYSKGQKNDFRDAEAIAEAVLRPTMKFVAIKTVEQLDLQGLHRIRERLVCQRTSVINQIRAFLLERGIAVRQGLRALRTEIPIVLAMTDKLSPRMIHMIEDLCTDWHHLDGHIETVSDEIETLSEQDDGAKRLMTVPGIGPIISTATVAAIGRGDVFSKGRDFGAWLGLVPRQMSTGGRTVLGPISKRGNRYLRMLFVQAARAVLLRPQSWEKHGLKSWIEAAARRLNRFKLAIALANKIARIAWGVLHGGRNLEVRPAPQAA

SEQ ID NO: 140482 - protein, 349 aa, unidentified
MKILGIDLGKYNSVACLFDTVSNEYLFFSFKSFPSEFKNLLTQSQPELVVMEACALAGWVNDLCQAEQIKTIVANTNDDAWSWKHVKRKTDKDDALKLTKLAALGLLAPVYIPPAESRQYRQLVKYRKRLVGRSTQIQNTIRALFNLQGIPIPIGKRAWSIAGLEALGKYRKPLAECDALSLWQGQLDIELTALDRLWEELDTVDTQLTAIAKKDNRVQLLESIPGVGRKTAEVIVAFIDDAKRFKTARQVSAYAGLVPRQDQSGETNRMGRITRRGPRLLRSTLVEAAWIMLQYNPWALALYERLCGGLKKRKKQAIIGVARKLLVLCWTLLRKQEKWDADKAMIPSH

SEQ ID NO: 140483 - protein, 350 aa, unidentified
MNVNHYIGFDVHKKTVSYCVKTADGKIVEEGKLRATHDALRQWAGKRQEPWRGAMEATLFSGWIYDTLQPFAGELQMGHPALMKAIAASKKKNDKLDARKIADMVRCDLLPVCYVAPPEIRELRRMLRYRNLVVGQATRLKNKMSGLLMEVGAEYNKERLHGKQYFTQLLDTVAEVPDSVKDLLRLSRGAMETFETTQQQLLARLRKDPRLARRVMLLESIRGVGEVTALTWALEVGDAHRFSSVAHAVSYCGLTSALVSSADKQQRGPLSKQRNAHLQTVLIEAAKLAPRWNPQLAALHARELARGNRNRATLAVARKLVAYLLAVDKSGQPFEVRNPLVAETEAQEVA

SEQ ID NO: 140484 - protein, 351 aa, unidentified
MMIIGVDYHPSFQAIAFLMEETGECGEQELNHSGGQAEKFYRELKQRGIRVRVGMEATGYSRWFERLLAELGFEVWMGDPAEIKAKRIKKQKTDRNDARLLRRLMLENNFPQIWVPSPENRDLRQLLWHRHRLVQMRTRIMNQLQALAMNEGYRWKKKLFSEQGRAQLEKLALAPWASRRRQELLELLDRMNPTIEELTTAVEQEAKKRPEVLRLMTHPGVGPLTALAYVLIIGTPTRFQRGKQIGTYVGMIPCEESSAHKQRLGHISKQGNSLLRFLLVEAAQAAARIHPEWRRRYLRLAVRRHQSIAKVAMGRRLGVRLYWMWRNGCEYSPSLEFGSYVGQLGTGHSVK

SEQ ID NO: 140485 - protein, 341 aa, unidentified
MKLIRVGIDLAKNVFQVHGVDRGEKVAWRRRLRREEWINVVRERAEPGCEIGMEACGGAHHWARELQKLGYRVKLIAPQFVKPYVKSNKNDAADAEAICEAMARPGMRFVPVKTVEQQDIQAIHRVRASLVEQRSAKANQIRGLVAEYGLVAPKELLHLRRALPRWLEDEGNGLTARFRWLLRGLRDELVALDERIAELDREIEQIAQSEPDAKRLMQLRGVGPIIATAMLATVGDARQFRNGRQMSASLGLTPKQFSSGGKERMLGISKRGDAYLRSLLIHGARAVIRTARPKNDPLSRWVIRLADRSHPNVAAAALANKTTRIAWAMLSRGTNYEAAVN

SEQ ID NO: 140486 - protein, 358 aa, unidentified
MSHITEVTLRVPAVTIGLDIGDRKSYLYAIDQAGQCVEERSVLTALDAITQEFAHRAPCRIVMEVGTHSPWLSMTLVQLGHEVFVANPSAMYGHQRRRKRNDRMDAEYLARLGRTDPTLLHAIRHRGAQAQKHLATLRARDALVSSRTKLINHVRGSLKSAGVRVRKCSAEAFTRRAREVIPADLAEALLPILATCDELTRQIRRYDARIVQLLETHYAQEGQRLQQVAGVGPVTALAVLLLIDDPHRFADSRDVAAYFGLVPRLDESSAQQPQLRITKSGDKLGRRLLVSAAQYILGPFGPDCDLRRFGEALMQRGGKNAKKRAVVAVARKLAVLLHVLWIHDRDYDPTRLSRQRAA

SEQ ID NO: 140487 - protein, 357 aa, unidentified
MGRVSTKDTEALSGKTVYIGIDVHKENWHVTVRTDGEEIFNGRIPGNYHSLQKILERFTGCQIRVAYEAGPFGFWLYDKLTEDGIETIVVPPSLMPVESGNRVKTDKRDSKKLARLLESNMLKKVYVLTEEERIHRELIRTRRQLVEHRGSVARQIKSKLLFHGISSPFPNRFGWGRKYIQWLKDLNLPSNYLRESLDTLICLYEYLTGEIKKIIKRIVELSDIEKYKRRIKLIRSVPGIGLITGMEILVELQNVERFKTSEEIASYIGLTPSEYSTGEHVHQGRITRCGNARVRTALIESSWILVSRDPFMRLKYMKLKSFKGSKRAIVAIARKLIIRIRSMLLHSTPYRIGNQEA

SEQ ID NO: 140488 - protein, 340 aa, unidentified
MEQYAGIDVSLDSASVCIVDAQGKILKEAKVACEPEALIAWFAAHGTPMARIGLEAGPLSQWLFAEMKAAGLAVELLETRHVRAAFKAMPVKTDRTDARGIAQLMRLGWFRPVHCKSLPAQEIRALLTTRKLLQAKRHDVEMSLRGVLRGFGLKVGPTTPKTFEGRVRDLVAQHDTLQTIADALLKARAVLEQEFKALEKRLSALARSNAPTRQLMTTPGVGAIVALTFASAIDDPARFRSSRMVGAHFGLTPRKHQSGETDVTGRISRIGDQGVRVALYEAANVILTRAVKGSDLKSWALGVAKRAGLRKAKVALARKLAVVLHRMLADGTTFMASTAA

SEQ ID NO: 140489 - protein, 461 aa, unidentified
MSKKRPAVKQKGSAQGKVDWKALDIVHPDAAGIDVGGGEHWVAISPDRDPEPVRRFGCFTADLREMARWLVEKGVRSVAMQSTGVYWMPVFEVLEQHGLEVYLVNAQHTKNVPGRKSDVQECQWLLKLHAFGLLNNSFQPTDEIRIARTLWRHRGNLVAEASSAIQRMQKALIEMNVQLSSVLSDISGVSGMSMIGAILDGERDPWALAALVQSGVTATTEDIAKSLEGNWREELLFVLRQEVELYRIYQEKIDDCDLQLRKHLESFGSVVDLKTQPIGPKPKGKRGSRNAPQFDLRTELYRITGIDWAQVNGIDVLTAQTVIAECGADLSAFASEKNFASWLGLCPTNEQSGGRILKRRTRKVVNRAATALRNAATTLLRSESYLGAQYRRLRTRLGAPKAITAMARKLACLFYRLIKHGQQYVDKGNEYYETKYREQQIRSLSKRAQKLGLQLVIPKPA

SEQ ID NO: 140490 - protein, 345 aa, unidentified
MEHFAGLDVSVKETSVCIVDDTGKIVREVKVASEPDVLLPVLTNPAYRFKRIGLEAGPLSQWLFSALAEAGLPAICVETRHMRAALKAQINKTDRNDARGIAQMMRAGLYRPVHVKTLRSQKLRVLLIHRKLLQSKAIAVENDLRATLRNFGLKVGVVGTVKFEARIKELVENLFDLAVLVEPLLIVRRAIREQIGILHRRLLAIVRDDDVCRRLMTIPGVGPVVALTYRATVDVPARFRNSKAVGAVFGLTPSKYQSGEIDRTGAISRCGDEMMRAMLYEAAHILLVRTTKWSWLRAWAMTIARRRGLKKAIVALARRLAVIMHRIWVDGTEFRWTREQAAAAA

SEQ ID NO: 140491 - protein, 340 aa, unidentified
MQVTTIGVDLAKNVFQVHGIAENDVVLFNKPLRRAQFLPFFAKLDPCLIGMVSCSSAHHWARELTALGHEVRLIPPMYVKPYVKRGKSDAIDAEAICEAVTRPTMRFVAIKTVEQQALLSLHRARDLLVRQRTQLINGLRGLVAEFGIYIPRGLARVIGFAEDITLGEVLDLPDIANEVIRNLSEQLMALHKRIRWYEERLKQVAKEDARVRLLRTIPGVGAVTASAIIASIGDGHQFRNGREFAAWLGLTPANKSSGGKEKLGRITKMGDQYLRSLLVVGMTSLVRQTRSHPERASKWLTSLLERKPARVATVAMANKTARIVWAVLTRDEPYSPRAAV

SEQ ID NO: 140492 - protein, 319 aa, unidentified
MRRCREVFVGIDTAKARNAAAIAEAGRQGEVRYLGEFDNTPDAVAKLVRKLSDRYETLQFCYEAGPTGYGLYRQILAMGHGCTVVAPSLIPRRPGERVKTNRRDALSLARLLRAAELTAVWVPDETHEAVRDLVRTRAMAVEDYRRKRQHISAFLLRHGRVYEGGTTWKGRHLRWLDGQNFAHAAQRFAFQEMLNAMRAAVERIDRLDAALVEIVPAWTMAPVVAAFQAMRGVGFLTATAVVAEAGDLRRFEHPRQLMAFLGLVPSERSTGDTRRQGGITKTGNSSARKALVEAAWTYRHSAGVGTTVFRRGKRTPLEG

SEQ ID NO: 140493 - protein, 355 aa, unidentified
MKTEQKQSTKRKVCRVSYGSDISSENFVASCGVMYDDLQREVNNVKKFTNNNRGFEKFIAYTKKHLKNLNLADNAEVWFVMEASGVYYENLAYFLHKKELNVHVALANKVKNFTRTMENKSKNDELDSRAISLYGLEKQLIEWKPMSEEMKRLKELTRELISTKEMSAGIKNQLHARVSGHEINPQTIKRINQQIKFFETQIEKIKKDIEKVLDDNPDLKERTNKISSHLKGVGQQTVVTVISETNKFTDIRNRRQLTSYTGFDIIENQSGKRTGKTRISKKGNSAIRKALYLPAIVSIKYDKRMYDLYHRVCERHGWVSKKIGIVAVMRKLLHIIYALWKNGEVYDPNYCIIAE

SEQ ID NO: 140494 - protein, 316 aa, unidentified
MREPDVFVGIDVSKAQLDVALRPTDERWPVSNDEPGIAILVERLRTIQPALIVLEATGGLEVPVAGALAETGLPVVVVNPRHARDFAKATGRLAKTDPLDAQGLAHFAEAVRPAPRPLPDAQAQALSALLTRRRQLVQMLTAERRRLQSAPQRIRADIQAHITWLERRLARTDEDLAAAIRSSPLWRAKDEILQSMPGVGPVLSRTLVAEVPELGLLNRQEIAALIGVAPFNCDSGTLRGKRVVWGGRAHVRAVLYMSTLSAVRHNPVLKAFYERLRAAGKAAKVALTASMRKLLTILNAMVKHRTCWQAKTAWTS

SEQ ID NO: 140495 - protein, 419 aa, unidentified
MAKSNDSSIISVVHPVCCGIDVHKEKLSACLIKTEESGTEEVLIQEFQTFTDELIRLREWLIEHDCPVVAMESTGVYWQPVHNVIEGCFAVILVNARHVKKVPGRKTDISDSKWLAGLLRHGLLRGSFIPPREVREWRDLTRLRRKHTETLGDYKRRTQKLFESANIKIDSVASDLFGVTGRNLMKLLLSGKSKITESDVKKSMRGRIKNKEDELYRSAQGFFSEHHRFILSSLLQTVEMVENEIKRIDQRLRTLTSSHADLLERLQEVTGVAEVSSHAIVAEIGPTLETFPSSAAISSWAGVCPGNNESAGKRHSGRSPVHRNHLKTILVEVAWAAVKKKGSYYKEKFHRLKARRGSKRAIVAIAHKLLKCIYHIIKDGTRFKDLGEQFLTLRNKALALLQLKRKAHQLGYTLVPREQ

SEQ ID NO: 140496 - protein, 373 aa, unidentified
MSEIIVACRSFIGVDLHKTTVTLVAVGPDGVEIARLTINTKCREKIRAWLLALPRPSHLAVEAVGFVEWFIDCFRPCVDLIDIADATELSNRRGKRRKNDYRDALDVARRLARGECPCGYIADDELMQLRKLGRHWRQLSSVLARSKQFMKSILLAANLRGPKFDGASAQRWLLAHGRRLKPAQRRAFANFTRIVQLVELQRQPLRFAIIEASRSERFEAKTKLLQSVPGIGEIWSCIIVAEIGPFDRFPNADALEFWAGMTADLKESAGRTQSGKITKAGSRTLRWALCSAALTLCHSDAGQEAIRRRLIRKNGGIKAKANTAMGRRLLRILFAMDRDGKPYKPVGPSRRRNSAANKARAAKRARKNRKEAA

SEQ ID NO: 140497 - protein, 393 aa, unidentified
MICVGIDVAKDKHDCFILSSEGEVLADVFTIQNNAEGFDTLLQTIRRCARPEDKIKVGFEATGHYSYNILGFLLDCGLPTYVINPLHTNLYRKSLSLRKTKTDRVDARTIAAMLMSDVDLKSYTDTAYHNEELKSLTRYRFDKVRERAKLKQSVSRLVTILFPELEKLVPTLHTTSVYALLSEFPGAKQVAEAHLTHLKAVLYDASKGRYGRDMATTLREAARCSVGSVMPAKSLELRHTIRLIRELDTEIEDIEEAIQSIMDEMQSPITTIPGIGFRMGAMILAEIGDFSRFDSPDKILAYAGMSPSTYQSGQLSLSGAYSHMEKRGSRYLRYALYNATKYVCLWDPTFAAYLAKKRAEGKHYNVALSHAAKKLVRLIYALEKSGLPYNSAT

SEQ ID NO: 140498 - protein, 310 aa, unidentified
MKIAGVDVGKRRLDVSVHGVEGELSAANTVAGISEVITWLRAREVCRVGMEATGGYERLLRASLEAEGFEVVVHQPIEVRRFAQLRRRRAKTDRLDARLIAAATAQVEAVRAAQDPRLLALAQLLTAYEHVTDQAACTKTFLEQVADKTLIAELKVKIRAWETLKAKLAARLVQGIKAHADLLARFRLLISLPGVGPIVAATLVVRMPELGGMKRGQAASLIGVAPFARDSGQWQGVRFITGGRSRPRRMLYLAALQAKRWDPTFKAFADGLLGRGKPAKVAIVAVMRKLIETANLILARGQPWLKAAAA

SEQ ID NO: 140499 - protein, 450 aa, unidentified
MSKQGKAMGLPVINAHAAGVDIGARIQVAAVPPELCDAPVQTFQCFTADIERMADWLVSLGIRTVAMESTGVYWIPVYEILEDRGLEAVLANARECKAVPGRKSDVNDAQWLQRLHACGLLHASFRPTRDIAALRAYMRVRDRHLEYAAAHIQHMQKALTHMNLQLHHVVSDVTGVTGMKIIRAIVAGERDPDVLASMRDVRCRESVETIRAALVGNYQPEHVFALAQAVALHDSYQARIGDCDAQIERTLQLLVAEKATSPLEALGAPRSRTKQTNSLNFDVRPLLYQLIGIDLTQIHGIGPSVALELIAECGTDLSRWPTEKHFTSWLTLSPGCKISGGKVLSSHTRKSNNRVAARLRLVATSVARTETALGAFYRRLAARIGKAKALTATARKIAILFYRAMRFGMRHQDPGADQYERRYRERVVKQLHRRAAHFGFSLTPMEAGVS

SEQ ID NO: 140500 - protein, 336 aa, unidentified
MQVYGIDLSMEKFDVNYIDQDGNERKQEVKNRLNGISKFLATVSSDSVLCAENTGTYGDMLVFLSNQKGINISLVSGYTIKHSLGMIKGKSDPIDAGRIREYGERFYDKLIFKEYDREEMVELRSLYSLRSQLVKSRKILRTGEHSRLNVPMQSISVKEHVTNALAHLDAEIKEVEKEIEGIITSDRELNENYALSVSIKGIGPVITTELIIKTGNFKTIDTARKAASYAGVCPFPNESGKMVGKRKTSSFADRKLKALLYMGAKTAVKHNPEYSLYYQKKKLEGKPHYLIMNNVSNKILRTIYSVVKNKTPYSQDYLCLDPRELEKNNSSAKKVA

SEQ ID NO: 140501 - protein, 339 aa, unidentified
MVEVYAGLDISDRSTQVCVVDGSGAVMWAGSCATDPEVIAGTLKRHAPGLVRAILETGPLSAFLYHGLVERGVEVVCVCARHAKGVLSVKVNKSDPHDAEGLAQMARTGWFKAVRVKDEATHMDRARLKIREQLIGARRAMAGQLRGLLKLFGLRLGQVTTPGKRRERLTELFALKPELEPIFAPLIESLEALEAQIAASSKALAAQAAADPVARLLMTAPSVGPITALVFKTSIEDPDRFARGEDVGAFAGLAPRRDQSGLRDRMGHISKAGDPMLRSALYEAANNMLARLKRPCALQAWGQRLAETKGPKRARVAVARKLAILLHRLWQSQTEFRWA

SEQ ID NO: 140502 - protein, 353 aa, unidentified
MEYIAFDAHKHYTLASVARPDGQLVREQRIALERGALQHFLERCERGSPVAVETVGNWYWIVDEIEAAGCIPRLVHARKAKLMMGQINKTDKLDVRGLNQLQRTGTLPTVWIPPGQLRDQRDLPRTRIVLVRQRTQLKNRIHANLAKYALHDLEVSDLFGARGRALLRQRLELLPPCTAYTTQHLLEQVERLDHQLREFEQRIRTLFTPTPAIQRLLTLPGVGLTLAVLIALEVGDVARFHTAEKLAAYAGTTPRVHASGGKSRFGPSRPDVNRYLKWAFVEAANAICLNRRRAPRRHVTRLYERVARRKGHQKAIGALARHLAEATYWVLTKQEAYREPHTAAVSSTGDQRG

SEQ ID NO: 140503 - protein, 335 aa, unidentified
MVKENFIYVGIDLHKETHTAVMIDCYNQKLGEITFPNRPAAFPKLVTKVKKCNTDGKEVVYGLENAYGYGRALAVWLIDKGYLVKDVNTAISHRQAKHRGAMYRKSDSDDAEAIALATLNMLDKLPDAYPNDAYWSLGQLVHRRDNIMKQRTRLVNQLHEQLCIAYPSYKQFFNDISRPTALYFWEHYPSRKYLKGKSVEDLRTELVPVSHNRCSTKNCEKILDAVASDKVKNNAYQDARDMVTLSIVSDLQHYDSQLAEVDKMLEQMYKMLGCTLTTIPGVNVITAVKILAEIGDIKRFSNANKLAQFAGIAPLHLSSSGKGKDVATKQGNRRL

SEQ ID NO: 140504 - protein, 347 aa, unidentified
MKIIGCDFHPSYQQIAMLDRDTGEVLEFRLEHEKGEARRFYERLQGPVRVGMEAVGNSQWFEQLLAALGQELWIGDAGEIRRLEVRRQKTDRRDAQHILDLLLDGRFPRLWVPSGEVRDVRQLLRHRQKLVEWRTQVKNQLQHLALNQGVRRKGKLWSKEGRAVLEQLPLQGWTARRRAELLGMLDRLEEQVKELDTAVRGEAERRPEVRLLMTHPGVGPVVGLAYALTIGPPERFPRGKQVASYLGLIPRENSSGGRQRLGAISKQGNTMMRTLLVEAAQNAARFDEQLRRDYRRLAARKHKALAQVMVARKLAVRLYWMLREQRPYAPPSVARMQGGSSHSVVEG

SEQ ID NO: 140505 - protein, 409 aa, unidentified
MIFVGDDWAEAHHDICVIDEAGKKLAKRRVPEGLDGVNQFHALVAAHATDPAEVVVGIETDRGLFVQALIAAGYQVYAINPLAASRYRERHTTSGAKSDPGDALVLAELVRTDRHNHRPVAGDSELARAVKVLARAHQNLIWVRQRQLNTLRSTLREYYPAALEAFGDDLGSRDALAVLGRAPTPALGKGLSAAKVASAIRAAGRQRNVETRAGEIREHLRGAHHLEAPAALAKAYGATVKASVGILTEMNAQLAALEEELKSSFEAHPDAEIILSHPGLGFVLGARVLAEFGDDRTRYVDAKARKSYAGTAPITKASGKSKVVLARFVRNRRLTDACYLWAFSALSASPGARAFYDAHRAARGPNDKDAHSKALRALANRLVGILHGCLRHRTSYDEAKAWHGEEAAA

SEQ ID NO: 140506 - protein, 359 aa, unidentified
MMTAPVAGIDPHQDSYTIGVVDPNGVELAHATFSTSAAGYLDGIDLLSAHGVERVGIEGSAGWGAHAAIALVAAGFDCREVPAQRSAAQRRARRLDKTDVVDAVASARALLAEPTLGPVQTLEVYDPLVAKIEAVLEHRRMLVSVRTLVLHHVQDQITKLPVEIRDQLTTDGKIEGRLRRLEQIDTSVVSTIAGAYRLSWLIPLVEQDRAARRQIRQLERDLDTLLDEHGTTLRDEPGIGSIAAATLVVEVGDPFRFVRESKFARWCGTGAIALSSGEGAGLPLKHRLDFRGNRRINSVLYITSVTQQRDIADAQAYIDRKLGEGKTRREARRAHKRHLANRVIRRMWHDEEHRRRDPN

SEQ ID NO: 140507 - protein, 343 aa, unidentified
MTKNTMIGVDLAKNVFQLHAASMTGQLQYRKKLSRQSFSKFMAEQPPAVLVMEACGSAHYWAREMIRLGHEVKLIAPHYVKPFVKRQKNDAADAEAIVTAAQRPEMRFVEPKTAEQQGRAILFRARERLVRQRTELVNALRACLYEYGHAVPQGIHQIKRIAEILDAHSSDLPDLMREECAELLDQIAEQTTRINARTAKIKTLAGEADTARRLQTIPGVGPLTALAVEAFAPPMENFRCGRDFAAWLGLVPRQFSSGGKERLGRISKAGQSDIRKLLIIGAMSRLNWLGRKSIPESSWLARMVARKPRMLVAIALANKMARTIWALMTKNEDYRVPAQAVAA

SEQ ID NO: 140508 - protein, 414 aa, unidentified
MTEITVTRFVGIDLHKHFVVVAAVDAQQNVLLRPTRRITLDDFPTWAAQHLSSRDAVVLEATGNAWWCYDQVAPLTGRAIVANPLQVKWIAAAAVKTDKHDAVKLAKLLAANLIPAVWVPPQPVRELRALLAHRHALVKQQTAAKNRLHSVLHRHNLTPPEGDLFAAHNRDWWATLDVSPTEWLRAQHDVATLDHLQQQLTDVETELGRLSMGAPWREHVPYLIQLPGLALLTAMTILAAIGDITRFPSAKQLVGYAGLGAGIHASGESQHEGHITKQGRRDLRRVLIEAAWSAVNTHPYWKGEFARLCRHKPQGVAIVAIARKLLVAVWHVLSERAADNHAEPAMVASKLMRWSWQLTPEQRGGLTSRQFIRYGLLHLQLGEELRGFTYGGQPRAIAPPAEILALFPELQAPA

SEQ ID NO: 140509 - protein, 470 aa, unidentified
MSSAIGIDPDSTGLVCALVDSQSPRVTTKGFLVTEEGLKDFLCWVRQHGEALVVLEGSHGQSRPIEKALRDAAIVFYSFKPADADKFRKAVLGQNKDNERDAESVARYALALESQGRLERHKKVWFPDMDLQLLTRRWGSLSEQITAEVNRLWKLLRYASADLYLALGGKNPHSDCGEHKALKNQGILTLLISVPDIGLWKTLSEEQIFQAMGGDNYKGRRQLIQELRPVMPSFPSLSHPMATLLKASALQIQRLREEQQDLKRALEDLSPARADIQKLLGIRGIGVTTAATMSAELIDIRRFSREDSLACYSGLGMNEHSTGQTLRMVPTHQFNRRLKDAFMTAALNFVLYNPDSHLAGYHKNLIKRGMSRLQANKRVARALVRVIYRLLVGVATTNTGTQAEEDLKRGESEVASGTSRSGRSHKSNTSLSAPKRSKAKKPTEVKVAESKITPVTKARRPRRKTLKKIA

SEQ ID NO: 140510 - protein, 337 aa, unidentified
MEEARTVTGAQSPHHKEGMTMTETTPIYVGIDVSAERLDVATTAKDKVWSLRYDDDGLRKIRAHLRRLKPQRIIVEASGKLERPFVAMLVADGLPVVVVNPRQVRDFAKAMGILAKSDHLDARVLARFGHATKPELRPLADEARQALAETVTRRRQLVEMIGMERNRTARTTPDVREQIERHIRWLETQLHEVDEDLHRTLQASPHWQETNDLLQSVPGIGPTTAAALIAYLPELGTLTHKQIAALVGVAPFCRDSGTLRGRRTVWGGRSAVRRALYMATLVAVRHNARLRTFYERLIATGKAKKVALLAALRKLLVILNAMLKHRTPWREDLPATT

SEQ ID NO: 140511 - protein, 366 aa, unidentified
MKKSSKKQSEKTMADGVVAIGIDLSDRTGKFYAIDDEGKMIAEGTIALRTPELEKWAMSIGRTVIAIEAGTHSPWISRLLARCGHEVIVANPVKVALITQNVHKTDPVDAEYLARLARFDRELLFPIQHRGEQAQIDLQVIRTRDIAVKMRSTAISHVRGAVKSLGGRLSKCSTDAFVNTARKEVPEALKTALDPMFDQIDQLTKTIDGYKRKIEKLVEQRYPEVERVAQIKGVGALTGLAYILVLEDAKRFADSRSVGAYLGLTSKKDQSGDSDPQRGITKAGDRLLRRLLVQSAHYIQGPFGVDSDLRRHGEKIAARGGKRAKKRATIAVARKLSVLMHRLWVSGETYEPLRNSTEIADATKAA

SEQ ID NO: 140512 - protein, 330 aa, unidentified
MRKGMEAGIDVSKDVLDVALRRDDGSLETARFDNEPAGHRTLVRWLTKRSRPVRVVLESTGTYSLDVALALHQARGVAVMVANPRAIKQFAGALMQRSKTDLTAAAALREYAARMPFVEWQPPAGEVLTLRGIARRIAALVVERTRERNRLHALQATGERVAVVVNDIEVNMRHLDRRIELLTAEAVTLIREHAELHRAFELLTSVPGIATHSAVQLLPELLVLPDDMTVRQWVAHAGLDPRAFQSGTSVDKPARISKVGNAHIRRVLFMPALVAVQHDLHVKAFFDKLVARGKKPIQAYVAVMRKLLHAIYGMFATQTTFVPEKFHAAA

SEQ ID NO: 140513 - protein, 421 aa, unidentified
MEETAESAELVERVAALDIGKAALTACIRVPHEDKPGRRCQEVREYATTTRALLELADRLRCQGVTLVVMEATSSYWKPPYYLLEAEGFECWLLNARHVKNVPGRPKTDKLDSVWLAKVAERGMCMPSLVHPKPIRQLRDLTRYRRTLIRERAREKQRLEKILEDAQIKLSAVVSDLFGVSGRAMIEALIAGERSPWALARLARGTLRNKTRILEEALTGHFDGHHAFLCQMMLERIDGLSAQIQTLDAKVEQAIAPFARQVTQLDEIAGVGPTSAQELIAEIGADMSRFPTAGHLVSWAKFAPIENSSAGTKKGGSTGKGNPWIGGTLGEIVIGASRTHTFLAERYQRLARRRGKKRAIVATGNTVLTIAYHLLCDPAARYTDLGPGFYDSKAGRERHARNLIRQLEHLTGKKVALNEAA

SEQ ID NO: 140514 - protein, 348 aa, unidentified
MVAVMIGVDPHKGSHTAVAIGTAEEPLGELRVRACGAQAERLLAWAAAWPERTWAVEGAAGLGHLLAQQLLAAGERVLDVQPKLGARVRLLAAGSVNKNDPNDARSVAVAALRCASRREVAADDHAAVLKVWSKRYRDLGRARTQVACRLHAVLCELIPGGVSKRISAAHAAHLLEGVTPSGAVVAARCELAAEFLADLRRVDAQMREAKKKLATAVRASGTTVTEVFGAGPVVAATVIGDVRDVSRFADRDHFAAYNGTAPIEVSSGRRKIYRLSRRGNRRLNHAIHMAAVTQISHRHSPGRAYYERKLGEGKTPKEALRSLKRRLSDTIFAQLQADARRAAAGTRR

SEQ ID NO: 140515 - protein, 387 aa, unidentified
MQKPHDNSKASPAAFVQDNTLIAVIELSLSNWLVAGLIPGVSREPLKKLEPNPEDLLKLLHGWRDEAIKAGRPITRIAVAYETGRDSFWLARWLRERGIDAHVIHATSVTVSREHRRAKTDRLDTAMLKRGFLGWLRGERGHCTVAIVPTMEEEDAKRPHREREGLVHEQTRAVNRMKSALIQYGVRNFNPKLRKASVKLETVRTPEGKSLPPNTIAALRRDMERLKIIKEQIKAIEQARLQQFEQKPEALVNRMVYLLVRIYGLGLETADLLAHELLSRKLRDRKAVARYAGLTGSPDESGSKRREKGLSRSGNARVRKIMIQLAWRMVKFQPDSALVQWFKQRTESAKGSRKPMIVALARKLIIALWRYANDGVIPEGFRLHSAA

SEQ ID NO: 140516 - protein, 350 aa, unidentified
MLYLGIDQHRKQLTVNLRDEAGEVLLRRQVSTAWLRVRAFLAELRDQAAAEGGYLAMLEVCGFNDWLLRELQQHGCREIVLVQPTGRSRKKTDRRDASLLSEQLWINRHRLLGGRAVHGLRRVTLPSDQDRQDRQLTAVRHRLVQSRTKTINKVQHLLLKHNLQQECPTKGIQAKRARRWLAQLPLDEIDRMELDLLLAQWTLWDEQLAEIDAQIARRQPAHPTAALVATMPGAGAAGSLALAARIGPIERFPTPGSLANYWGLTPACRNSGDATARLGSITKQGSSLARFYLSQIVLHVLRYDSAMKAWYRRIKNRRGSKIARVAVMRRLATILWQMVRHARPYAIGGV

SEQ ID NO: 140517 - protein, 338 aa, unidentified
MNYYAGIDVSLEALSVCVIDATGKIFRETKVASEPEALIGWLGSLGVSLMRIGLEAGPLSQWLYAAMRQAGLTVELLETRHVRNAFKIMPVKTDRKDARGIAELMRLGWFRPVHCKSMEAQETRAILTSRKLVQKMLHETEMSLRGVLRNFGLKVGEVAAGQFEFRIRELVEGHPTLTAIAASLLATRATLRREFNALEKRLRAIARTDTRARLLMSTPGVGMIVALTYASAIDDPSRFKSSKIVGAHFGMTPSRYQSGETDRSGRISKIGDSSVRAVLYEAAHVILTKPVKGCTTLKSWAMRIAKRAGMNKAKVALARKLAVIMHRMLADGTTFQPA

SEQ ID NO: 140518 - protein, 285 aa, unidentified
MKQYSKYVGMDVHKERITVAVAQANRKAPLYYGEIENTSEAIAKVVKRIAGQEETAFCYEAGPCWYRLYGQITAMGHRCEVAAPSLLPKKSGTRVKTDRRDALALAGLYRAGELTPVWVPDKEQEAMRDMTRAREDMKMMERHSRQRLGGFLLRHGKVYPGRSKWTQGHFRWLEGIRFETASQQIVFQEYVDMVKHTQGRVTAMQEEMRKALDGYTLKEVVEGLMALRGIDLIAAMTIVGELGDISRFTSPRQLMAHLGLVPSEHSSGGKRRQGGITKTGNSHVR

SEQ ID NO: 140519 - protein, 415 aa, unidentified
MSILTVSQTEMRAQVIQKLDAPGILIVGIDAGKGRHVGCVATSEGRILQKRLVFQGDAEGLASMEHALKRWGHLTSYVAAMEPTGGYTACVDQYLRDRGVTVVYVHPLKVKSNRRTLDLSENKSDDRDTVNIVDLVRQKKFYLPVERDAANRLLLAVVKRHADLTKRRTQLVARLRLILEEHFPELERAFADVPCPSLLAILKRKAHPEAIQRQSLSAYKKQFAGLRGLTAERVETIYRLAHASVGCRGMEALFNEKLDAWMQTWTAFEAQEQETRKRMEELGQAHPAYPLLNTIPGVGLMTITTYLAHLPDPSCFRYASRVVKFFGLDVVERSSGNWNPTQRHISKRGSPIMRKALYNAALACLQHNPVLRAYYDRLLNKGKRPKVVLVALMGKLARLLFAIHRDGTTWNPNSE

SEQ ID NO: 140520 - protein, 339 aa, unidentified
MKCRIIGIDLAKSVFQVCGVNQYLKPLFNKKLARRDFIAFMSEQPPTQVVMEACYSSHYWARELTKLGHTVRLIPAQHVTPFVRGNKNDHNDALAIVEASQRPYIRFVPIKSEAQQEVMALHRIRERLIKNKTALTNQAHGLLSDFGIIFNQGERCFTVMAHIVATSSEVSENIKSLVASQHEEFLELKAKLKVIEKKLKQNLNNFPQAKILLSIPGIGYIIASSFIASIDKGQAFKSAKDFAVWLGITPRQYASGSNSYMGKITKRGNRYLRKQLIHGARAVLNIYKNDKDALKAWGVAVAHRRGFNKAVVAIAHKIARIAWHLLQKNETYQPQSIKA

SEQ ID NO: 140521 - protein, 377 aa, unidentified
MKRIKFVGLDVHAETIAVAVAEQGGEVRSLGVIPNREESIRKLVKKLGPVEQLRFCYEAGPTGYVVYWQLTALGAKCEVVAPTLVPVKSGDRVKTDRRDALKLARNYRAGELTAVWVPDAAHEALRDLVRAREAAKKDQLRARHRLSKFLLRHGRRPPTGVKLWTLNYLTWVKQEVHFEQLAQEATLLDYLYEVEHAAARIARLDLAIEEAVKLTPPKMRAVIEALQALRGVAQVTAVTIVAEVGEVSRFPRARQLMGYGGIVASEHSSGESNWRGGITKTGNAHLRRVVVEAAWAYRHRPYVGETLRKRQEVVSEEIREIAWKAQHRLHTRYRKLLARGKEKGKVVTAIGRELLGFIWAIGVEAEAAQRKTERRAA

SEQ ID NO: 140522 - protein, 424 aa, unidentified
MKVTFQTCCGVDVHKSFLVATIIKTTGGIEPSYQKRRFSTFNNSILEFKKWLLENECLYVCMESTGKYWIPVFNLLEDEINVTIANPKWVKAVKGNKDDTKDSKWIGDLFRLGLVRGSYIPCKKIRILREFTRYRYKLVSCRSSEKNRYQNALTVCNVALDSVVSDVFGKSSTSIIDYLLEQSGTSIDHEVIASKLLKRLKAKEDAVIESIEGYQMTDSQKYRMHLVRAHMDYITAAINDVDSEIESLIASDPDYENAVELLCTIPGVKYDSAITIISEIGIDMSQFCSSKRLCCWAGLTPGSNESAGKKKSVRITRAGVYLKPALVQCAHAAVKSDKSPYYKKKYESLVKRRGKKRAIIAIARMILTAIYQMLSTGEQWNPSDLYKIDMPVALVEKQKAKAIKQAKKLLQREGLLPPDESLAS

SEQ ID NO: 140523 - protein, 445 aa, unidentified
MKKQEKIRNSVKENRIFNGLTIANPNSAGVDIGSRYHWVAVAPHLAPNHIRKFSTFTADLDEICKWLKECKVESVCMESTSIYWIPLFDLLEKSGFEVFLCNATQAKNLPGRQKTDNHDCAWIQKLHSYSLLTNSFIPKLAIRDFRNLMRYRENLTQDQSRYVQRMQKLLTQMNILLPKVLSDITGKTGISIIKAILSGETNPEQLLKLKNHRVKASDETFLKALQGNYDTSLIKLLHFELKQYESSNTLISEVDDEIESTLSEMHVSDPNKKSEITKISERDRLIALTGVDLTEVPGFDLLSIRKLISETGLDMSKWKDSSHFSSWLRLSPHSKISGEKKLSSSTLRHKPRAAIIFRMCANTLRRSKSHLGDFLRRKTAQKHYGKAVTATARKLAVIYYNMLKHKTPYNELDENYYAIHYKERSIRRLGNYAKSLGYSIVKNDE

SEQ ID NO: 140524 - protein, 451 aa, unidentified
MVQKKRRRRDALEVRNPNAAGIDIGSRQHWVAVAAHRDPQPVRWFGTTTTELVRLADWLASCGVTTIAMESTAVYWVPLYEVLEERGFEVFLVNASYARNVSGRKSDVKDCQWIQQLHTYGLLRASFRPSAPIAELRSYMRHRDMLVASAARHIQHMQKALLLMNVQVHHAVTDITGVTGMAIVRAIVAGERDPAVLATHRDPRCHATAEQVADALRGNYRPEHLFALEQALRLYDTYLELIAECDSRMDAVLQALAQRCSPPPEPAPPPKRRGRPRGSLPTFEIRQPLHRLCGGADITQLDGIAPHTALQLLSEVGTDPSRWPTAKHFTSWLNLAPPTKITGGKPLRAQRPARKNRAGEILRMAAVSVGRTASALGAFYRRIAASRGKGKAVVATARKLAVIIYHLLRGAPFRPTSLAAHDERYRDHVLRRLRNRAKSLGFDLTPLPAET

SEQ ID NO: 140525 - protein, 446 aa, unidentified
MSRKKHTHLRGERGQAFADKIRGVPLEQILCVSLDIHKYFHVVMIHNALGEIVTTTFEIDIFQAGFDRLCQAIDEAVARTNVQVVLVGMEPTGHYFENLARHLHHDQRSPQPVTLINSFAVSRNRDQQMMHREKDDEIDVAAIGDLLRRGEGTPFQPVRGLYLEMQHLSRVRLSKVKMQTALKNQILGHLDRIFPGLVIQGKVARERYEPLFVANFWSCQTLQHLIRVCPDPRQLATMAPQDLRTAFHEQGFALGPKTAARIITYTQKVLLPDPEVVAIRCELLARDLALLAQVEQLIAELEDRLHALLQQTPYWVWTQVRGLSMTQVASLAAAIGDPSHYTHAAQVFRRSGLVSGRNDSGTRRHKGKGKRVVKTGDVYLRRALMTAIMSLIRHQPTLQDYFNELHRTKHAGVARVATARRAMGILWAMQRDQHSRTLVLKRGTEM

SEQ ID NO: 140526 - protein, 413 aa, unidentified
MEVYAERVAGIDIGKAELKVCVRVPGRRAGTFRHEVRTFATTTRSLLRLQDWLVEQQVSVVGMESTGQYWRGVYYLLETLFTCWLINPQHIKKVPGRKSDVTDAMWIAQLVQFGLVRASFVPPPPIRRLRDLTRLRTSLVRDRTRHVQRIQDVLEDAAIKLSIVATDIMGVSGRSMITALIDGERDPELLADMALGKLRAKTEALTDALTGRFEDHHGLQCRILLRQIDALDADIARLDEEIDTQIAPFHDLRDLLDTIPGVARRAAEVLIAETGADMTRFAGPADLSSWAGMCPGNNESAGKRGNTRTRKGNTWLRGALGEAALAAARTKNTYLGERHRQLARRRGPKKATVATGRHILEIAYWIMVRGVPYQDLGPDYRRTRVRDPRRRAEQLTRQLLALGYKVEIMPPAA

SEQ ID NO: 140527 - protein, 346 aa, unidentified
MEIDKVGIDLGKSVFHLAGLSVTGETVVRKKFSRLQLLRFMANLRVRVIGMEACGGAHFLGRALREQGHDVRLMPAQYVKPYVKTNKNDYIDAEAIAEAVDRPRMRYVPIKSEEQLDMQSLHRVRERWVKGRTALVNQIRGLLLERGITIRKGRRHAEAALPMLIEDAENNLSGPLRLLLTQLMSELRRLECQITEIDATISSGADEQEACKRLMTIPGIGPLTATAIVSAIGNGAEFPKARSFSAWLGLVPGEYSTGGKQKLLGISKRGNGYLRKLLVHGARAILQRRQKQSSGLGAWLEQLVARAHPNIATIALANKMARMAWALLIRGETYRPPLLTQQVVVV

SEQ ID NO: 140528 - protein, 297 aa, unidentified
MAQSRTRYVGMDVHKASIAVAYGAQDYGAEGISLGTVGTRQCDIDTRIRPLQAKSQPLVFVYEAGPCGYWLYRSLTTTGHGCRGVAPSLIPKKSGARVKTDRRDALQVARLMRSGDLTPVYVPAVHDEAMRDLSRAREATRHDRKTATFRLNALLLRHDRRSTGRATWGPAHLRWLREVVGPTPAQHIVFPEEVRAVTAHPDRRQRLAQERHAQGTAWRRGPVVDAVPALRGVQLTVAVTPVAARGALPRFEPPRQRMHDRGLTPSESSRGERRRQGGLTKTGHTPARRALVEGAWA

SEQ ID NO: 140529 - protein, 371 aa, unidentified
MKESSKPLYVGLDVHKDSIAVAYAPEDRGGEVLSLGAIGTRQSDIDKLIRKLQSKGAPPVFVYEAGPCGYWLYRYLTRIGLVCHVVAPSLIPRKAGDRVKTDRRDAITLARLMRSGDLSSIYVPGIEDEARRDLSRGRDDAMQDLKRSKRRLKSFLLRQDIRYEGRANWNAAHLRWLAEVVCPTPPQQIVFQEYVRAVTEQQERLQRLERELHEAVKGWRLYPVVEAIQALRGVELTGAVILMAELGDLTRFDTPRQLMSYLGLTPSEYSSGARRRQGGITKAGNSHARRALVEGAWAYRYPAKVSRHLQLRLEKLPAEVQAIGWKAQVRLCKRYRQLTARGKHVNQVVVAIAREMAAFAWAIARIVPLAA

SEQ ID NO: 140530 - protein, 421 aa, unidentified
MTNGTRQEFAAFIGLDWADAQHDVCLQVAGSDKREGKTLAHRPEVIEAWVTDVRQRFEGQPITIALERNKGPIVEALRQYDGLVLFHMNPLMLVRYRQAFTPSRAKDDPTDAELQLELLLRHRDKRKPLVPQSPAMRALAQLVEHRRRLVGERVRITHRLTRTLKTYFPHVLQWFPNKDTILFCDFLRQWPTLKAAQLARPRTLDSFCHQHHVRDKQRIHECLAAIKSAVPLTTDEGVMMPNALMVQALLAQLRLLLEAIERFDHAIAARAQRHPDYALCDALPGAGPAFAPRLLVAFGAQRERYGAAEEMQQYAGIAPVLERSGKHSWVHWRWQCPKFLRQTFVEWATGSIRFSGWARAYYEQQRDKGASHQAAVRALAFTWIRIVFRCWQAGVPYNESVYIAALQRRGSALISHLAPSS

SEQ ID NO: 140531 - protein, 366 aa, unidentified
MNSMRQRGQIWLGLDVHKDSISAGILGEDDDVARRDRIGSDDDAVRRLIDRVGGPRAAIRSCYEAGPTGYELHRLLTGMGVHCEVIAPSLIPKAPGDRVKTDRRDAARLARLYRSGELTAIRVPTPAEEAVRDLCRARADVVDDVRRARQRLGKLLLRHGQVYRGRSAWTAAHHQWMAELRFAEPALMQTLRHYRAILDEREATLAAIEADLRPWLGREPFADQVRRLVCYRGIAEVAALTFATEICDWRRFPAAPAFMAFTGLTPSEHSSGESRRRGHITHAGNEHVRSQLVESAWAYRYPARIGADLKRRQAGATTDTVARSWAAQQRLCGRFRRLSDRKHVRTVVVTAVARELAGFLWAEMTA

SEQ ID NO: 140532 - protein, 327 aa, unidentified
MYKNTIYFGIDISKDVFDVMDANNNYYQFTNNQKGFKKFFKLLDASSHCVMEATAYYHLLLANFLFDSEIKVSVENPLSVKRFIQMKLSKIKTDKSDAKMICKYAEQVDLKLWKPNSKNIVECLQISRLLDVYTKQSTAIKNKIHGEKILGTPSAIVIKSLKKSLKNIQKQIMELEERLIYLVKLDFQQMLTLLETIPGIGRKTAAMLIVLTNGFDKFENANQLCSYCGLTPVIRQSGSSIKGKARISKVGNQKLRNLLFLCSFTACKHNLACENIYTRIVDKGKSKKLALIAVCNKLLKQSYAIAKSGLPYDANFQSKLNLKHAES

SEQ ID NO: 140533 - protein, 331 aa, unidentified
MKQKYFIGIDISKGKLDYAVILSDYKVVSENIIPNNVKSVKSFFKSFIKKHKTDFEQVLVCCESTGIYNGPLREVCADLNIGLWEEHALKIKRASTDMRGKSDRKDAMRIAEYLVRYLDKVILYKKPSNVLKTLDQLNKVRETLLGSKMTLQNQLKESKTFDPEGYKVLSKHYKQMIKQIDSQLKKIELEIQDQLNEHEDIKTNINLMKGVPGVGNQTALQIMIYTQNFTVFKSVKHLACYAGVVPFQNESGVVIKRARVSKMASKKLKTALHMAALAAVRTKTELKSYYIRKLAEGKNKMCVLNAVRNKILQRVWAVIERQSPFQLIEAF

SEQ ID NO: 140534 - protein, 337 aa, unidentified
MDYFAGLDISMEETHVCVVDRDGAVVHEAKTASTPEAIAASLAKAPTCRRVVFETGRMAPTLYHGLVAVGLPVVCIESRHAYQALKSLATHKTDRNDARGLAHLARTGFFKPVHVKSLPAHAMRSLIIARKKLVGQRVMLENQIRGLAVVFGVRLPRGLSPAFIKQALRASAGIAGLSAAVRGLIAARAAVLSAVAAIDADLKRLAKASEACRRLMTIPGVGHLTALAFTAAVDDPDRFRRSRDIGAYLGLVPRRYQSGEVDYTGSISKCGDRRVRTLLYEAANVMLTRYKGPLKLKEWALAIAARSTMRKARIALARRLAIIMHAMLQKGTEFKAA

SEQ ID NO: 140535 - protein, 384 aa, unidentified
MPDVSSNAPGVVRMRAALDVHKRTIVCASQPDDPRAGELRLQEIPNTERALRALIRRLGGAEGLVVCYEAGPCGYEPYRLLSEMGVACDIVAPALVPVAPGARVKTDRRDAKRLLVLHRAGALKFVHPPTPAQEGLRDLVRCREDLVCARRAARHRVAKQLLRHGHIFREGKKSWTKIHQAWLRRQRLADPLAQSALEHMLAHLDALDAQIAVLDHQLDKIAQREPWSDPVRWLSCFRGITTLTALALLAELGDFRRFGTARELMGFLGLTPSEYSSGEQRHRGHITLAGNTHARRLLIEAAWHYQHAPRASQRIAAVQPHVPPDVAARAHSAQVRLHHRHRSLTGRGKRSTVANVAVARELAGFIWAAMTRQPLRDPEVNAAA

SEQ ID NO: 140536 - protein, 459 aa, unidentified
MRQKGKRTKGIEQAHPFEGMSKVNPHAAGVDIGAEEIVVCVAPNETTQLVRGFGNYTVDLHTIAAWLAEHSVKTVAMESTGVYWIPLFEVLEQGGFECLLISSRSLRRVSGRKSDISDAQWIQTLHNYGLLESSFRPQADLVALRSLLRHRRSLVDHRSPHVLHMQKALLQMNIQLSQAVSDVTGVTGQAIIRAILSGVREPKMLAALREPGCKKSEEEIGKALTGTWREEHLFVLKQAVALYDFYTQQILECEQEIERLYSATRPDWDGGELQPLSRRKRNSHSKNQFYESEKIRGHLKRISGVDISLVDGFGVSLAQTVILECGTDMSKFPTDKHFCSWLGLAPKHEISGGKVLNNKTLKTKNRAGQAFRMVAQSVKQAECAFGVLYRRLRARLGPAQATVATAHSIARVVYRMLKYKVEYDPLSVNEYQKQYEEQQIKYMKKRAAKLGYQLMPVPA

SEQ ID NO: 140537 - protein, 480 aa, unidentified
MANPSKRRPDLRAVPTLLNESVYLGIDIGKNKHVAGFLSKTLLERHERFKAFMTLVFENSREGFRRLVERLRELAPLEHYFILLERTGHYHRPLMQYLQDLDLPVYVIHVQSRPAGMLKTDKRDALMLANTLYNQLELGVQVPNKMQLVRRLVPPTQAAAQLKGLIRHRYELVRESTQRKNKLTAICDELFPELVRVVKDPNAWVALALREQFPTPQALATASLTVLQQIRGGARSLSDLKLLELQRLAAESIGVKDLIRQRGLVLEQGQLIKELRLLREHIDQLESEIVTIVEQAREGQILMSFPGFGPITAATIIAAIGSIHNFPSASALKSYVGWAPVVAQSGSTLDVSYLTRGGTRTMKQIMFMAVMQVIRLRDNEWARLYERLVKARCPFDERTQSYTGKTRVIGRVAGQMIEAIYALLMRDAELLSRVPQGQEPPSPLLYDPEVHQRHRHGQYRPLKSTPPPNVITITHLSSPE

SEQ ID NO: 140538 - protein, 340 aa, unidentified
MSNANSYIGVDLHKKTCFITVMNEMGKIKRQTEIKNEKETICEFFKRYNDASVAVESTMNWMPFYENLENMGFNVVLSNPLQTKAIAAARIKNDKVDSRVLADLLRTNFLPTAYLQPREVRDLKELVRQRMNYVDMRTQIKNQIHSVLFKSGISHSFSNLYGKAGMEFLKKLELREVYRRQLDWHLTALGNISVQIKEMSEVIEKTAKADFDCRLLATIPGIGYFNALLIKSEIGDIARFANANKLCSYAGLIPSTYASADKVRHGRITKRGSKWLRKALVDSITSGCRHEGRLAYVYRKLKKSKGTGKARVATARKLCHIIFAMLTDKQPFREFAPVKQ

SEQ ID NO: 140539 - protein, 346 aa, unidentified
MSKISIIGIDLAKQVFQLHGNDSRGHKILGKQLKRDQLLPFLATQPICLVAMEACGGAHYWARQIKALGHEVKIIHPRYVKPFVQVHKNDQRDAQAIAEAAARPSMPSVAVKSVEQLDIQALHRVRERLVKEKTAIGNELRGLLLEMGITIAQGHKSLRETVPLILEDAERALSVRARHLIHDLREQWLERERRIADYDRELKLIAKENAVCEAIQSLPGIGLVNSTLLYSHAGDAAHFKSARQFGAYLGLTPRQHATGGVGKMLGISKQGSKHVRKQLVHDARAAYRVLVQPDNDSRLGRWVKRKSMEGKHVNKIVVALANKLARIVWAIMKTGQPYQPMRGLEA

SEQ ID NO: 140540 - protein, 372 aa, unidentified
MKKRSSSRQNPKPVAKAKRAQQPVTMGMDLGDKKSRYCVLSEEGEILREGQVATTKAGMTETFGALGRARIAIEVGTHSPWVSRLLRSFGHAVIGANPRQVKLITESSRKDDRLDAQTLARLARIDPQLLRPIQHRSEKAQMALMTIRVRAALMSARTSLVNAARGLAKALGERLPNCDADQMGVPQGESLPPNVQGVLEPLLKEVESLTEKIQDRDRKIEQIAREDYPETTLLQQVGGVGTLIALTFVLTVENKDRFQKSRDIGCYLGLRPKRSDSGQRQPQLRITQEGDPYLRTMLVQGAHYIISRRGPDTDLKRWGLRLAERGGKRGKKKAVVAVARKLGILLHRLWVTGEVYEPWRNQNLRKERKQAA

SEQ ID NO: 140541 - protein, 407 aa, unidentified
MDVIYPRCAGLDVHKQTVVACARIAGDGPVLQEVRTFATTTSGLLALADWLDSHGVQIVAMEATGVYWKPVWHVLDGHFELVLANAAHVKNVPGRKTDVNDAMWLADLLAHGLIRASFVPPVAVQELRTLTRTRKQFVRERTAHTQRIDKLLEDANLKLSVVLSDILGKSGRAVLQAIVDGQDDPERLAACVTTRVKASRTELLEALRGHVSAHQRFMLKLHLDHIDALDKAVAAIEEEVGLGLDTFRQAAKLLSTMPGLSAVGSNVVIAEIGIDMSRFATPGHLLSWACMCPRNDESAGKRRSTRLRRGGKWLKTTMVQAAWAAVKVKGSYLQAQFHRLRARRGAKKAIIGVAASMLTAAWHMLRNGTEWHELGAAHFDRADAHKTAIRLVRRLQQIGYAVQLTPA

SEQ ID NO: 140542 - protein, 416 aa, unidentified
MTKDIVYVGIDIAKVRNDVRVELPDGKVRKFKMLNRKEDFNNLARYLSSLGNDCQIGLEASGNYHRPLAYYLQKKGFKVYFVSSLALARTREAIHNSWDKNDPKDAQVMVHLLKTGIKQRYYDSFLNGFQDVEELSKTHYQVSLAKMKIQHSLLTHFLPLYFPEVEKYFCTTRAAWFSKVLYHFPSPHHIGKMGQDKFIEKAWDIVGRKVSKTEFLKDFYNTAKNSIGLPVDRDSYAMEMFRRTLKQHHDLCVKRQELEDMAHQKLKDDRVYQILRTVPGIGPILALTIISETGEFDRFKHHRQYLKFCGLDLSTSQSGQFRGQSRLSKRGNRRLRCAYWFASTVAVRMRENTFRKKYSRYIKNDPDNADLKRKAVVATAAKMARVCYGLIKSSEEYRPYYDEDIPSGEIRSLCIR

SEQ ID NO: 140543 - protein, 397 aa, unidentified
MYIVGIDIAKRKHEAAVIDGEGAVIIKPFSFTNNCSGYNRLLAMLTKAKLPLDEVSFAMEATGHYWLALFTRLQKEGFRVQVINPVQTNSIRSFYIRQAKTDPRDALLIAEVIRFGHFSESTLHPENIYELRELCRGRHAIVSMQADVKRKAVALLDQVFPEYETAFTNMFSDTSMAILQNCPTPKELSEMPLEELCHLIEVSSHKRFRMAKAQELQELARNSFGFAMAGDVFSTMIRLYAKHLDFLKQQVREMDRKIAEIMETLDTPITTITGIGPTLGAYILSEIGDINRFSSAAKLAAYAGIDPTMRQSGEYNGVRNRMSKRGSPYLRHAIWLAASSAVLHDPALKLYFQKKRDEGKPYMASVGHACRKMVSIIYAVMRDNKAYTPYIPNEISA

SEQ ID NO: 140544 - protein, 347 aa, unidentified
MLIIGCDFHSRFQQIALLDTETGEVVDKRLEHEGGEAKRFYEGLKGPALVGIETTGYTRWFAEMLAELGHELVVGEAGKIRAQDPRKQKHDRRDAEHILNLLVRGDFPRIWLPSASERDVRVLVEHRHQLVELRTRAQNGLQALALSYGLRRRQRLWSKAGQEELQKLPLREGAGRRREDLLQLVRQLNTWIKELDQRIEDEVARREDAQRLLTHPGVGPQTALTTVLVLGPVERFPDAKHVTSYLGLIPQEDSSAGRQRFGHLTKQGNRLMRFLLVEAAGIASRFDPGLRRMYRRLAFRKGAAVAKVAVARKLAIRLYVMLRDRIDYPEFCRRGSHAGMLAEVALA

SEQ ID NO: 140545 - protein, 418 aa, unidentified
MDQEDVIYERCAGIDVHKRMIVVCLRIGRKTELRTFGTLTHELREMSTWLKSNGCQMAAMESTGPYWKPLYNIFEIEELPAMVVNAQHMKAVPGRKTDMKDAQWIAKLLSQGLLKPSFIPDREQRDTRDLTRFRKSQIEERARNLNRLQKMLEGANIKLASLVSDIDGQSATKLLELILGKPDFTVDDVAQRRHKRMNASAEELFQSLEGIITPVQRELFKHVMQIIREQTKQIEQTDALIQKHMGEAYKQAAQALTAIPGIGKVSAQQIVAEIGYDMSRFPSAGHLCKWAGICPGNNESAGKRKSGKTSHANKALKSTLAQCAQSAKHNKSSFFSAQYQRLVVRRGKNRSTIAVAHSMLIAVYHVLQGAQFHDLGSDYYTQFNREKKINSYIKQLKTLGVNIPDDVLRSAIAEGVAA

SEQ ID NO: 140546 - protein, 452 aa, unidentified
MEQGNKGLSRGDRNRNARLAALRAMAPRDHAILGIDLAQSRQAAVLADHDSRVIARWRPRCSPWKLGELLERALRKALAAGFAGITVACEPTGHRWMVIAQLAAERGIPMVCVQPLVVARAREAEDYTRGKSDDRDAVLIARLASQLHCYLPEQAGQEWARLRHLGVRRSRLIESATACRQQLRDLLEVAWPAVLAAAADPMESATWLACLQAALARCDGDLAAVRALGQDAFTAQARAELGAFGARRVCRRIAAGVYAALGDGAGVAAQRPGALERAFRVLGDWSVTRAELGDVSARMLQSLDAMGLLEVAGSIPGVSAVQVAAILAEAGDPSRFATSRAMVKHAGLAPCENSSGNHAGETGISRRGRPALRLAAWRAVWGALRHNRVYAARHAELTGRAKDPLTDQQARAAIAAALIRQIHAIITRRVPWDADIAAGRRRPGQEVTAQAA

SEQ ID NO: 140547 - protein, 333 aa, unidentified
MSKIRFIGLDVHADTIAAAVAEPNGDIRPLGVIPNRLESLRKLVNKLGPVNQVKACYEAGPTGYVLYWQLSSLGVACEVVAPSLVPVKAGDRVKTDRRDAAKLARSYRAGDLTAVWVPDAAHEAVRDLVRAREDARQDQARARQRLGKFLLRHGWRPPEDVKKNWTQKHMDWIKRQVCFEQAASQAAFLDYVHEVEHAADRLERIEKAIDDAIVAAPPEVQQVVQAIQALRGVGKIVAVSVVAEVGSLSRFTNPRQLMAYAGMVSSEYSSGNHIQRGGITKTGNSHLRRVLVEAAWAYQHKPWIGGWLAKRQQGLDEETKAMAWKAQWRLCTR

SEQ ID NO: 140548 - protein, 455 aa, unidentified
MKANRVSALRSKRGLHRVNGAEPQVVGLTPQTTDNRKTDTMKTYILRQIKPVEPQKSIRTPRPKPVGPVLAVVPLGRPEPAVKGPSLFIGLDVHNDSLAVSLAPSDSTEVRRYGIIGGEHDDVLKLAHKLQAAHPGTLLKFCYEAGPRGFALCRCLQAHGWDCILVCPSKVPRKPGERVKTDRRDADDLARLYRAGELTGIYVPDPEDEAMRDLIRARFQVGKQQHRARQQLKMYLLRQNLRYGGQTSWSPAHLRYLAKIKMPFPVQQIVFQEMLEVISEATARLERYDQEIERAVPGWRWEPVVRALMSLRGMALLHAATLVAELGDFNRFEHPGQLMGYLGLVPSEHTTGKDRQQGGITKMGNAPARRALVEAAWQYRVPARLSPHLKKRQEGLPKAITDIAWEAQRRLHHRYLHLTRVGKKKSQVAVTAVARELAGFVWAIARQVKPKPVAG

SEQ ID NO: 140549 - protein, 314 aa, unidentified
MTENTSERFAGVDIAKHSLELHIEGQPVLHLTYDDAGIQEACSRFRAAAPTLIVMEATGGLETRLATELGALGLPVAVVNPRQVRDFAKASGRLAKTDRVDAQVLSAFARAIRPQARPLKEDEVRELDALVTRRRQLIGIRVQETLRLGTASRLQAKSLKEHIAWLDRRIARLDIDLTAKLRQSAAWRAKEDLLKSIPGVGQVTCTTLLAKCPELGQLNRREIASLVGLAPLSHDSGRHRGKRFVWGGRAEVRAVLYMATMSAMRSNPLIQSFAKRLKQAGKPAKVVIVACMRKLLTIMNAMIKHNAPWNPNLA

SEQ ID NO: 140550 - protein, 307 aa, unidentified
MNSYVGIDVSKDELVVHVLPAQQDRVFPNTAQGLAELVGWLVELGGCRVAFEASGGYERDLLDALHQAGVAAMRLPARRPRDLARALGLKAKTDALDARVLALAAQMLPATTTPPATAPVQELRGWLQLRTALVQERDNHRRRIQQVRQVSVQTFLRSVIDSLQQRIAEVEQQLRCALERYPVQIAAAPGLGPILRATLAARLPELGQLDRRQIASLIGLAPYNRDSGRWRGQRCIGGGRADVRRVLYMATWAAIRARSPLASTYQRLVAAGKPKKLAVTACMRKYLTMLNAMAHDQAPWAPATSTA

SEQ ID NO: 140551 - protein, 370 aa, unidentified
MKKNNTRLQSSKRRSKASESITIGMDLGDKTSRYCVLNGNGEVVGEAKIPTTKAGMARAFGAMKRCRIALEVGGQSGWVSRLLTGLGHEVIVANARQLKLISESSRKDDRLDAQMLARLARIDPQLLRPIRHRSEDVQRDLTKVRARATLLDARTGLVNAVRGFAKTFGERIPSCDPDNLTVDSAEGLPAAVQELVRPLLAQVQSLTGAIHKYDEEIEQIARGKYPETELLKQISGVGHLIALTFVLTVGDPARFDNSRDVGCYVGLRPKRSESGQNQPQLRITKEGDRYLRKMLVQGAHCILSRRGPDTDLKRWGQKLGTRGGKNAKKRAVVAVARKLGILLHHLWVTGEVYEPLRNTCVANRRTYQAA

SEQ ID NO: 140552 - protein, 412 aa, unidentified
MEVIYPCCCGLDVHKKSITACVLRAEAKGKSRKEKKRFGTFTHDLLQLADWLAERGVTHLAMESTGVYWKPVWNILAEQFEALLVNAQHIKAVPGRKTDQKDSEWIADLLQHGLLRGSFVPPQPIRELRDLTRYRVSLVQEINRIANRIQKVLEDANIKLASVATDALGASGRAMLEAMLAGEEDAARLAEMAQGKLRNKIPELQLALEGRMTEHHRFLLRQLFEHLRFTESKRSEIEQEIDKRMRPFQDKVTRLCTIPGVDRVTAWGMLAEIGMNMNQFPSSEHLASWACLCPGSFESAGKRLSGKMRKGNVSLRRCLAQAAWAISMMKNNYLSALYRRIAARRGAKRAVMAVAHALLVIAYHMLKRKEDYRELGADHFDRIDVNRIRRSLVRRLERLGHKVTLEPLAQTV

SEQ ID NO: 140553 - protein, 374 aa, unidentified
MKNFSTFIGMDVHKETIAVATAEKHGTALYYGEIANTTEAITKLVKKVVPARSKAVFCYEAGPCGYGIYRQITDMGYRCDVVAPSLIPKKAGDRVKTDRRDAVSLVRLLRANELTAVWVPDEQQEAMRDLTRMREDMKTMERRARQRLSGFLLRNKKVYAGDSKWTQAHFRWMEEVRFESPIQQIVFQEYVDVVRHLQGRVTAVEQEIMKALESWSMRLVVEALMALRGVSIVTAMTIVAEIGDISRFESPRQLMAYLGLVPSEDSSGNRQKRGGITKTGNGHVRRLLVEASWSYRLPARKTAHLQRKAEKTSEAVQAIAWKAQKRLCSRYWHLMQKGKLKVQACTAVARELAGFIWAIGREIMGKSNTAVTVA

SEQ ID NO: 140554 - protein, 340 aa, unidentified
MDTTTPTPYQLFLGIDVSKDTIDCWLRPRGEYSQWTNRDEGFQRLHRWLSSHNCPQQHTIICIENTGIYSERLLASLTRRGWKCALLKTTAAKNVAPEHHRKDDRFDARLLAEYGDRYADKLTLASPPQERVKRLHQLYAERQRVIAARSATQNRSQQATHAQVPSALLEEQWQQQLQLYKQQIEQLEDQIHQLITTHQGLNRYYQLLLSIPGIGNVTAWLWLTLFYGQQTLNHKKIASRFGFAPHGHRSGTSVRGRTRSSGHGNSQMRSCMTMVARSVSHHHERFARYKQRKLDEGKPWPVVRNNLINKMIKIICAIWNSGQPYQQDYESRFDRQKNAA

SEQ ID NO: 140555 - protein, 407 aa, unidentified
MELPAIFPCVVGLDVHQAKISACAMIEQPDGTLTVEHREFGAFKRDRRALAEWVRTLGPDLVVMESTGIYWKSPYAALEQVGIAAWVVNARHVKNVPGRKTDVADAQWLATLARAGLLRASFVPPADIRHLRLIARQRQKLSGMLASEKNRLHKLLADAGIRLNVLVSDIHGQAGRAMVKALIEGQPIPEILDLAGRLRASREELFEALQPEQLSDAHRFVLSEIMAHIEELEARMGRFEQTLLAGLAAWEPQLVLLQTLPGVDRIGAAMLLVEIGTDMASFASAEKLASWVGICPGNNESAGKRKSGKIRKGNAWVRRLLCEFAQAASRSRCGLKEKFKALSIRKGHKKAIVALAHKMLRIIFAMLKNHTPYQDQAVDYEALLVQRNAPRWIKMLLKHGFISPAST

SEQ ID NO: 140556 - protein, 345 aa, unidentified
MNKKGLHYVGLDVHKKTIRICVQNRMGDIIQEKTVASRPSDLLSWVKKEAPKKWIGALEATVFSPWVYDTLKPFSKELHMGHPKDLKRIGKHKSDKLDAITLCNLIRADYFPSCYVSPPEVRRLRNLLRYRATLVREMVRFKNKMACLLMAAGVSYNKRRLHGKQYFSQLIEREELPGELKELLRLKRLPIEFFHFQSKTALRKLEKHPGLLKRLEILKSIPGVGSITALSWILEIWDPFRFPNDKHAHSYCGLCGSRKESGGKEQNLPISKDRNAHIQWVLIEAAKIARNRSPRLQEIYDKVKKAKNANTATIAVARKLVTYLLAVDKSGKPFEEKGKFLAPGK

SEQ ID NO: 140557 - protein, 307 aa, unidentified
MFVGIDVSKDRLDVHIRPTGEVFAVARDGAALEQLVGKLRTIAPSLIVLEATGGFETVVAAALAAAGLPLAVVNPRQIRAFAKACGQLAKTDKLDAAVIAHFADAVQPPARGVPDEAARALAELLTRRRQLIGMMTAERNRRRQLTQPRLVRTVDQVLATLQLQLSAIDTDIDTAIRATPAWREKEELLTTAPAIGAKIARTLIADLPELGALTRRRITALVGVAPFNHDSGKRHGKRAIAGGRSSVRAALYMAVLVAIRRKLPLAATYQRLRAAGKPAKVAIVATMRKLLVILNAIMRDKTAWHGI

SEQ ID NO: 140558 - protein, 331 aa, unidentified
MNYSHFVGLDVGKKTFDASLMSAAEKELSHKSFDNTPEGIQSLLDWIAGYHLSLSKLLFCAENMGSYVTELSVSSVSMGFSLALVCPLTIKKSIGLQRGKNDRIDAKRIANYAVLHYRKLELYKLPNKDLVRLRGWIIIRDNLVKQKVSSIKLLETFSQMAKLADVTESISFLEEQLKSIKEKILEVEEDMEQLIAASTSLYTNYLLLRSIKGIGIINAIVLLCVTDNFQRFDNPRKFACYCGVAPFEHTSGISIRGKTQTSSLANKEVKVYLTRAAITAISWDPQMKAYYKRKIAEGKHKASVINAVRAKIIARSFAVIRRQTPFVTLTV

SEQ ID NO: 140559 - protein, 375 aa, unidentified
MKKNSSGCKSPKASMKATKSTNVTVGMDLGDKTSRYCMLDENGEVLREASVGTTKEAITQVFATMKPCRVAIEVGTHSPWVSRLLKSFGHEVIVANARQVQLISHSSRKNDRMDAQMLARLARVDPRLLRPIQHRSEQAQEHLRVIRVRAALVEARTMLVNAARGLTKATGERLPSCDADQMGVERMESLPAGLQNSLRPLLEEVESLTEQIQALDQQVEQIARTDYPETRLLRQVSGVGPLIALTFVLTVEDRERFQKSRDVGCYVGLRPRQSDSGESEPQLRITKEGDPYLRKLLVQGAHCIMGRRGPDTDLKRWGLKLSARGGKNAKKRAVVAVARKLAILLHRLWVTGEVYEPLRNSQAEPPVKETGKAAA

SEQ ID NO: 140560 - protein, 426 aa, unidentified
MEVGNIVYPICCGVDIHKTFFVATLVITEGLLPRYQKRRFSTFNNQILAFKQWLLDNNCHDVCMESTGKYYVPVYNLLEDSIRVTVANPKWVRAVKGHKDDAKDSKWIGNLFRLGLVPGSFIPDREIRILREFTRYRFKLVSCKSSEKNRYQNVFTVCNIALDAVVSDMFGKSATSITRYIVNSDTFDMDHCVSLLRGSLKQKAEEVAASIDGFQMAPAQKLRAQAVLEHYDFLVEHIQKLDTAIDRLAIPLEDSIVLLSSSPGIDRRSAITVLSEVGTDMSLFGSSKRLCCWGGLTPGNNESAGKKKSVKITRAGVYLKPALVEIAHAAVKDKKNPYYAIKYERISKRRGKKRAIIAVARMILTAIYHMLSTGETWNPCDLQQIDMPPELREKELQKSIRRAVKLLVAQGVVDVDAIRLPLAAPA

SEQ ID NO: 140561 - protein, 345 aa, unidentified
MKYIGIDLHAKTFSINVQAQDGTTLWADTCPTSGSELISRIIALSGPKTVVFEESTVADWAFRLLSPHAKVIVADPRQNRHIAADQMIDDATSARKLVELLRAGSIKPVHHSDSDERQQFKELVQAYHDQTRELTRCKNKIKAKFRGRAIDCSGSSVFNAAPDNRERWLAQLPTGGTRIHVKILWERLDLLEAQKRTLLSAIRQLAAQFPEVERFMQLPGIGLIRAVTFFAVIDTPHRFPTKGKLWGYCGLGIAGRKSASIIGPEHLTRFGNRTLKNALKGAALTAIQIGGNLFADRYQQKIADGMSAELARVNVARSIANTMWAMWRRGEEYQPDRANPWDNTA

SEQ ID NO: 140562 - protein, 358 aa, unidentified
MTLAQKPNPGGSQIMRDDVYYIGLDIHKRIVAYCLKTDAGEIVDEGTLDARRSALSGWADLIDRPWIGAMEATMFTGWVYDLLEPRTVELKVGNPQKIKAICSGKKKSDRIDAATLADLLRVDMIPECYMAPQWMRELRRTLRYRNFLVRHNTALKNRAAGVLMELGVEYDGDRLHGKRYFAELLGDLEDDAKSAIPILRFNHEAMRTFDRTQRTLTAGLERHERLAERVARLRTIPGVGPILALTWALEIGDPHRFSAIRKAVSYCGLSSRFISSAGIVKRAPLSKQRNAHLQWALIEVAKLAPRFNAQLAEVKERTLGKGANRNQATLAVARKLVAYLMAVDKSGQPFEATERPAA

SEQ ID NO: 140563 - protein, 345 aa, unidentified
MELHTIGIDLGKTVFHLVGLNLRGEVVVRKRFSRKQLLQFTANLSVELIGMEACGGAHFLGRALQEQGHEVRLMPAQYVKPYVKTNKNDYIDAEAIAEAVTRPNMRFVPIKSDDQLDLQSLHRVRERWVMRRTAVVNQIRGLLLERGITLRKGRCHVDAALPGILEDASAKLSGALRVLLAQLRLELDHLQTRIDEADAVIRKMAGENEACRRLLGVPGIGPTTATAIIAAIGNGAAFRKGREFAAWLGVVPGEHTTGGKQKLLGISKRGNCYLRRLFVQGARAVLQQSAKQSSGLSTWLAQLTSRTHRNVAAVALANKLARMAWAVLAKNEPYRPPVLADSAAV

SEQ ID NO: 140564 - protein, 361 aa, unidentified
MSESMALVGLDVHKSRTVAAVLDPVTGELRLERLRGEPERVVPVFLEELDRPVTAVYEAGPTGFVLARAAEQRGLDIRVVAPGSIPRAPGDRVKTDRRDAKRLVRLFAAGELRFAFVPSEADERFRDLVRAIDDVRRDLMRARHRLSKFLLRRGVRFAGKAWTQQHERWLCTLDFEDPLSQAVFVDYQCAVQALAQRRKTLMSTLELAVPDSSHNETISRLRCFRSIDTLTAAGLCAEVGDFHRFGKPALLSGFLGIVPSEYTSDEKRTQGHITKAGPTNARRLLVEAAHNYRHRPAVGEKLKARQSGQDPRVVEIAWRCQQRLHGRWMHLAGKRGKLAGKVAIAVARELAAFCWEAATLN

SEQ ID NO: 140565 - protein, 399 aa, unidentified
MINNHDEVDIFIGVDVGKSNHHAVAIDRAGKKILDRALPQDEAKIRAIIQAVAGKGTVLLVVDQPSTIGALPVAVARAEGIMVGYIPGLAMRRIADLHPGEAKTDARDAAIIAEAARSLPHTLRSIVLADEQAAELSMLCGFDDDLAKQATATSNRIRGLLTQIHPALERVIGDHLDHPAMAELLIKYPSPEKIRKAGQTRVRTLLTKYAPRGGKPWSADIFAALSEQTVTVPGSGSAGIVLAQLAAMLKQLRTARNELLTQIEALVEAHPLHEVLTSMPAVGVRTAARIITEVAGKEFQSSGHLASYAGLAPVTSRSGTSIRGDHPSRKGNKTLKRAFFLSAFAALKDPLSRAYYDRKRAEGKRHNQALIALARRRCDVLFAMLRDGTLYDAPTPKAT

SEQ ID NO: 140566 - protein, 523 aa, unidentified
MATKTRKNKNSKTTVRFIGKPTGQIQERVQKVGPQHFGIVSVDCAKRRSKWMLCDFYGRVLVEPTVVEHTRSGLDMMTQSITIARQTHHLKDLIVAVEMTGIYHRPVQRACRDAGFETRLVHPFASKHFHKPLHTDDKTDDHDLEAIFHAVAQGYGLEIKPLDEIYLSLQLLTRHRSRLVKQKARLQIQIRQLMHQSMPGYADLFEDDNFFNKSIAISVAKKFSSAKEIHDAGVKSISAYLKKNKIRFQAPTVEKIVAWASNAADAAPLGKMLTMQWLELNDLRFQMVENVVRIEREMAGFLAKTPYVLLLSVTGINVVSAGALAGEAGPLNRYANSRSMIGRAGLFPSRYQSDEVDRPNGKLVRQGNKRLRVALLTIAENLIKCHSYYRGYSALLTQQKVHPRDRRCRVANKASRMIFQIVGGRQVWRGKGVDREYLLYKLKEFHRTHRSPATQTVGDLNEAFKWLPKSSYREEAEQLSVAAGKRRRGVTSLGDLLIPLLIRLGVPASDEVDSSSSEARDSH

SEQ ID NO: 140567 - protein, 390 aa, unidentified
MGKRSTTVGLDVHKDTIDVVIAEAGADGEVRHFGTIGGDLGSLDRMLTRLRRPGRRLRFVYEAGPCGFHLYRHLTGQGVECAVVAPSMTPRRSGDRVKTDRRDAEALARLHRAGELRAIYVPTPEDEAIRDLMRAREDAVEIQRRARQRLKAFVLRHGFRYAGRAGWTFRYRHWLAGLRFPHPAQQLAFQEYIDTIGEAEKRVARFTEEITKALEGWCRAPVVRALQALRGVSLLTAATLVAELGDIARFATPRELMAYLGLVPSEYSSGAKTRRGAITKAGNPHVRRVLAEAAWAYQGQARVGRAMMCRQEKLPQAIRDIGWKAQLRLTTRFRRLAARGKARPKVATAIARELTGFIWDIARHVPLTSQLAAGGIPRVVPVAARGSAGL

SEQ ID NO: 140568 - protein, 344 aa, unidentified
MIYVGMDVSSKSFVVHAINEKKQLVFRGEIPPSRSELRKLMGRLGRETKLVVFEAGNQMKWIALTLKKMRGVHLHIVHPNEMKWISESSGKTDSVDARKMAELARGDLLPRAVHVVEGSVRDLRELVSARQTLQSKRVALINTVRGYMLQEGVRLPEKFFQRADWWEQLERMKVGETTKAILSAFHLSVVVLEDAERDLTDRILAVEDERAELLDTIPGYGGLSARVVLSALDNVERFDNKKAAAKYGALSPTIRQSGSVTHVGRINFDGRHEVRRVLLQAAHTVARTKSYGAKPLRDFYERVEKKRGKKTAIVALARKLLTIAFGVLKSGEPYDPEKLMPRAA

SEQ ID NO: 140569 - protein, 365 aa, unidentified
MSNYKIGCDAHRRFSQFAILDANGQFLEQVRVNHEPGAILNFLAEYPPGTPVALESVGNWYWIVDEIEEAGCVPLMAHAAKAKVMMGNVNKTDKLDAQGLATLLHLGSLPSVWLPPHEIRDERELHRTRMALSRIRTSLKNRVHSTLAKYALSLDTASDIFSPKWRPELTIACNALPPETRRCMEQHLRALDHVQSQINELEERIKQRVEATPNIQLLKTLPGVANILSIVIEREIGDVNRFPSSAQFASYSGTVPTVKGSGGKIRYGRLRKQSNQYLKWAFIEAANVVVRQRRHPNWRSKHVTILFERIRRRKGHSIAVGAVARHLSEAAYWMLRKQEPYKDPARQVVYRDKGPRGPNMVNVKP

SEQ ID NO: 140570 - protein, 403 aa, unidentified
MNSVGIDISKGRSTVAVMRPFGEVVISPFEVRHTDSELSELARQLKSLNGETRVVMEATGNYHAPVAKLLHDAGLYVSVINAKLVHGYGNNDLRRVKTDRKDAVKLANYGLDRWLTLPRYVPEEDTRLLLKNCYRQYRQYSKVQTVLKNNLISLLDTVFPNVNRLFSSPARADGSEKWVDFVAEFWHCGCICERSEKAFVSKYQKWCKKHGYNFGEEKACAIYAEASGHIGVMPKSETTKLLVEQAVSQLRATSAALAALKHEMQSLASMLPEYPAVMDMFGVGLTLGPQLIAEIGDVRRFYSKKALVAYAGLDAPPNDSGDVTGRHKSMSKVGASSLRRTLFLVMSAYLQNAPLDEPVYQFMDRKRAEGKPYRVYMMASANKFLRIYYATVKAYLESLEHTA

SEQ ID NO: 140571 - protein, 337 aa, unidentified
MKYSGIDLHSNNSVVTVTDEEDRVVAEKRLPNDLAKILGLLEPWREEIVGVVVESTFNWYWLVDGLQAAGFQVHLANTVAIKKYEGLKHSGDEADARYLAHLLRLGILPTGTILPPEQRAVRDLARKRMQLVRSRTTQILAVENITARQRGARISSNQVKRLTAETIDQMALPDDVAFAIKTNVAVIATLSAQIDLLEKRLQERIGERPEYGLLTSVPGIGRVLATTILLKTGPIDRFAAPGNFASYARCVDSVRTSNGKKKGEGNTKNGNKYLAWAFVEAANFALRYCAEAKRFYERKKARTNNVVAIKALAHKLARACFHILKERKPFDVTRCFA

SEQ ID NO: 140572 - protein, 418 aa, unidentified
MDVVHRRCAGIDISKRDAKVAIRAAGGGRAGTRTTVTTWSSMSAQVLALRDHLLAEQVTCVVMEATSDYWKPFYYVLEDGPWELLLVNARHAHNMPGRKTDVSDAAWLAQLGAHGLVRGSFVPPEPIRALRDLTRTRTSLVRQRAQQVQRLEKLLEDSGIKLSAVACDIVGVSGRAMLEALVAGERDPQILAAMAKRRLKNKTEDLVQALAGRFSEHHAFLVRTHLDLLDHLSEAIDQISSHIEEAMAPFRAARDLIVTIPGVSVLLADVIIAETGADMTRFPSPGHLASWAGTCPGANESAGKVKSTRTRPGNPYLKGALGVAAMAAARSKDTYLAAKHRRVRTRRGPQRATVALEHAILLALWHMLTNHTPYRDPGGDYYLHRNPERAKDRALNQLRALGYDVTLTTQGLTNPRAT

SEQ ID NO: 140573 - protein, 412 aa, unidentified
MQAIIERCCGLDVHQETVVACLLVGAPGAQPTKEVRTFRTVTRDLEALRDWLREAGVTHVGMESTGVYWRPVYAVLEGHFELIVGNARHMRNVPGRKTDVKDSEWIADLVRHGLIEKSYVPPQPLRELRELLRYRRKLVESQAAERNRLLRLLETANIKLASVASDVFGVSGRAMLRALIEGEASPEAMADLARGQLRRKRTDLILALDGRVEEHHRFLLAVQLRRLEAIEADIAALDLRIGERLEPYSAPHALLMQIPGVDWVVAAVLIAEIGVDMSVFLSIYHLSAWAGVCPGSYESAGRQKSGRARKGNIHLRAILVGAAMSAARTKGSYLKDKFHRLKARRGALRAALAIAHKILVCAYHMLAKNLPYRDLGEAYLDQISQTRTVANLKRRLERLGYRITLEPNSRAT

SEQ ID NO: 140574 - protein, 414 aa, unidentified
MEGSYKVAGIDVHKKMLAVVITDATEIGQYRFERRKFGAGEAELKVLAGWLAEQAVKEAVMESTAQYWKPVWQALEHQLKLHLAQAHSNKAPKGRKRDFADAERLVRRHIAGELILSFVPDEEQRLWRTMTRTKQQLRRDRVRLQNQLEGFLEEVRIKLSSHVSDLLGLGARRMLQALAEGETDAAKIAALATHGLRASQEELRDALSGAARLNQLQRQVLKLFLERLMLLETQIDTLDKSVAESLRQYQDAVRRLAEVPGLGADSAQQIIAEVGPQAATFPSPGQLASWVGCCPGREESAEVSRSDRSPKGNRHMRHILNQGANAAIKAKGSVFEILYRRVAGRRGHYKAIWAVAHKICRIVWKILHQNLSYEERGQQPNPQAIHQRTRKLIRDLRRLGYQVQLTPVSTGVPA

SEQ ID NO: 140575 - protein, 527 aa, unidentified
MAVRYKSSTRRKSRPHVFQKPRGVLHPRVQTVGPEHFGIVCVDCAKARSKMMLVDFYGHVLIEPTTIAHNRFSLKTAVQNVRDAMARHKIEDGIVVVERTGRYHKVVQRTFTKAGFEVRVVHPFATKQFRQPADPGNKTDDTDLFAMFRATTCGFGLSEPKPDPLLVRVQLLARYRRSLVRNRVTIQLKMHEHLEACMPGYSRCVSDLFDSEVAMWVAKNLGSAQAIADVGVMELVRRLSQAGVRKNVPIVEKIVAWAGSAPAADEPASLHHRFFLEWDEDQISKLRRIERLEVELAELLVLTPYVLLLALPGIGVVSAAEFAGEAGPMDRYPNARAITGRAGLYPSRYQSDEVDRRDGKLIRCANRDLRYALMMIADNLLKCNEYFRVRSASWKQQDKDPRDIRVKVAGRFSRIAFQVVGGRQVYRHPCAQQRDYILEKLLDFCIEHKIPPEQRRRILNAAADQLPQTARREEAIPLQDKLARVRKHRGAGPLSLGEILPELLARLGVTLVISNESGESDLTGRPS

SEQ ID NO: 140576 - protein, 391 aa, unidentified
MTQSAMAGRSTKAFDADATLVVVVEMSRSVWLVAGLLPGIERRPLKKMTPDENELALLLGRWRGEVAATGRCVRRVVVAYEAGRDGFWLARWLRAQEVECEVIHASSIAVSRDRKRAKTDRLDTALLMRALLGWLRGEQGHCTMVSVLSIEEEDAKRPTRERENLVGERTRLINRMKGAMARLGIRGFNPALRKAEGELEDIRTPEGTKLPPNTLAELRRDTARLRIIEGQIREIEQGRRERLEAAGSSEADAMVSNLTRVVGLGLETADMLVHEILLRNLRDRRAVARYAGLTGSPNESGGRRRERGLSRAGNARVRRGMVHLAWRFLVFQKDSALVRWFRQRTADGRVRTKMAMVVALARKLLVALWRMARTGEVPEGVRLRPMAPVIA

SEQ ID NO: 140577 - protein, 358 aa, unidentified
MAGKVTEAAVVGGVDTHKDLHVAAVVDQNNKVLGTRFFSTTRQGYRQMLAWMTSFGVLKRIGVECTGTYGSGLLRYLQNAGLEVLEVTAPDRMERRKRGKSDTIDAECAAHAAFSGIRTVTPKTRNGMIESLRVLKTCRKTAISARRVALQIIHSNIISAPDELREQLRNMTRMQLIRTLGSWRPDASEYRNVTNVYRISLKSLARRYLELHDEIADLDVMIAATVDELAPELIKRNAIGYESASQLLITAGDNPQRLRSESGFSALCGVSPVPVSSGKTNRYRLNRGGDRAANSALHIIAIGRLRTDDKTKEYVARRVAEGHTKMEAIRCLKRYISREVYTLLRNQNRQINSIPITA

SEQ ID NO: 140578 - protein, 361 aa, unidentified
MKLFVGIDVSSEKLDVCFLTDDDQLSILSEISVANDIEGATLTREMIFEFNEKYHFTQIVIGMASTSMYSFHPSMFFHEDKELKKLNALVTIENPFRIKQFSRMFDEDKTDRNDALRIADFLRIQRFTTSPIKEEKYMSLQRLTRTRYQLIKQLTRTKQHFLKNLTYKCNTLAREMRDESTSLFSATVISLMTDDYTLDELAELPLEAFCDLLQEKGRGRFKEPEKIAKAIQRAITMSYRLGDLAQESINVVLSVLVREIRALEKNIKDLDKAIEQLVVVIPEYQCLTSILGIGKVYAAGLIAEIGKIERFEDQTKLAKYAGLSWKVKQSRNYQSQNTLLTKQRNRYFRYYLVEVANSVKN

SEQ ID NO: 140579 - protein, 414 aa, unidentified
MQSWSQITYYAGFDWATDHHDVVIVNRSGQIVADFQIDHTAQGWQRWREQVAALGAGLAACVETSQGFVVEQLLESGVAVYPISPASAKAYRQRKVPSGNKTDHVDAWSLADALRVDGHGWKALAKEDPLVAELRLLCRDEVALIEERTALINQLQSALREYYPAALEAFEDWTLPSAWAFLEAFPTPQALASAGKRKWEKFLHTERLARPQTYEKRMEIFAHATGFVSGQALTRAKSRLALARARMLRVLQSQIDSYRAEIEKLFAQHPDHDLFGSLPGAGPKIAPRLLGEIGSDRSRFEDPTALQCLAGTAPVSYQSGKIHKVYLRRHCNKLLRHAVHLWANLSRQSSPWSAVYYEQLRTRGKNHACALRSLGQRWLKILWKMWQTGTRYDAELHARNQLKHGSWVLKIQHA

SEQ ID NO: 140580 - protein, 348 aa, unidentified
MVADWVDYVVGVDTHLEEHVLAVVAAPSGAVLARRAVRANARGYAEALRFAGEAAGGARVWAIEGTGSYGAGLARYLAGRGETVLEISRTPRPERRLRGKDDSLDAARTARAALASETLALPRSGERREALRLLLIARRSAVDVRREALGQLRGVIVTAPDGLREQLHGLPVGKLLERCSRLRQSSSASADEVATRLVLRSLARRIQAATVEPAELEQEILGHVRALAPRLLDEPGVGPIVAAQLIVAWSHRGRLRSEAAFARLAGVAPIPASSGQTTRHRLSRGGDRQLNRALHTVVLHRRQHDPATQAYIERRVAEGKSRRDATRLLKRYLARNLYRLLQQEPLMT

SEQ ID NO: 140581 - protein, 318 aa, unidentified
MLSLGIDVSKTTLHVALVLSNEKLRHKTFPNAPAGFADLARWLARHTEGPIHACLEATGPYGDAVAEFLFDAGHTVSVVNPSIIHAYAKVQLLRAKADAVDAEVIARYAAKEQPAPWAPPPPELRQLQALVRRLDALHGMRTQETNRLAVTSDAAVRASIDTVVATLEAQIADVKHRIATHLDDHPDLRAQRDLLLTIPGIGETTAAVLIAELFHQSYASARQAAAYAGATPRIRESGQWRGKASLSRCGPALIRKALYFPALVALRYNPTIAAVRTRLVAKGKPKMVIVGAAIRHLIHVAFGVLKSQRAYDPNVARA

SEQ ID NO: 140582 - protein, 429 aa, unidentified
MNNEALIRIMQFRQFKERIRGSEEYLIVGIDISKNQHHAFFGTANGKTIKRRLIFKNDFIGFMDFLSMAQVLRGQNGLSQIVFGMEPTGNYHKPLGTFLIKRNQEVVLVSGIATQRNRELLDGRWDKNDTKCAANVADLISQGKCLFYDYPEPKISGLRSLLSLRERLKKNYHILRMRIRNNLVSEYFPEFDRYFGQSPKQTLSIVKYCLDPVKINQMEFKEFLLKVTTTNRGLAQEKRLRKIHALASESIGCESNRYTEFEAKILVDQMEQTTIFIKEIEDKIAEAAGEFEEYHFLLTIPGFGPYISALVLAKIGNPFRFENRKQVLKMSGFDLSAKRSGKGSDKAYPVISKKGSNALRYALFQGAVIASSRNNYFIEYFTNTLKGREKERGIKIKMRVKLAAKLLVIAWTIMKTKKAFDPALLFSVK

SEQ ID NO: 140583 - protein, 344 aa, unidentified
MKNSNVIGIDLAKNVIQVCKIDKHGELTSNKAISPSKLKALLANSNPSIVAMEGCGACHYWARLAQTYGHDVRIISPRRVKAFLQGHKTDANDALAIAIASTQFGMVFSQVKKEEQQSLQTLETSRKFLDKELTALNNHIRAYLYEYGITIHRGRKSLRETIVIVLDDLDTRLPMCLKNTLKVLWERYQLTVVQLKETEKCRAALVKQLEPCNRLMELEGIGNVCAAMLYASIGDGREFKNGRQASVYIGLTPKQHSSGGKTYMVGIDKQGGNKALRAALYQGALSVISRLPSEPRTVKEAWLLKLIERAGVKRACIALANKTVRTAWALLATGKSYEPVLLGR

SEQ ID NO: 140584 - protein, 315 aa, unidentified
MFVGIDVAKASLDVAVDGTTQRRKFANEEAGIEQATTYLKGLSPELVALEATGGIEIPLAASLVAAAIPVAVVNPRQIRDFARATGKLAKTDVLDAQVIAFFAATIHPTPRPLPDAKTQELNAVLVRRRQVRGMITAERNRLSSARKAVRERIQAHINWLEQELVSLNDDLKRKVEESPAWREKDDLLKSVPGVGPVLSATLLMELPELGTLNRKQIAALVGVAPLNRDSGTLRGKRSVWGGRAPVRAALYMAALVATRFNPIIRSFYQRLCAAGKAKKVALVACMRKLLTILNAMLKHRLPWSYPAPPVFGPCH

SEQ ID NO: 140585 - protein, 346 aa, unidentified
MTIVEDTRVVTGGVDTHLDVHVAAALDEIGGLLGVESFEASAAGHDKLLGWLQSFGLVARVGVEGTGSYGAGLARLLRAGGVEVVEVDRPNRQARRRQGKSDPADAVEAARAAQSGRAAGAAKTRDGNVEAIRALVVAKRSARSTKIKTLNQIRHLSFTAPDELRERLKGLSRHHLAGEAAALRPRPGGDPVICATKTALRTLGRRVLALDEEKATLDALMADLVAATAPSLLELHGVGVDTAATLLVTAGDNPDRLRSEAAWAHLCGVAPIEASSGKVTRYRLNRAGDRQANSALWAIVITRMRSDARTRAYVARRLAEGRSKPEIIRVLKRYVAREVYRHLPRA

SEQ ID NO: 140586 - protein, 408 aa, unidentified
MRRVIGMDIHRTFGEVVIWEEGRLRNAGRVDMTRTALEGFGKGLRATDEVVIEATGNCMAVSRVLSPFVARVVIANPLQVKAIAHAHVKTDKIDAGTLASLHAAGYLPEIWTPDAATERMRRLAARRFQIVRHRTRIKNEVHSILHAHLIPRCPHADLFSTVGRAWLLRQPVPEDERGAIERHIRELDRLTDDLVAIDREIAGDALDDDAIARLLTITGVNLTVAAGIVAAIGDINRFSSPKKLVSYFGLNPRVRQSGLGAAHHGRISKVGRSHARSMLVEAAWAAAKTPGPLHAFFVRIRAKRGHQVAAVALARKLAVLCWHLLTKQTDYRWARPALVANKRRTMELKAGKPQKKGNKPGPAYAYNVKALRDQEMDIARHAEQAYEQFVAQWETRPKVRGRSKPAGL

SEQ ID NO: 140587 - protein, 369 aa, unidentified
MGEYSEAFVAFDVAKKKHAVAIAEGGRTGEVRFVGEVENSPAAIERTIKKLGKKYDRLHVCFEAGPTGYGLCRQVRDLGHDCMGVAPALIPKRPGERVKTNRRDAVTLARLHRAGELTGVWVPDVVHEAVRDLVRARETAGDDLRRKRQQLLSFLLRHGRIYEGGGHWTLAHRRWLARQSFEHMAQQIVFQEKIDAIEDAAQRLRRLDEQLRTIVPTWSMARVVEAYQAMRGASFLVAVIFAAEIGDVRRFDTPPQLMAFLGLVPGERSTGDTVRRSSLTLAGNRRARRALVEAAWTYRYPARVSEALRLRLEGLPKAVRDIAWKAQIRLCTRYRRLNAAGKKPPVVVAAIAREMAAFLWAIGREVAPS

SEQ ID NO: 140588 - protein, 333 aa, unidentified
MVLKTGLQERDWKMSEKVVSAGLDVSKQWIDAAIWRPGLRDRCLKRFEQTAEGYQALGAWLTEHQVGRVGLEASGGYEVGPMDALQALGFEVFRLNAQRVRQFAKAKGRLAKTDKVDAWVIAQAVVVLPDEEAQAPQRRRDLDALVEYLTYRRRLLDWITDCANQLEHLTNPTLRENVSADRARFRTQVIALDKTLAALVAQAGPLSDLAKRLRTAKGVGPVLAQTLIALLPELGQVSRQAIASLAGVAPFDDDSGKRVGERHIKGGRQAVRDALYMAALSAMRHNPPIKALAERLAGKKPKVIIVACMRKLLVILNAMVRDGQDWRDPAKAT

SEQ ID NO: 140589 - protein, 342 aa, unidentified
MGEVSIIGLDLAKRVFQAHGACSKGSAVFRKKLSRSQVLTFLAQQLRCIVAMEACGSAHFWGRAIRELGHEIRLIPPVYVKPFVKRQQNDAADAEAIAEAAARPNIRFVALKSSGQQAGAMVFRTRDLLVRQRTQLVNALRGHLAEHGVVAPQGVTNVRVLEAAIEDAETSLDLLVVEMARLYLQQIASLAEQIAKLEKVLQHEAANAPTTARLLTVPGIGHVTAMEIETFAPSMETFRRGRDFAAWLGLVPLQHSTDGKQVLGKTSKMGQRDIRRLLITGAMTVVRWASRKSPPDGSWLFRMLGRKPRMLVAIALANKMARAVWAMLTKGEDYRNPATAAA

SEQ ID NO: 140590 - protein, 356 aa, unidentified
MTQKNTDTIGIDLGDTSHDACILNKAGNVTATITLLNCRSELERFSSETKGAKIILEAGTHSPWISRLFEELGHTVIVANPRKLGAIYKSDNKTDKRDAEMLARIGRFDTKLLHAVQHSSLKHQRDRKVIDTREALVDVRTKLINYVRSSLKSFGIFLPKGTSAATFARKAREHLGEEDYALFASTIETVSELTARIKEADKAIDALIEQDYPEALKLQQVAGVGPITSLTFVLTIGSPDRFRYARDVGPFLGLVPKRDQSGESDKALRITKAGDHQLRRLLVQCAHYALGENGPDCALKRSGLKRAKGGKTDKKKAVVKTARKIAVLLLALWKDEQGKYLPFPDQAQQPESQKVA

SEQ ID NO: 140591 - protein, 338 aa, unidentified
MELYAAIDLHSNNSVLVVTDSEDNVVFAKRLRNDLDMIVMALRGCPGDIQAVAVESTYNWYWLVDGLRAAGFAVRLANTAAIKQYDGLKHGDDFSDGKHLAQLLRLGILPQGYICPPELRALRDLMRKRAQLVRQRTSQILSIHNLLARNLAKSVKGDDIKRLEDGEIDGLALLEDQKRALRANVAVMRCLEEQIRLLERAILAKGKLREEFHGLKTVSGIGDVLALTIALETGDIHRFASAGKFASYARMVDSRRESNGKSKGVGNRKCGNKHLSWAFIEAAHCAVRYDPSVRRFYQRKCAKGLSVVAIKAVAHKLARACYHIMREGVAYDGTRAFA

SEQ ID NO: 140592 - protein, 339 aa, unidentified
MQVTTVVLDLAKNIFQVHGVTENGEVAFNQALRRAQLFAFFEKLPPCLVGMEACGSSHYWARQLSKLGHDVRPIPAMYVKPYVKRGKSDAVDAAAICEAVTRPIMRFVAIKSEEQQGVLFLHRARDLIVRQRTQLSNMLRGLLGEFGIVIVQGIGSAIKFAKGVLDGDKPGIPEVAIDVLDNLSNQLVALHLRVRRYEMRIRLQAKQDLRVTLLRSIPGVGPVTASAIVATAGDASQFKNGREFAAWLGLTPLNRSSGGKEKLGRITKMGDRYIRRLLVTGITSRLRQMKTHPERVDPWSRALLDRKPARLATVAMANKTARIIWAVLSKNEYYRPHTI

SEQ ID NO: 140593 - protein, 441 aa, unidentified
MTEEPTLSSDEPQWAAFVAIDWADQKHVWKLQPTGTGPCELGELEQTPEAIEVWASQLATKFEGRPIAVALEQSRGAVVFALTKYRHLYLYPVHPATLAHFRQAMVPSGAKNDPGDTGLLLELLVHHRARLRRLQPDTEETRELQFLVEVRRKLVDDKTRFTNRLTAQLKLYYPQVLRWFYKLSSPVTCDFLSRWPTLEAVQKAAPRALTAFFRRHNCRDEGRRLTEIRQAVPATHDRAVIQSSVLMVQAAVRVLQSLKEDIARCEERIEQLTKAHPDFGIFDSLPGAGDALVPRLIAALGTQRERFQSAGEIEALTGIAPVVRQSGNTRSTHCRQAYPHFLRQTFHEWAAHSIMKSEWARAYYEQQLARGNKHHAAVRALAFKWIRILFRCWKDKVPYDEIRHQEAIRRRRLSTDTPANPIVNLEWKTVAGFVKISAANS

SEQ ID NO: 140594 - protein, 352 aa, unidentified
MGESWSSRPYIFSEPEQLLGLLKPAFVQGRATEEEAMGERSVFVGIDVAKAQLDLAQRPEGPRLSAANTESGIATVVAHLRRVKPTMIVLEATGGLERPLVRAVVDAALPVVVVNPRHVRDFAKATGQLAKTDALDAQVLARFAQAVRPALRPVPDAPTQELAALIARRRQVVEMLTAEKNRLEGTPKRVQKRIQVHLNWLTTELARADDDLDQAIRTSPIWREQEDLLQSVPGVGPVVTRTLLAELPELGTLNRKQIAALVGVAPLNRDSGTLRGKRMVWGGRAQVRAVLYMGAIVAARFNPVLRMFYQRLRAAGKAKKVALTACMRKLLIILNAMMKHRTPWRPEMAQCA

SEQ ID NO: 140595 - protein, 339 aa, unidentified
MWYSGIDQHKRDSVIATYGRDGPRVKQVRVVNTPLALAQYFADFPAPHRAVVESTGGWYWLADVLAPLGVELVLAHATRLQAISAAKVKTDQVDSDVLAQLLRADLIPVAHMIRPDQRGPRDLMRTRLRLVEKCVSAQNSIDRLLEKFNVDTVAELEAIYQLQAACHQAQIDLLEEQITTLERALHPHLIPNPDVQRLLWIPGVGKVNAFTLYTEIDGITRFPSVRQFFSYSRLVPGADNSGGRTRHRSGSKAGNRYLKLAFSHAGIRAVQYYPEIRAFFKAKARRKPIRIARTLVALELARIVYQVLMKQEAFNGQFKHRPLSRGKHAQWPRRASPPV

SEQ ID NO: 140596 - protein, 467 aa, unidentified
MSKSTQKQDALSNTTNALPQHLEHINLRAAGIDIGSTSHFVAVPEGSSDTNVREFKSFTSDLYALADWLKQCNVQTVAMESTGVYWIPVYEILEEKGFDVNLVDARQVKNVSGRKTDVEDCQWIQRLHTYGLLNAAFRPTDEICELRSYIRQRSMLIQSASRYIQQMQKALMQMNVQLHHVLTDITGETGMKIIRAIMGGERDPAVLAEYRDRRCKNSIEEIQSALTGNYRAEHLFALKQSLELYDYFQEKIQACDDEIQKKLHQFSTNEKVIAIPEEQLNPSKKNSAKNAPNFNLGGELHRITGVDLLAVPGINHISALQLIGEIGLDMTRWKNAKQFASWLGLCPGNKISGGKRLSGKTKPTNNRAASALRMAASTLYRSSTALGAYLRRLKAYKGPMKAITATAHKLAKIIYNMLRYGVEYMEAGQAYYEEQYRDRVIKNLKKKASELGFELIESLQMIKIKTN

SEQ ID NO: 140597 - protein, 354 aa, unidentified
MNDEQHLFSQSTHWVGVDVSKRTFDAALVRHGQKWPATPLAAVPVHGFSRTIKGVNDLLQWLDALLAENDPPLGVRVVMEATGRYSSELAVWMLTQRLALAPAIAPPHQTAAFIASMGVRNKTDKLEARALGFYGMERQPPAYQPMTPQEAELRELARYRDFLVRERVAAANRADETSACKTVRDMEHKRRRLLDGDIKRIEEQMRRHTHETPELERDVELLATIYGVGFITAVTIRVELGDLRRFHKARQLSAYAGLNPSLRQSGSSVNGRPHMNKQGNPRVRQCLYLAAMVAIRGHNDLQRTYLQLREQGKSAMSALGAIMRKLLVLMRAILVSGKPFDPMWKTSPRQVLQT

SEQ ID NO: 140598 - protein, 475 aa, unidentified
MNLKGTKKKNQVITANIFEQQELMKKAEVIRENLKASTWHELETKGKFDKNEKLSFISNDMLILGCDIGSETHYVRAIDTRDRELSKSAFSFHNDSEGFQSAKEWAVKIAAEHNKNQIVLGLEPTGHYWFCLATWMISNGISVVQVNPYAVKQTKEIEDNSQLKDDTKDPKLIANLVKDGNFGMPYLPEKLYGELRRLSMFRDQLNEDRIRSINRMHREMKIYFPEYKDALGKADGAFSLELLKQAPFPDDLTALGEDGIRQIWHNAKLRGRGYSRAREILQFAKVSVGIKDGAEAGKTAVKWFVQKITELNIELAAIEEKINQKCQEIPHAGNILEISGIGENTLSGILAEMGDISRFDDVKEIQKLSGLGLVACSSGKHKGETKISHRGRKRLRYWLFQGAKSAVAHAEEFKELHKYYTTRTDNPLKKMQSLVVIACKLLRIIYTILKNGTVYNPKKMLMDIRRPEKAEAVAA

SEQ ID NO: 140599 - protein, 351 aa, unidentified
MIIIGVDYHPSDQYIAFLDTETGECGEQRLSHSNGEAEKFYRELRLRAVSVRVGMEATGYARWFERLLTELGIELCIGDAAKIKTKRVRKQKTDRNDAQLLLHLLLDNNFPKIWVPSPENRDLRQLLWHRHRLVQMRTRIMNQLQALAMNEGQRRKKKLWSAAGRAQLEKLPLAVWASRRRKDLLELLDRMNPPIAELTRAVEQEARKRPEVQRLVTHPGVGPITALAFVLIIGTPERFPCGKQIGSYVGLIPAEDSSAGQQRLGHISKQGSSLLRFLLVEAAQAAARCDADWRRRYMHLVMRRQRNIAKVAMARRLAVRLYWMWRNSWEYSQWVKFGPYAGQLDTGHGAN

SEQ ID NO: 140600 - protein, 385 aa, unidentified
MIYIGIDISKYNHDCFIATETSVSFSFENNSSGFKELLEHFKPFNKSEMIIGLEATGHYGDNLKSFLSSHGFSFMEINPLLVKKFSDSKSLRKLKTDKKDAKLISEYMMTVDYKAYHHQSYHISALKSLTRERSKLISFRTAQYNMITKTLDIIFPEFNPFMKEQGYSDTSLYILSYFKSPDKIAKMTDLHYDKIRKKSMGKFSYPKFMKLKELAKETIGTSQDYHLDRLSTSISYVEKLNTDIKVIESRITELMKKYPTYFGSIKGIGTLTEAIILAEYGNISLYDSPSQMVSYAGLDSTIKQSGTMSTTGKLVKRGSKYLRSALINITLILMVNNPLFYAYYHKKKQEGKHHRVAQVNLAKKLIRVIHHLETTKTYFDSSLLK

SEQ ID NO: 140601 - protein, 489 aa, unidentified
MSTPRKQQREKKDPMLNAQLLKRKARGNHCQQGKGNQRRSKLTITNPDAAGIDIGAQVHYAAVPEDRAPVSVRSFGAYTAQLDELVQWFKDCGIKTVAMESTGVYWIPLYQKLEEAGFEVLLVDARQAKHVPGRKSDVQDCRWLQQLHSYGLLRAAFRPEDSICRLRTLQRHRKNLVEYAAMWVQHMQKALNEMNLHLHHVLSDISGLSGLRILDGILAGERDPAKLASLAHHRVRKSRAQIEAALTGDYRPELLFVLEQSLQNYRQIQQQITQCDLSIEKQLVKMTDGPAPRQAAEPMPSSPELGGGKSGKRKPPVALETSLAGHLKRILGVDLTTIPGLNVLAILTLISEIGTNMTKWRNEKAFVSWLGLSPNNKISGQRVLSSRTRKVVNRAATILRLAAMIVGKTDTPLGSFYRRKRAQLGGPKAVTATARKLGCLVYRLIKNGQGYNAPDLHTYELKYKDQILNSLRKRANTFGFDLVELPKAA

SEQ ID NO: 140602 - protein, 387 aa, unidentified
MPQPNDLSRSLVALDQNSTIIAVIEMSQSSWLVAGMLPGIERQPRKKLEPSPERLLALLHRWRDEAVRAGRTITRIALAFEAGRDGFWLARWLAARGIEAHVIHASSLAVSREHRRAKTDRLDTELLKRGFLGWLRGERGHCSMARVPTIGEEDAKRPNRERDCLVGERTRIVNRIKSTLARLGIRNFKPTLRKAAERLATVHTPEGVPLPPNTLAELQRDMARLGFVVGQIREIEEARQKRLEQQPESGPHAMVRLLARIVGVGVETADLLVHEVLSRPMRDRRAVARYAGLTGSPDESGARRREQGLARAGNARVRRGMIQLAWRFLMFQKESALALWYRARTADSRRGTRKTMIVALARKLIIALWRFVTAGEPLEGVVLRPAS

SEQ ID NO: 140603 - protein, 358 aa, unidentified
MHEYFAGCDTHKEKHFFSIIDCKGEVQESFEIANSPKGWNEALIKIQKYPKILCGIENSANYAKKFSKFLLEKGLKLKEVNPVFTGKKRKAHTCSSKTDLIDSIIIAKITRDEQDYLPDIQINQESEELKAITRQREELVKEQTRIKNRLHSKLTQFDPQYKENYGSFRNKGTISKLEADFKKSTDILEKLLFQDIKLLKNIIKEIEILEKMLLEKEQKNVLIQNLDTIKGIDTVSACKMVGIIGDISRFKTPDKLASYAGISPVEKSSGKSSKKFRNCKGNRQLNAVFYTMALTQIRCFEIAKAYYVSKLNEGKTKKQALHCLMRRLVKIIWMMYKHNQPYNFTKKIMPEKQVLQAA

SEQ ID NO: 140604 - protein, 342 aa, unidentified
MEKVTIIGLDLAKNIFQAHGMRRDGSVAFRKKISRAKLLCFFASVPKCVVAMEACASAHHWGRQIGALGHEVRLIAPIYVKPFVKRNKNDAADAEAIAEAASRPTMRFVAIKSIEKQAAGMAFKTRDLLVRQRTQTINAIRGHMAEYGVIAPNGPVHIKRLVEALQDPDSGLPESIHGVCELLLRHIALLSEKIGLLEREIRERTRRDELANRLMEIPGVGAICAVAMEALAPPPESFSKGRDFAAWLGLTPRQNSSGGKTRLGGTSKMGQRDLRRLLVCGAMTVVRWAARKGAPQGSWLEQMMKRKPRLVVAVALANRTARIAWALMMTGERYRASKAICE

SEQ ID NO: 140605 - protein, 342 aa, unidentified
MQITTIGLDIAKNVFQVHGIDAAEKVVVRKQLRRGQMLAFFKALPPCLVGMEACATSHYWARELTKLGHQVRLMPAKDVKAYVKRNKNDAADAEAICEAVRRPTMRFVQIKSVEQQGQLMLHRARDLLMRQRTQLINALRAHMAELGIVAAQGREGVKELVKIIASEQDARLPVDAHTSLVVLAAGLQALQTMIGSIERRIIAQHRSDEASKRLRSIPGIGIVGATAIAATVPDPKVFRSGRDFAAWIGIVPREDSTGGKHKLGPISKRGDQYLRRILVVGAHAVLKRARHQPEKYPWVTRLLERKPFRVVAVAVANKMARVAWALLARGGSYRAPAFAAAA

SEQ ID NO: 140606 - protein, 339 aa, unidentified
MKLHCGLDLHSNNTYVGIIDQNGKRVVRTKLKNIPENIVQFLDPYKEDLASIVVESTYNWYWLVDLLMDEKYKVHLANPSAIQKYSGLKHSDDTDDAFWLAEMRRLGILPEGYIYPKAERPIRDLLRKRGHLVKLRTSLIISLQNIISRNCGVKLSANDIKVVQEDRVAPFLSDQEELFLAGAVSKDAIDFLGGKIRYIETEVRNRSRLKEPYTLLRTMPGVGTILSLTIMLETGPISRFSKVGDYVSYCRKVPSLWTSNGKKKGKGNQKNGNRYLAWAFSEASELSRRTDENARAYYNRKRQKTNLMVAHAALAHKLARAAYYIMKDQVPFMPEKLFR

SEQ ID NO: 140607 - protein, 379 aa, unidentified
MNFIGIDLHTNRFTCCYRDENSSIENLSKGRNIITFGLDKHGLAEFYKTLTKDTYVLVEATITTFSFVRLFKDMVKEVFIANTYELKQISAARCNTDKIDADKLCRLLKAQVLSGEQFISPVTLAPKEIQVLRSLFTSYRLMQKQNVQLKNRIHSILKEQLYGFTQEEIFSKSKRELIQSISSDPVLNFHVNFFLRQLEEGEKAVDILKEQILLQAAPYMKEIEILTSIKGISVFIAIAIIADIIDVSRFKNSKAFTSYLRSAPTVSNSNTTVSIRGTNKKGRKLSATLLTQSLNHVLDSSLKLRRWYDRLCEYKKPGLVRTGLRRRVFAEIFQMLKKGEYHYARNENNHQAKMMQYQRFLEKHKSQTFLTKSAAIFSV

SEQ ID NO: 140608 - protein, 416 aa, unidentified
MEYPPETLPAVPPGGVTCGIDWANDDHAVCVVDLAGTVVQRFTAQHTGEGLAGLVRRLRRAAVGEAAIERPDGTVVDTLLEAGFTVVVISPNQLKNLRGRYRSAGKDDRFDAFVLADTLRTDRARLRPLLPDSPATVTLRQACRARKDLVRHRVAVCNQLRAHLKGAFPGAVGLFCDLDSPISLAFLARFDCQDRAGWLSPRRLAAWLKGQGYCGRKDPAVLHARLAAAPRGATGDDGAAKAHITRALLAVLTSLVTQIKALDAQIAEQLALHPDSPIFTSLPRSGTVRAARLLAEIGDCRARFPTPEALICLAGVAPSTRQSGKVTHVGFRWAADKQLRDAVCDFAGDSRHASPWAGRLYDDAIARGKDNPHATRILARAWLYVIWHCWQHGVPYDPARHKALQRVLAQQKPAAA

SEQ ID NO: 140609 - protein, 348 aa, unidentified
MRFIIGCDFHPGYQCIAMLDTETGELVKKRLVHEGEEVRKFYAGLPAPALVGIETSGHSQWFEKQLGELGHQAWIGDAAKIRAAEVREQKTDWRDALLILGLLQQGRFPRIWVPTAEERDARQLLLHRHKLVRMRAQVKNQLQALALNQGVRRKSKLWSVLGRAQLESLALLPWAARRREDLLKLLDDLGPRILELDRAVAQQAWARPAARRLMTHPGVGPVTALAFVLTTGPVNRFRRGKQVASYFGLIPRERSSGGKQRLGHISKQGNAFLRGLLVEAAQSAVRHEPELRRDYQRLAQRKCRALAKVAIARKLAVRLYWMLRTDSDYAQLLQGSHAGQPESSCGRS

SEQ ID NO: 140610 - protein, 451 aa, unidentified
MARLAIGVDTSKGRHRAAAYDSDAGSWIGELSFPVTRVGFERFEAFLRSLRREPSEVVIGLEATGHYHLTLVEHLVAAGYAVVLLDPYRAAQFRRSEGRTAKNDRVDARALARFLAMQPCDVASRPDRRLAALRELTRFRADLVRDRTMALNRLRGALDLAFPELLGLIRDPASPTVLALLAAYPTAAAVAAVERGVLVRLIREASHARLGERAADGLLEAARTSIAVRGGEEALAIKVRALVRQVVAFNEEIAALERAIEREFGALGYAAADFPVGTAVSLATLVAEAGDVRRFPTAKHFLAHFGWCPRDTQSGQYRAAHPRLSKAGNRHVRRLIWMLAVTSVRHPGPYRTYFDRRTAVGKNKMHSLVAIGRKLLATIYAILKTGRPYDRAYHLHTVPTPQPTCQIGRQDDGIAPSSPKAHPSSSPTRARVEEPPSPPHRRLELAVHSHS

SEQ ID NO: 140611 - protein, 424 aa, unidentified
MKVTYQTCCGVDVHKSFLVATIVKTTGGIEPSYQKERFSTFNNSILEFKQWLLDNDCHDVCMESTGKYWVPVFNLLEDDINVVIANPKWVKAVKGNKDDTKDSKWIGDLFRLGLVKGSYIPCKKIRILKEYTRYRYKLVSCRSSEKNRYQNALTVCNVALDSVVSDIFGKSSTSIIDYLLEQSGSSINHEEIASKLLRSLKSKEDAVIESVEGYQMTDAPKYRMRLVRAHMDYITAEINDVDKMIENMISSNTDFENAVQFLCTIQGVKRDSAITIISEIGTDMSQFSSSRRLCCWAGLTPGSNESAGKRKSVRFTRAGVYLKPALVQCAHAAVKSDKSPYYKKKYESLVKRRGKKRAIIAIARMILTAIYQMLSTGEQWNPSDLYKIDMPVALVEKQKAKAIKQARKLLQREGLLPPDEPFAS

SEQ ID NO: 140612 - protein, 328 aa, unidentified
MDQISVGIDVSKTFFVVGLAPTGERWTSETTPVAIDALVTRLRGLAPAIIVVEATGGYERALVAACGVAGLPVAVVNPRQVRAFAQALGLTAKTDDIDAGVLATFGDRVQPAPRPLADAATQALAALVARRRQLIEMIGMERQRLEQAPPTGRITRDLRNHIRWLERRVSDVDDEIGTAIQASPIWRVQDNLLRSVPGVGPITARTLLADLPELGTLDRRAIAALVGVAPFNCDSGQHRGQRHIWGGRASVRTTLSMAAVSAARHNPVLATFYRRLRDAGKPAKVALVATMRKLITILNAMLKHHTPWTGDGASTPAAIARRAPAATV

SEQ ID NO: 140613 - protein, 467 aa, unidentified
MKLYLGGDVSKGYTDWVILSDKKQTVLENFQLDDTYEGHCKLYSTIEAYFDKYPGLEMYAAVESTGGYENNWVHTLKSYQKVFNLKVARVNPAGVNYNRRAGMKRNVTDAISALSIAEYMINHPENIIYDQDEKWKTLCRHWNFVEMQKKQRVQTINQLETILYCANPTLLRFKKNKLPNWLLELIIKCPTAGKLAHSKPEKLAKISFLTLKKAQGLVAEATQNIASATDRNSEILVRQIARQIKAFDENIKSQMKLIEKEFICPGIKILKSFQGIDTTSAIGILLEIGTIERFPTVKGCSCFYGLHPKFKQSGDKIIGVRMSKQGSKNMRKILFNIAKGAITSNPLIRDLYQKKLSEGMSKMAAIGVCMHKILRIIYGMLKNNQAFDPSIDKHNNERSKSKQQEKKQQESANIDKSRRYQAFDATAPISRKQIKKRKEHDLSQCEISSQSTGSICPSDTKILKVKH

SEQ ID NO: 140614 - protein, 397 aa, unidentified
MYIVGIDIAKRKHEAAVIDGDGAVVIKPFSFTNNCSGYNRLLAMLAKAKLPLDEVSFAMEATGHYWLALFTRLQKEGFRVQVINPVQTNSIRSFYIRQAKTDPRDALLIAEVIRFGHFSESTLHPENIYELRELCRGRHAIVSMQADVKRKVVALLDQVFPEYETAFTNLFGDTSMAILQTCPTPKELSEMPLEELCHLIEVSSHKRFRMAKAQELQVLARNSFGFAMAGDVFSTMIRLYAKHLVFLKQQVREMDRKIAEIMDTLDTPITTITGIGPTLGAYILSEIGDISRFPSAAKLAAYAGIDPTMRQSGEYNGVRNRMSKRGSPYLRHAIWLAASSAVLHDPALKLYFQKKRDEGKPYMASVGHACRKMVSIIYAVMRDNKAYTPCIPNEISA

SEQ ID NO: 140615 - protein, 426 aa, unidentified
MKEFITSTLYVGLDVSARQNVLCALDFSGDKLLTIEDSNNHPGAENIAAQLKKCLLDNNLDRLTIALESTSFYSVHIANYLSACDELMPFHPMVYCLNPKTTARYKETFVDMDKTDPLDALAIADFARAQKITTEPWRGAQFLALQRLTRHRLHVVESIAREKVYMLNNIYLKFSELAVINDPAERPFSSRYSATAQGVLTEFLTLEDIAESSLEELVLFVRDKGKNRFADAEHTAKLLQKAANDSYRLDKVLYEPINLAIASSFNIVKALQQEIKIIDKGIAKQYKGINTNQFQCLLSIPGIGPTFASGILSEVGTITAFSSNDKLAKYAGLTWRIKQSGPYTADVTRMTKTGNKYLRYYLIEAANSVRKSIPEYKEYYHKKYDETTTHQHKRALALTARKLVRLIFKLLSENQLYSSDNARSNN

SEQ ID NO: 140616 - protein, 397 aa, unidentified
MDVHRSFAQIAVVESGLVRDEGKIGVRPEDLREWADAFLEPDDEVALEATTNSDAIATMLRDVVAKVVVSNPRKTRAIAEAKVKTDKVDARILAQLLAADFLPATWVADDQTRRRRRLVARRVHLVKQRTRLKNQVHGILSRNLVPTCPHSRLFSGVGRRWLARQVVPADEQRSIDALIRQLDFLDEELAEVERDIAVDAIDDPVIARLMTVPGINITVAMSMVAAVGDFSRFESPDRLVSYLGLNPRVNQSGNSVAKHGRITKQGRAQARGMIVEAAFSASRAPGPLRAFYRRIKDRRGFQIATVATARKMTVLCWHLITKEEDYAFARPSLVAHKRRTLELAAGAPSRRGPVAGPSHDYFIKELRDAEKVLVEQEERAYEVLVAHWQPHKPSAAG

SEQ ID NO: 140617 - protein, 350 aa, unidentified
MYFAGLDAHLKYVTVAVLDRLGALVLETTVPTREPERVLAVLAPFRPLEVVVETCPFWPWLYDLLVPAGIRFHLAHAKRLRAIATAPQKNDRVDARLLARMLLSGLIPEAYPRPGDQRELLRLLRHRTTLVRARTRLAGRIHSQLHQQRLMLPREQLLRQATRGWLRETAWPRLTAEQQAIVTTHLELIDHLTPLIQALERRIAAAADANPTATLLATIPGIGPYRSLLLAAELSPLSRFPRVEHLASYAGLAPVTRSSGGHTRHGSIPQGANRWVRGALVSAIPSHVRSAPHSPVSHAYAQLTARLGWRVARVAAARKLLRIVYIMLRRGEAWRSEQVAGADVRDEVHV

SEQ ID NO: 140618 - protein, 410 aa, unidentified
MAEVMIGIDPHKASHTAVAIGLSEQQLGQLQVCACPSQTDQLLAWAAAWPERAWAVEGAAGLGHLLAQQLAAAGERVLDVPPKLAARVRLLQAGDTNKNDPNDAFSVAVAALRSTAKRPVIAEDHAVVLKVWAKRHRDLARARNQACCRLHAVLCDLVPGGIRKEISAGQAARILEQVRPADAVTTARCELAAEFLTDIRRLDAQLRTTNKKLAAAVKASGTSLTGLFGVGPVIAGTVIGDVRQVFRFPSRDHFAAYDGTAPVEVSSGGRKVYRLSLRGNRRLNHAIHMAAITQLRYKHSQGRAYYEKKLAEGKTHKEALRSLKRRISDAIYAALVADARQAAAACSKGPGGQPGNLSVSRAAGSHPARRLFGQATPGPATTLRPGTTAGPAPSQPNGALRYRATNPPAD

SEQ ID NO: 140619 - protein, 338 aa, unidentified
MRLYCGIDLHSNNSFIVIIDEDDQVVCRQRQPNDLDVILATLEPYRDELVGTVVESTFNWYWLVDGLEDAGFRVHLANTTAIQQYSGLKYADDSTDARWLAHLLRLGILPTGYIYPREQRALRDLLRKRISLVQLRTSNKLSLQNLSQRNLGRRFSSSELKSLNTAGIQERFDDANLVLAMDSTLQVTACLDQEIQRLEREIRIQTRPHPAFEPLKSVCGVGNVLAQTILLETGEIGRFPSVGNYASYCRCVGSQRLTNYKSKGKGNTKNGNRYLAWAYVEAANFAIRYYPEIKRYYQRKAARTHRIVALKTVAHKLARASYYVMRDLQPFELKRAFG

SEQ ID NO: 140620 - protein, 369 aa, unidentified
MKNITTYVGVDAHKKDLFVAMLVGDGPTPVTWTVPNEPNAVKRLVRKLERDAPGLVRMCYEAGPCGYALQRQVSTPRVSCQVIAPALIPRKPGDRIKTNRRDARKLAELFRAGLLTEVRPPTPEDEAVRDLCRARDDAREDLQRSRHRLGKLLLRRGLHYTGGRNWTQGHRRWITGLEWTQRAERVVVDDYLLAIDHLEARLIELDARLVEVADTEPYRAHVGWLRCFRGIDTLTAILILAELHDFRRFPSPRALMAYLGLVPGEDSTGEKHRRGRITRTGNALVRRLLVETAWHYQHRPSIGVALTRRRTGQPGRVIAIADKAQQRLCRRFRRLMEQHKPAPKVAVAIARELAGFLWAALQPAPIPAS

SEQ ID NO: 140621 - protein, 332 aa, unidentified
MKVLIGVDPHKASLAVAAVDEAEGEFLERASFPQNRAGLRALERWARRFPERRWAVENAGGLGRYLAGMLATSGESVVDVPPKLSARVRVLSTGNARKNDGVDALATALAASRNERLAAVDPQDSSEVLRLLSERREDLVAERTRALNRLHGLLRDLVPGGVTGTLSADRAARILRGIRPQSSSSRVRRRLASEVLRDVRTLDRKIADLNRRIEAELEASGTTLTEIFGIGPILAAKIIGTVGSVARFPSRGHFASYSGTAPVEASSGDVVRHRLSLAGNRHLKTTPCTWWRYARPGRTLGAGPITARSSRRASPARRRCGASRGASPMPFS

SEQ ID NO: 140622 - protein, 390 aa, unidentified
MDVLYQSCAGIDVHQANIVVCILHGPLTSTRPNREMATFDTTTKGLRACHDFLSQFHVEAVGMESTGVYWRPVWHALCDDFELILAQPAHMKAIPGQKTDKKDAHWIAKLTRIGLLPRSFVPDETIQELRELTRQRKHYVESRNRETNRIHKILQSGGIKLTTYIEDIMGLSGRNLLQLLVDGTPMTPRIVHQSVYTSLKKKVPQLLEALDGYFSDHHRFMLKQSLEIYDFYQKQIELLEERMNGYLSQYENHVEILDSIPGIDVITASVIISEVGVDMSQFPTAGHLASWAGLCPGNNESAGKKRSTKIRHGNSYLKKCLCQAAFAARNQKGSPLADRFYQIQSRRGSQKATIALAHQLLKITYILLKEQITYPEFLAQKKTTRDELVV

SEQ ID NO: 140623 - protein, 463 aa, unidentified
MARNNKGKKNKKHVRSLKAIQPDAAGIDLGSREHWVAGPPLEDNTPNVQRFGTTTPELLRLADWLKEQKVKTVAMESTGVYWIPLFEILDSRGFEVILANARQVSHVPGRKTDMLDCQWLQLLHACGLLRGSFRPSDDICRLRALFRERNTMIDQRSDWVRRMQKSLDQMNVCVHHAVSDITGVTGMAIIRAIVDGERDPRTLAQMRDRRCQKSEEQIAEELTGNWRPEHLFNLRQALKMYDQFCQIVTEYDTEIFAYIKTLQPGLDDDQTAPPPASKSKARNIAKKGQEPMRQALYQLTGFDMTIINGIGVDTASVVLSELGFDYSAFPDEGHFVSFLRLAPNLSISAGKKVPSKLKGTTTSRVATALRMAALALRNSKTALGAFYRRISRRKGASVAVFATARKLAQIIYRFVCHGQAYIDIGAKAYEAQFNNRQLKYYTKALKDMGYKVKPLAAATVLAA

SEQ ID NO: 140624 - protein, 333 aa, unidentified
MLPPNCGTATPYILRNTVGLDISKLTFDATAIVGNAEYSAKFDNDSKGLDQFSDRLKSLGCQNLHICMEATGNYYEEVADYFAQYYSVYVVNPLKISKYAESRFKRTKTGKQDAKLIAQYCRSAQESELVKRQKPTDEQYRLSRMIAAYAQIKSECAAMKNRHHAAKDEEAAKAYAEIIKAMNEQLEVLKEKIKEQTEKPNCKEGVKRLETIPAIGRMTAAVLFHHLTSSKFETSNKFAAFAGLSPQQKESGTSVRGKGKLTKFGNRKLRAVLFMPAMVAYRIRAFPDFIKRLEEKKKPKKVIIAALMRKLAVIAYHVHKKGGDYDPSRYKSA

SEQ ID NO: 140625 - protein, 346 aa, unidentified
MRFYNRQHRYYCGIDLHVKTMYVCILDAAGQVLVHRNVKSSAETFLEIVAPYRDDLVVAAECMFTWYWLADVCAAEGIVFVLGHALAMKAIHGGKAKNDKIDSQKIASLLRGGLLPQAYVYPAAMRSTRDLLRRRLHLVRKRGELLAHIQTTRAQYDLPAFERRLAYPANREGVSAHFSDPSARKSMDVDLALIDQYDTLIIDLELTIVREAKRHDADAFHRLRSVPGIGKVLALTILYEIHDVTRFDRVQEFASYARLVKCVKTSAGKKLGTGGAKMGNVHLKWAFSEAAVLFLRHTKDGKKILAGIEKKHGKGKALSILAHKIGRAVFYMLSRGTIFSMEKFAA

SEQ ID NO: 140626 - protein, 438 aa, unidentified
MLNKVFFNLDDLFISVGIDVGADFSWMSIALPNQQFVGKPYKILHNSIDSLTTAVSKIKEAEELYSLESRIFLESTGIYHYPLFCYLRDKGFNCSVINPIITKNSTNINIRKVHNDRFDSKKAALIGLKPDLKVSLMPSDLALNCRNLCREYYDLMDNRSAYVNKLQGELRMAFPQYLGIFSKVTINTSLTLLETYTSPSAFLEADKQEIIDIIKSTARFGLTYAQNKYNAIIQAATDANQFGYIIDSNIKRIRLYISFIRKYDEELNSILESLHELVDAHEDADFVKQIHLIETFKGAGFLSAVSIMGEIGDFSAFSKPKQLFAYFGLDPAVKQSGKFEGTKVQMSKRGSAIARCVIHTLTLQSISISRNGEAKNTVLREYYLNKCGSKPKLVAMGAVSHKVCNMIFAILRDNKPFKIIAPQEHIKQYNAAKCDIAA

SEQ ID NO: 140627 - protein, 362 aa, unidentified
MEYFCGLDIATETTALCVVDVDGTVVCQASVPTDPEAIYRHLKPYLAKLKRLGHEAGSLSPWLHPELLARGLPAVCLETHHVRNALKAQRNKTDATDALGLAHIVRTGWYKSAHIKSENGYRLKLLLTQRRNLKRKFLDIENSIRHSLKAFGIRLGAVGRARFDTAVRQAVADDDLTANLMDAMLTARAALWTQYTKLHALVVRFVATDEVCSRFMEIPGVGPVAAMTFMTAIDDPSRFKRSRDVAAYFGLTSKRWQSGTSIDVQGRISKAGDGDVRRALYEAASAMLTRFKGKDKVKTWGQEIAKRGCHNKAAVAVARKLAVIMHAMWTDGTCYVGDPSASASQRALKTNDKRKRLLGALA

SEQ ID NO: 140628 - protein, 351 aa, unidentified
MMIIGCDFHTRYQEIAWLDLETGETGERRLEHAGEQVREFYGALRGQVRVGIEATGYSQWFERMLHQMGHEVWIGDAAAIRASVVRKQKTDRRDAAQVLELLHTNRFPKIWVPTPEQRDLRQLVLHRVKLVQMRTKVQNQLQAMAMGQGICRKKKLWTVQGRAELERLPLDRWAQRRRQELLQFLDQMNESIRELTGEVERQARQHPDAALLMTHPGVGPNTSLAFVLTIGPVERFARGKKIASYLGLNPSEHSSGGRQRLGSISKQGNATMRWLLVEAGQMAVRGDADLQRVYQRLKFRKGSAVAKVAVARKLAVRLYWMLRDRCDYATLVRMPGSSSSAVVPEESESGR

SEQ ID NO: 140629 - protein, 411 aa, unidentified
MVKENFIYVGIDLHKETHTAVMIDCYNQKLGEITFPNRPADFPKLVTKVKKCNTDAKEVVYGLENAYGYGRPLAVWLIDKGYFVKDVNTAISHRQAKHRGAMYRKSDSDDAEAIALATLNMLDKLPDACPNDAYWSLGQLVHRRDNIMKQRTRLVNQLHEQLCIAYPSYKQFFNDISRPTALYFWEHYPSRKYLKGKSVEDLRTELVPVSHNRCSTKNCEKILDAVASDKVKNNAYQDARDMVTLSIVSDLQHYDSQLAEVDKMLEQMYKMLGCTLTTIPDVNVITAVKILAEIGDIKRFSNANKLAQFAGIAPLHLSSSGKGKDVATKQGNRRLQATIYFLAIQMVQVSSKGTPRNSVVRAYYEKRKAEGKTSQQALICISRRLISVIYGMLKNGTEYRMPVVENAGENR

SEQ ID NO: 140630 - protein, 414 aa, unidentified
MKIVISKNNQYMEPVVEFPVHVERCCGLDVHQQTVVATIRGTGLIECTRTYSTFTQDLEALSNWLESLGVTDVAMESTGIYWKPVYNILDLRFRVILVNARHIKNVPGHKTDKKDSVWIAKLLASGLLKASFIPQQPVRELRELNRYKKKLVNQRVGHVNRLHKILQDANIKLASVVSDVRGVSASAMIEAIIQGIDTPEELVLLAKGSLKHKREQLVKALTGRLSDHHRFMLSTIKNAILEVDHQIEAIQARIDLYKKEQQETVDHLCTIPGVSEKIAMNILGEVGPTVASFPNEHHLASWAGVCPGNNESAGKKKNERTVKGNKLLKTTLVEAAWAAVHTKNTFYQRKYQALIVRKGPKKAIVAIAHKIIKAVYFILRDQCVYKEINLDRWETRKRQTLEAYYHKRLNELSH

SEQ ID NO: 140631 - protein, 430 aa, unidentified
MKSNTQNAKIEAITEKTLVLGIDVGSETHYARAFDYRGIEYSKKPFKFSNTEAGFVTFKEWILDLKERHEKDKVVPGMEPTGHYWFNLGKFLQDNEMKPVLVNPHHVKKSKELDDNNPTKNDRKDPKVIAGLVREGRYMIPYLPDGVYADLRTASNIRFQLQAELTRIQNRISRWFNIYFPEYKTVYGKPDAKSGILILKAAPLPEDILTLGIDGVNQIWRDAKLRAVGKARAKTLIEAAEHSVGSKEGAVSARMEIRMLLEDYESRNTRLQEVMVLIEELVRKIPMAEKLLEIKGVGIRTVSGFLAEVGDISRFNNPKELQKLAGLALVENSSGKHKGETTISRRGRKRLRYLLFEVAMSLVSKNQEFRELHNYYTTRRLNPLKKMQSLMAIAAKLIRVFYVMLTKGVNYDPKKMVNDIKRPAVYLQTA

SEQ ID NO: 140632 - protein, 340 aa, unidentified
MSEIKRIAIDTSKAVFTLHGVDDAGRPMLRRNVRRRELLPFFEKLPPVEVVLEACGGSHHWGRALSTIGHRVRLLPAQYVKPFVKRSKNDRNDAEAISVAASQPSISSVPIKSLEQQAAAMLLSVRELLVRQRTQLVNALRGHAAELGMVAPLGEKGLAELQTEIAAADEGAVPAAAKQALMLLGQETHRIETRLAAIEVKLMQQHRANPVSRRLSGIPGVGPIGALNFALRIDPAQFRSARHLAAWLGLVPRECSTAGRQRLGGISRAGDERLRQLLVLGATAVIRHAKPGRPATSPWLLSLLGRKPRKLAAVALANKMARIIWAMMTSGQAYRSQPAA

SEQ ID NO: 140633 - protein, 397 aa, unidentified
MIAVGIDISKAKSTVAVIDSDGTVLASPFTMAHTQPEMEAFVTYLKGLGEPTTILMEYTGHYHYPVLKKLQDEGFPVCIVNPYQMKKYGDVEIHKAKTDKKDALRIAAYALEKSYKLVPYSSMEQKYEDLKFLSRQYSQRITYVAKLKVQLIALLDQTMPGITRILPLNSRNPEKCALLLFIKRFKSFDEIQRIGKARFLASYDVLAKKASERSASSKGLSIYELAVDSITTRGEDPYIWLSQNQCVDLLSTTQNAADEIISQMRNIAETIPEYKVLRAMHGVGDRLGPIILAEIGDVHRFHSGKALNSYAGNDAPPYQSGQFESRNRHISKRGSSALRKACYEVMQALKLIKPQDDPVYLFMLKKEQEGKPFNVAKMAGVNKFLRIYYARAMELYK

SEQ ID NO: 140634 - protein, 412 aa, unidentified
MTVTNQFAAHVGLDWADKKHDVCVQFKNGERVFDVIEHTAEALDAWLTELHQKVKGRIAIALELKKGPVVYALQKYPFITVFPVHALSLARYRQAFSPSGAKDDPQDAELALELMLRYPQKIKAIEPDNADIRLLQQLVEQRRQLVEDKRRFVNRIINTLKQYYPQPLEWFSHRGSLLLCELIIRWPSLQQLKRARRDTIRNFLNAKGGRAMALTEQRVASIDNAIPLTTDPSVIEANALMAAALATQIKVVSEIIKTYDERIETLFDTLPDAGLFKSLPGMGPCMGPRMLAALGDNRDRFNSAEEIQNYAGIAPVTERSGQKSWVHWRWQCAKFVRQTFVEWTAKTVNSSYWARLYYQGQREKGKSHQSAIRALAFKWIRIIYHCWKTRTRYDEAKYLLALEARKSPLLKP

SEQ ID NO: 140635 - protein, 425 aa, unidentified
MGIVRNKVCGADIHKKFLVATILSRDGTQISERFGMTLDEILKFEEWVLENNCEQVAVESTGVYWVPIYTVLEDKIEVIIGNAYQIKHTPGRKTDLRDSEWIAELCLKGMIEPSRVFPKEDRELRTLTRARENLVNNISQLKNRIHQSLESSCIKLSSVLSDIFGKSGRYILDGLLEGKTIDEILVGIKSKKIKKKDRELREAIKNSLDTAQILVIRINLELMEEFQKKIKILDTEIMSRLERKSEDVEIAMSIPGIAFTSASSILAEIGNYRDFANGNKLAAWCGLVPSIYGSAEKRIMGSITKQGSKHVRRMLVQVAHAISRTRNSKLKNFFLRIKAKKGTKVAIVALARKVLCILHHLLVNREMYEESGNLKPKKPLKFDRTSSPIQITEQYMIDALVKAGYIIKKMDKGGGSGGGYSTPLS

SEQ ID NO: 140636 - protein, 343 aa, unidentified
MGTYYYIGLDIHKRTISYCIKAIDGSLIGQGKIEADRKSLDEWAKGLPGPWVGAMEATIFTGWVYDFLKPHAVALKVAHPEMLKAITAAKKKNDRADAEKIADLLRVNLLPECHMLSEEIRELRRVLRYRNHIVRTAVKMQNKISGLLMEVGVSYSKRRIHGRKYFHEILERVEEIPPSVKELLKLSRSSYEMFRAFQKRLVETLRTNNLIHDRVQCLMTIPGVGEITALTWVLEIGDPGRFASIRQAVSYCGLCSAQRESAGKEQRGPISKKRNKHLQTMLIEAAKLAPHWNEQLAIVHERELKKGNRNRATLAVARRLVAYMLAVDKKQADFKLPAEIQAA

SEQ ID NO: 140637 - protein, 392 aa, unidentified
MYFVGVDIAKYHHEAAILDEAGNVIVKKLKFDNSHQGYNKLMKEVRKLSCEAVFAMEATGHYWLALYAHLRADKQTVHVINPIQSDALRGLYIRKTKNDAIDAQIIADVVRFGRYCQTSVAPEDILSLRELCRQRFYIVDTASDFKRKAIALLDQTFPEYGKLFSDTFGKSSLELLSNYTTPEEMLAVDSGVLAELLSKASRGRLGIDKAMEVQEKAKNSFGIVMATTSFALILRQLIEQIKSLESSIEAFDKEIARIFGTFDTKLATITGIGTTLAATIFSEIGGNIKRFSESGKLAAFAGIDPTVKESCEFIGNKNKMSKRGSPYLRRAIWLASTVAAFKDPAIHQFYEKKLSEGKPHLTVIGHICRKMVSIIFAVMRDNKPYVPNLKLA

SEQ ID NO: 140638 - protein, 343 aa, unidentified
MDHFAGLDVSVKETSICIVDDTGRIVREVKVASEPEALLQVLGNPIYRFKRIGLEAGPLSQWLFSALAEAGLPVICVETRHMRAVLQAQINKTDRNDARGMAQMMRAGLYRPVHVKTLRSQKLRMLLTHRKLLQSKAIAIDNDLRGTLRNFGLKVGIVGTVKFEARIKELVENLPDLAVLVEPLLMVRRVLREQFSVLHRRLLAIVRDDEVCRRLMTVPGVGPVVALTYRATVDVPARFRNSKAVGAVFGLTPSKYQSGEINRTGAISKCGDEMMRVMLYEAAQIMLVRLAKWSWLKAWAMKIARHRGMKKAIVALARRLAVIMHRIWVDGTEFRWTREAAVA

SEQ ID NO: 140639 - protein, 361 aa, unidentified
MLIIGCDYHPGFQQIAWVDSDTGELSERHLLHREEAEQFYRKLQEQGVKARVGMESSGHSRWFERLLRELQCELWIGDPAEIRTKRVRKQKTDRQDAQLLLRLMLENRFPRIWVPDAANRDLRQLLWHRHRLVQMRTRVMNQLHVVALNEGLRRKKVLWRPAGRTELELIVLAPWASRRRQDLLDLLDQLTPKIQELTRALEEEVEKRPVTRRLMTHPGVGPLTALAYELVIGTPERFHCGKQLASYVGSDGRIQRRSPSTGTHQQARQRAAQVSAGGSGAGHGAQQPGVAQQVFPPRDAAWKKDRQGSDGAQAGGASVLDVAPGPRLRSDAEARFARGRARTSRWCAVNHRCNDWASRSQ

SEQ ID NO: 140640 - protein, 350 aa, unidentified
MSFAHLSSRVVECEEDGLVRAVGMDVHRDFCGVAIAEAGAVRSGGRIETSPEALELFAASLARTDVVALEVTGNAGEIARILRPHVGAVVVVSPHDTGISRARAKTDRLDARVLAKLLAAGELDAVWMPDEWTRAMRRRLARRDQLVRARTRAKNEIHAVLIRRLAGRPPVSDVFGVRGRRWLSELELREDERETVAGCLRHVDFLDGEVAALDGAIASEALRKPEVLRLMTVPGVSVVTASTFVAAICDIRRFSSARKLVGYLGLDPRVRQSGPGPARHGRITKQGSASVRHVLVEAVWTAVRSPGPMRAFYERVRARRGAQVAAVATARKLASLSWCLLTREQDYSFA

SEQ ID NO: 140641 - protein, 347 aa, unidentified
MVHAGLDLSRRRLDVQLVDGEGNRLGELAVGPDADGLWSLARQVRAVYDQPVRAAIESMTGARFVHDQLELAGWEVEIADAQKVKGLAPLACKTDRIDAWVLAELSRRDLVPSIWLPDPEVRAERERARWRLHLVRHRTQLKNRIHQTLISFGHPCPVSDLFGVRGRELLDGMSLPEPWRGTVEAALRLIDDLDRQVAGIERELRDLGADHPYVSLLVTVPGIAWVLGYTIASEVGDIERFSSPTKLVGYTGLCPIVRQSGGHDHRGPLAKNGPRYLRWALIEAAHQASRSPLYRDRYQRTKHRLGKQRGPKVAAVELARKLTEAIWYMLTRNQPFAPGGAAPPLAA

SEQ ID NO: 140642 - protein, 410 aa, unidentified
MELLHAPLRSSALVVAIDPGKVAHRVWVTSEHGLIGEPVSLPVLRSGIEALSSLISASQIAGPPVIAIEATGGLHQAWVTELERRYPGSVRLFAPSQTQAARAQLGSRRRKTDDRDCAALVWLARQGAGRPAVDRGSEALLAAVRYRRALVADRKTAQQRLHDQLNRLCPGLSAPAGHGRTLKLEGPAGQAVLACAIAFGGQPPSIRSLLARAPSRMTATTARFWAGRWRSCLPPPADATTRAQRLGQDLARYQALQADITTTETEITRLLARTPGQILTSLPGVAAVRAAAFAAHVLPITRFPTAEHLYAATGLAPATWQSATLHRRGRISRQGLAEHRDALMSIAWGLSQHCLPFRERDHELRARGMRPIQARVALARHACRLAYALLATQQPFDETRYRQARHSRGR

SEQ ID NO: 140643 - protein, 317 aa, unidentified
MDESRSASICVGIDVSKDRLDVHLRPFDEAFSVAREGKGLETLVERLRALDVALIVLEATGGFETTVAAALAGAGLPLAVVNPRQIRDFARALGKLAKTDAIDAKVIAIFAEKISPQARPIASQEAQRLGELVARRRQIVEMIGMEQNRRRRAGEKRLIKQIDRHIAFLEKELAGVDSDIDAGVRASPVWRETEELLTSVPGVGPVTARTLIAELPELGQLDRRKLAALVGVAPFNRDSGTWRGHRMISGGRTSVRTVLYMASLAAIRFNPVIRENYQRLVARGKPKKVAIIACLRQLLKILNAIVRDATPWAVQSA

SEQ ID NO: 140644 - protein, 447 aa, unidentified
MEVLYPRCCGLDVHKSSITACVLLAQAGKPLKHIRRFGSATRELLELVAWLREFGVEHVAMESTGVYWKPVWNVLEGHFQIVLANAQHIKAVPGRKTDTKDCQWIAELLQHGLLRASYIPSVMIRDLRDLTRARTSLSQEHSRIASRIQKVLEDANIKLASVASNALGKSGRAMLEAIIGGEESPERLADLALGHLRLKIPQLQTALEGRVRDHHRFLLRSLLRQLQFMEAEIALLDARLDEIGREHLDLAEALDRWITVPGVDRVAAWSFIAEMGIDVTQFPTAAHLASWAGVCPGNNESAGKRISSKTRKGSPWLRRMACQSAWAAARTKNTYLSAQFKRLAARRGRKCAIIAVAHSILVIGYHLQTEELYLYRPRQQLLRSTPRRRFKAIPGEASGEPRALGHTPNPNCLNRVFSREKDGLRTGCCMHPSCRRALSTRDKGDRQ

SEQ ID NO: 140645 - protein, 424 aa, unidentified
MDVIYDRVAGLDVHKETVVATVRIMVGRKAEHECRTFETTTAGLSALLAWLTETRCSHVAMEATGVYWKPVWNILSDGAFELIVANAAHIKNVPGRKTDVNDATWIADLLACGLIRGSFVPSETFQELRALQRTRKQLTREQTRHVQRLQKTLEEANIKLDSVISDIMGLSGRRMIEAIIAGVRSPRKLADLADRRIKASPKELYDALHGRVTDHHRFRLRLHLGQYDALAEAIAALDKEIDAAIDRIDGEREFAGQVPFRAASREVCQIPGINLLAANMILAETGLDMGRFRTAGHLVAWAGLCPGQNESAGKRKSSKLRKGAPWLKTTLVQCAVSASNKKDSYFRAQFQRLKSRRGAPKAFCAVAASLLTTIYHMLKDGTQFRDLGKDHFDKRPTKAKVNRLLAQLAKLGYQADVRLLANAP

SEQ ID NO: 140646 - protein, 453 aa, unidentified
MEQPQEIEDEEYKRTWERVAAIDVAKGSGVVCTRVPGEDRPGWRRTHVWTVKATKQAVIELADHLRGLQVQIVTLESTSDYWRIWWVVLEAAGLKVQLVNARHVKNVPGRAKTDKKDAVWLAKLTERGLLQPSFVPPPEIRRLREFTRLRTDLVRERTRYWARLEKLLERALIKISAVLSKLTTDTARAMIEALIDGQRNPKVLAELAIGKARSKRAELAEALDGDWQPHHGELARILLDQIDALTAQIDALTDRVSELIDQIPAAWGVDADGVTGPQAGAGPDAVILPAVARLDEITGCGIIAAHAIIAEIGLDMTVFGTSGRLVSWARRSPQTRQSGKKTTTGRAGKGNPYLNGMLGEIAASASRTDTFLGERYRRIARRRGKRKALAAIARSILVIIFHLLADRTARFTDLGPGWYDTQIDAQRKTRNLIRQLEALGHTVALTPAGAAAA

SEQ ID NO: 140647 - protein, 427 aa, unidentified
MSYRIAGIDVHKKMLAVAVADVEVDADFQFEREKVGTTPIELRRLADWLVEHEVDEVVMESTAQYWRPVWEALEQQWRPQRRALKSAPPLAGTLHLAQAQSNRGAGGRKRDFPDAERLVKRLVAQELTLSFVPDAEQRLWRTVMRRKYQVTRNRVQLQNRLEALLEEAHIKVSSLVSDLLGISARRMLQALADGETDPAALATLATARLRATPEQLCDAFQACPTLHPVYRRLLQLTLEELRVIEDHLGQLDQQMADLLAAHHDAVQRLAEVPGLGVDSAQQIIAEVGATAATFPSAKHLASWMGACPGNEESAGVNYSHRCPKGNQHMRRVLNQAANAAVKAKGSIFAIVYRRLVPRLGHAQAIGAIAHRLCRLIWKILREGIRYEERGPAVSVEAKKVRTRKMIRELRTLGYRVELLPAPSSNPA

SEQ ID NO: 140648 - protein, 527 aa, unidentified
MAVKFKSSRRRKARPHVFQKPRGVLHPRVQAVGPEHFAIVCVDCAKARSKMMLADFYGRVLIEPTTIAHDRFSLDAAVRSVRDAMAQHKLKDGIVVVERTGRYHKVVQRTFTKAAFEVRVVHPFATKQFRQPADPGNKTDDTDLSAILRATISGFGLSEPKPDPLFVRLQLLARYRRSLVRGRVTIQLKMLEHLEACMPGYSRCVSDLFDSEVAMWVAKNLESAQAIADVGVMGLVRRLSEAGVRRNVPVVERIVAWARSAPIADEPASFHHRFFVELDEDQISKRRRIKGLEAEIAEQLVLTPYVLLLAIPGISVVSAAEFAGEAGPMERYPSARAITGRAGLYPSRYQSDEVDRRDGKLIRCANRDLRYTLTLIADNLLRCNEYFRVLGSSWQLRDKDPRDTRVKVAGRFTRIAFQVVGGRQVYRHPCARQRDYILEKLINFCVEHEIPPAQHRRILNAAADQLPPTARSEEAIPLQERQARVRKHRGSGPRSLGEILPELLAKLGVTLVRSNESGEYDLTKRPS

SEQ ID NO: 140649 - protein, 416 aa, unidentified
MNAVGIDVSSRKSTVAVLRPLGEVVCLPFDVSHDADGLASLAEKLKAIDGETRVVMEHTGRYYEAVAKALHEAGFFVCAVNPLLIKEYGANSLRRVKTDKADAIKIARYALDNWADLRDFTPMDAIRYDLKTLNRQFQLASKQRTASANNLIALLEQSFPGIRKCFDSPVRSDGTQKWVDFAHSFWHVDCVRKQPFAAFCERYRKWCKRHAYFFKLSNAEEVYALAKRAVVLTPKSKVVKVLVQEAANQLSSISRSVEVYRAEMDRLAAMLPEYPVVMAMYGVGKSYGPQLMAEIGDVRRFERKQALVAFAGIDPMPNQSGDKNVRSNKSSKRGSPYLRKTLFNVIRTYLQCAPQDEPVFQFLNRKRAEGKPFYVYMLAAANKFLRRYYAKLRDYFASLDTLQSVDPIPATLKASL

SEQ ID NO: 140650 - protein, 313 aa, unidentified
MAQIVSRAGIDVSKRSLDVALWPAGKTLHLERSDPVWSDSLAAWLKAHDVGRIGLEASGGYEAEVVEVLQSHGFEVVVFNPQRIRLFARANGRLAKNDRVDAAVIAQASAVLSARLAPKRPAALTALIELLTYRRRLQEWIIDCTNQLEHLKDAALRRRTQQRKAALQRERLAIDARIAGLLAGCANWQALSVRLQTVPGVGPVLAQMLLALLPELGRLSRRQIASLVGVAPFDRDSARRRAWRHIEAGRAALRHVLYMAALSAKRYNPVLAAFAKRLAGKPPKVVTVACMRKLLVILNAMVRDGTDWTAAAV

SEQ ID NO: 140651 - protein, 338 aa, unidentified
MKLYGAIDLHSNNNVTVLIDEQDKVVYEKRLPNDLGVIAQQLAAYQSSLEGIVVESTYNWYWLVDGLMDKGHQIHLANTAAIQQYEGLKYTDDHSDARWLAHILRLGVLPQGYIYPKEERAVRDLLRKRGQMVRQRTANLLSLQNLITRNTGSSISSNRIKTLDSETVDALLPNPDLALAVKANLAMIQCADGQIDILERTVTDRVKLRAEFSFLKTVPGIGQILALTIMLETGEIRRFSTVGDYASYCRCVGSQKLSNGKKKGSGNTKNGNKYLAWAFVEAANFAIRYNARIKSFYQRKKAKSHGVLAIKAVAHKLCRACYYIMKDQVPFDITKAFA

SEQ ID NO: 140652 - protein, 309 aa, unidentified
MEHFVGIDVAKDRLDVHLRPSGESFTVIRDGEGLVQLVDRLHRLAPRLVVMEATGGYETIVASAVAAAHLPLAVVNPRQIRDFARATGKLAKTDAIDAAAIAHFAEAIQPPARPIAEPEAQALGELVARRRQVIEMIVAERNRRRRATQRRVVRAIDRHLELLQGELCELDADIDGAIRGSPAWQADADLLASVPGIGPVTLRTLIAELPELGRLDRRKIAALVGVAPINRDSGAMRGRRSIAGGRPAVRTALFMAALVASRKNPIIAPYYAKLRAAGKTGKQALTACIRKLVVILNAILRDRKPWQPA

SEQ ID NO: 140653 - protein, 343 aa, unidentified
MQAVTTIGLDIAKSVFQIHGVDAAGHVVVRRKLKRRYVVPFFQKLPPCLIGIEACASSHHWSRELKALGHTVRLMPPAYVKPYVKRQKNDAADAEAICEAVTRTNMRFVATKTPEQQSCLMLHRTRHLFIRQQTAVINAIRAHLAEFGIVAPVGRNGVEQLLDVVADASDKRLPEIARACLVALGTQLRTLKAQILNFDRQIMAWHRSSEASKRLDEIPGVGPALATALVASVADAKAFRSGRNFSAWIGSVPKQHSSGGKEKLGSISKQGDRYLRSLFTAGALAVIRYAKIHGTKHRPWLTALLARRPTKVAAIALANKIARMAWAMMARGDRYREPVALAA

SEQ ID NO: 140654 - protein, 383 aa, unidentified
MSDHSEAFVAFDTSKLRNAVAIADGGRGDEVQFLGEIDNTPAAIAKLVRKLAGKYERLTFCYEAGPTGYGLYRQVKGLGHECIVAAPSLIPKKAGDRVKTNRRDAVGLAKLLRSGDLTAVWVPDRQHEAMRDLTRARETAMLDLRAKRQQISAFLLRQGLHYPEDKRTWSKSHLNWLASQKFDIAEHRIVFEELMEAMRQAQGRLDRLEAAIRAAVPDWSLGKLVIALMAMRGLDMISASTIVAEVGDLSRFRTPRELMAYVGIVPSENSTGDKVKRGPITKTGNRRVRRMLVECAWSYQFPPRLSKDKQVKVDAVPQAVREIAWKAQSRLNQRYRALLRRGKLKNVAITAVAREFVGFIWAVAQAVGAAPAANNRTAPAAAR

SEQ ID NO: 140655 - protein, 378 aa, unidentified
MTKIMRYVGMDVHADSIAIAVVEGNGVERDLGTIPNRPEAIRRCLKKLGRADELHCCYEAGPTGYVLYWQLVRMGIDCTVVAPTLIPTKAGDRVKTDRRDARKLARYLRSGDLTAVWVPDEAHEALRDLVRARQAAKIDEKRARHRLQKFLLRHGQRPAPGVKAWSSAHRAWLHALKLEHATLAVVLSEYLHELLHSEQRVERLDTAIDRAIDEAPETIRAVVAALQGLRGVRRVTAAGVVAEIGQFSRFAHPRQLMGYSGAVPSEFSTGGPGNHRRGAITKAGNAHLRRLLGEAAWCYRFRPAVRYPLKQRQQGLPAAVTAISWKAQLRLCNRYRRMVARGKTKQKVVIAVARELLAFMWAIGVEVETHQAPARTAA

SEQ ID NO: 140656 - protein, 424 aa, unidentified
MREEGLSMAEEIEWFVGIDWASQSHQVCLIDAHGECLGERAVAHGGAGIEELCDWLIARTGATPEVIGVAIEMTQGPVVEALLERGFCVYGINPKQLDRFRDRFTVAGAKDDRRDAHVLGDSLRTDRHAFRRLSNDEPVIVKLREWSRMADDLQQERARLASRMREQLWRYYPQMLELADDLAADWFLDLWNQAPTPAKAARLRQTTIERFVKAHRLRRWQAPEVLGILKQKPLSVAPGVVEAASDHIRTLTVRIRLVNQQLKAAHRKLDELCAQLVPSEEDEPGQQCEQRDVVILRSMPGLGRTILAVLLAEVWQPLRRRDYHALRSLSGVAPVTRRSGKTCVVVRRYACNKRLANALYHWARLATQHDALSRRRYAALRQRGHSHGRALRTVADRLLSVACTLLEQQTLFDPTYEVREAAGA

SEQ ID NO: 140657 - protein, 319 aa, unidentified
MNKSTLFFGIDISKDCFDVYSDQMGYNSYSNTKDGFKIFLKVLGKTSHCVMEATGCYHHKLAMFLYEKGIAISVINPLIIKRFIQMKLRRVKTDKSDAFMIYNYAYEQSLEQWEPEVAYIVKAKELLSLIQTYLRQSTALKNKLHALENRGHSKGIMITSIKRQLRQLKKEHELLEKELETLIKSNEPNLFSRLNTIPGIGKKTAVLMMVSTSNFNSFNSYKQVSSYLGLAPNERSSGSSIRGKSRISKTGDGLLRNHLFMCSFTASVHNPQCKALFDRIVAKGKSKKLALIAVCNKLIKQAFAIAKSGLPYDSNYAVK

SEQ ID NO: 140658 - protein, 372 aa, unidentified
MKKNITSGKDLKQEQKHGKGPITIGMDLGDRTSRYCILDGNGETVREGSVGTTKTAMTQLYGPLKKCRIALEVGTHSPWISRLLKAMGHEVIVANPRQLKLITESSRKNDRVDAEMLARLARVDPKLLRPIRHRGEEAQLDLMIIRARAALVEARTSLVNAVRGFSKTVGERLASCDTDQMGVEKMAGLPAGLQKVLEPLLSQVEALTAGIKKHDREIEQIARVKYPETSLLTKVGGVGTLIALTFVLTVEDKNRFERSRDVGCYVGLKPKQGDSGESQPQLRITKEGDAYLRTMLVQGAHHILSVRSQDSDLKRWGLKLAERGGKNAKKRAIVAVARKLGILLHVLWVTGEVYEPLRNSHAAERQSRKQAA

SEQ ID NO: 140659 - protein, 409 aa, unidentified
MEVIIDKGCGLDVHKQSVVACIMGKDIKKDIQTFGTYTSELVSLKKWLKDNGITHIAMESTGVYWKPIFNILEDEFEILLVNARHIKNVPGRKTDVSDSEWICKLLRAGLLRGSFIPPRDIRELRDLTRYEQKLINNISSEKNRIQKILEDANIKLSSVVSNMFGVTATKIVEELLKGELTPQELCQFAKGRLSPKKEEIIKAVEGKLTSHHKLMIEASLQHIKAMENIIDTINIQIKKLLKKYNKEYELLQTIPGVKEKAAATLIAEIGTNMDQFPTEDHLCSWAGIAPGNNESAGKKKSGKITKGSKALKNILVQSAWAASKTKDTYLSSKYKSLVGRRGKKRALIAVAHKILQIAYFIIKDKQPYKELGGNYLELRKEQTIVKGLKKRFEKLGYNIKIQKEEVKVA

SEQ ID NO: 140660 - protein, 347 aa, unidentified
MACRLTRDVDGQPLAQTQTFGTTTGELLRLSDWLVEGGCSHVGLESTGEYWKPIYNLLEGTLTVWLLNAQHIKAVPGRKTDVKDAQWIAELLRHGLVRPSFIPPPPQRELRDLTRYRTTFVRERATLVNRVQKVLESTNLKLASVVSDVMGVSSRAILAALLAGEADPFVLAGLAQGQLRKKRPQLEQALQGRLRPHQSFVLTELLAQIDSLEETIARFDAQIRDACAARDDAAQVVALLDTIPGIAEGTAQLLVAEIGTDMSRFPSAAALAAWAGLAPGNNESAGRQRSGRTRKGNVWLRTALVQAAQAAAHMKHTALAARYRRMAARRGAKKAVIALAHSLLVIA

SEQ ID NO: 140661 - protein, 392 aa, unidentified
MEPVVGLDVAKGKSVFQAFLRKNESYGRAESISHSEDGFKRFGNLIAELKNLTGSDPIVILEATGHYHREVVNFFTGVKINHIIINPLQSKRAKGAKLRKVKTDAIDAWNLAEMYYRGDVRPHRTWQETYTELQHATRQHEFVTSLYVQAKLNMRALLDQVFPQYENVFYDLYSVTALKVLQTCLQGNIENMEETILDTAGKSHSKSWINEKLACLRETLGVWEKRDKSLSQSAALEGMLALLLTLRMQLEQLEEQIAKLAANLSEVALLKSIPGIGDKLAATIISEIGDAKQFESAKQLVAYAGLDPGVHSSGTFTATNNRITKRGSKRLRRALYLAVQCSMRKGTENRIRNYYDKKKREGKPYKVAVIACANKLLHYIYAILTKGQPYSN

SEQ ID NO: 140662 - protein, 348 aa, unidentified
MNQRYEKSCQYVGIDLHRRRSVVLRMDGEGEVLECVRIENSVRALLAEVAKAGPGAPVALEATYGWYWAVDALTGAGFAVVLAHPRGIKTMQNRRAKTDALDARELADLLRLGRLATAWIAPPQIRELRELVRYRHKLVHDRAAVKASIHAVLGKCGVIPEIADMFGPVGTKMLDALELPEPYASRVASQRRILAALTAEVVRLEIETARRLKDNTEYRALLTIAGVGPVMAAIFVAEIGDVHRFATADQLACWTGLTTRVDSSDKKTRYGHVSKQGSRLLRWAAVEGCQRAREPYLADKRRAIIQRRGRGAQHIATVAAARHMIKVVYYTMRDGHARCLDAPLPVPA

SEQ ID NO: 140663 - protein, 406 aa, unidentified
MKRLFAGLDWAAQTHALCVIDEHGVVRERFEVAHSTAGLHQLLGKLRSVARDAAQLAVAIERPSGLLVDTLVEAGYPVVPIHPNVVKATRPRYRSHGAKSDASDAYLLADLLRTDGARFEALKPQSDAIRALRAMVRTGDDLVATRVQLANPLRSLLESFWPGAAVVFAAIDSPIALAFIQRYPTPQAASHLGEKRLAAFLAQHRYCGRRSPAELLERLRAAPAGHTGDLELGAKGELVRAFASTLEPLISQIGELSARIEHNITELPDGRIIMSLPRAGRICAAQILAELGDVRERYPSDDQLAAEAGACPVTYESGKHRSVTFRWACNRRLRRAITCLADNSRRDSPWAATRYNAARARGCDHPHAIRILARAWIRVLWRLWTDRTVYDPAHHRAALAVTKARG

SEQ ID NO: 140664 - protein, 356 aa, unidentified
MYGLKHQKEKRSMDHFAGMDVSVKETSVCIVDDTGKIAREVKVASEPEALLAVLTNPAYRFKRIGLEAGPLSQWLFSGIAEAGLPVICVETRHMRAVLKAQINKTDRNDARGIAQMMRAGLYRPVHVKTLRSQKLRMLLTHRKLLQSKAIAIENDLRATLRNFGLKVGVVGTVKFEARIQELVENVPDLAMLVEPLLIVRRVLREQIVILHRRLLAIVRDDDVCRRLMTVPGVGPVVALTYRATVDVPARFRKSKAVGAVFGLTCSKYQSGEIDRSGRISRCGDEMMRVMLYEAAQSMMRSKKWSWLKAWAMRIARRRGMKKAIVALARRLAVILHRIWVDGTEFRWTREQAAAAA

SEQ ID NO: 140665 - protein, 343 aa, unidentified
MSAVVTIGLDLAKSVFQLHGVGESGETVLRRRLSRHELVSFFGKLPACLIGMEACSAAHHWARQLTCLGHSVRLIPPQYVKPYVKRNKTDAADAEAICEAVGRPNMRFVQLKTLDQQSVLTLHRVRSAFVRQRTSAINTVRGLLTEFGIVAGKGIPRLAELRQRMDETDADLLPDEARAAITEEFEHIDALTARIESVEARIVAWHKTSEASRRLASAPGVGPITASALVASVGDGRQFQSARHFAAWLGLTPRISASGGKEHIGKISKGGDRYLRALLIHGARAIVGTSFRKGVTPRLWLKQLLARRPVNVAAVAVAHKTARALWAMITRGEEYRRVAAQAA

SEQ ID NO: 140666 - protein, 400 aa, unidentified
MIDINDIGVFLGLDVGKSNHHGHGLTPAGKKVFDKALPNGEPQLRAVFDKLKAKFGTVLVIVDQPASIGALPLTVARNADCKVAYLPGLAMRRIADLYPGEAKTDARDAAVIADAARTIPHTLRSLELADEITAELTMLVGFDQDLAGEANRTSNRIRGLLTQFHPSLERVLGPRLDHPAITWLLERYGSPAALRKTGRRKLAEVIRPKAPRMAARLVDDIFDALDEQTVIVPGTGTLDVIVPSLAKSLAAVHEQRRALEAQIETLLEAHPLSQVLTSMPGIGVRTAAVLLTTVGDGTSFPSAAHLASYAGLAPTTKSSGTSIHGEHAPRGGNRQLKRAMFLSAFAALHDPASRSYYDRCRARGKTHTQALLRLARQRINVLFAMLRDGTFYEPRTPRHA

SEQ ID NO: 140667 - protein, 403 aa, unidentified
MNNVAGIDVSKGKSMVSVLRPFGEVVAKPFSVGHTGSELKELADYLKSLDGETRVVMEHTGRYYEPVARFLHEEGVFVSAVNPKLIKDYGNNTLRKVKTDKADARKIARYGLDNWAELRQHTPMDTIRMQLKTLNRQQSLYTKTKTMMKNNLIALLDQTYPGVNALFDSPVREDGSQKWVDFAMTFWHVDCVRNMSLTAFAERYRKWCKRHGYNFSQSKAVEVHAGAQDLIAMLPKDALTKTMVRQAIDALNAVSASLERLKAEMCTLAAQLPEYPVVMAMHGVGDSLGPQLMAELGDVARFTHRNAITAFAGVDPGADQSGTHEAKSTRVSKSGPPELRRALFLVMDCLLKTQPQDDPVYRFMDKKRAEGKPYLVYMTAGANKFLRIYYGRVKEYLASLEGN

SEQ ID NO: 140668 - protein, 418 aa, unidentified
MSKTLYVGIDPHQKENFCCLLDQEGNKIINTFSVANNLEGAKELEDRIDLIMKEHCFTELKAATEAVSFLDLHIVDYLASSKLLSKYSPSIYQFNPKITSGFKKAYPDKDKTDAIDAFVVADRLRFGRLPEPYEDSQPYFPLKRLTRYRYHLVSNISREKNYFLTHLFLKYSSFSDVKPFSNVFGKAGIAIITEFFSSDELASMDIEELVEFLIKEGKNRFSNPEAVAQKVKQVARESYRIRPALANSVNLILSSTIENIRALTSSLKEVNEAIANELKAFPNTLESVKGLGPVYSAGIFSEIGNIKRFSSHAKLAKFAGLTWRKTASGNFEAEETYMTKTGNEYLRYYFVEAANSLRMHNEEYRLYYESKYKEVPKHQHKRALALTARKLVRLVFALLTKNRLYQENEAFSKNGVNF

SEQ ID NO: 140669 - protein, 418 aa, unidentified
MIDDVQWFVGIDWATQSHRACLLDVEGRHVSEHDFAHDGAGLTELRDWLLEKTKAAPGQIAVAIETPHGPVVEMLLDHAFLVFAINPKQLDRFRDRFTVAGAKDDSRDARVLGSALRTDRHAFRRLVVDDPVVIELREWSRMADELQQERIRLANRVRQQLWRYYPQAVELTDDVADDWFLALWQQVPTPATAAKVSAKTITRILKDHRIRRLDAATVLLTLRKTPLFVAPGTTEAACAHIRNLAARLHLVNQQIKEAHRALDGLCAKLEAATENPLGQIREQHDVTILRSWPGIGRIVLATLLTEATEPLRRRDYHALRALAGTAPVTRRSGKQCFVIRRLACNKRLQNAVHHWSRVAIQHDTAARRRYDALRRRGHGHARALRTVGDRLLHALCAALKRQTTYNPNCQTAQMTASL

SEQ ID NO: 140670 - protein, 454 aa, unidentified
MLDTTTFVGLDVHARSIKAVSLDVMTGEVRAATFGYDAGAVAEWVRSVDPGARCVYESGVTGFDLQKRLSGLGVDCVVGAVSKMIKPSADRRRKNDRNDAEFLARMLSVGNVVEVWVPDDECEAARDLTRALEDARDDLSRSKQRLSKFLLRHGLVFDERTPTGRRKGNWTRAHWSWIESIRFAEGADEEVLAYYVDAVRRAAEEKARLEGLVEGEARKPRWRRRVDSLRCLKGVDTASAADLVFEAGEFSRFRNARSFAAWVGLTPSEHSSGESDRRGAITKAGNKHLRKTLVEAAWHYLTCSGRPKDLAKGQAPDRGANKACRQGRAEAGREAGGAARARGARQQGERRHGARARLLGVGGRPHGRGGVGGGGPPHISQSPRKRFDPKPLRRTSGPFSASAQGATRVHRLSVRRRSLSRSNGLPSERSPRADIKLQRRASVRHAEVAADGLI

SEQ ID NO: 140671 - protein, 450 aa, unidentified
MAFKIFRKNCCGLDVHKTWIYACMGITDTNGRTEYKQARFSSFTKGLQKLADWLAKYDCNDVCMESTGKFWIPVFNILEKTCWVTLAYPKYTKPQKGNKTDRKDAKWICDLYMCGMVKPSFIPPPDIRQLRDLMRYRMKLTNMLTGEKNRAQNCLTVSNLKLDDVFSDVFGKSSRSIIQYILEHPGEQFDVTPFIHRRCKHPVEEIQAAVDGVVSREQAAKLKECLLHIDQLNAHRERIEAEILRLAEPYPYQLELIRTVPGFAAAPLTAVALISEIGVDMSVFPSAKHLASWAGCCPRNDQSNKKVKSTRISRAGCYLKPLLVQIANAVIKSDRHPECRERYRRIKARRGHKKAIIAVCRMLLTAIWNVLSKLEPYSAKGYLADKLTEHSVVISKAEGLALLSRTNWPSSQVETLFHIVFSRSPCGCVFAPFFLLLRLSLCFKLYHLSV

SEQ ID NO: 140672 - protein, 353 aa, unidentified
MNSLTDLREVVDVVIGVDTHVHTHSAAVVDAATGGVLDEITVEATAEGYSELVEFANNHAMLRAWAIEGTGGHGAGLSRHLLEMSEIVIELDRPKRAARRNGAKSDPLDAIRAAREAMARPRLGTPRSGGERQALSVLLAARRSAINASTEAQQQVFSLVIAAPEPIRLRFRGQKLAAMLNTAANLRVHASWDTETTSTVVALRTLARRAHAMLKEARELQKAIVAIIRNWRPDLLEEFGVGPIVAATVLCAWSHPGRIHSESAFAMLAGVAPIPANSGQVTTRYRLNRYGDRQLNNALHTVVQSRIQYQPATRDYVARRTAEGKTGREIKRCLARYVARDLYRLLENTATTA

SEQ ID NO: 140673 - protein, 355 aa, unidentified
MNFTAIDYHKRYSFASTLNEHGQRIGEARIVGNSPAGFVQFFRSLGGPSQVVIEACWNWGWLYEQLQQIEEVTEVVLAHPYKTRLIAEAQVKTDKLDARTLAQLLRADLVARAHVPSAATRQRKNVLRQRLFWVKLRTAIRNRVHTLLARQRGLVAPERSDLFGKKGQQWLAQVELADPDGWLLRQDRELLALLDAHVREIERYTEAEIADDPNLQRLRSIPGIGSVLAAVIGTEIDTLGRFVRPAKFTAYAGLMPTTHASGGHCYHGPLVSGCNRWLRWALVEAAWVAVGHDAYFGAQYRHHRDRGKSATIAITIVARRLAQIVWHVLHEARDYEERNWQVVSDRSGVMLTGRS

SEQ ID NO: 140674 - protein, 417 aa, unidentified
MNSPPETIPIQRYIGIDIHKHYLMVGGQNSHQEWILKPRQVQMVHFRSWAEKNLKEGDAVVVEATGSVWDIYDIVDPLVSKTVVANAHKVRQIAEARVKTDKEDIKRLITLLIADIVPEVWAPPQHVRELRSLISFRWRLSKQITMSKNRLHSVVQRFNLTAPEGGLLTDKNKSWWEEQEFTDLTGFQVDRDLEIVANLESQKSAIDQKLAELSNTEPWSSDMAFLMQTPGFGLIFSMVVLSAIGDISRFSDPKKLVGYAGLGAGVHISGEKYQEKSITKAGRKELRWTLVEAAWVAVRFDPFWKEQYQRLRVRMHPNKAIVAVARRLLVSIWHILTKREPYRHFDEETIAYKMLIWAQAIGEEGRQGLTRQQFAKYGLLRLGIGQDLERIEKGGGPRRIASTEEVLALKPELAPPR

SEQ ID NO: 140675 - protein, 339 aa, unidentified
MELYAAFDLHASNSFLGVIDEQGRRVFKKKVYNDRELVLDILRPRKEDIVGIVVESTYNWYWMVDALMEEGYRVHLANPSEIQKYEGLKHADDEHDAFWLAEMLRLGILPEGYIYPKQQRPVRDLLRKRGHLVKIRTSLILSLQNIITRNCGIRLNVNDVKRLRENRVTPLLEENDDLALAGMVSIETIDFLTHKIRRIERTIQGKIQLKEPYRYLLTLPGVGTVLALTIMLETGPISRFAKVGNYVSYARKVSTKWTSNGKKKGKGNKKNGNRYLAWAFSEAAELGRRYNSQARAYYNRKMQKTNFMVAHSALSHKLARAAYYIMKDQVPFKPEKLFR

SEQ ID NO: 140676 - protein, 339 aa, unidentified
MSIIGCDLHSRYQVIALVETETGEVVTRRLEHENGEARAFYATLPKPSLIGMEATGYTQWFERLVAELGHELWVGDPAAIRARAVRRQKTDTRDAEHLLDLLLTKRFPRVWVPTPEERDARQLLKHRHKLVRMQTSVRNQLHFLAMSQGVCRKKKLWSARGRAELEGLSLGPWASQRRKELLELLDQLGPRIAELDQAVKTEAERRPEAVELMKHKGVGPVTALAFVLTIGPIERFRNSRALVSYLGLNPREDSSGGHQRLGHISKQGNQMLRWLLVEAGHSAAQFDPELRRKYQRLVFRRGRNVAKVALARHLTVRLYWTLRQASSATPPVHTPGSPR

SEQ ID NO: 140677 - protein, 348 aa, unidentified
MRRYIGIDLHKNTFTVCYLKGKVKRVKSFNMSKRDIEAFKATLSKSDEVAVESTGNTGYFFREIKGLVKAVRVINPTQFKIISQSVKKTDEKDAEVIAKYLSKGLIPEVRMKSKEDAQLSSLIGTRDKFIKLRTTLKNKIHNILNANGIVTKREIFSSDKALEKVLDYDLDKASLFELRIVIKEIKHLNEAISEIDNELKDKGSKLKGHKNLTSIKGIGDISSTILLNTIGDINDFNGDHKLAAYIGIVPRVQVSNETSHYGRITKMGNKLARTALVQSTLIAIRYNPYLRDFYIRLKAKKGSGKAIIATARKLLTIIYRTLKNNWVFEDFSSFKLMPAKEVCRLSLT

SEQ ID NO: 140678 - protein, 355 aa, unidentified
MKYYTSTTEFNCGIDLHARQMYVCVMDRQGNKLVHTNIKHNDFAYFLKRIEPYKHDLTVCCECMFGWYWLADACEAAGLTFVLAHALYLKAIHGGKNKNDRIDSEKIAHLLRANLIPPAYVYPAERRPLRALLRQRLFFVWRRSELLARIQSHQLAHNRAPEKQTRSNRDPWEQRLLAAENHPLRQLALQNDMAMIRHFDAQLVQLEEELQRQAKKLAACEYALLQTVPGIGEHLGLTILCEIGDIERFPTVKDFLSYGRLVKGSVASAGKLKGLRGAKLGNPYLRWAFGEAAVIAKRDHTVIGPLAQRLEAKMNGNKFKANTVVAIKLARAVYYMLKSKTVFDPDRLVAALSRN

SEQ ID NO: 140679 - protein, 346 aa, unidentified
MHHSTTVGVDLAKNVIQISVVSGGGKELLNRSLTRKKFAEFLGKQKPALVAFESCATAHYWARAAQRHGHEARIIPAKAVAPFRQGHKTHSNDALAVAEAARRPNIKEAPIKTVEQQGSQAILRARDRLIQECIAQSNHLRGILLEFGIAIPQGFAALLRTLPEVLEDGDNELPDFYRPTLHRLYRRMLELRQDIDEMTREVTELVKNHPVCNRLTAIEGIGPIGAMSLHATLGSGKAFSKGREASAYVGLTPRQYSSGGKANIVGLSKRVGNRKLRSVLIQGALAYVYRMKEPRSGKDLWLKALIERAGPRRAAVALANKNVRTAWALVAQGTEYQRRGQLEMAA

SEQ ID NO: 140680 - protein, 340 aa, unidentified
MNATTYGLDIAKRVFQLYWVDAQTGEIANRRFGRDDLIAFLAQRPAGRVALEACGSAHWWARKIQALGHEVVLLHAQFIRPFVQTNKTDAADAKAIWTAVQQPGMRTVAAKTEDQQAMLSLHRMRSLLIKFRTMQVNQLRGFLYEFGVTFRAGRLAGLAEVRERMAELEDTLPGAIIHNLQDQLRRINAFEEDIEQLEKRIGAWQKQEVACRMISEVPGIGRLTATALVATIGDARTFKSGREFAAFLGLVPRQSGTGGKVRLGSISKRGDPYLRTLLIHGARSVLCHTKVPTAWQKGMQERRPVNVVAVALANKMARTAWAILAHESSYQTNHVSVRPA

SEQ ID NO: 140681 - protein, 347 aa, unidentified
MLADQVDAVIGVDTHKHTHTAAVVAPTGGLVADVTIPTDAFGAKRVLAFAREHAPGRRVWAIEGSGSYGSGLTTFLLEQGEWVVEIDRPARPARRNGAKSDELDAVRAAREALSREHLAQPRRRGDREAIRVLVCTREGAVLSRTRAITHLHALVVNAPEGIRNQLRKLTTDELLDRCARLRTGPSQSIEHRATITALRSAARRALACEAEAGDLESALELIVTRVAPELLAEPGVGVMSAAHVLNAWSHQGRIRSEAAFASLAGVSPIPASSGQTVRHRLNRSGDRQLNRALHTIVLSRLQHHPETRAYAERRRAEGRTDREIKRCLKRFAARGLFRLLERSALPA

SEQ ID NO: 140682 - protein, 313 aa, unidentified
MDKTAPTFVGIDVSKRRLEIHLRPSGEGLAIDHGEEEITALVERLVALEPTLVVLEATGGMEVRLAAALAAAGLPVAVVNPRQVRSFARAMGRLAKTDRLDAEAIARFAEAVRPPVRPLPDEAARRLGALVARRRQLLEMLVAERNRRHAADPALHGRIDAHLRWLEQALAEIEGDLDGAVRDSPVWRAKEELIRSVPGVGPVSARTLLAELPELGALTRRQAAALVGVAPFSRDSGKLRGRRTVWGGRAALRACLYMAAVAAARGSNPAIAGFYKRLRLAGKPAKLALTACVRKLVVTLNAMLRTDTAWKSA

SEQ ID NO: 140683 - protein, 290 aa, unidentified
MDTPSAPLASIGIDIGKEVFHVVGFGTDGKIAFRRKIKRLALVETFKRLPPSIVGMEACLSAHFVSRALRQLGHQPRIIPAIYVKPFVKGQKNDYNDAEAIAEAALRPNLRIVREKTQDQLDLQALHRVRSRLVSRRTATINQIRAFLIEQGISVRTGATALRNSLMAILENRRDEISPRMRALIIGLYDDWIYLDERVETLAGEIEQIGEKEANCRRLMSVPGIGPLISTAVVAAIGTGEAFERGRDFGAWLGLVPRQYSSGGRSILGASPSAVASISGPCSSRPQTSS

SEQ ID NO: 140684 - protein, 342 aa, unidentified
MLTAEADKCKTKVVVNTAAGVQALLAWCAKHGAQPAQLHAILEPTGLYHEQAATALPQVRVSLVNPAQARDFAKALALRSKNDALDSYVLARYGQTLSPALWHPAPLHARQLRALLTRREALSKDLLRELNRKEKSQFSPSAPLVDGSIDKAIAFLREQIKQIERAIDQHIDNHPDLKQDCELLNSIPAIGPQAGNAILAVMHNRHIDSAQSLAAYLGVVPVQRQSGRQSEQLRTPVQSRPLPGARHVIHGGPGWDPPQPPHPRPLPAPAQSRKKQKGRAGRGHEKTGASVLRGPQKPHPLPAQLRHEWLTAKTVSVPLPGTGTHAPSGDRHPSSFSVSPRA

SEQ ID NO: 140685 - protein, 331 aa, unidentified
MYVGIDYHKRYAVATSMDDKGQVIETVRLKNEPGDLIGFVDRLPEDSKIAIEATGNWYYFYELLEGKSPEIHLAHPLKTRAIAEARIKTDKIDSKILAHLLRTDLLPESYIPPREIRDIREVLRYRASLVSLRTALKNRIHAILSKNGIIVEYTDILGKGAKAQLRSLEVRSCYRLGIDGYIKLTETLQQLINEVTETIEGIVENNPQAKLLTTIHGIGYYSALLIVSEIGDITRFPNAKKLCSYAGLVPSVYSSGGKTRHGSITKLGSKWLRWIMIEQSQHFAKSCSRLERMYARISYKHGKNTARVAVAREMLKIIYSMLVNNRPFVKA

SEQ ID NO: 140686 - protein, 349 aa, unidentified
MTQFSRIGLDTSKAVFTLHCVDDAGKPLLRINLRRAQLLPFFKKHAPTVVAMEACGGSHHWARKLLALGHEVRLIPAQYVKPYLKRGKNDRNDAEAICEAAGRPDMRFVLAKTEDQQAQAMVMKVRTTLIDQRTQLINALRGHAAEFGVIAAKGISKIPPLLTAIAAETTIPAIAREMMALLGQQIDHLNNQLAALEARFAAMHQANALSQMLATAPGIGPIIALTFAIEVDVSAFETGRHLAAWLGLTPQEHSTGGKQRMGGISRAGNERLRSLLVEGAMSVITAVETRGSKLATPWLLAMLARRPKKVVAVALANKMARMIWAMMTRREVYRRPTAAGAARSTAAVS

SEQ ID NO: 140687 - protein, 428 aa, unidentified
MDELNRSRLEAFRQLRKEVRHSGEHLIVGIDIAKDRHHAFFGTATGKTLLRRLVFSNDHEGFRKLLDQAEALEVRHGLKKVVYGMEPTANYHKPLGEYLITLGRTVVLVSGVTVKRNRESLDGRWDKHDVKDSANVADLISQGKCLYYEHPSAELRGLRGLLSLKRRLKRQEQSYRVRIRNHLIAQYFPEMDSHYGRSEREGMAIVRWCFPPSMITQIDVDPFIERVTSRRVRMEQRRRLEGVWEKAGASIGCEGVPGVEHEAKVMVEGLRQLREMIKETEDKIEELCRQFPQYQYLLTIPGFGPDISAKVLGAIGDPDRFQNGKQVLKMGGLDLSADRSGKNSDKATPEISKRGKSDLRYALYQAAFIASTKNRDFMLYYTRKLRGREKEKGIHTKMLVKLSAKMLLIAWTLMKKKEAFDPAYLNAE

SEQ ID NO: 140688 - protein, 339 aa, unidentified
MPIQSKKIVQEPKPLFAGIDVGADELILVIRKNGTPYKPQKFANAPADRARLVKKLVNLPGIIVCLEATGVYHFDLSIALHDAGVAIMVVNPKSSHNFAKALMKNSKTDAVDADTLAQYAERMDFVAWTRPSDEKISLRGFARRIDSLTRQKAAAKNQLHALSASKENPKAVLRDVNLSITQLEKRIDSLSKEALVLIKKYADLERAFKLLTSVKGIAQTSAIALMGELLLLPQGLSNREWVKFAGLDPRAFDSGKSVHKKTRISKSGNRHIRSALYMPALSAKQHDPHVKAYFQHLVDNGKLPLQALCAVMRKLLHAIHGMLKYDKPFDNTRFYAIPA

SEQ ID NO: 140689 - protein, 315 aa, unidentified
MAMPVLVSKPIVGVDVAKNELVIYQAEFDLLEAIPNTKAAIKQWLKALPGTVAIAIEATNIYHLEFADLAYEAGCTIYMVGGYELSHYRKGVKVRAKTDALDAKLLARYLKNEAEDLHPWTPPTPLYRQLLSLFRRRAALVQARVGLVQSWANEPLLKAAFAEQVKSMQQLEVLVEKTIKDHLKEAGLLGQLKRCLKVEGIGFLTGARLIAAFQRGDFRNANAFIAFLGMDLRVAKSGQKDCRRSLSKRGDPEARRLLHNAAMSASRTAAWKGFYEAQRARGFSTTQALVMLARKLARVVFALLNGQSEYQPKTN

SEQ ID NO: 140690 - protein, 410 aa, unidentified
MIFVGVDIAKAAHLVAAIDAQGRTVLKPERFTQDAEGFRRVGEILCTLTQQDAVTIGFEATGHYWVLLAEELVRQGYQPQVFNPILSGEATRTTVRGRKTDADDALLIAQVVRDGRFVAMPLPTAAQAQAKRLARERQRTVARAANAKKRLGSRLDLVFPEYVSLWSELCCRSSLALLARWPSARLLASVSVTVLTKVLKKCSRGHLGSERARDLISAAKSSIAVAREDAATEMAIRLAAQEIMLLEEQVADYDKTLNQLDLPGKSNLQTLPGIASVLATIILAEIVTIERFTSQDPHRSQRRRSRGRNGVHRLLAYAGMDCQIRESGTWRGTAHMSKRGSRFLRTAVYQAAQVARHHEAFQDIWHQHYVVMKQPYKVALSHVARKLLQAIYGMLSRNVPFDPVAFKKAA

SEQ ID NO: 140691 - protein, 324 aa, unidentified
MIDGILGIDVSKNTLDVSISSCGKVRTKSFANTSDGWHHLLDWLVAQKIRRVHACLESTGRYSLGIACALYEAGHIVSIINPAQVRDFVRTKLGRNKTDGIDASRIREYCELFKPLPWAPPSEAHRRLGELQTIRSGIIAGLTEWKNRKNSGIIDAEAQALADATILHFTSQIGAVDKAIALAIENDSDLRSKRDLLLSISGVGDTLAGIVLAELPGPDVLHSSGEVVAYAGLNPRQHQSGTSVDRATRISKIGNAVLRAALYMPALSAMRYNPAIVALVTRLKSRGRLKPKQIVVAAMRKLLVLCFGVLKTGKPFDPAIAMGC

SEQ ID NO: 140692 - protein, 387 aa, unidentified
MPKHNDLSRCLVTLEQASTLIAVVEMGQSSWLVAGIAPGLDRYPLKKLGPDRDALLQLLHRWRNEAAKVGHAINRIAVAYEAGRDGFWLARWLRSQSIEAYVIHPSSVPVSREHRRAKTDRLDTELLKRAFLGWLRGEPKHCSMAAIPTLEDEDARRPGRERQILVGERTRILNRLKANLARLGVHGFRPNLARAPSQLGALRTPEGVAIPTNTLAEMRRDLDRLRFVKQQIKEIEKTRAERLAKAPDERRHAAARLLTRVVGVGIETADMLVQEVFSREIRDRRALARYAGLTGAPDESGQRRRERGLAKAGNARVRRGMIELAWGHLVHQKGSSLTTWYRRRTADARGGARKTMIVALARKLLIVLWRFATTGEMPAGLLLRPAA

SEQ ID NO: 140693 - protein, 381 aa, unidentified
MKKNNISQTTTKKPRHRRRSKRNPTNLYLSAVPPSQTVGMDLGDKTSRYCVVDQAGAIQKEGSTPTTKKGMAQTFAQMARSRVSIEVGTHSAWVSRLLASFGHEVIVANARRVRAISDSNCKDDRMDAQLLARLARVDPALLYPIRHRGQQAQQHLAMIRSRAALVDGRTALVNTARGLVKSFGERLGKCDTDQMGVEKLSHLPAEEQAALRPLLETVEALTEHIQEYDQQIAEIARKHYPETALLEQVSGVGQLIALTFILTLEDKDRFERSRDVGAYLGLRPKRKDSGESQPELSITKEGDVYLRRLLVQGAHCILSVRGPDTDLKRWGVKLAGRGGKKAKKKAVVAVARKLGILLHHLWATGEVYEPLRQSQAQAAVA

SEQ ID NO: 140694 - protein, 456 aa, unidentified
MQKGQSKKQSKNQVLSAECIEANAAGIDVGATEIYVAVPADRDQRPVRCFATFTEDLRAMAAWLVQCRVTTVAMESTGVYWIPPYEILEAAGLRVCLVNSKHVKHVPGRKTDVQDCQWLQYLHSVGLLGSSFRPDAEICAIRSLSRHRSSLVETAAMHVQHMHKSLTQMNLQIHNVLSDITGLSGLCILDAILDGERSPTRLAELCHGTVRSSRETVVKSLVGNYRSEHLFTLKQSLAAYRNYQKLMAECDLEIERLMRQLNSKIDPDQKQPASPPRLRSLKRRKNQFHFQMGPELNRIFGVDLTAIPGISTLTAHTLLAEIGPDLSRFHNVGAFASWLALCPANKKSGGKVLSSRTRNTNSRANRALRIAAQTLARSQSHLGGFYRRMRARLGAPQAITATAHKLARIVYHLITTGKPYDETVFRNEEQKQAQRHESRIRKQAKTLGYQLVPLTS

SEQ ID NO: 140695 - protein, 355 aa, unidentified
MTIVGGLDVHRRQITFNYLDTETGEEQRGRINDADRDHVRDWIERSFADRSVDVVFALEGCTGWRYVAEVLDDANIEVHLADPAEAQACRGRKKRAKTDSSDALLLRNLLIRDDLPESWIPPEHILEVRTLVRLYKSLLDNRSEWQQRMQAVIFHQGVPETKRLCAQDRRKWLLRDAALSLAGRRQIRTGYAMIDAVNADLVPLRADLERIARDQTGCRALIDAQYGIGPLTSAVIWAEMGDCRRFANSRAAVRHTGLDITVYSSNNKRSPGHLSRQGPGVLRWALYEAGKCASRKTSPDHAYYQQVKDRCDGKIATLSVARRIVRRAFHILAGLGDEALCPPADWPTRQAQHRT

SEQ ID NO: 140696 - protein, 481 aa, unidentified
MSNRKMSTFERLQNGGPLNRQERRELQAKLNASDPGLQIVHPDAAGIDVGNASHFVAVPAGRDPQPVQEFGSWTADLQRMAAWLKSCGIRTVAMQSTGVYWIAVQEILEQAGFEVYLVNARGTKNLPGRKSDVQECQWLMKLHTYGLLRNSFRPPEEIRSVRTVWRLRDRLVKDAGRAIQQIQKALTVMNIRLAVAISDVSGVTGMAIVRAILKGQRDPHELAKLRDPRIRATEKEVASSLEGNWREDVLFELQQVVEGYDFLQRQIATCDERLQQYMAVLPARPMESEEVVEEPAKGSQQRRQSKPRSKNQPRFDLGSELRRVFGVDLTRIDGIKVMTAQVILAELGPDLSAFPSEGQFASWLELVPRRDISAGRVIKHLSRESKNRVADAFRMAAQSLSRSDSYLGARYRQLRGRLGGEKGVKAMAHYLARLTHRLLTKGQAYVDRGAAYFEKQRAERELTRLKRKAAELGMQLIPANA

SEQ ID NO: 140697 - protein, 351 aa, unidentified
MTAYCGVDFHTRQQTIAYCDTRDGEIKLIQLRHDDRESLRRFYSQFEGPVMVGLEAGGYSDWFERFLEDAGIEAWFGNPTEIRRRARSRQKNDRRDAELLLDLLLKSEFPRVYRQKPEARAVLSTLRYRHKLIQLRTKATNSLHALAIREGLTLGSKLLTKAGLLQLRALPLTAVQAAQRDEWLGLIAQLSTNIRRIEHELLHLADEDQLVQLVRSHPGIGLMTGLALVHTLSPISRFPNSRKVAAYVGLEPREFSSDTKQRWGGVSKAGSPLLRFLLVEAAHQAARYDPELKNTYLHLSVRRGKARARVAVARKLLVRAYILLRDQIDYATYRRAVAVGKLGNSREQSPA

SEQ ID NO: 140698 - protein, 315 aa, unidentified
MRRVIGIDIHRTFGEVVFWEAGKLRHGGRVDMTRTGLEGFGKSLRATDEVVVEATGNSMALSRVLSPFVARVIIANPLQVKAIAHAHVKTDKVDAGTLASLRAAGYLPEIWTPDVATERKRRLVARRYQVVRHRTRLKNEVHAILHAHLIPKCPHADLFSARGRTWLGRQPLPDDERSAIDRHVRELDRLAEDLNIFDREIAQGALDDLAIKRLITITGVNLTVAAGIMAAIGDIGRFKSPGKLVSYFGLNPRVRQSGLGAAHHGRISKIGRSHARAMLVEAFLREALEEVADETVREEFEAAVGHWLAARHLEV

SEQ ID NO: 140699 - protein, 312 aa, unidentified
MTSEVFVGIDVSKRWLEVRGHGEAESRKIGNDPDGFTTLIEQMKAVGSALIVFEATGGYESRAVKALSEAGFAVAVVNPTRVRRFAEALGILAKTDKIDAQVIAHFASVVQPAANGRQTALEEQLAACVERRRQLLVELVAEKNRLSTCPACVRKGIEEHIAWLEDHIESLEAEIQTYILQKPEWQERAEIIDSVPGVGLVTATTMVAELPELGQLNRQKIAALVGVAPFNRDSGPKQRKRRIFGGRSGVRRTLYMAALSASKHNPVIRAFYESLLKRGKEKKVALTACMRKLLVIINAMVRKGEAWKVSPA

SEQ ID NO: 140700 - protein, 395 aa, unidentified
MFIVGIDVAKRSHEVCMITSDGQTVQRPFSIRNNCTGYNLMLEKIRKHTNIKSQIVFAMESTAHYWLALFTRLRKDGYHVILLNPIQTSAMRDMFIRKIKTDAKDSFIIAELIRFGRYAESNVAQDRLLALKELCRNRFYLVDMAGDLKRKLVALIDRVFPEYEAQFDTIFCKSSVALLKKYPTPQKLSNAHLDKLTELLWNSSNGHFGEWKARELKDLARNSFGVEDCDGAYSTLILLMLDQIQSLSGKADALEKEISRLFQSFDTTVTTIPGVGPIIGAVILSEVGDISRFSSADKLAAYIGVDPSVNQSGEFQAAHAHMSKRGSPYLRRCIWMASQVAVQRDPMFRAYYEKKAAEGLKYMTIIGHVTRKMTAVVFAILRDHKVYEPILSTAA

SEQ ID NO: 140701 - protein, 333 aa, unidentified
MKSGTVHIGVDVSKEKLDVYVPPHGGVRAETKQLDNSVAGFRTLRGLARKAKATVCVEPTGGYELELIAFMHKFGVAVAYADALRVRQFARAEGCLSKNDAIDAALISRFADKIGVRVLEPQEVEAVELKRKAKFRQTMTDSRTAMINRLETEVDPEMKALLKEQIKHMDKVISKAERLCLKTVEKDERMNALRERFTRVGGVGDMTAISILAGLPEIGKLPDAKLNRLVGIAPEEKQSGTKEWQRRIWGGRKDVRNALFMACLASIQWNSILGAYYHKKRAEGHLHKWAMVPTMRKLLSLLNRIARDPNFTPKPEPESTKKNTRAGRKKKTA

SEQ ID NO: 140702 - protein, 342 aa, unidentified
MNTFYVGLDLGSSKFQQVALNHNGVSRVNRDFTTSEAHLVKAFSDLKGEIHVHLEAGELAPWAASIIAPLVERVVCSHPQSNAWIAKDADKCDRIDAYKLAELLRLNRFKEVHYAPDQPRRNFKQLVQHYDEMTAQQARLKTKLKARLRMPGVIVTGERLFSSIGRKEVLAKIESRDLRTAISQLYQVLDQSVSAQSQARLLMLRAAQAFPEIKLLRTAPGVGPIGACRFSAYIHTPNRFSTTRKLWKYCRLSVSHRSSNGKPLRRPRLDRCGCGRLKDVSRKAFDVAIRSRQDNGFKRAYLRALETTHDATHARLTVQRKIVSTLRAMWLTMTPYDDEMSR

SEQ ID NO: 140703 - protein, 341 aa, unidentified
MELFVGLDVSVRTTSVCVMEASGKLIRECKVESEPEAIGELLHTIGGPYKRIGLEAGPLSQWLYSGLAAAGYPVICVETRHMKAALSAQINKTDRNDARGIAQMMRVGLYKPVHVKTVRSQEIRMLLTARKFVQGRIVDAENNLRGLLRNFGLKVGAVTKLQFERRIVELLEQSSQLRLVIEPLLEVRRVLREQYQRLHKAMERLAESDETCKLLMTTPGVGPLVALSFRAGVDEPARFGRSRSVPAHFGLTPSRYQSGEIDRDRGISKCGDGSVRSALVEAAGALLHISKRSSPLKSWGLSVARRRGMAKAAVAVARRLAVILHRMWVDNTPYRWEAKVA

SEQ ID NO: 140704 - protein, 459 aa, unidentified
MMGRNKSKNKDRQTMSVLNPNAAAIDVGATMHMAAVNADRTPEPVRSFGTFTADLHRLVDWFAECGVDTVVMESTSVYWIPIFELLDSRGFAVFLVNARDAKHVPGRKTDVSDAQWLQRLHSFGLLRASFRPKGQIAELRAYLRQRERLLEYGASHIQHMQKALTEMNVQLHHVVTDITGVTGLRIIRAILAGERNPTVLARMRDRRCHATMETIAKALTGNYRAEHLFALEQALALYDTYQQKAFACDARIEAVLKELSVRRGREGGQLPAARQNRSHQQNAMLFDVRAALFALLGKDLTQIDGLGPYLALKLIAECGDDLSAWPSAKHFTSWLCLAPSNKISGGKVLSSRTRRSGSRAAALLRLAAATVGRTDTALGAFYRRLSARIGKAKAVTATARKIAVLFYNAVQHGMDYVDPGASSYETRYRARVIANLQRRAKAFGFALQPIDPSPSIAVS

SEQ ID NO: 140705 - protein, 297 aa, unidentified
MNVKTIGIDLAKNVFQIHGVDEHGKRLFNKQLRRAQMASFFANIPPCLIGMEACASAHFWANKLISMGHNVKLMAPQFVKPYVKTNKHDAADAEAICEAVTRPNMRFVPVKTAEQQAVLALHRSRQSFIKQRTAQANQIRGLLAEFGIVVPRGIQQLQRRLPELVEDADNPLPVLFRTQLSLLQHHMAYLFDVIATLDKQIEQCYRQNALCQRIGKIPGIGPVTASALIATIGKANNFENGRQLAAWLGLVPRQHSSGGKQVLLGISKRGDTYLRTLLIHGARAVLQSAKHKQDAQT

SEQ ID NO: 140706 - protein, 456 aa, unidentified
MKQKTTSQSSRTLPIVGEVEPNAAGLDVGARKVYVAVPADRDAQPVRSFDTFTEDLERMADWLLECGITSVAMESTGVYWIPVFDILERKGLRVCLVNAHHVKHVPGRKSDVQDCQWLQYLHSVGLLRGSFHPQDQVRALRAIMRHRDSLIEMAAAHTQHMHKALTQMNLQIHHVLSDITGVSGLAIIDAILKGERNPQVLAGLRDGRVQASEEIIRKSLVGNYRREHLFTLEQSLKAFRQYQALITACDQELAQYVKDFPSRMDGDQPPLAKEPNKHRPRKNELRLELRSELYRLFGTDLTAVPGISTLTWFTLLTELGPEMGKFPSSPAFTSWLCLCPNNRQSGQRILSTQTRRSKNRINHALRVAAQTLHHSNSSLGAFYRRLRARLGAPKAITATAHKLARILFHLITTRQPYDESVFALADQQQQQRHERYLRKQAQAMGFSLVRTEVQPA

SEQ ID NO: 140707 - protein, 354 aa, unidentified
MNKIKQLNFEGKVIYCGLDVHKTNWKINARMEGIEMAAFSQNPDPLLLKNYVHKNYPGAELKVVYEAGFCGFEIQRSLKSLGIECIVVNPADVPSSDKDRKRKDDKRDARKLSIELAKGNLKGIYIPDKQMQDARSLVRQRHRLVQDQTRCANRIKHLLLNNRITAGEKSERWSLRFIKKLQQLDCGSISLKSSLRFAIEQYVQTRRILKEITLAIRGLSKEEPFKKVQAVLQSIDGIGLINGMVIQTEIGEIHRFKRLDSLCDYGGFVPDIYSTNDKMVVRGISKRGNEFLRETIIESSWVLIRKDPAMLMKYNEYRNRMSANKAIVRIAKHLLSRIRFLWKNEQAYVRGIIG

SEQ ID NO: 140708 - protein, 421 aa, unidentified
MRSIGIDIHRDFMEVAIAEGGEIRSGPRVAINPESLELFAASLERSDQVALEVSGNAWEVVRILRPRVGRLLAASPTDTGMRQARAKTDRLDARALARLLASGQLETVWVPDEATQAMRRLQRRSQLVRTRSAAKNEIDAALMRRLVPKPGFSDLFGKAGRRWLAELELPAAERESVDSAMREIEFCESEIAAIEKLVASEALASPEIRRLMSVPGVGAITAAAFMAAVGDIRRFPSAKKLVGYLGLDPIVRQSGSSEASYGRISKQGSAAGRYALVEASWSVVKAPGPLRAFYERTKGRRGASVAIVATARKLACLFWTLLVRGEDYAYGQPSLRARKQRQLKLTAGARKGRGGAGVWKANAAVRDAERKMAEQAEAAYRRSVAEFKRVEALRAKQRKEAQKAEAKRHEEGAGATSGRAS

SEQ ID NO: 140709 - protein, 337 aa, unidentified
MRIIRIGLDTSKHVFQVHGVDENEQPVLRRQLRRSEVEKFFAKLAPSRIGLEACGASHYWARVLRSLGHAAVLLPPQYVKPYVKRGKNDRIDAAAICEAMSRPGMRFVPVKTAERQAALMVLRVRDLLIKQRTMLSNAIRGHAAEFGLVAAKGPVKMSELLQRAHAEEAGVPALAREMLSLLANQLDALEARLKALETQLVAWHRQDPVSQCLATQPGIGPIGAVSFALKVTDPQGFRSARHFAAWLGLTPKEHSTGGRRRPGRISRQGDETLRRLLVLGATARIRFAKAGRASPWLMNLLARRPKKLAAVALANKMARILWAMMVSGETYRHPQQA

SEQ ID NO: 140710 - protein, 389 aa, unidentified
MLLDHPSDGPAAIHTQFGAIFVSLELSRSNWLITSLSPGKGEKMSKHSVTAGDVPELLKLFADLRRKAEVRTGQSYPIITIQEAGLDGFWLHRVLQQEGIESHVVDPASIATPRRRRRAKTDRLDGETLLRALLAYKRGEPRVCAMVVAPSPEAEDRRRLCRERATLIAERITHVNRIKGLLFSQGISDYAPLRRNRRSRLETLRTGDGRELPSHLRTQIGRELDRIELLLEQIKAVEAERDALLAAARKPASEEAAPDAVTMLLALKGMGANFAAVLWSEAFYRQFANRRQVAAYAGLAATPWQSGGIRHEQGVSKAGNPRLRTTMIQFAWLWIRHQPQSALTRWFKERSQQGRKRAIVALARKLLVALWKHVTQGVVIEGAVMKPTA

SEQ ID NO: 140711 - protein, 344 aa, unidentified
MHIASIGIDLGKTTFHLVALGERNKILLRRKFSRSQLLAYTANLPSSLIGLEACAGSHFLGTVLREQGHQVRLIPAQFVKPYRKTNKNDFIDAEAIAEAVTKQNMRFVQIKSQEQLDIQAMHRVRDRLVQRRTALINEIRGFLLDRGLTFAARPIHLRKNLPSVIEDAEQNLSSCLRWLLDRMWQEWKQMEVDIKAITEAIERVGNENALCRRLRQIPGFGPLVSTATVAAIGNGAAFRRGRDFAAWLGVVPRQYSTGGKQKLFGISKRGNTYLRRMLIHGARAVLLRVKYDTGGFGQWVHRLAQRAPHNKVVVAIANKLARIAWAVLSSGRDYQHQRLQSAAA

SEQ ID NO: 140712 - protein, 438 aa, unidentified
MSNNVIFHPDELFISVGIDVGADFSWMSIALPNQRFAGKPYKILHNKMDSLSAAVSKIKEAEELYSLESRIFLESTGIYHYPLFCYLRDKGFNCSVINPIITKNSTNMNIRKVHNDRFDSKKAAMVGLKPDLKVSLMPSDLALNCRNLCREYYDLMDDRSAYINKLQSELRMAFPQYLGIFSKVTTNTSLTLLENYTSPQAFLNTDRQEIIDSIRSTARFGLTYAQNKYNAIIQAAHDANEFGYIIDSNIRRIRLYIRLIRKYDGEIASLLQDLHDLVEQNEDTDFVKQVHLIETIKGAGFLSAVSLMGEIGDFSAFSKPKQLFAYFGLDPAVKQSGKFVGTKVQMSKRGSSIARRVIHVLALQSISIAQNGVAKNPVLHAYYLKKCESKPKLVAMGAVAHKVCNIIFAVLRDCKPFEMIKPEEHIRQYITARCYMAS

SEQ ID NO: 140713 - protein, 353 aa, unidentified
MAIATIGIDLGKNSCSLAGLDGTGAVVLRRRFSRARLVAFLAGQPPCVVAMEACCGAHHLGRVFATQGHEVRLMSPEYVQPYVKAQKNDDRDAEAIAEAATRPTMRFVALKSEAQLDQQTLHRARSRLVNGRTRLMNQLRAILLERGITVAKGRRALGLALGDLLGDERSGQSSGLSSGLSSGLSLRMRMLLGAMREEWAELDMRIAALDREFVETARNSAPARRLATIPGIGALNATALTAAVGEAEDFASARDLAAWLGLVPRQTTTGGKARLGGITKRGNVYLRTLLIHGARAALPGLSRGETPLGAWLRGLLERAHPNVVVVALAAKLARIAWAVLRSGADYDRRAADA

SEQ ID NO: 140714 - protein, 402 aa, unidentified
MHYLGIDVSKASHQCIILDTNGEALGRSFTVQSSKDDFIKLAKKLSELNIPKTDLVIGLEATGNLWENLYSFLKEQGFNVILLNPYQTNKYHEAMLKKAKTDSIDALVIAGLLRSGCASSSYIPDEDIQSLRDIVRLRDGYLKDIKNYKRKAYSLLNLVFPEFLSLVKDPFNITSTDMLLKYQTASDFKNLKPKDLIKIFRHRQGNNYDDSWALKVINSAKDSIYSGKAHKARGFVLKSLVQNIKYLKEQVELLDNEIQLLLKPDDKSQNNGIDNLLTIPGVGPKTIAVFLAEVGNIQRFLSCKDFIGFVGFYPKIEQSGSSLNRAKLTNKGSSILKHALYMASVASLIHNPYLKSVYHDKVSQGKCPKQALIVVARKLACIMYSMLKNNTVYNPGRVAIAI

SEQ ID NO: 140715 - protein, 343 aa, unidentified
MDHFAGLDVSVKETSVCVVDATGKIVREVRVASEPEALLAVLASPAYHFKRIGLEAGPLSQWLFSALAEENLPVICVETRHMRAVLKAQVNKTDRNDARGIAQMMRVGLYRPVHVKTLRSQKLRMLLTHRKLLQSKAIAVDNDLRGTLRNFGLKVGMVGAARFEARIKELIENFPDLAVLVEPLLVVRRVLREQLGILHGRLLAVVRDDDVCRRLMTVPGVGPVVALTYRATIDVPARFRKSKSVGAVFGLTSAKYQSGEIDRSGAISRCGDELMRTMLYEAAQSMLFRSTRWSWLKAWAMQIARHRGMKKAIVALARRLAVIMHRIWVDGTEFRWTREAVAA

SEQ ID NO: 140716 - protein, 344 aa, unidentified
MEHYAGIDVSLEQSSVCVVDETGRIVRETKVPSEPEALVRFFGQLGVVVARIGLEAGPLSQWLHAGLTKAGFETVLLETRQVKAALSAMVVKTDRKDARGIAQLLRMGWFRPVHCKSPPAQEIRALLVGRKLLQGKLLDVELSIRGILRGFGLKVGVVSKGRFAPRIRELIGGQTMLERVIEPMLRAREALRAEYHALHRAVLGIVREDTTCRRLMTVPGVGALVAITFTSAVDEPGRFTRSRTVGAHFGLTPKKYQSGETDVTGGISKVGDAMVRSVLYEAANVMLTRASRFSSLKRWALEVAGRRGMKRAKVALARKLATILHRMWVDGTSFRFGKEVAAAA

SEQ ID NO: 140717 - protein, 367 aa, unidentified
MKKISTAAAKQTKNFREHKLTIGLDLGDRSSWYCVLDEAGEVVLEQRLGTTPKALKEVFEDMPRSRIALETGMHSPWVSRLLSVLGQEVIVAHARNVRLIGESRKKDDRLDARTLARLARIDPQWLCPVKHRSAKAQADLTVIRARAGLVRSRTALINTARGLTKSYGERLRGCNPRNLNPEKAQGLSPELQAALEPLLSAIESLRERIYEYNQRIEKIARESYPQVARLEQVKGVGTLIALTYLLTLEDPHRFRKSRDVGCYVGLQPGRRNSGQSEPQMHISKEGDPYLRTLLVQGAHHILGPFGADSDLRRWGLKLAERGGKNGKKRAVIATARKLAVLLHRLWVSGEAYEPLRNSHPAAMPAAA

SEQ ID NO: 140718 - protein, 355 aa, unidentified
MNQPNCTKLSFKGQHFFIGLDVHKINWKVDIRLNKTSIKRFTMDPTPEQLARFMRNNYPGGFYHSVYEAGFCGYWIHRRLVELGIDNIIVNAADIPTSHKEKDRRDDKIDSAKLARELENGSLKAIFVPTPLQQSLRSLARLRYQHRNQVTRIKNRIKMFLHLHGLKIPGQFSQSYWSSSFITWLKSIRFDYVSNAHYLLHYIQQLEDQRTLMNDALKQMRMHCRENRVLSCIRSVSGLGIVSAFTIYAELVDMRRFKDLDHFASYVGLVPSKDSSGDWTAVQGLTPHYSRYVRYLLVECAWRAIGVDPALTQAYANFCRKMPKQKAIIKIAKKLLNRIRYVWLNEKEYVIVITE

SEQ ID NO: 140719 - protein, 343 aa, unidentified
MQTITTIGLDIAKSVFQVHGVDADGKVVVRRQLKRRYVLAFFQKLPPCLVGIEACASSHHWSRELQALGHTVRLMPPAYVKPYVKRQKNDAADAEAICEAVTRPNMRFVPTKTPEQQSCLTLHRTRHLFIRQQTAVINSIRAHLAEFGIVAPVGRNGVERLLEVVADVNDTRLPEIARACVAALGTQLLALKAQILAFDRRIMAWHRSNETSKRLDAIPGVGPALATALVASIADPKAFRSGRDFSAWIGLVPKQNSSGGKDKLGSISKQGDRYLRSLFTTGALAVIRYAKLHGTKHRPWLTALLARRPTKVAAIALANKIARMVWAMMVRGERYKEPVALAA

SEQ ID NO: 140720 - protein, 407 aa, unidentified
MTKVIIGVDPHKLSATIEVVDRHEKMLGSGRFTTDQAGYTAMRTYAKNWPERVWAIEGSNGAGRPLAQRLLEAGEHVVDVPAKLAARVRLFDTGHNRKTDARDAHSIAIVAVRTTTLRVLHPDGELEALRMLCDRREELTRLRVQTVNRLQRLLAELVPGHGKKDLTALQAKAILATVRPRDIAGKTRRRIAVEELADLVAVEAKMKKATAELKVLVKARGSRLMDLHGVGPVVAARTLADVGDIARFADRNRFASWTGTAPLDASSGEQIRHRLSRAGNRRMNHMLHIAAISQIRLDTPGRAYYRRKLAAGKTKLEALRCLKRRISDALYRQLLADAEQAQFVRPAEPGGTGPGGHCGATQESSAVDLPPHIDTSDQPLPGPAKPTLQPASRSRKTANDGALISAP

SEQ ID NO: 140721 - protein, 394 aa, unidentified
MFLVGIDVGKLSHMFCIMDSSNGEILVSPVSFKNNKQGFDFLMGNIKLYPKDKLLIGMEDTGHYHFNLLKFLLDSGYTVALINPITTDLTRKMQLNPTKDDNLDTMTICDVLASSPRKKGYRISKINNFEFYEQKRLTREHHDLKEQLNVYANKLQKCIDIVFPEYNSLFRSKYGTVYMKVLKAFGCANAIAHADIRNIRKCFETNRNGRTISLTPEKLKEAAKHSIGFPSKAEVIEIRHLIDLIELIKEQINDVDIKIEEFSTQLNSPILTIPGISHFSGTSILAELGDLRNYSKASQIIKFAGVSPYKHQSSQYEAQHTAITKKGSRYLRKTLYQVILPVIRYNPVFNKYYHLKLSQGKGHRCAQGHCVRKLLRIIYHLVITNQPFDSTLLK

SEQ ID NO: 140722 - protein, 414 aa, unidentified
MDVLIDRVCGLDVHRDEVSACARTPSSKRAGARVTSQARFGTHGRGLVAMVAWLNEMGVTAVAMEATGIYWRPVFYALEDAGFDTTLVNAAHMKNVPGRKTDTADAAWLCQLAEHGLLRASFVPPDGIRALRELCRYRKSLIQERGRVIQRLEKICQDAGVKLTSVTSAVLTKTGRSIIEALISGERDPVVLADLARGRLRPRIGQIEEALVHRWKPHHSVVASAGLAHLDALDVQIAQVSAAIIVARQPYEWAIELLCTIPGVEVRSAETIISEIGVDMSRFPTAGHLASWAGMCPGNNESAGKHGPGFTRPGAPWLSQGLIEVAHAVARTKGNHLTERHRRIRARRGPKRAAVATGHAVLIAVWHILDRKVAFENLGVDYNSRRHDPEAETRRLVSRLEHLGHHVTLSTTAA

SEQ ID NO: 140723 - protein, 408 aa, unidentified
MNVVHERCCGIDVHQAKLAVCVSIREEGKHETHRLLCGTTTGELLRLVDWLHGHGVTHVAMEATGVYWKPVWHMLEGQFELLLANPTQVKALRGRKTDLRDGERIADFLQHGLLQGSFVPSQPMQQLRDLTRNRTLLKQEQVRISNRILKVLEDANIKLNTVVSDMMGASGQAMIRAIVSGKWDAGELAEMARGRLRGKIPALRQAAEGRLTEHHRFLLEQWLAMWDELSKRVGLFEERTEEQMRPFEWAVKTWMSLPGIDRVTAWTMVAELGVEMRQFPTAGHASSWVGLCPGDDETAGKRKSGRTRNGNRWIKQALSQAAWGARATKGSYFKALYHRFAARKGAKRTIVIVAHALLETGYALLRTGRTYADLGADYFDRLDREHLTKRLVKRLEYLGHKVTLQPAA

SEQ ID NO: 140724 - protein, 318 aa, unidentified
MQDSVVTWIGIDVAKDSLDVAWGSGDKSHRSSAANSRSALTALVHQLPPPTEARVVVEATGGYERALVTTLIEAGYRVAVVNPRHVRDFAKALGILAKTDHIDALVLARFGHQVQPRVLEEDPAERAELVQLVTRRRQLIDLRTMESNRLQQTTVRPAQKSIQHVLKLLAKEIDQVEAEITRLLQSDDDWRAKIELLSTTPGVAKVTSATLVAEVPELGRLNRQAIASLVGLAPFNDDSGRHRGSRRVRGGRASVRHVLYMATLSARRYNPVIRAFSERLAAQGKKPKVIITACMRKLLVILNTMLKNNTPWKDTHAC

SEQ ID NO: 140725 - protein, 349 aa, unidentified
MDQDTTTIIGCDLGDRSSHLCLLGIDGTVLRRTKIASTRRAFHKFFTGLQSALVVLEVGTHSRWSSAVIAELGHQCLVANPRHVRLIYGGTHKSDRLDAEALARLGRLDPTLLRPIQHRSKEAQTELSSLRARDALVRCRTRLIASVRGITKSAGMRLVACDADYFTRKVTLPPALQPALGPMLQSIEALSAQIKDYDKQIAQLCAQHPETRLFQQVSGVGPITALAYTLTLERPERFSSSRDAAAFVGLVPKQRQSGRHDPQLGITKAGDRFLRRLLVQCAHCILSARGRDSDLRRFGLRLAAQGGKRAKKRAVVAVARKLAVLLHRLWVSGEVYQPLRLAPEHSHAA

SEQ ID NO: 140726 - protein, 339 aa, unidentified
MNKTNTVGIDLAKNVFHLCTQDSNGHILSRLKLGRSQLKHFLATTAQSRIVFESCATAHYWSRIAESHGHQVALIHPGYVKAYVKTNKNDFNDAEAICEADSRPTMRYVNSKTINQQDIQLLHRIRQRQVQQRTALVNQIRGHLLEYGITIPRGVSRVRHQLSGILEDAENELSCQARVLFGELQLELYDLDDRIQQADRKIKRLATQDLVCQRLMAIPGIGPMIATALVSTVGNANHFKNGRELSAWLGLVPRQYSTGGKQRLLGISKRGDCYLRSLLVQGAISAITRSKNRSDNQLTWARQLKVNKGLKKAAVALSNKTARIIWSVMAKDHDYVVQQ

SEQ ID NO: 140727 - protein, 351 aa, unidentified
MIAIGVDAHKRVHAALALDDAGTVLGSWRGSNTAQGWLELWHWASQWSQPRHWGIEGAWNYGRGLAQFLVTHQEVVYDINPRWTAERRRRTRKLDKNDRLDAHAVARLVREDGPTLPRVTGEDESVVLDLLVSEREAVLAETIRLRNQLHQLLLQLAPDYAISLPNLRSAAGLRAVEAFLPEPSDFLQSQRTEGIRRLLERLQLAVEQTKVLAKKIRALATQHFLPLTELCGVQLLTAGMLAGILGPGRRFTSEAQLAAYAGVAPIEASSAGTIRHRLNRGGNRRQGAILYPIALVQATSSPQAKAYLARRQTEGKTRREAIRALKRHLIRAIWRLWQRCLIGQMEPVPAT

SEQ ID NO: 140728 - protein, 339 aa, unidentified
MARYVGVDLHRNRFTVCVLAENGRQYLSAYRLEQLPLFVRKLRPTDELAVEVTTNTRLFYNAVVSHVAKVVVVNPTQFKVVRESVKKTDPHDARTLAFFLSKGMLPEVRMKEKLHAQLASLTQTRDLLVKQRTALKNKVNNILSAHGINLPREKLSSDAALEEVVGMTFEPIVQAEVRVVVGQIRALNQSIAELEKTIQAEGPKLPGHRNLRSIKGIGDLGATILLSVIGDIHDFADPGKLAAYFGIVPRVRNSNEMERSGRITKRGTKLGRTTLVQCALSAQRYSPYLAKFYSQVARRRGGGKAIIALARKFLGVIYHTLKNNWVFADFPNFVLAEAS

SEQ ID NO: 140729 - protein, 346 aa, unidentified
MRFYTQQHQYYCGIDLHARTMYICIKDQQGNILVHRNLPTKPERFLKVIAPYREDIVVAVECMFAWYWLADLCAKENIPFVLGHALYMKAIHGGKAKNDRIDSKKISTILRGGMIPMAYVYPSEMRSTRDLMRRRNHLMRKRAELLAHIQNTNTQYNLPPIVDNLSRPHNRTGVAERFEDDSVRKSVETDIDLINYYDKLLRKLEYFIAKNAREHDVTAYHHLRSIPGIGHILSLVLLYEIHDINRFPRVQDFASYCRLVKPIKESAGKRYGGSGKKIGNAHLKWAFSEAACLFLRNAEGKKFFAKLERKHGKGKALTVLAHKIARAVYYILKRKVPFDMKQFIGS

SEQ ID NO: 140730 - protein, 386 aa, unidentified
MIYVGIDISKYKHDCFICKDTGEVIVENLSFDNNKKGFQQFLDLLKSYDNYNVHIGLEATGHYGLNLKLFLEKNNYSFMEFNPLLVKEFYKSLSLRKTKTDKVDATVIAQKLMSVPYKPNSCLFYHKYSIKSLSRLRETLVKQRSKYKVQLTNILDMIFPEFKPFFSNSFGATSLYILEKYKTPEKVANMRDFDSLSKISRGKFTYAKFVKLKDLAKNTIGESNDIFELELTSILNLYKNIDEQIIELDKQISTIIKDLNPPTLSIPGIGVITCASIISEFGDISKFSNPSKMLSFAGLEPGIIESGTMSSKGKMVKRGSGYLRYSLMNVALTVIRFNNTFYDYYHKKISEGKCHRVALSHVCKKLIRVIFILETKNIQFDPSLLK

SEQ ID NO: 140731 - protein, 361 aa, unidentified
MNRVQINELDFKGQNIYVGIDVHLKSWSVSVLSEHSVLKKFNQNPDAEALHRFLERHYPGASYHSVYEAGFCGFWIHKKLVELGVNNIVVNPADVPTMSKEKLRKTDVVDCGKLARELRSGTLKGIYVPNVETLEIRSLIRLRNTIVKDSTREKNRIKSLLRFHGIEIPEQFTRHSIGNWSKRFLGWLRAVELSTEYGRKALDLHIEQFIRLRGMLLQETRLIRNLSRTGLFADSLKLIITVPGIGTTTGISLLTEIDDIGRFANAEQLASYIGLIPMCHSSGEKEGIGDITIRKHALLRCHMIEAAWVAIRKDPAMTMAYEEYRKRMNAQKAIVKIARKLVNRIYFVLKHRKEYVPCIVE

SEQ ID NO: 140732 - protein, 341 aa, unidentified
MGEVSTIGLDLAKTVFQAHGADASGGVVFRKKLRRDQLLAFFAGQPRCVVAMEACASAHYWAREIAALGHETKLIPPSYVKPFVKRQKNDMADAEAICEAAQRPTMRFVAPKSAEAQGAAVVFRTRDLLVRQRTQLINALRGHLGEFGFVVRQGAGHVAQLIDLVADPSSNLPAEARPVLAVIADSLQSVQARIAVLDREIASRAKADPVARRLMTIPGVGPVVATALVALAPPASAFRRGRDFAAWLGLTPRQHSSGGKERLGRTSKMGERSLRRLLILGASSAAKVAARDGSRASPWLAGMLARKPRMLVTVALANKMARIVWALMAHGGSYRAPAAAV

SEQ ID NO: 140733 - protein, 315 aa, unidentified
MSENAVEVFVGIDVSKDTLDAGFDPTKTTLQVAYDKAGIAKLIHELHQTKPTLIVLEATGGLETHVASALVAAELPVAVINPRQARDFAKATGQLSKTDRIDALGLADFARAIRPQIRPLKDPACAELEAMLTRHDQLVQMRVQEQLRLGSAPKVQQKSLKSHIAWLDKQIAKVDSDLTTRLQNSSVWRAKHDLLRAIPGVGLLTTVNMLAKLPELGTLNRKQIAKLAGVAPLADDSGKHRGKRFIKAGRGDVRRVLYMATVSAMTWNPVIKIFADRLKKTGKLNKVIITACMHKLLTIMNAMLKNNSPWDPKIA

SEQ ID NO: 140734 - protein, 383 aa, unidentified
MRPTCEDDFTPEEEVLAVALELASGSWKIAFQDGKHAKPAVLTVSADQPAARLQEVEREIGKIRRKWRVRPGARTVVLYEAGQDGFWIQRALSARGIKTLICDPGSIPMPRKHRRAKTDRLDAIKLVSCLRGWLRGELDRMHIIRIPEEQDEAQRHLSRDRGELIKERGQHRDRMRKLLRTVGCWDGIDGDVGKRLQQGQYRCHDGASLPAELQERLVREIERMELVDRQLRELEDELALQLPEATQERIATLQRLKAVGSVGATRLVLELFWRRFDNAKQVGACIGLVPQPYDSGESRVDQGISKQGNRKVRSLLIEMAWFWLRYQPGSAIAKWYAAHIGGSGASKRSKRSAIVAVARRVAIALWRYLEQGIVPEGAAFKAA

SEQ ID NO: 140735 - protein, 350 aa, unidentified
MILGIDVHKHNHAAALIDDRGGEIATLIVANTPKGYRCLIDWLVEHEAAGAVIGVESPGSYGRCLVSALAGAGFEVLQVPAWRTHRERHRRGPGKTDPGDALSIAHVVRTKREDLGPAEEPELVRALGMLELQRRRFVRDRTQAVQRLRSDWTQHDPVAEAGVIRCDRQRELAKLKRVQLGSSLAGRTAARCIRELARDIADLNARIADLDREIAELLIEHENPLADLQGAGSNLAATIIAQAGDVRRFRNASAFARFCGAAPIPCGSGKTANRHRLHRGGNRQLNAALYRIAIVQQRHHPDAKAYLARKILEGKTPREARRALKRHLANVLYRRLHAWAEHAPAMNLLT

SEQ ID NO: 140736 - protein, 419 aa, unidentified
MTESETTVAVSSSQAKARLTPSRSLTQSMGAKEETAMRSVALDLGVKETSFCEVSRGLVIARRTVTELRELEDVLGPTSERARVAIEACREAWHVHDVLASWGHDVVLVDTTRTKQVGIRHHGRKTDRIDAELLARAVEQGGIPIAHVLSPARRELRDVLGVRRALVETRAQYITTIRGLARSRGLRIGTCAPEYFLPALEKARLSKEVQEVIEPLAATLQRIGVELARTDARLEALAKTEPTIERLTTAPSVGIVVAAAFVSVIDEARRFDGAHQVESYLGLVPREATTGGKRKLGSITKQGNAYMRQLLVQSASSLLRVGDANDPLRRWGRGLVDRRGRKIAVVALARRLAGILWAMWRKGTVYEPSRLGMQSPSSQQASATAIGMKMAAKKAHIRVLQTARALRTATAASKKEAHS

SEQ ID NO: 140737 - protein, 368 aa, unidentified
MKDITKYVGLDVSKEKIAVAIAEEGREAPRFWGTIHNAPEAIKKLMNQLGKPGQLKVCYEAGPTGYGLYRQLLSIGIECTVVAPSLIPKKPGERVKTDRRDAIRLAQLFRAGELTSIYVPSEEDEALRDLVRAREDAKEDHLRARHRLTKFLLRYDINPPKGIRKWTAKYRAWLNSLDFKQDTLRTVFREYLHHLDEIEQRINRLEAEIHTQATQSVKAPVIQALQTLRGVAEITATSLVAEIGSFSRFAEAPLLMGYTGLVPSEYSSGETRRQGKITKSGNRHVRRLLIEAAWSYRYKPALKGEIRKRQKGQPAQIQAIAWKAQERLHRKYYRLVGRGKPSGKAIAAIARELAGFVWAVACEIEKVS

SEQ ID NO: 140738 - protein, 330 aa, unidentified
MKQIYGIDLSQEKFDVNFLNSDNKSKSFIVKNNLTGIVDFLGNLPKDAILCAEHTGVYGELLVFISNCMNVPISLSTGYEIRHSLGLLKGKSDQVDACRIREYGERFYDKLKFVKYPDEQLKELKELYNLRAQLVKERKMLQTHEKGKIHMPYNSIKVHEISESMLKSLSKAIEDLEFEIAGLIMSKQELRTNYKLIIGIKGIGHVTACDLIVTTGNFKEIDTVRKAASYAGVCPFPNSSGKMVKKSRVSHMADKKLKSLLYLCSVSAVNTNPEYKLYFLRKKQEGKPYFLIMNNVANKLLRTIYSIINSKKEYSLGHVTTDPRNLKKVA

SEQ ID NO: 140739 - protein, 412 aa, unidentified
METVYQWCCGIDVHKKTVVACLRIPDSRGRRTREVRTFGTTTPELLTLSDWLLEAGCTHVAMESTGVYWKPVFNILEGVCEVLLVNAHHMRMVPGRKTDVKDCEWIAELLEHGLLRASFIPPEPIRDLREITRYRKTLIQTRASEVNRVQKILESANIKLGNVATDVLGSSGRAMVKALIAGERDAVRLADLARGVLRRKRDDLTPALTGRVTAHHAFMLGRILAHIEEIEGHIRECDARIAEYVLPFARQTELLQTIPGVGRRTAEVILAEVGFDMARFPTAGHLASWAAMCPGNSESAGKRKSGKTRKGDQWLRAALIECAWAAARTHNSYLGSLYSRIARRRGAKKAAVAVGHSILIAVWHILSKDIPYQDLGASHFDDLNSDRLRRHYLRRLEQLGVKVTVEPVPDAA

SEQ ID NO: 140740 - protein, 412 aa, unidentified
MEVVYERCAGLDVHKKSITACVLWALPKGKKKQEKRRFGTFTAELLALADWLGECGVTHVAMESTGVYWKPVWNILEGHFEILLVNAQHSKAVPGRKTDQKDSEWIADLLQHGLLRSSFVPPTPVRELRDLTRYRVALAQECNRIANRIQKVLEDANIKLASVATDSLGASGRAMLDAIIQGERDSAELAEMSKGLLRRKRAELRLALEGRVTEHHRFLLDQLMTHLRFTEDRMDDVEKEIARRMQPYQADVDRLCTIPGVERVTAWGLLAEIGFNMDQFPSAAHLASWAGLCPGNFESAGKRLSGKTRKGSASLRRCLSQAGWAVSTKKDNYLAAFYRRVAARRGAKRAIIAVAHQLLVIAYYLLKRKEEYRELGSNHFDNINADRVRRSLVKRLERLGHVVTLQPAVQSA

SEQ ID NO: 140741 - protein, 443 aa, unidentified
MTRKNQKRFEVIHPDCAAVDVGGGEHLAAVDPTKCADPVKRFSTFTDDLHAMADWFESMGVKMVAMEATGVYWIPLFEILDRRGFKVYLVNSRATRQITGRKSDVLDCQWILQLMTHGLLRGAFRPSDEVCSLRSLVRQRGNKVRDQAKALNRMQKALVQMNIQLAQVISNIAGVTGMSILRAIVEGERDPEVLAMLRDKRVKADQATVARSLRGNWRAEHLHALSQELAAYDFLEKQIGECDQAIAHALERLPVLQADVVPPSKTLRNPHRSNEQQLILHRALNKAMGVDLTAIPTIGIDTALVLASELGADLSRFPTSQHFCSWLGLAPPTRISGGKPLPGKTVKVINRAAQALKQAASIARNDKSFIGASHRARLTRMDTCCAIKATAHQLARLIYAMLTKGQPYVEKGIEEFEERSRDRQLRALERKARKLGLQLVKAA

SEQ ID NO: 140742 - protein, 347 aa, unidentified
MDVHKETISIAVMNGEGKLVMESIIETKAITILQFIQGLRGDLHVTLEEGTWAAWLYDLLKPHVTKLVVCDPRKNALMKEGNKSDKIDARKLADLLRGGYLRSVYHGENGLRTVKELARSYLTISKDLSRVMNRVKALYRSWGILCGGQQVYAPRHRSEWLNKIGEAGVRRRAEFFYQQLDALRALRQAVRRDLLAESRKHGATKLLRQIPYIGPIRAALLIALIQTPYRFRTKRQLWTYSGLAIETRDSAQHRYVAGQLRRSKKPQQVRGLNQNHNHDMKAIFKSAATMASSREGPFNDFYQGLLTKGMKPAMARLTLARKIAAITLIVWKKGAHFDAEQLKPQAA

SEQ ID NO: 140743 - protein, 343 aa, unidentified
MEYFAGIDVSLEASSVCLVDSAGKIIRETKVASEPDALIEHLTSLGFALKRIGLEAGPLSQWLYEGLTKAGFDVVLLETRHVKAALSAMIIKTDRKDARGIAQLLRMGWYRSVHSKSPGSQDVRALLTGRKLLQAKLRDVELSIRGILRGYGLKVGEVSRGRFEERILELVDGHPVLETVIGAMLHARHALWNEFTKMHREMLKIVRQDRVCQRLMTTPGVGALVAITYRSAVDDPGRFAKSQTVGAYFGLTPKKYQSGETDLDGGISRVGDTMVRTALYEAAHIMLTRATRFSALKRWAVDVAKRRGMKRAKVALARKLATILHRMWMDESEFRWGKETSAA

SEQ ID NO: 140744 - protein, 449 aa, unidentified
MGKGSGITRGDRRRNAKKARLRALVPHGNAVAGLDLGEKRQALAVTGADGQVLARRSPQVSVHDLGPYLDWAVRQARAAGCAGLSVACEPTGSRWMAVQDLCAARGLPFVCVQPLVSHLAREQEDLTGDKTDEGDSGLIARLARELHCYEPERLEGAWAELREEGRRRAQLITNATAAKQLLRDKLGLVAPALLETACEPFDSATWLASLEVVLERCDADAARVTVMGFEAFAARTAAVLREWGGRRLGGTCRQLFAALGDDRGVARMRRAALRRARGALADLKYARARRARAEADMITLLGELGVDTDRICQIPGLSPVTLAAILAETGDLRRHESSSSVVKHAGMSPARNESGGFRGQAKISRRGRPGLRLAAWRATWAVLRHCDVLAAKHAALTSRDDDSRLTAEQARVACAASLLRWIWSLMVHGTCWDARIAAGQLSHHHAIAA

SEQ ID NO: 140745 - protein, 369 aa, unidentified
MTIIRIGLDTAKHVFQVHGVDEDEEPVLRKQLRRSEMERFFGKLAPTRIGLEACGASHHWARVLRALGHEVVLLPAQYIKPYVKRGKNDVIDAAAICEAMSRPGMRFVAIKSAEQQAGLMLLKARDLLVKQRTMLVNAIRGHAAEFGLVAAKGPVKVAELLQRAHTEESGVPALALEMLSLLSGQLDVLEVKLKAIETRLLALHKENPLSRCLATQPGIGPIGAISFALKVSDPKGFGSGRHFAAWLGLTPRENSTGGRHRPGRISRQGDEGLRKLLVLGATAVIRFVKGGKDLALVDEFAGTAAEKARRRSAGQQDGPDALGHDGERRVLSPAATGLSRSPSYHLALARNAARWRSVEPRVGTLRGIL

SEQ ID NO: 140746 - protein, 322 aa, unidentified
MFLGIDVSKKSLDVALIRDHPKPLHKVFTNDAAGHGELLAWLNQHGDQTVHACLEATGTWAQNVALALHEAGHVVSLVNPAQIHAFARTGLKRTKTDKADALLIARFCQMHLPPAWTPASPQVQQLQGLVRRLEHLEEMLTIENNRLGAGGVQGLVKESLEEHIAYLNGQIEKTRRQIKDHIDQNPDLKQQAQLLESIPGIGATTAALLLAELGDISHFDNARQVAAFAGLVPRIRESGTSVRGRSRLSKMGSSRLRKSLYFPAITALRFNPLIKAFGLRLSAQGKSKMLIVGAAMRKLLHLAYGVLKSGIPFDPDFVAQTA

SEQ ID NO: 140747 - protein, 313 aa, unidentified
MANAHVHIGVDVSKGALDVFIPGGKTLRVANRLSAVRRMVRGVSAREPSAMFCCESTGGYERTLLDACREEGRPVCLINAQQVRCYAGHLGTLEKTDRLDARLISMAADDKAPEPLAHPTGRQRKLKELWTLRTQLVGERDRVRNQLEHLREKEAVSAVCRIAASIERQLSALEKRCRELVAEDEASGAVMERVQLVKGVGPLTALALAALLPELLVLDDKRLAKLAGLAPIAEQSGTKDGPRHIQKGRGLVRRALYFAALSASRRNAILSAFYRRLREAGKPPKVALVAVMRRLLCLLRRIAQKPDFVPAPA

SEQ ID NO: 140748 - protein, 350 aa, unidentified
MKEYIAFDSHKHYTLVEWEKVTSRRARQRRVEHRPGAIRACLAGSERGTPVAVEATGNWYWIVEEIEQAGLQPRLVHPRKAKLMMGMINKSDKLDVHGLNRLQRNNTLPTVWIPPAGLRDLRELTRFRMVLARQRTRLKNRLQANLAKFGLRLEEPVSDLFAVKVRPALEELLEALPEQTRWTSQLMLTHVDELAGRINQVERRLGQLLKVAPTMELLMSLPGIGPILSAVIWLEVGSIDRFCDGPHLASYAGTTPRVHSSGDKVRYGRLRPDANRYLKWAFVEAANSVAVNYQRCPDRHVSRLYGRLRARKGHPKAIGAVARHLAEATYHVWAKQEPYRDPLLGRISKG

SEQ ID NO: 140749 - protein, 427 aa, unidentified
MNYKQNQRIEQMTDATLLVGIDIAKKVHVARAQDHRGIQFGKAFSFENTASGLRHLLSWVSSLMRDHEKEHVLFGMEPTGHYWLPLAYLLRKQGHRIGIVNPMHVKKSKELDDNSPTKNDAKDARVIAQLLKDGRFSEPHFLEGIHAELRVGMNLRDTLTRELVRIQGRVINWLDRFFPEFTSVFKDWEGKVALLTLLNFPFPAQVASFGAEAILSTWKQQGVIRGVGMKRAIQLVEVAKESIGLTSGTKMAKQELRMLLDQYLQIQQQMSELTEQIQEMLKDIPGTSQMMTIPGIGWITVAGFLSEVGDLSKYDHPQQIQKLAGLNLKENSSGKRKGKTHITKRGRPLLRALLFRASLPLVSNNQEFRDLHLHFTTRTDNPLSKKQSLIALCCKLIRVFFALGRKQIAYDSSKMRMGFSTKLSNVA

SEQ ID NO: 140750 - protein, 335 aa, unidentified
MNSYVGVDVHKDSCHGTVQTESGETVKQGYFKNAHPGFDDFFDGIEEAEAVVEAGAAWQPVYDWLDENGFDVKLADPRKVRIIAEVKIKTDARDSEALADLLRADLIPEIYVPCDERRELRKIVRRRGKLVQERAKYKNRIRAELRKRGIDSDGYYLGTQKAKRWLRSLEIDSVDDYLEIMNSITERIRNLEKEIKEIAGDMEEAQLLMTIPGVSYYSALTIIAEIATVERFPSSEHLCSYAGLVPSTTQSGSKETHGHIQGGRPLLRWIVCQCAHIHVHNADSHLTRFYERLDKEKPGNHATVSTGRKLLKVIYWMLKEGEEFRPEGYDPRQSC

SEQ ID NO: 140751 - protein, 374 aa, unidentified
MMKNTRYVGLDVHGETIAAAMGEEQGKVRSLGQFPNRPEAVRRFIQQLGGPEGLKVCYEAGPTGYALYWLLTKLGVACEVVAPSLIPRKPGDKIKTDRRDAEKLAQCYQSGTLTCVWVPDAAHEALRDLVRARAASKRDESRAKHRLVKYLLRNGLRHPDDCRAWTHPWWRWVQAIKFDFETQQVTLADCVAEVLHQRERLARLDLAIDRAIESAPAEKKAVVEALQALRGVAKLTAVTIVTEVGTFRRFRKPTELMGYTGLVPSEYSSGSRQAKGRITRTGNAHLRHVLGEAAWHARHRPWLNVRLKKTLPTLPPGVSEIAWKAQERLHRKFTKLTYHRKPAAKVATAVARELVGFIWAIGRLAEHRATASMS

SEQ ID NO: 140752 - protein, 366 aa, unidentified
MLIIGCDYHPSVQQIAWADTETGECGEKRLMHSDGEAERFYRELKQRGVQVRVGMEATGHARWFERLLAELGFELWVGDPAEIRATRVRKKKNDREDARLMRKLLLENRFPRIWVPSPENRDVRQLLLHRHRLVGMRTRVMNQLQAIAMNEGLRRKSGLWSKKGRARLESLSLAPWASRRRQELLDLLDRLNPMIDELSKAIEQEAERRPEVQLLMTHPGVGPITALAFVLIIGTPERFHCGRQIASYLGVIPCEDSSADHWRLGHISKQGNALMRFLLVEAAQTVARCESEWRQHYFHLLLRRGRAIAKVALARKLAVRLFWMWRKGQDYQQVKKFGSDAGQLETPNGVKSITVKLMERPAPSMA

SEQ ID NO: 140753 - protein, 418 aa, unidentified
MEPLYDRCAGLDVHKKTVTACRIYPDDSGHATKDIRTFTTMTPDLINLSDWLSQAGITHVSIESTGEFWKPVFNILEGNFDVILVNARHVKAVPGRKTDVCDAEWLADLLQCGLLRASFIPPQAQRDLRDLTRYRTNLVQERAMVVQWLHKVLESANIKLAAVATDVLGVSGRTMLSQIVAGSADPAALADLAKGRLRDKRAELEQALTGLVRPHHRTLIADHLTHIDFLDERIAFITQEIQKHMDEHFPDDDESLRLLDTIPGVDRKTAELILAEVGSDMSRFPSADHLASWAGLAPGNNQSAGKKRSGRTRKGDRWLRTGLIQAAHAAARKKTCYLAGQYHRLAARRGTKKAAVAVAHSILVIAYHILSRREPYRDLGPNYFDERKKEATIQRLMHRLENLGCRVSVELMPSPAPA

SEQ ID NO: 140754 - protein, 410 aa, unidentified
MLFVGDDWAEDHHDIEIVDEQGRRLVRRRLDEGANGIAALHALIADHLDDQAESGQVVVGIETDRGPWVQALLAAGYTVYAINPLQASRYRERHGVSGAKSDPGDAHVLAELVRLDRDHHRPIAGDSTTAEHVKVVARAHQSMVWSRQRQTNTLRSMLREYYPAALAAFDDLAGRDALAVLALAPTPAAGRRLRVARVEKALRAAGRQRNLTATAQRIVETLRGEQLEAHPGVVEAYAASAKALVAVITELARQCEVLKGEVEAGFGRHPDAELYLSQPGLGPVLAARVLAEFGDDPTRYADTRARKNYSGMAPVTRASGKARVVLARHARNRRLADALYQQAFAALSASPGARAFYDAHRARGNTHHQALRALANRLVGVLHGCLRHQQPYNETTAWPPPAEHAETSAA

SEQ ID NO: 140755 - protein, 317 aa, unidentified
MTTTAPVFVGIDISKARLDVALRPAGSPFTVPYDDAGIAMVVERLGALSPVGIVVEATGGLEVLLSGALATAGLPVAVVNPRQVRDFARATGRLAKTDRLDAQILAQFAEAVRPACRPLPDASTQQLAALLTRRRQLVEMLTAEKNRRGSAPHGMRSQIQTHIDWLEQHVAQLDRDLTTAVQASPIWRAHDALLRSVPGIGPVITRTLLAELPELGTLTRKQIAALVGVAPLNRDSGAFRGKRTIWGGRASVRAVLYMGALVAARHNAVLKAFYQRLRGAGKAPKVALTACMRKLLTILNAMLKHRTPWRTLSDQAT

SEQ ID NO: 140756 - protein, 347 aa, unidentified
MSITMIGLDTAKSVFQVHGVSETGKVEIRRKLRRNELIPFFEKQEACAVVMEACGAAHHWARILRGLGHEVRLIAPEAARPFVKQGKKNDPADAAALCAAASRPDMMFVPIKSIEQQGILALHSARSLLVKQQTMLANAMRGLATEFGLTVPKGIGRLEELLELVEADKGFPEKARPVFMGFFEQCRAMAESIAALEVEIVAHARQDKTARRLQTIPGVGPITASLIAATVVDISLFKSARHFAAWLGLVPRQYSTGGKTRLGRITKTGNREIRKLLVLGATSMVYRAPQWNSVVGVWTRGILERRPTRLVTVALANKMARIAWALMTRKEVYRAKGRVATATEAAI

SEQ ID NO: 140757 - protein, 311 aa, unidentified
MKQSVVYIGIDVAKTHLDVAWAGTFRRLPNERSGHAALVRWIKQSATPVQLICEASGGYEQALLESLEKSEVKVTLVQAVRVRQYARAAGILAKTDRIDAKVLAAFGSAMQPQPSRPLSAEQKRLRQYEAQRRHLSRTLVAEENRRAQLSCAELRTLSRSLISKIKTQIKTIDRGISDLIAQDQTLCVKAQKLTAISGVGVRTAALLLAQMPELGQLNRRQAAALAGLAPFNHDSGSVRGKRAIFGGRPASALRSGLYMAALSAARFNPILSNFYQRLRAKGKPHKLALTAVMRKLLLALNQTLKPLPYSA

SEQ ID NO: 140758 - protein, 361 aa, unidentified
MQSTPVIAFDQHAATTVAAVLLPGQRTPALQTLASDTQAIVRFVERVRRQGAVRCCYEAGPCGFEVQRALTSRGIPCDVIAPALIPRRIGDRVKTDRRDASQLAILYRADALTAIHIPTEQEEAARDLLRCREDIRADLLRARHRLSKFLLRHGRRFTGTKKAWTKRHAAWLQAQHWPLTALAQTHRAYVRTVDEAVARLQAVDAELRDLLTLEPLKARVERLRCFRGIDDLTALTIASELGDPRRFPSAPSLMGFIGLVPSEHSSGPKRARGAITKTGNAHLRRVLVESAWHYRHHPFAGRSLRLRQRAAPAAVTQHAWTAQHRLHRRYRRLAARGKPKQVIVTAVARELTGFLWAVLTQ

SEQ ID NO: 140759 - protein, 414 aa, unidentified
MQVMVERCCGLDVHQETVVACVLIGAPGIRPKKEVRTFRTMTRDLEALRDWLKALGVTHVGMESTGVYWRPVYSVLEGHFELIVGNAHHVRNVPGRKTDVKDAEWIADLVRHGLIAKSFVPPPPLRELRELLRYRRKLVESQTAERNRLLRLLETANIKLASVASDVFGVSGRAMLEALIAGDAPAEAMAALAKGKLRRKRDELELALTGRVQEYHRYLLTMQLHRLEAAEQDIEALDQRIAERLEPYRMQHALLMQIPGVDWLVAAVLVAEIGVDMSVFLSAHHLAAWAGVCPGSHESAGKQKTGRARKGNVHLRTILVGAAVAASHTKGTYFKDKYYRLKARRGALRAAVAIAHKILVAAYRMLSTGSAYRELGEIYLDQIDQTRTAANLKRRLERLGYVVTLQLKEATSAV

SEQ ID NO: 140760 - protein, 394 aa, unidentified
MILVGIDIGKNQHTFSIIDKGTGEILSNPSVFNNNQEGFLSLIKKLSDYAKSELLIGMEDTGHYHFALLKYLLDSHYTVALINPATTDLTRKLQGGITKNDSLDSLTICDVISSNHRKKPYRITKVNRFDLYEQKQLTRHHHNLKEELNIYKNRLQKCIDIVFPEFNSLFRSKYGIVYMNVLKTFASAKKIADSDIQTIRKCFEYNRRGKRISLSAEQLKAAAKTSVGIHSVAEEIQIRHLVRQIEMIEEQLSEIDKKIEEFSLQNDSPILSIPGISHFSGTSILAELGDICNYTKASQIIKFAGVAPYHHESSQFTAQHTAITKKGSRYLRKTLYQIILTVINNNKVFTAYYNKKLAEGKGHRCAQGHCIRKLLRIIYHLLSTGQTFDPDLLR

SEQ ID NO: 140761 - protein, 353 aa, unidentified
MQIVGALDVHRRQITFKTIELATGEVRRGRITPAVRQSVREWLAGFAAGEAQFALEGTTGWRFVVEEIERAGHRAHLADPAETAAKRGRKQRAKTDNADCDLQLKLLLAGELPGSWIPPAHILELRTRVRLRKTLIDQRTAWQQRLQAQLFHQGVPAGLRPRTRAGRAALARAELSPAGRELVELALRMIDAIDRELAPLDRQLCSFARRQPGCRALIARLYGVGPVSATAILAELGDARRFARSDDAVRHSGLDVTVYQSDEKRAPGHLSHEGPELLRWALFEAALSAARAGSPDHAYYLEVAERIDHNRACLSVARKLCRRAYHILRELGDEALAPVAGDPHAEEAIAAAA

SEQ ID NO: 140762 - protein, 405 aa, unidentified
MTAVMIGVDPHKGSHTAVAISGAEEPLGELRVRACAAQTEKLIGWAAAWPERTWAVEGAAGLGRLLAQQLVAAGEQVLDVQPKLASRVRLLQAGDTNKNDPNDALSVAVAALRSRVVRQVTVDDHAAVLKVWSKRHRDLARNRNQVACRLHAVLCDLVPGGYPKEIYAAQAARILERASPSGAVALARAELAAEFLADLRHLDDQLRQTKKKLAAAVRASHTTLTDVFGVGPVVAGTIIGDIGDASRFPGPDNFAAYNGTAPVEVSSGNRKIHRLSLRGNRRINHAIHMAAITQLRYKHSPGRAYYDKKTGEGKTHKEALRCLKRRISDAIFARLQADARQSAAARAKGPGGQPGNDSDSSAAGSHPEHQLFGQATPGPATTLRPAAQPSATPPKPGSKKTRPAT

SEQ ID NO: 140763 - protein, 345 aa, unidentified
MESMYYIGLDVHKKTISYCVKDVSGRIHGEGKIPATRFDLDLWMKTLPRPWTVAMEATIFTGWIYDHLRPHAGAVKVAHPLMLRAIAAAKKKNDRIDAKKITDVLRCDFLPECYMAPTAIRERRRTLRYRNLLVRQTVQLKNRISGLLMEAGVSYNKQKLHKVGYFRELLKTNPDIDESLRPLLQLCRETLVGLQKTESALIRSLARDRLLVERVEHLMTIPAVGPITALTWALEVGEVSRFSSIKKAISYCGLCGDEQSSGEHVKRTPISKQRNKHLQWVLVEAAHMAPRLSPELALLYDREKQKGNANRATLAVARKLVAYLVAIDRSQRDFLLVEKENQAAA

SEQ ID NO: 140764 - protein, 354 aa, unidentified
MNKNHDQNEIILGVDTHLDVHVGAVVNTAGKLLGTLSISVNTQGYLDLLSWASSFGDVKRAGVEGTGTYGAGLCRLLTDNGITVFEVNRLDRVARRRRGKSDPIDAENAARSVLSGLSTAIPKQHSGACEAMRIASVARRSAVKARTQAINQVRAILVSAPQDIREKFWRVKASECVKACIKSRKFGDSPLMTTLQSTLKCLAKRWMMLSSELHELDKQLEQLTQNYAPKLRSRFGVGPNTAAILLSVAGDNPERLKSEAALASLCGVNPLPASSGKTVRHRLNRGGSRVANNALWTIAMVRMRSDARTRIYVERRTKEGLSTKEIQRCLKRYIIRELYPLILGDLKNTGEFLT

SEQ ID NO: 140765 - protein, 416 aa, unidentified
MKIYPITRPIQRYIALDIHKEYVLAGGMNARQEWLLPPRRIEISKFGEWARKNLCESDAVVIETTTNVWDIYDIVQPLVGHAVVAHAGAVRQIAEARVKTDKEDVKRLIRLLIADILPEVWVPPQPVRELRGLISYRQRLVKTGVVFRNRLQSLLHSHNLVLPEEGLVSQAWWEQQEKISPLEKLQIGQEIALLEQIEKHKAEVDQELGKQSLGETWGKQALHLMQLPGIGVVIAMTLLSAIGDAHRFENAGKLVGYSGLGAGVHDSGQEHIEKRITKSGRKELRWAMVEAAWRAVRSSPYWKEQYEKFVKRMRRPNQAIVVVARKLLVAVWHVLTKAETDVRASEEDLAYKMLVLSWDLDENVRQGLTYKQFAKYALMKLGVETDITRFVRKNVPRRLAPREEVLARMAELGLTA

SEQ ID NO: 140766 - protein, 373 aa, unidentified
MFNLPVFVGIDYHLNTLQVCVMNQQGKILSNQSVSNDPRAVFSVVAPYGSNVHVAIEACTGSATFAEALFTQYHWYVALAHPGYAARMKQTPDKSDWTDAKLLADLIRVGYLPRVWLAPPYIRELRDLVRYRHGLVLQRTQTKLRLRALLRQHRIICPYSPWTTAGKKWLLDAGNIASPNVLFLLQEHYDTIAFFIKKIATVEKRMVSVVADDPVVKQLLRHPGIGPITAITMRAIIGHFDRFRTGKQLAHFCAVCPRNDSTGGKTTTGGLIKAGDDLLRQVLVEAAHRLIRYNAEWKAMADRLRANGKKTCVIVAAVANRWIRKLFHQMRAPEATGDADVRFLRHGQESTPTLETPSDARRNVSHGTGRLST

SEQ ID NO: 140767 - protein, 355 aa, unidentified
MNDVKFIGLDVHKTSISAAVLDESGKLVMQAVLMTNAAAVLSFLHGLRGTLRVTFEEGTHAAWLHKVLKSQVAEVVVCDPRRNALLKSGNKNDQVDARKLADLLRADMLKAVYHDDTQTMTLKELGRTYRCLTDDCTRVMRRLKALYRSLAIDTGGKKLYSKRRREQWINQLQQPGQRYRAERLFEQFEQLKTLRRQVRSDLINEGHKHAATAVLSSIPFVGPIRSALLIARVQTPFRFRTKRQFWAYCGLALETRSSADHQFVNGELRRKSKPVFIRGLNLNHNHDLKNIFKSAATTASASPGPFRDFYENLLGKGMKPEMARLTLARKIAAISLSVWKKGERFDPEQLTTQAA

SEQ ID NO: 140768 - protein, 346 aa, unidentified
MVIIGCDFHPSWQQVAWLESETGETGEGKLVHASGAAKQFYQRLRGPVLIGMEATGNSQWFIEMVEDLGHEIWIGDAAQIRASYVRKQKTDKRDAGHILNLVVQGRFPRLWTPDREQRDLRQLVLHRHKLVEIRSRVKNELQHLALNKGMQKKRTLWSQAGQKMLHELSLKPWASCRREDLLGLLAMLDEQVGKLDRAVKEAAEASAQAQLLMTQPGVGPNTALAYVLTIGDVSRFRRGKQIASYLGLIPREESSGGRQKLGAISKQGNRLLRSLLVEAAQIAVRFDPGMKKQYLHRCHHKPKGVAKVAAARKLAVRLYWMLRTQTGYPEIVRIESSPRVPLVGAS

SEQ ID NO: 140769 - protein, 417 aa, unidentified
MLFVGDDWASDHHDIELVDESGRRLARRRLAEGIAGIAALHALIAEHLPEDAVDPATGGLAAETVMVGIETDRGPWVAALVAAGYHVFAINPLQVARYRERHSTSGAKSDAGDAHVLAEIVRLDRAHHRRVAGDSADAEGLKLLARAHQTLIWERTRHHLRLHAALREFFPAALAGFEAAGIELTAPDALELLGRAPGPEQAAALSKAKIAAVLRRNRRRDVDAKAERIQAALRAPALRQPAAVARAYATIVASQVRLLTTLAGDVAELETAVEQGFGRHPDAEIYRSQPGLGAVLGARVLSEFGDDPARYTDAKARKNYAGTSPITRASGKKLLVLARYARNDRLGDAVHQWAFCSLKGSPGAKTYYQALRARGIGHQAALRQLGNRLVGILHGCLKTGTLYDEHTAWAHHMNAAS

SEQ ID NO: 140770 - protein, 379 aa, unidentified
MEISSSTLPAVAAERATMFVALELSKSSWLVALHSPVADKVSMHRFVGGDVAGLLALIARKQTQAEARLGRTIRVLSCYEAGYDGFWLHRLLCARGIDNRILDAASILVDRRSRRAKTDRLDAAGLLRTLMALDRGESRVCGVVRVPSVAQEDARRRSRERTRLVVERGQHSNRIKGLLMTLGVRDFEPTRRDWQQRLGGLRTADGRELPACLKAEITRECRRLHQVIVMIAEVEAEQAAALDAEEGRAAQLIRLRGIGLVSATVLADEVFYRDFRNRREVAGYLGLASSPWASGRVQRDQGITKSGNPRARRTAIELAWLWLRHQPGSLLTQWFRQRVGTTRGRMRRIMLVALARKLIVALWRYLSDGLVPDGAELKA

SEQ ID NO: 140771 - protein, 361 aa, unidentified
MFEHRAPSIANPLGDSLVDHYAGIDVSLELSSVCIVDATGEIVKEARVESHPDALVKFFKASGLPLTVIGLEAGPLSQWLYAGLTKAGFVTTLMETRHVNAALSATTVKTDRRDARGISQLLRMGWFRPVHAKSTGSQEVRALLVARKQIQHKLKDIELSLRGILRGFGLKVGKVTEKTFEARIRELVTSHPMLEEIAEAMLAARAALLEQFKKLHKAVLKIVRHDEVCRRLMTTPSVGAIVAITYKSALDDPGRIKKSRNAGPLFGLTPKRYQSGETDITGGISRVGDEMVRTALYEAANVLLSRVTRFSALKRWGMEVAKRRGLKRAKVAVARKLAVILHRMWIDGSTFRWTKTEAAYA

SEQ ID NO: 140772 - protein, 411 aa, unidentified
METVVERPGALDVHKAQVTACVRVPADGGGREQHVSEFATTVAGLLTLRDWLAAHGVSQVTMEATGVYWKPVWAILEDEFELLLVNARHVKQVPGRKTDVKDAEWLCQLAEAGLLKASFVPPKPIRALRNLTRYRKTQIQERSREANRLHKALEDTGIKLDCVATDILGKSGRAMLDALVAGTTDPEVLADLAKGRLRAKLGALREALEGRFDHLHAVWIGAILAHLDFLDEQIQSLTETIGEQIAPFEKAAQLLCTIPGVGRRTAEVIVAEIGVDMSVFPTAKELASWAGMCPGNDQSAGKRRSGKTRKGSKWLDWALEEAALAAIRTKDVYLAAQYARLRPRRGHKKALGAVKHSIIIACWHMLSTGELYNDLGGDYFRKRDPERTTKRLIAQLEALGHTVTLQEAVAA

SEQ ID NO: 140773 - protein, 323 aa, unidentified
MTVYLGIDIASKKFDVAELCDGNYRCRAFANTSAGFLAFYKWLNTENKQDIHACLEATGDYGTGLATFLYERNLKVSVVNPARIKGYGASELSRTKTDRADSKLIARFCKAANPERLKPMPAPVRKLQALVRRISALNGMLRMECNRRENADANIQASLDRIINQLKKEIEAVRQELHAHVRSHDELKKQDELIQSVPGIGSISSHLILSFISGKEFRKAKEVTAYLGLNPRHHQSGSSVRGKTRMSKMGDARLRSALYMPALTALKHNPDIKAFGQRLLLAGKPRMLVVGAVMRKLIHIVFGVLKSNTAFSSRIALDSVTTS

SEQ ID NO: 140774 - protein, 341 aa, unidentified
MKRLYYIGLDIHKKTISYCVKEIDGRLVQQGMIAAQRKVLLKWMEGLPGDWVGAMEATMFTGWVYDFLKPHAVELKVAHPEMLKAITAAKKKNDRADAEKIADLLRVNLLPECHMLSQELRELRRILRYRNMIVRTGVKMKNKISGLLMDVGATYDKAKLHRRKYFSHLLERVEDIPDSVKEMLRLSRNSLEMFEAVQRKLIHTLREDNLIHERVERLKSIRGVGEVMALTWVLEIGEVSRFSSARKAISYCGLCSAQRESAGKEQRGPISKKRNKHLQTMLIEAAKLAPRWNPQLAILHERELLRGNRNRATISVARKLVEYMLAVERQQRDFVPSELAA

SEQ ID NO: 140775 - protein, 313 aa, unidentified
MNKSFIGVDLSQRYLDIAVRPEREQWRLPNEAQGLAALVERLSALAPTLVVLEASGGLERPVARALSQAGLPVAVVNPRQVRDFARSTGRLAKTDALDAQVLAQFAERVQPEPRPQPDESTQQLQELLTRRRQLVEMLTAEKNRLKQAPPPLRPRLQAHIDWLNEELDRVDDEIARRQQVNAVWREQSALLQSTPGVGPVFSSTLLAYVPELGELNRKQVAALVGVAPFNRDSGQLRGKRTVWGGRAQVRAVLYMSTVSAIRCNEVIREFYQRLRAAGKPQKVALVACMRKLLTILNAMMKQGTPWQPKAIST

SEQ ID NO: 140776 - protein, 457 aa, unidentified
MSARKNVKKKSTSKTNVQLPTLHPHAGGVDIGATQIQVAVPCDADPKPVRTFTTFTDDLLKLRDWLKACGVRTVAMESTGVYWIALYQILEAAGIEVCLVNARHCKNLPGRKTDVSDCQWLQYLHSVGLLRASFRPPEQICVVRSFLRQRANLVRYASQQVMQLHKALTQMNVQIHNVISDIVGVTGLAILDAVLAGERDGQKLAQLKDRRIKASGDTIARSLVGDWRAEHLFALSQALATWRHYQILITECDAATAQALAGFESRVDVVANPPPPSTLRHKKPHANEPRFEARTELYRITGVELTQVPGLQVGTALVLFGELGPDFVTRFPTAKCFASWLGLCPDNRITGGRVISVKTRDVKSRSAEALRLAAQALWQSKTYLGDCFRRWKARLGTPKAITAMAHKLARILWHLLKYRKAYDPTVWTMAEEKMRAKKLKRLHQNATALGYKLVTAA

SEQ ID NO: 140777 - protein, 414 aa, unidentified
MESAYRSVAGIDVHKKMLAVVVRCESGDEAVYEQRKFGTTRAEIQHLEAWLRTLAVREVVMESTAQYWRPVWYGLEPHFRLHLTHPLKTRAPRGRKSDFRDAQRLADRWSAGDLEESFIPDSEQRAWRWLTRTRVQLNKKLGVIHSHVEGLLEQGGIKLSAVVSDLFGVSGWAMLEHIAHGVTDVEALAKEARGVLRKKDAELKEALAGRLEPVYRLLLKQHMDQVRLLRRQVEEINEALAAAMKQHLAALHRLTKIPGVDLYAAEELVAEIGPKAAAFPSAEQFASWVGVCPGSQESAGVNYSHRSAKGNRYLRRLLCQIAWAAIHTKDTFFASLFHRLKPRVEGKGAAWAVAHRVAKVIWRVLHEEVEYQEKGSAPPNERTLVRKFKRMLREFGSLGLDVRALLDQQLPASA

SEQ ID NO: 140778 - protein, 434 aa, unidentified
MQEVTDEPLYRDRVCGIDIGKAQMAATIRVPSEKNPARRMSETRMFGTTKAGVLELADWMRAWQVGAAVMEATSDYWKPVFYRLEAEGFECMLADAKQVRNLPGRPKRDPSDSQWLACCFERGSVTSCFVATPEFRIIRLHTRRRRDLTGERTREKQRAEKLLEDAALKLSSVLTDLHGVTGRDIMDRLIAGERDPKVLAQCARTRARRKIPQLREALEGAEFFTEYHARLLRSILDRIDAITAEIDQLSQVIEELLAPYEEQLQQAESMPGWERRAAQDVIAETGVDMTRFRTGGHLASWCGRTPLDKQSGNRKGQRKHKRGNKYAGAVLGETAVAAGKTQTREGTRHRKIARSRGKAKAVVATGNTQMKVFHALLSSPGTRYEDLGPDWDTDERRTARRLSRLVGELGAMGYEVTLCRRQDPRPEPEPATQA

SEQ ID NO: 140779 - protein, 483 aa, unidentified
MKSKPEEQNKRATNHPTQHHWHEMNRKQRREMTRQIQSEDLSLEVIHPDAAGIDIGNESHYAAVPPSRDSQPVREFGCTTAELKAMAAWLKQCRIRTVAMQSTGVYWVAVYDILEQAGLEVYLVNARDTKNLPGRKSDVQESQWLMKLHTYGLLLNSFRPSQEIRVMRTYWRQRNDLVQSAGRHILRIQKALTQMNLQLANVLTDISGATGQAIIKAILAGEHDPHKLAEFRDPRVKASEEQIAQSLEGNWQPDLLFLLKQEQDGYEFCHKQMAECDRQLAQYLQQRKDRSQGAPLPEEKRKGRLKKKKGNAPQFDLREGLFRMTGTDLTRIDGIDVMTATTVISEAGYDMSKWQTENHFVSWLRLCPDNRISGNKVIGKGRLPTNNPISIALKMAATTLRESKTYLGAQFRRLRTRLGAPIAIKAMAAKLARLVYRMLRYGMKYVDQGAAFYELRHRELQIKRLKSKAEKLGYRVTPIPVAA

SEQ ID NO: 140780 - protein, 356 aa, unidentified
MQTLVEHGCGLDVHQATVVACLLILGKDGKVRKQVRTFATTTREWVSLRAWLLAEGCTHVAMESTGIYWKPIYAILEGALEIVVANAQHVKKVPGRKTDVKDAEWLADLLCHGLLRSSFVPPKPIRELRDLVRYRRKLVQSQAAERNRLLKVLEGANIKLASVATDVFGVSGRLMLRALIEGQANPQEMAVLAKGKLRNKIPELELALEGNIEEHHRFLLELQLQRLQAAEKDLATLEQRIEQKLEPYASQLELLHEIPGVDWAVAAVIIAELGVDMSVFQTVSQLVSWAGVCPGNNESAGKRKSSRITKGNVYLKTALVEAASAAARAKGTYLRDKFYRLKARRWLQTGRRGCGP

SEQ ID NO: 140781 - protein, 468 aa, unidentified
MRKDTKKKSLMSKKKRVNNLPKHLEHINKMAAGIDIGSKSHWVAVPEGYDEACVREFQSFTADLHELVSWLERCGIETVAMESTGVYWIPLYELLESRGFDVRLVDARHVKNVSGRKTDILDCQWIQQLHTYGLLNGAFRPNERVCMLRSYLRQRSMLVERASHHIQHIQKALSQMNIQLSNVISDITGDTGMKILRAIICGERDPELLAAYRNKACKNPVEVIKKSLEGNYREDHIFSLTQAVELYDVYQEKIAACDKSIENMLLEFNEQKEIDMEKLSKRATKRKGGGRSKNAPLFNLKLHLIRITGIDLTAIPGIEATSALKIISEIGLDLTRWESSKHFASWLGLCPGNKVSGGKRLSGKSKRTGNNAASALRMAASTLHRSQTALGAFFRRLKSRLGAPKAITAAAHKLAVIIFNMLKNGVEYVETGQHYYEEQYRERSVKNLIMRAKTLGFTLVETTAYSIS

SEQ ID NO: 140782 - protein, 355 aa, unidentified
MNDEKYIGLDVHQATIVVAVLDSTGKLVMESILETEAATILQFFAGLRGTLSVTFEEGTWSAWLYDLLNPHVDKLVVCNPRKNALLKDGNKSDRIDARKLAELLRGNQLKPVYHGETGVRMLRELSRSYLTIVKDLSRVMNRLKAVYRSWAIPCAGRDVYYRRHRAQWLAKIREAGVRRRAERLYEQLDMLQHLRQQARRELLAEGRKHAITAKLRQIPYLGPIRSALAVALIQTPHRFRSKRQLWAYSGLALETRISAEYRLVEGQVRRSKKLLSIRGLNKDHNHDLKGLFKGAATMASVRPGPFQDFYQAALAKGIKPTMARLTLARKIAAITLTLWKKGENFDAEKLKSQAA

SEQ ID NO: 140783 - protein, 344 aa, unidentified
MEAIVTIGLDIAKSVFQVHGVDANGAVVVRRRLTRAKVLSFFERLPPCLVGLEACATAHYWGRELRKLGHDVRLMPPSYVKPYVKRQKNDAADAEAICEAVTRPSMHFVEIKSPEQQSIMSLHRVRQMLMRQRTQVSNAIRGHLGEFGRVAPIGRNGLAQLIAIVADENDNTLPDDVRAAVAMLAVQLRIVNDQILELDRRVRASARATDVGRRLMEVPGVGPVLASALVATVPDASAFKSGRNLAAWIGLVPRQNSSGGKERLGGITKQGNRYLRQMLVVGALAVIRYAQRHGTRRPWLVHLLARRTTKIAAVALANKTARMIWAIMTTGERYREPSAASAAV

SEQ ID NO: 140784 - protein, 410 aa, unidentified
MVERCCGLDVHQETVVACVLIGAPGVRPTKEVRTFRTMTRELQALRDWLKAAGVTHVGMESTGVYWRPVYAVLEGHFELIVGNARHIRNVPGRKTDVKDAEWIADLVRHGLIAKSFVPARPLRELRELLRYRRKLVESQSAERNRLLKLLETANIKLASVASDVFGVSGRAMLRALSEGNVSTEEMASLAKGQLRRKHDDLVLALEGRVEEHHRFLLAIQLHRLEAAEHDIEVMDSRIAKRLEPYRTQHALLMQIPGVDWVVAAVLIAEIGIDMSVFHSPNHLASWAGVCPGNHESAGKQKSGHARKGNVHLRTILVGAATSASRTKGSYLKDKYHRLKARRGALRAALAIAHKILVAAYHMLAKGLAYRDLGEAYLDQLDQTRTAANLKRRLERLGYTVVLQLKETATA

SEQ ID NO: 140785 - protein, 289 aa, unidentified
MTNFNTKYQSVCGIDIAKNVIQIYQVNQDGECKNFQVKRKEFLQLFENREPSLIGMEACGGSQYWARELQKLGHTVNLMAPSAVKPYVSGFKSDRKDAIGIFNAMLAGVRKVAVKTEAVTDLATLLGIRARRIRARTAKVNMVRGYLMEYGIVMARGLRQFKNSIADSLLQLERAQASNMVKEEFKFLVDEVDKETEAILRLDREINSLAKQCKNFDHFLTAPGVGLITAATMCVKLADPQVFKNGRQFAAYIGLVPQHYGSGGKNVNTTIPIKCNKELRGLLVQCAQS

SEQ ID NO: 140786 - protein, 430 aa, unidentified
MKSNTQNAKIEAITEKTLVLGIDVGSEMHYARAFDYRGIEYSKKPFKFSNTEAGFVTFKEWILGLKERHEKDKVIPGMEPTGHYWFNLGKFLQDNEMKPVLVNPHHVKKSKELDDNNPTKNDRKDPKVIAGLVREGRYMIPYLPDGVYADLRTASNIRFQLQAELTRIQNRISRWFNIYFPEYKTVYGKPDAKSGMLILKAAPLPEDILTLGIDGVNQIWRDAKLRAVGKARAKTLIEAAEHSVGSKEGAVSARMEIRMLLEDYESRNTRLQEVMVLIEELVRKIPMAEKLLEIKGVGIRTVSGFLAEVGDISRFNNPKELQKLAGLALVENSSGKHKGETTISRRGRKRLRYLLFEVAMSLVSKNPEFRELHNYYTTRRLNPLKKMQSLMAIAAKLIRIFYAMLTKGVDYDPKKMVSDIRRPAAYLQAA

SEQ ID NO: 140787 - protein, 343 aa, unidentified
MDHFAGLDVSVKETSVCIVDDTGRIAKELRVASEPDALLRVLGNPAYRFKRIGLEAGPLSQWLFGALAEAGLPVICVETRHMRAVLKAQINKTDRNDARGMAQMMRAGLYRPVHVKTLRSQKLRMLLTHRKLLQSKAIAIDNDLRGTLRNFGLKVGVVGTVKFEARIKELVESFPDLAELVEPLLIVRRTLREQIGILHRRLLAIVRNDDVCRRLMTIPGVGPVVALTYRATVDVPARFRNSKAVGAVFGLTPSRYQSGEIDRPGTISRCGDEMMRVMLYEAAHIMLVRLAKWSWLKAWAMKIARHRGMKKAIVALARRLAVIMHRIWVDGTEFRWSREVTAA

SEQ ID NO: 140788 - protein, 330 aa, unidentified
MNYSHFVGLDVGKKSFDASLVSLDQELSHHTFPNTPEGIEELLHWIRQHGVEVETALFCAENTGSYVIDLCLSSYQYHFPLALECPLTIKKSIGLQRGKNDRIDARRIAQYASLHYRKLRLYELPDKDLVRLRNWLVIRDNLVKQKVSSLKLLELTRETSRLADLMVPMTFLENQICQIKEKISYVEEEMEKIITENITLSTNYQLLTSIKGIGPVNAIVLLCVTDNFQRFSAPRKFACYSGVAPFEYSSGTSIRGKTKTSHLANREVKVYLTRAAITAIAWDPQIKAYYKRKIAEGKHKASVINAVRAKIIARCFAVIKRKTPFVTLSA

SEQ ID NO: 140789 - protein, 343 aa, unidentified
MTIVAEHYQFVTGVDTHARRHQFAVLNAAGHVLEERSYPTDPAGIARSVEWARSRTAGGALLVSIDGAGSYGRLLTDAFLRAGIDVTQAPVIRYRPDGKDDRIDARLAASSVLPLEQDALARPRTGAEQEALQILLTARTSMTRERTATINALTGLLRRHDLGIDARRPLRTGQIAQIAAWRSHPTDPLDAAIARREATRLARRIRELAEQLVENNTTLRDLVTAVAPRLLDEPGVGPVSAATVYVAWSHPGRVRCEAAFARLAGVAPKPVSTGNHHRHRLDRTGDRRLNAALHRVVITRWRAHPQTLEYTARRRAEGRTDRDIRRALKRIVARQLFRLLQAS

SEQ ID NO: 140790 - protein, 365 aa, unidentified
MNKNSNPAKTNSQSKEVFAFYIGIDLGDKYSDVCVFDAGGEVSKQFRLAMKEADIRKHFSSIGRSRVAMEAGGQSRWVAEVIESCGHEVYVSNTRKVPYIHDSDDKDDAGDAHKLAELVHFKPRLLHPIQHRSKQAQADLSWIRARQALVDVRTQLINTVRGISKSFGERLGRCSTEAFTAKMAEKIPGAIGGAVAPLLELIDQINERIRYYDEMEEHIARERYPKYGLLEQVNGVGVHTALSYMLTIGDPERFEKSRAVGCFLGMRPRKRDSGSSQPQLGITKAGDEYLRKTLVNCAHYILGPHRKDSDLRRAGQRICKRGGKNAKKRAVIAVARKLAVLLHRLWVSGEVYEPLRNSKKVAAAA

SEQ ID NO: 140791 - protein, 342 aa, unidentified
MTKILKQVAGIDVAQNELVVSLGKLDQSLCKEVYAYKTFANKPSGLAALLTWVRKHSEREVAVHYVMEATGVYHEKLAYYLSDQGLAISIVLPNKISSYMKTLEIKTITDKTASQAICQFALERTLTLWQQPKKVFRDLKQLTRERDQIIAERTMAKNQLHAEQAEAFPNDSSIYRANQRIKLLNEQEKEIKQEIAVFLKTDQELHKKIDLITSISGVGDLTAVIVLAETNGFELIRNKKQLISFAGLDVIGKDSGTSVKGKPRISKKGNRYIRKAMHMPSLNAIRNDERFKAIFVRLVSKHGIKMKAAVAVQRKILEMIYTIWTTEKPYDKEYLQKANTAV

SEQ ID NO: 140792 - protein, 366 aa, unidentified
MKKISTLQAFSNEILKEQKLTIGVDLGDRWSFYCVLDEAGKIILEQKLLTTPEVMKQTLGKISRSLIALETGTHSPWVSRLLTELGHEVIVAHAQKVQLITKSNRKDDRHDARTLARLARIDPELLGPVRHRSVQAQIHLTVIRARAELVSARTALVNAARGLAKSYGERLPKCGTYQVSEKLAERLSAELRDVLGPLLKEIESLNERVKEYDERMEKIAKEVYPEVSLLQQVKGVGTQIALTYILTIDDPYRFSKSREVGCFLGLKPGRRDSGESEPQKGISKEGDRYLRTMMVQGAHYILGPFGEDSDLRRWGLKLAERGGKNAKKRAVVAVARKLAVLLHRLWVSGEVYEPLRNSQKAMRAVA

SEQ ID NO: 140793 - protein, 340 aa, unidentified
MDEYIGLDISLKETAVSIRRDGKRVWRGKCSSDPQLLAALIRKHAPAPKRVVFETGPLSVWFFHALAAEGVPAICIDARHAKAALDMAANKTDANDADGLAHLAEVGFYKEVRVKSFDSMLTRTLVAARTRLVRIGTELSNQIRGLMKTFGLVVPAVTGSKFEHHVHALLADNTDLGQIIRPLLEAWHAVRLRSAELGRKLLADARRNAACQLLMSIPGVGVVTATSFVSAIEEPANFKHSRSVGAFVGLTTRRYQSGKIDYDGHISRRGDSHLRGLLYEAATVLLTRSRSECDLRKWGLQLRERLGFKRATVAVARKLAVIMHSMLITGEPFREKSAAA

SEQ ID NO: 140794 - protein, 413 aa, unidentified
MDVLHPRCCGLDVHKSSISACILVQVAGRVQKHQRRFGAMTQDLQELANWLRQFEVTQVAMESSGVYWKPVWNILEGQFTIVLVNAQHIKNVPGRKTDQKDAEWIAQLLQHGLLRPSYVPCEIIRDLRDLTRMRVSLSQEASRISSRVQKVLEDANVKLASVATNTLGKSGRAMLEEIIAGQDDPEYLASLALGHLRAKTLQLRLALEGKIRPHHRFLLRRLLDQLRFVEHEIVLLDERLEHIGRERPELSQAVARWDTIPGIDRVAGWTLLAEVGHTMAQFPTAEQLASWASLCPGNHESAGKRLGGTTRKGSPWLRRMACQCAWAAARTKNTYLSAQFRRVAARRGSKRAIIAVAHSLVIIGYYLQKNQRNYEDLGGDYFDRIDSDGLKRYFVRRLEKLGHKVTLVPIKAA

SEQ ID NO: 140795 - protein, 369 aa, unidentified
MKHFIIFVGLDVHKDSIVIALADDGRNGEIRVYGTIGGDLDSLDKAIRKFRRSGVELRFVYEAGPCGYEIYRHLTAQGFHCDVIAPSMTPKKSGDRIKTDRRDALSLARLYRAGELTPVYVPREDDEAMRDLVRGREDAVNATRKARQRLSAFVLRHGFRYSGRNAWSAAHLRWLADIKMSHPAQQITLQEYINSIEETSERVDRLTDQILNLIPAWRMGPVVAALQALRGVAAVVAATTVVELGDLRRFENPRQLMAYLGLVPSENSSGQTTKRGGITKTGNSHVRRALIEAAQAYSFPAKVSRELRKRQEGLPREIKEISWKAQVRLCGRFRKLMAKGKNRNRTVTAIARELSGFMWAIAKEVPMPA

SEQ ID NO: 140796 - protein, 366 aa, unidentified
MKKTSTVRVNGNMIFKGHKLTIGLDLGDRWSFYCVLDEAGQVILEQKLPTTPEAMKQTFARIPRSLIALETGTHSPWVSRLLRELGHEGLVAHAQKVQLISKSNRKDDRHDARTLARLARIDPELLGPVRHRSAKAQIHLTVIRARAELVSARTALVNTARGLVKSYGERLPKCGTQQVSRELAAALSVELREVIEPLLKEIESLNERIQEYEVRMEKIARESYPQVELLKQVKGVGTQIALTYVLTLEDPHRFAKSREVGCFLGLRPGRRDSGESQPQRHISKEGDPYLRTMLVQGAHYILGPFGEDSDLRRWGLKLAARGGKNAKKRAVVAVARKLAVLLHRLWVNGEVYEPLHNSQQAMRAVA

SEQ ID NO: 140797 - protein, 422 aa, unidentified
MTQVTHNTQSLSIVNPNCCGVDVHKSFLIATIIKTGDNNFIDIISERFETFTDDIFKFRDWLIQHNCPVVAIESTGIYWCPVFNILEDHINVILVNARHYKNVPGRKTDFSDSRWLAELLRFGMLKPSFIVPKEFRDIRDLIQTRQSYVNSAADYKKRIQKLFKKANINLDSVLSDMFGVSGRNILSRLANGQFYFSKTEILSCLKARTRNNADEVIRALNGFFQVHHQFILVELLNTLNQLETTIKTLEERIEQLMKPYKKLTERLINHPGLGYSTVYAILSLIGIDMSVFHSPEAIASWAKLSSGHNESAGKRKSTRTGGYNVQIKTVLVEAAWAAVKTKGSYFKAKYHKLKARIGPKKAIIAIARKILINIYFMIKDGTEYIEKGEEYLILLNRKRIIADIKKKAEILGITLTIPDHLQ

SEQ ID NO: 140798 - protein, 387 aa, unidentified
MYFVGIDISKFKHDCAVIDDIGNVVTPSWSFNNNSEGFSLLAELLTNLGKDIKIGFESTGHYGQNLKLFLESNSFTFMEFNPLLISRFVRSKSLRKTKTDSIDALLIAQYLMTVEYEPYPASFYHLDKLKSLTRFRNSLVRQRSRQLVELTNVLDKIFPEFKPFFKHRFSVTALYILSNYATPEKIANMNSRSYETIRKLSRGKFTMSAFIQLKTLAKNTVGQSDDYLIRETDVLLELYNQLNAKIQEIEEQVVECIQGINPPILSIPGIGALSAAIILSEYGDFSKYDSPSKMLSFAGLEPGYFQSGQSEYTGRMVKHGSSHLRYALMNCCLPLITNEPVFAEYYAKKRAEGKPHRVAMTHVAKKLLRVVYTLQTRNITYNPELMR

SEQ ID NO: 140799 - protein, 388 aa, unidentified
MNRIIKIGLDVHSTNYTLCAMEPTIGSEDRIFGELQTAPDYKEVIAFINSLKLKLDLSDKDSIECGYEAGCLGYTLYNQLTNAGIKCVILAPTTMLTQQGKRVKTDKRDARLIAQCLCYGGYHPVYVPAGEDNAVKEYLRMRDDHKLALKKLKQQINAFALRHGHQYPGTKWTCKHIIWLRKLELNPIYREALNEYMASYDEQEAKIARYDARIEEIAAEAHYKETVEKLCCFLGIRTHTALSLIVETGDFKRFAKGNTYGAFLGLVPGEHSSADKINRLCITKAGNSHLRTLLIEAAKGICKGQIGRKSKSLRARQNGQSAEVIAYADKANTRLRSKYYRMIRHGKKKNVAVAAVARELACFVWGMMTGNISVTGSTGTSAPAVSQG

SEQ ID NO: 140800 - protein, 335 aa, unidentified
MEFEFFIGIDVSKNELDFSIQQGKAFLFHKEIINDPEEINTLLKGLGKLKGFSMNKAVFCLEHTGIYSNHLLSCLYKKKANICLESASQIKKSLGNLRGKNDKVDSMRIATYAYKNRDDLRLWSPRREEVQQLAHLSSTRSRLIKTRKILKTPLKEYGTFVKKKAAKQNTSLCNKALNGIEASLEGVEKEIMNIVNADPELKRLFTLVTSVTGIGKVTAIQLIVTTNEFKDINNASSYACYAGLVPYLEESGVFKGKGRVSHMANKKVKTLLHMAALVAIQYNDELRLYYERKVNVEKKNKMSVLNAVRNKLVQRIFSCVNQNRKYEKNYLKLVA

SEQ ID NO: 140801 - protein, 451 aa, unidentified
MGNGNGVSRGDRNRNTRLDRLRTLVSMSNAIVGIDLADRKQMVVVTDHDSKVLARKTFRCRAWDLGRALDWAAGRAAAVKGFAGVTVSCEPTGHRWRVLAQLAANRSMPFACVQPMVTSWARRAEDLTHDKTDEKDAVLIARLTAQLRCYEPEPVDETWARLRHLGARREQLITETSSQVQQMRDLLECVWPAALGTAQQPFRSRTWIAALTVIVDRDSGEFDRTRRLGAARFEHAVRREIVKHGGQKPCRRITRNLFAALADPAGVIAHRAGALERVQLLLEDWRNAHDRLADTEARMTGVLDELGLTRLVTSITGISAVGAAAILAQTGDPRRFATARALVKHAGLAPREKLSGAFVGRTKLTGQGRPGLRLAAWRAVWGAQRANPVYGARYRHLTTREHNKLKPTQAQTVIAAAILRHLHAVITTGQAWDPAIATHGTPQRFEPAAAA

SEQ ID NO: 140802 - protein, 379 aa, unidentified
MSDSIIYVGMDVHKDFVMMAVLPADAARPTRVERVPNEPTHLRRFFRRWVPQGRVRACYEASGAGYVLQRTLEGWGVECAVIAPALMPTRPGHQRKHDKRDAIELARLHRAGELVPIRIPTASEERVRDLVRCREVLQRELIRARHYLVKFLARRGLVYREGTPWAGPHERWLQALARSGALSAEDATVFGEYRALIAYVAQRRAELDRQIAALALTPAYAASVARLRCFRGLETHAAMVLASEIGDWRRFTSPRPLMAYLGLVPREASSGTHERRGSITKAGNSHCRHVLLQAAWSYRHVPARSERLQQRQQGQQGQPAEVVAHAWKAQQRLHRLYGRLVYRKRPAVAVVAVARELVGFLWAVMQDVAPAAEALAHVA

SEQ ID NO: 140803 - protein, 468 aa, unidentified
MGHNRSRSRQTGRGKRKHPSLLKRINRNAAGIDCGSKAHYVAVPLERDTEPVRSFKTFTADLHCLADWLEACKIKTVAMESTGVYWIPIFEILEERGFEVVLVNARHIKNVPGRKSDVLDCQWIQELHSVGLLRGSFRPAAEIASLRAYLRHREKLVQGAASHIRRMQKVLVQMNLLLHNVISDITGVTGMRILRDIVAGVTDPMVLASHRDYRCRASVEEIAASLTGNYRAEHLFVLRQNLELFDTFQRQIQTCDGEIESLLRTLAAKQRRPKAPVPSPRCKPRFCDNEPRFEIRDPLYRLAGADLTQIDSIGPYTALKLIAEVGTDMSRWPTYKHFTSWLTLAPKNKITGGRLISSKTQPSANRAATVLRMCAMVVGRTSTALGAYYRRIAYRIGKPKAITATARKLAILVYRVLKGDLDYDDPGAQAYEDHHRTRTLRNLRNRASQLGFGLVNVETGELFHGPVS

SEQ ID NO: 140804 - protein, 344 aa, unidentified
MGNITRVGVDIAKSIFHVHAVDRFNETQWKGKYARTKWLAAICKKVPLGAEIAMEACGSANYWGRELERLGYKVKIIHARFVKPYVKSNKNDAVDAEAICEAMSRPNMRFVALKTVRQQDVQSAHRIRENLMKQRTAKANQIRGLTSEYGVVAPVGIEKLRQAIPCWLEDAENGLSVMFRELLDGLAVDLRFLDKRIAKIDDVIKRDVQEDPVAQRLLELRGIGVLCASALSSAIGDGKAYRKGKDFAASLGLTPRQHSTGGKQKLLGISKRGDGYLRKLLVHGARSVIRHAKNKDDHLSNWVNKLTTIKHVNIATVALANKTARVAWALVNNKENYRPELVAA

SEQ ID NO: 140805 - protein, 360 aa, unidentified
MTLPVVADTEVRVTLGVDTHADVHVAVALDQLGRRLGACSVATTPAGARQLLDWASQFGAVQRVGCEGTSSWGLGLARFLRGQGLAVLEVNRPSRQTRRRRGKSDSLDAEAAARAVQAGTARTVAKTADGQVEMIRALRVVRRSAVKARTQAANQLQSLLVTAPDELREQLRGLPGDRLVTAAAQLEASGQVATILAASQLALRSVAVRYQQLSAEMSALDQQLGRLVTQAAPALLALPGVGIDTAAALLITAGDNPDRLTSEAAFAHLCGVAPIPASSGKTTRHRLHRGGNRDANRALWVVAMGRLRWDARTRAYVARRTAQGKTKREIIRCLKRFIAREVYHVLVPIPPAGGQGHPAG

SEQ ID NO: 140806 - protein, 341 aa, unidentified
MRKTLYCGVDLHSNNAMYVITDEKDQQLLRQRLPNELPLVLQTLAPFRARLKVVAVESTYNWYWLVDGLVDHEYPVVLAHPSEMEQYEGIKEADDLTDAAFLARLARLNILPTGYIYPKEDRPVRDLLRRRMLVVQHRTGVILSLQNMAERQTGQKVGWRAIRKLSDAERAELLGEHDCLAFVTAEQVEMIELLNKKIRRFEQKILEHVQLRPAYECLQSLPGVGPILALTILLETGDIGRFPTVGDYTSYCRCVRATHTSNGKKKAHNNGKNGNAYLAWAFVEAVHHALRTCPPAKAFYDRKRAKRNGALATKALAAKWSKAAYYIMKRQEAFDLTRVFG

SEQ ID NO: 140807 - protein, 383 aa, unidentified
MRIVCGLDVHKDSVFVCILNEKGEKFEAKYGVLTPELEELHQLLLTHEVKEVTMESTSIYWHPIWRILSDIECLKLVNPYFIKQLPGRKSDVRDAAWIAECTMKDLIRGSFVPDDIVQRMRQYNRRIFDLNKEKVYKLTKLDTLLQRCNIRISNYVSSTDSKSYKDVVKLLSEGIADAEKLTEAIHGRTLKRVGKEVIAAALTGVVNEVDIDLIRQYREEILMDDKHLKECQEKLTEICRKEFPKEFENLQTIPGVKERSATSILSELGVDMKMFLTASALVSWCGLKPRNEESAGKIKSRKITHGNKYIRKTLIECAWGASRTQNCFYSNFSYIQTVVRRKNAMKVKVAIARKMLVAIWHVLNEGVAYHDYKKPEAIADGNS

SEQ ID NO: 140808 - protein, 339 aa, unidentified
MGLYTGFDLHSTNTYVGIIDEDGGRLWKKKLRNDPNLISETLRPLKKDIEGIVVESTYNWYWLVDLMMEEGYRVHLANPSRVQQYSGLKHGDDEDDAFWLAEMLRLKILPEGFIYPKEQRPLRDLLRKRGHLVRLRTSLILGLQNILARNLGTKMNTHHLKSLRTDHVTPLLMGNDDLSLAGRVSKEAVDSLTRQIQAIEVAVERKIDIKKPYDLLLSLPGVGRVLGLTIMMETGPIDRFKDVGNYVSYCRKVPAARFSNDKKKGTNNRKNGNKYLSWAYGEAAELARRLDSEAKVYYDRKRRRTNAPIAHSALAHKLARAAYYIMRDEVPFKPEKAFA

SEQ ID NO: 140809 - protein, 420 aa, unidentified
MAPLSNQQFKAFVGLDWADTKHDICLQQAGDDRREFDCIPHQVTRIDEWAKALHQRFGGPIAIALELARGPIVSVLQKHAFFTLFPINPAMLAKYREAFKPSRAKDDPTDAELALDLLLRHPERFSPLRPQSAGMRSLLSLIEQRRELVGDKTRFTNRLTNALKQYYPQALEWFDDIDTVLFCDFVTRWPTLPAVRRANRKTLETFFHAHNCRRAKLIEGRLESIRCAVSLTDDPGIVAPHRLLALMLVTQLRTALAAIDVFDKEIAAVARALPDFDLFDSLPGAGPHLTPRLLAAFGEQRDRFRGADELQKYSGIAPVTERSGKKCWVHWRWQCPTFLRQTFVEWAGQTINKSFWAGAYYRQQRAKGSSYQAAVRALAFKWIRIIYRCWQTGTRYDESVYLNALRKRGSPLLRNLELPG

SEQ ID NO: 140810 - protein, 343 aa, unidentified
MNNFVGLDVSQNITSICVVDDAGKRIWRGQCASRPDDIERVVRKQAGEEARIGIETGPMTPWLVHELRRLGLDLICLDARHAKAALRMQLNKTDESDAEGLAHIVRTGWYRSVHVKSYAAHRARALLGARAQLVGMTTRLSNHIRGVLKIFGLLPGGMHGLSFAARVETLLADRPDVMPIVSPMLIAWRQLRAQITSFDKAVHALVKNNPDCRLLMTVPGIGALSVLAYVSAVEDPERFRRSRSVGAHLGLTPRQYQSGEIDRSGRISRCGDALTRTLLYEAAVVVLCRVKRSSPLKDWALAIAKRSGAGKARIALARKLSAILHSVWRSRVPFCWVKEAASA

SEQ ID NO: 140811 - protein, 426 aa, unidentified
MQPHYNCVCGVDVHKEFLQVCILKRDESPEILRVFNNFSGIQELKQRVEEECCECIACESTGVYWYRLYLAFEGQTRVIVGNAYQIKSIPGRKTDVRDAQWIAELAMNGLINPSRIFPKNNRELRELTRSRESTVKSRTQIKNRIHRILDSAGIALGKGVRDIFGKSGIHLIWGLLNRANADDIIATLPSARVKKKADILREILSGSLSDLQIILIKKNLEMMAHINEHIHALDEQIIARMMEQDSIRNVEIACSIPGVNVTTAVTVLAEIGNYRDFENAERLASWAGLVPSVYQSAGKNCSGKITKHGSEHLRWILVQAAKAAGRMVNTTFRKFFNRIAYRKGANTATVALARKILCILWHLLMNKELYVDPLKSVKSTKPPVVQKFSKNSSTDVQQAIDFIIECGFKVIHPGSILDQKFQGVSR

SEQ ID NO: 140812 - protein, 352 aa, unidentified
MSMLAEQVEVVIGVDTHKHTHTAAVVVATTGAAVDELTVPTDPDGFLALLDLAETHPGIRAWAIEGTSGYGAGLTRFLLAAGERVIELDRPQRAKRRGGAKSDPLDAVRAAREALGRDQLATPRARGERAALSVRLAARRSAVEGSTDAQRQLHALVVMAPEALRGRFRGKTTLQMVDVACRLRIDPRWDLETRTTAEVLRCLGRRSRTLGEEARLHEQAILEVVRSWRPDLLGQLGVGPIVAATVLCAWSHPGRCRNDGAFAMLGGVAPIPASSGMTTRHRLNRYGDRQLNRALHTVVLCRLRYDPDTKAYAEARTKEGKTPREIKRCLKRYVARQLYRQLENPPVALDNQ

SEQ ID NO: 140813 - protein, 316 aa, unidentified
MLAPNPVAGVDVGKSFLDLDFDPAAKALRVRNDAPGIAALIEAMRRRGASRVALEAIGPYAWPLTAALVANGFEVGLADPRQVRAFRTAEGRIAKTDRLDAGLIARFARTMSERLRPAPEPQALALKALSTRRRQLTELVAMEKTRLAQAFDAGIAASHRAVIATLEAACAEVERRLEAAIAADPALARKREILTSIPGIGGRIAGVVIADMPELGSLDRKAAASLAGMAPHPDQSGTLPGRHAISGGRPCLRTAFYMAGMVAARCDPRLKAAYRAMRDAGKPPKVAIVATGRRLVTIANALVRENKTFDQSRFVS

SEQ ID NO: 140814 - protein, 331 aa, unidentified
MNIVEVIGIDVGKQENEARIHTNQKTYAFENNPTGFKKLEKWMLKNVNCQKQQLMIAFEHTGLYSHPLSTFLTENQYFYILIPGLELKRSMGITRGKDDNIDAKRIALYTYEKRDKLIPYRLPGEEIIQIKRLLSLREKLVKQCAGYKGSLKEYKHFLKKKDNEMLFDVHEKMIVQLSKQIDRIEKQLDDVIKRDDQLKQMYDLITGIKGVGPQTALFIIAFTNGFTQFKNWRKFASYCGIAPFPNRSGISVRGRTKVSNLANKKIKSLLDLCAKTSIQYNMEMKIYYEKRVSEGKSKMSTINIIRNKLLSRIFAVVERGTPYVNTVGYLK

SEQ ID NO: 140815 - protein, 355 aa, unidentified
MNDAKYIGMDVHQATISAAVRDSAGNLVMEATLETKAETILEFVHGLRGSLHVSLEEGTWAAWLYDLLNPHVAEVLVCDSRKNALLRVGNKNDREDARKLAELLFLNKLNPVYHGETGIRTLKELARSYLTITRDLTRVMNRLKAIYRGWGIACAGQQVYAPRYRVEWLAKITEGGVRRRAEIYYQQFDALAALRQEARRELLAEARNHPAMRLLRQIPSIGPIRAALLIALMQTPHRFRTKRQLWAYCGLALKTYTSGDYRFVGGQLKRSKKAVAIRGLNKNHNHDLKNIFKGAATRAAATTGPLQNFYEARIANGMKPPMARLTLARKIAAITLLVWKKGVRFDAEQLKQQAA

SEQ ID NO: 140816 - protein, 387 aa, unidentified
MSNPHELVRKMDRPSKVCVVSEAEEGSSSLGCGRNETCMEGQPIANSPHTARRFRMTEYIGIDVSKQTLAVWDGTQEEEVPNEKGLKTLKKLLKKKYGGEWNQQVRFIYEPTGPYSNYLRAFAAEHEVRVYEVNPKKSANFAKVLGNRSKTDVVDAKMLSTFHALLTEEDFGVPEVDEMAEQLGAELGSYEMIQKTRTMLSNHLQSLEYKSGVTRKLKESLEKELKHLDAIEEQLENEMEAYAEDHEETREALHNLLSMNGVGVISAINLLYLFRKYPGTNRNEITALAGLDPVRRQSGSSMNGGRKISRAGDPMLRKVLYLACMNSIQHNECIRTFYKHLVSDNHKKPKVALVACMRKLLLIAHHLYVTKSPYRTLEHDANLCLTS

SEQ ID NO: 140817 - protein, 356 aa, unidentified
MLAGVVDFVVGVDTHRDTHTAAVVDARTGGVIDQITVPTDAFGYRRLRSFADQQAPERRVWAIEGTGSYGAGLTTSLLEHGEWVVEIDRPARPARRDGAKSDDLDAVRAAREALSREHLAAPRARGDREALRVLTAARQGAVVARTKAIGQLKALIVNAPQSLRDQLRRGTTDQQLQRCARLRTLPQHSIEHRATIRAIRGTARRALALEAEAAEYETELEQLVVAICPVLLAQPGVGTITAAQFLISWSHAGRIRSEAAFASLAGAAPIPASSGTVTRHRLNRSGDRQLNRALHTVALSRLRIHEPTKAYAARRQAEGKSPREIKRCLKRAIAREVFRLMNTHAAAVTGSLPMTA

SEQ ID NO: 140818 - protein, 404 aa, unidentified
MFIEHKEGHYPVTGAPPSDRVVIAVDPHKASWTAAAVDSSLQPLDVIRVPVSPQGYRQLRGFAQRWSAPGWAIEGAAGLGAPLTQQLTADGIDVVDVPAKLAARIRVLSTGHGRKTDEADAVSVGVAALTATRLNTATIDAAITVLRALVEHRDDLVKIRTQTVNRLHVLLTLLTPAGAPRGLTAERAADMLRRIRPRDPAVKTLRGLAVDLVSEIRQLDRRIAKAARDIQTAVDTSGSTLAELCGIGTLNAAKILARVGSVHRFRSADAFASYTGTAPIAASSGDVTRHRLSRAGDRQLNCCLHTMAITQIARDTPGRTYYRKKRAAGKSHREALRCLKRRLSDAVYRQLLRDATTQAGAGPAGHAGATLASSAAGSHPFTSTSDKSLTGPANRNHTTGGHDA

SEQ ID NO: 140819 - protein, 321 aa, unidentified
MAMQVQPLLIGVDVSKAELVICRGSEAALETIANEPAAIKAWLVSLPPGLGCLAVEATNVYHLELVAQAHRQGHTVYVVDGFRLSRYREGVGGRAKTDSSDARLLQRYLERERNDLRPWSPPSAGYVAIQRLLHRRATLVSATVALRQSLGDFPELKRATATLFRQLARVDALLVRRLRESISQHGWASDVARCQAMEGIGPITAAALTMAFRRGHFRNSDAFVAFLGLDVRVRDSGQARGRRKLTKQGDPELRRLLHLAAMQACRSITWQAFYQRYLQRGLTKTQALVILARKLARVAFALLKNQSDYQPRAPQGGCVAT

SEQ ID NO: 140820 - protein, 402 aa, unidentified
MTNEHLKVIAGIDTHADTHHVAIISETGRHVADQEFLAAGSGYRKIIEFITGFGPVIAAGVEGTGSYGAELARVLTGEGIRVLEVMRPSRQGRRLRGKSDPLDAYQAAEAALAGRNVATPKSRDGAVESLRVLRAERATAMRARVAVMVQVKSILTAAPEALRAKYRRLTSAAMMAALEKTRPGGSLSDPVNATAVVLKRLAIRYRALHRELAVIDAELDAIITVHAPMLRDLHGVGTDVASQLLVTVGDNPERVTTEAKFAALAGVAPIPASSGKTTRHRLSRAGDRQANKAIHNVALVRMRTDSRTINYVTRRRQEGKSTKEIIRCLKRYIAREVYDQLLHPQPAPDAGALRALRKTKSITLQAAADSLHVWPTALSRLERGHTRNDDFYHRYEDWLNEH

SEQ ID NO: 140821 - protein, 391 aa, unidentified
MRTGPHPAISDTEASEENDSTLYVGLDVHKDSITVAYAIGMGEVELLGKIGTMQIDVDRLCKRLLAKSKRICIVYEAGPCGYGLYRRLVEKGFDCMVCAPSLIPRKPGERVKTDRRDAIKLVRSLRAGDLSAVHVPTVEDEAFRDLARAWSAAREDLKAARCRLKSFLLSHGVHYLGRPDWGATHRRWLSTFSFDSAWQQLAFDEHRRTIEDRLAQCERLEVALREAVANWRFYPAVLALQAMRGIQFTSAVGLASELGDLSRFEHPRQLMAWLGVTPSEHSSGGKRRQGSITKTGNSYARKMLVESAWSYRHPARVSIDIQRRHEGIPKPIIDRAWDAQLRLCRRYRKLVARGKSAQVAIIAVARELAGFIWDIGRLGMSLASPQCSQPA

SEQ ID NO: 140822 - protein, 344 aa, unidentified
MNYYAALDVSLRTVNLCVIDEQGEIKAEAKLASEVEEIAYFLHGLDYEVSSIGLEAGTLTQYLTYGLQSAGFEVICMEARQVKAALSAMRNKTDKHDARGIAQIVRSGWYSRVHVKSIESHHIRALLSSRKAVLNKCIDLENEVRGLFKVFGIKLPPKLGHGAFDAKVRTSIEADAALAQALLPLLDARLVLYRTFRELDNRTRKLAQQDRVCQRLMTAPGVGFVTALTFKAAVDDPTRFKRSRTVAAHFGLTPRRFQSGEMDIPGHISRAGDPDVRCTLYTAANAMMTRSSRWSSLKAWGIQLAKARGHRRAVVAVARKLAVILHRMWLDDTQFRWGTEGARP

SEQ ID NO: 140823 - protein, 387 aa, unidentified
MTVRTVNNLPAATHGETVRCLFAIELSKQSWVIGFNTPLSEKISRRTLSGCDWKGLLELIEDVRARVSREMGRAVAVMSCYEAGYDGFWLHRQLEAHGVRNYVIDPASLQVDRRARRVKTDRIDAERLLRSLMAYLRGEPKVWSVVRVPSVAEEDERRLHRERDRLVLERVQHVNRIKGLCALHGIYDYHPLRPQATARLEQLRTAQGGELPPRLKSEIKRELHRLELVVEMIATLEAERDAIVEDEASTHLNAEKIQNLHKLKAIGPEFAAVLVGEIFHRSFDNRRQLASYVGVTPSPFQSGSMAHEGGISKAGNRKGRTTGIELAWLWLRYQPDSDLSIWFRARVGIMKGRIRRIAIVALARKLLVALWRYLETGLVPRGAVLKG

SEQ ID NO: 140824 - protein, 338 aa, unidentified
MSLYCGIDLHANNSYVAVTSPEDEVVLGQRYPNDLGKILGALELYREGLEGIAVESTFNWYWLADGLRESGYTVHLVNPLAAKQYQGLKYTDDRSDARWLAKMLHLGILPTGWICPPEERAVRDLLRKRTQLVRQRVASRLSLRNILERTTARRLSGNALERLSEEELAGWIEDEHVRLSMTTTLAVIETLDEQIELLEGVVFEQARKASAFSVLQTIPGVGPILASTIQYETGDLSRFAGVGHYASYCRLVRSERLSNERRKGQGLRKNGNAYLSWAYHEAAHFALRYQPSARKWYERKRSKTCALVAIRALAHKLARAAYFMMRDQVAYEPSRLFG

SEQ ID NO: 140825 - protein, 385 aa, unidentified
MTVATTVSRIIPAHFDIFAGLDVDKKSMATTFTDHGTLFKSLRLPYSSTQLLNYVAKHFPGKRIAFVYEAGPTGFGLHDDLVAQQRTCLVVAPSMVATAPGNRVKTNRLDSKKLSVQLRGGELRGIHVPNRSYRELRHLVQLRDTQTRQLTATKCRIKALLLYEGIEFPEPSGRWNARAIDDLRTLPCTSEVRFKLDHLIGTLYFHFNSAAVVQKRIRQFCQNDPELRQSISLLTSLPGVGWITAAHAVARLGDWREIKNVRQIAGFLGLVSSEHSTGDKENRGPITRSGDSRLRNKLVQCAWVAINKDPELRAFYRSVFLRQPKKVAARKAIVAVARKLTTRMYVVLKQQRPYIIRPDSSIAPLTAEETAGPRERLDAAQNEQR

SEQ ID NO: 140826 - protein, 383 aa, unidentified
MRKIQETLPAQSTTTQDIMYIAFELSNSTWRLAFSDGNKKRHVTIKARDLKQLEVETAKAKKRFCLKDNVQIKSCYEAGRDGFWIHRYLLSKGIDNLVVDSSSIEVNRRKRRVKSDRLDAENLLRLLMRYHGNERQVWKVVTAPTVEEEDARHLHREIETLLRERTRYRNRIRALLVQHGLDVKNPSRKNFLKVLNTLRTWEGQALPESMKARVVREHERLKMIEDHIKLLKKEREQRVKSKETASLRQVAQLRGLCGIGVNSSWIFVMEFFGWRKFRNRREVAALAGLTPTPYDSGGSQREQGISKAGNKRIRTMAVEIAWCWLRFQPHSKLSRWFNERFASGGSRMRRIGIVALARKLLISLWRYLEHGVIPEGATIKSTS

SEQ ID NO: 140827 - protein, 422 aa, unidentified
MKSATSTTSDTNVLPEQPLNDVTGGLDWARDDHAVSVVDARGRELVRHTVEHSAAGLRELIHVLTNVGCVEVAIERPDGPVVDALLHAGLTVVVISPNQVKNLRGRYGSAGNKDDRFDAYVLADTLRTDRARLRPLIPDTPATLALRRTCRARRDLVAHRVGAANQLRAHLRGVFPGAVGLFAEIDSLTSLAFLTRFTTQDQADWLTPARLGAWLAKQGYSGKVDPSVLHARLLAAPRGASGPDAVVQAAITHGFVAVLTTLLEQIKTLAREIETQLATHADAHIFTSLPRSGKVRAARLLAEIGDCRARFPTPESLACLAGVAPSTRQSGKIRAVGFRWACDKQLRDAICDFAGDSRHSNPWAADLYQRARARGHDHAHVVRILARAWLTIIWHCWQDNTTYDPTKHRALQRLTQDQQLTG

SEQ ID NO: 140828 - protein, 323 aa, unidentified
MRRVPVFVGVDVSKARLDVAVSGSDEAWHVANDSGGIAKLVERLREIGPELVVMEATGGFEVSAAAALAAAEIPVVIANPRQVRDFAKSTGQLAKTDAIDARILALFAERVRPQVRALPDEDARALDAIVGRRRQVIDMITAEKNRLGIALPAVRKNIEEHIRWLERQLERVDSDLDRRIRKSPVWMAKHNLLRDVPGVGPNLARTLIAELPELGRLSHKQIAALVGVAPLNRDSGRFRGKRMVWGGRASVRSALYMSILSATKWNPVIRVFYQRLRAQGKPPKVAMVACMRKLLTILNAMVRDGREWDPNVPLDQLRSQHSC

SEQ ID NO: 140829 - protein, 363 aa, unidentified
MLPTDVPTNVATMDEEIILGVDTHNDAHVAAVITVLGALVDTQAFPTTVAGYTDLVDWARGHGRLRRAGVEGTSSHGTALTRHMHRDGLQVIEVNRPDRAVRRRRGKTDAVDAENAARAVLSGQATGLAKSGDGAVEMIRMFKIAKDSAVKARTQAINQLKAVLVRADPTLRESLSGLGRVALIRRCAALPPTTDHSTHAATTTVLRSLARRVLALTDETRALQQQMSSAIAACAPQLLDQYGVGPDTAAALLITAGDNPDRLTNQAAFAALCGVNPIEASSGKTTRRRLNRGGDRRANSALYTIVLTRLGRDQRTRDYATKRAHEGKSTKEIIRCLKRYVARQIFPLITAALPPATTPTPST

SEQ ID NO: 140830 - protein, 343 aa, unidentified
MDHFAGLDVSVKETSICIVDDTGRIVREVKAASEPEALLQVLTNPAYHFKRIGLEAGPLSQWLFSALAEAGLPVICVETRHMRAVLKAQINKTDRKDARGIAQMMRVGLYRPVHVKTLRSQKLRMLLNHRKLLQSKAIAIENDLRATLRNFGLKVGMVGTVRFEPRIKELVENLPDLAVLVEPLLIVRRVIREQVGVLHRRLLAIVRNDDVCRRLMTVPGVGPVVALTYRVTVDVPARFRNSKAVGVVFGLTPAKHQSGESNRTGGISRCGDEMMRVMLYEAAQSMLVRSARWSWLKAWAMKIARHRGMKKAIVALARRLAVIMHRIWVDGTEFRWTREVAAA

SEQ ID NO: 140831 - protein, 462 aa, unidentified
MKRKAKSQATHSGLAVVNPNAAAIDIGATMHVAAVGADRASDPVRSFGTFTADLHRLADWFAECGVKTVVMESTSVYWIPIFELLDERGFEVILVNARDAKHVPGRKTDVSDAQWLQRLHSYGLLRASFRPKGEIVELRAYLRQRERLLDTAASHIQHMQKAMTEMNLQLHHVVSDITGATGMRIIRAIIAGERDPAVLASMRDTRCHSSAEVIEKALTGHYRGEHLFVLEQALALYDVYQQKVAACDIRIQSVLKELNSIRGRKEDARADGSGSTRRRSRQSNGPDFDVGKALHSLLGKDLTRIHGMGPYLALKLVSECGDDLSAWPSAKHFTSWLCLAPSNKISGGKVLSSRTRRSGSRAASLLRLAAVTIGRTDTALGAFYRRLSARAGKSKAVTATARKIATLFYNALRHGMDYVDPGASYYETRYRERVVKNLHRRAKAFGFILQAAEMPAAEQAVS

SEQ ID NO: 140832 - protein, 366 aa, unidentified
MKKVITVATAGTGKMQARGLTIGVDLGDRSSCYCVLNEQGEIVQEEKVATTPKAMRERFAEVPRCRMALETGTHSPWVSRLLSELGHEVIVAHAQRVELIAKSRRKNDRMDARTLARLARIDPQLLSPIQHRSAEAQAHLTVIRARAGLVRARTALINTVRGVTKSTGERLRGCNPRKVGERAQELSPELQHALGPVLSEIDSLSDRIREYDERIRSIAESSYPKVELLKQVHGVGTLVALTFMLTLEDPHRFSKSRDAGCYAGLQPGKRDSGDSEPQLHISKEGNKYLRAMLVQSAQHILGPFGADSDLRRWGLRLSERGGKNAKKRAIVAVARKLAVLLHHLWVSGEVYEPLRNSLRMATAAAA

SEQ ID NO: 140833 - protein, 348 aa, unidentified
MSDGTAVDRQFVGVDLHSRRSVICRIDAGGVELACRQIDNDAKTLVREVRRAGRGAPVAIEATWGWYWAVDALQGAGFEVHLAHPYGMTAMRKRKRVKTDAKDAYELANLLRLGSLPEAYIAPGGLRELRELVRHRQRLTQANTAVKAGIRAVLAKHNIHLPVSDLESGLGTALLDQVTLMPAYLHRLDSQRRQMLLLEAEIGATEVELDRRLKHHPDFRNLQKIKGIGPVLSAVLVAEIGDVHRFAGPDQLACWAGLTPRHYASDRTTRRGHISKEGSVLVRWAVVEAVQRQCEPSVRELRERIIARRGPGGRNIAKIAAAHRMLDIVYYTLRDGTSRVFTDTRDAA

SEQ ID NO: 140834 - protein, 403 aa, unidentified
MEKTAGIDLANEEHRLCVVDGEGRQLEQRRVVHDEAGIDALCRRLVALGVSRVALERPDGLVVDRLLEAGLTVVAVHPNQLAATRDRYSVAGGKSDGFDSYVLAELCRTDMHRLRVLEPDSDETKALRALTRTREDLVQARVALANQLSAQLDAFWPGAARVFSDVDSPIALAFLERYPSPADARGLGAKRLQGFLARHGYSGRRSTAELLERLRQAPRAHTGELESEARRAAVLGLVAALKPLVEQIKLVTSQIGGALRSHPDGKIFLSLFRDPKTVVTAAELLAEIGDCRNRYPTRDALAADAGMSPVAVESGKRKVACFRYACDKRLRDAVACLANTSRHHHPWSHDVYQRARARGHDHPHAIRILGRAWTRIIWRIWQDGNPYDPARHGSLNRLTATEG

SEQ ID NO: 140835 - protein, 338 aa, unidentified
MIVIGLDVHKQSVTAVAVDEAGRPLEERSILVGSEELLAWAAALDDERLWAVEDCRQLTRWLERQLLGVGEEVVRVPPKLTVPERRAGRTRGKSDPIDALAIARAAIREPNLSRPLPDERVYREIKLLVDHRDDLVDQRRRIQQRLRWHLFQLDPTYQLPLRMLGRHSHLERVARWLARQDQQLQVRLARELVTSCRQLNRQITELDLQLEQRVRATAPGLLELPGCAAVTAAKLLAEIGPVDRFRSDAQLARHSGVAPLEASSGRTQRHRLDRGGNRQLNAALYRIAITQSRYHPPARDYLDRKRAEGKSRREALRCLKRLLIRVIFNTLKAEPALT

SEQ ID NO: 140836 - protein, 443 aa, unidentified
MGVIKSTTNKLLEVFYMKYKQNFKIMQITDETLVVGVDIAKHVHYARAFDWRGIEVSKTFSFEANGTGFTKFVEWAKENADKNGKNKIVVGFEPTGHYWFTFAHAIEEKGMKVVQVNPYHVKSAKELDDNTPSKSDRKDPKTIAMLVKDGRYQIPYIPKGKYAEIRKANNLREEWLRKNTAIKNNVQRWLDTYFPEFLKVFSSWEGKAAIMVLERIGLPDKIASMEANDIVALWREDVKSSVGVNRARMLIEVASNSVGIKEGLEMAEYEIRLLMREYRDVQGIMSEIEARLEEMVLTVKGAENMMQIKGVGIKTVSGFLAEVGDITRFNHPDQIIKLAGLNIRENSSGKHKGKTTIAKRGRSRLRALLFRAILPIVATNKEFRELHRHYTTRAENPLKKMQSLIALCRKLIKVAYKLITENIDYDPEKMMNDIRRDTELNAA

SEQ ID NO: 140837 - protein, 343 aa, unidentified
MKNTIVGVDLAKDVIQVCIYTNKKVRSNIEMTPPEFIEFLANYTSLTIVFEACGTSNYWKQKATSLGHDARLISAKLVSVVRQNQKTDKNDALAIIQAALLPDVTFISGKSIEQQQLQSIMRLREVCIKQKTAAGNQLTSLLLEFNIKVSSRNSGLKGAVESTLEDAENGFSFEFRKALSEAWQLYLSVIKSIHTYDECLECAIEGHTDCKKLRQIEGVGTLNAINLYVALGCADLGVFNKGKDASACIGLTPIQYSSGGVTKLGSIGKYVKSSVLRSQLITGAMSAVNHATRRKAKTKKDQWIQEMVERRGKKCTAVALANKTVRTAFAMLTQNTEYKAELI

SEQ ID NO: 140838 - protein, 353 aa, unidentified
MDYYAGIDVSLEASSVCVVDASGKVVREAKVLSEPENLIGWFRDLGLELTRVGLEAGPLSQWLYAAIKKEGLAVELLETRHVHDAFKAMPVKSDRNDARGIAKLMRLGWFRPVHCKSMPAQEVRALLTARKLVQSKLFDIEMSLRGILRGFGVKIGRTNPNRFGLRVEELVAGHPTLEIIGKALLAAHEVLLRELSGFEKRVRQQARQDKRVRLMMSAPGVGSIVGLTYVAAIDDPARFKSSKPVGPHFGMTPKRYQSGETDYSGRISKIGDASLRTALYEAANAILTKPLKGATSLKSWGMKLAKRAGMAKAKAAVARKVAVARKLGVILHRMWVDGTRFADRASSPKAAAA

SEQ ID NO: 140839 - protein, 412 aa, unidentified
MHNRCAGLDISKRDAKVCVRVAGAGRRKAVETVTTWSSMTSRVLALREHLATEQVTCVVMEATGDYWKPFYYLLEDLPGVEVILVNARHVKNLPGRKTDVADATWLAQLGAHGLVRGSFVPPEPIRQLRDLTRTRTSITRERSREIQRLEKLLEDAGIKLSAVATDIVGVSGRAMIEALIAGDRDTARMADLAQRRMRVKIPQLTEALVGRFNEHHAFLARVHLDLIDKHTAVIDQLTARVEAMMEPFRGFHDLICTIPGISTRTADVVVAETGADMSRFPTAKHLASWAGTTPGNNESAGKVKSSRTRPGNPYLQGALGASAMSIARTPGTFLNARYRRIATRRGPQKANVAIQHSLLVAIWHMGVTGTLYDDQGSDYYTRLRPDRSKQRAIHQLEAMGYRVTLDETPRAS

SEQ ID NO: 140840 - protein, 464 aa, unidentified
MTAGKQLWRNRKEKKEWARRLQSEDPGLQVVHPHAAGIDVGNSIHYVAVRPDRDPEPVRRFECFTADLHRLADWLQSCGVKTVAMQSTGVYWIPLYEILEEHGLKVYLVNARHTKNLPGRKSDVQESQWLLKLHTYGLLNNSFQPVSEIRVLRTYWRQRGEHVRGAATCIQRMQKALTQMNVQLANVISDISGLTGQAIIRAIVAGERNPLKLAMLSDPRVHASHEEIAKSLEGNWRPELLFVLHQEVDMYDTYQKRIAECDQRLQKHLASFTRPLPIQPPTQKLKTKKPAAKNAPRFDLSSELQRVTGVDLTRIDGIDVMVAQTLLSEVGLDMSRWITESHFASWLGLCPDNRISGDKVLSRGTRRVVNRAATALRQAANTLMRSRSYLGAQYRRLRTKLGAPKAITAMAHRLARLVYRMLKYGQTYVDKGTEYYEERFRQQQIQLLRKRAAKLGLQVAEIHA

SEQ ID NO: 140841 - protein, 387 aa, unidentified
MSQLNDLSKSLVALEQDATLIAVIEMSQSSWLVAGIVPGVERQPLKKLTTDQDALLQLLHRWRKEANEAGHVIKRITVAYEAGRDGFWLARWLRAHEIEAYVIHPSSVPVSREHRRAKTDRLDTELLKRAFLGWLRGEPKHCSMAAVPTIADEDARRPSRERENLVKEVTRLVNRMKANLARLGIRGFRPHLAQAAGQLQTLQTPEGTAVPANTLAELRRDMDRLRFVKQQIKQIEAARVQRLESEPGERRHAMVYLLARVVGIGVESADMLVQEVFSRKLRDRRAVARYAGLTGAPDESGNKRRERGLAKAGNARVRRGMIQLAWTHLLHQKDSVLAQWYRARTADARGRTRKIMIIALARKLLIALWRLVTTGEAPAGLLIRPAA

SEQ ID NO: 140842 - protein, 355 aa, unidentified
MKYYTSTTKFNCGIDLHARQMYVCLMDRDGNKLVHTNIKNNDFAYFLKLVEPYQHDLTVCCECMFGWYWLADACQAAGLTFVLAHALYLKAIHGGKNKNDRIDSEKIAHLLRSNLIPPSYVYPAAKRPLRALLRQRLYFVWRRAELLARIHSHQLAHNRIPPKQTRRVRDSWEAALLAAEDHPLRQIALQNDLAMIRHFDHQIAQLEEELQRQAKKIAARDYALLQTTPGIGENLGMTILCEIGDIARFPTVKDFLSYCRLVRGTVASAGKIKGLRGAKLGNPYLRWAFGEAAVIAKRDHAVIGPLAQRLEAKMNGNKFKANTVVAIKLARAVYYMLKSKTVFDPDRLVAALSRK

SEQ ID NO: 140843 - protein, 350 aa, unidentified
MELHTIGIDLGKTVFHLVGLNQRGEVVVRKKFSRKQLLHFTANLWVELIGMEACGGSHFLGRALREQGHEVRLMPAQYVKPYVKTNKSDYIDAEAIAEAVERPKMRFVPIKSDDQLDLQSLHRVRERWVTRRTAVINQIRGLLLERGITMRQGRRHIDAALPGILEDASAQLSGALRLLLAQLRLELDHLQMRIDEADAVINKIAGDNDACRRLVAIPGIGPVTATAIIAAIGNGAAFKKGRGFSAWLGIVPGEYTTGGKQKLLGISKRGNSYLRRLFVQGARAVLQQSAKQSSGLSAWLAQLTTRTHSNVAAVALANKLARMAWAVLAKNEPYRPPMLAGAATECLACR

SEQ ID NO: 140844 - protein, 315 aa, unidentified
MQTVLDLGADVDSRTFVVAAAAMSTAPQRIANARRDILAWLRSVPPGSRLGLEATGTYHELLADLAHRAGLQVFVLNARDVRRYAQGLGRRGKTDRVDAQVIARYVAHEHSELHAYVPPSPQQRALARLIKRRAKLVTIKGMLNQSLRGVPGVAAELRQATARLERLIGHVEGLMQRALEQLPSASQAAQHCRTIPGVGPLGSTCLAYTLTRVPYANSDALIAHTGLDPRPADSGQKHGRRRLCKRGPGELRRVLFNCGMAAAKTALWRPYYQAQRAKGLSSTAAIVILTRKLVRVAFALYKYQQPFDPARVATA

SEQ ID NO: 140845 - protein, 320 aa, unidentified
MASRESLFIGIDVSKQTLDVAFGADPHAPLETIPYTDEGVQLLVTRLQRLQPTLIVLEATGGLERMVFAQLLQAGLPTARVQPRRVRALAHAEGRQAKTDRLDARLLARFAERVRPPHHQATDEQRASLRDLLVRREQLIQMRTAEINRLTAAAPNLRPGIQKHIDWLDQEIRALEQELDNEAERTDELRRKRELLESVPGIGAITALNLLLRLPELGTINRKEAAAVVGVAPYANQSGAQRKPRHISGGRRDVRSVLYMATLAATRCNPTIRAFYQRLCQAGKPRKVAIVAAMRKLLTILGAILRQQKPWDPAVHTSAP

SEQ ID NO: 140846 - protein, 453 aa, unidentified
MAQRNRSISLKSGRSRAALTITHPNVAGIDIGSASHFVAVPPDRDDEPVREFASFTVDLNANAEWLQACGVDTVAMESTGVYWIPLFELLESRGFTVFLVNARHVKNVSGRKSDVLDCQWLQQLMTYGLLSAAFRPAEQVCVLRALARQREMLLKSQARHVQHMQKALTQMNIQLANVISDVVGVTGQKILRAIVAGERDGLALAACKDVRIHASAEDIAKSLQGNWRAEHVFALKQALALFDFIGTQLGECDREIEAQLQGLQAHDGEPAKGKKRSKARNAPKFELRTQLFRMCGVDLTRIDGIDVTTALVVVSEVGADMSRFASVKHFTSWLGLCPGTKITGGKVMSGKTRRCVNRASQALRLAAAALRSSKSAPGAYYRRMCSRMDKPKAVTAAAHKLARLIYTMLTKGQEYTDQGQDYYEERYRERVLRSLSQRAAKLGLKMVPITQPS

SEQ ID NO: 140847 - protein, 384 aa, unidentified
MRKHSIIFIGLDTHKEFIEVAYAEDGREHSPVHLGRVPSNKAQLRKLARQFESKYPQATLHFVYEAGPCGYWVYRFLTSLGHCCYVVAPSLIPKKPGERVKTDKRDALKLAQLIKNGDISPIYVPEPEDEAVRDLSRARETAMKDLKDAKYQLKAMLLRNNINCKINDNWSKQHLRWLTELVLPHPCQQIVLQEAIHTITERMKRLQRLDNELEYQVKLWRYYPVVKAVQAMRGVRLLIAVGVIAELGDLNRFDHPRKLMSYVGLVPSEHSSGGHRRLGAITKCGNGRARRLLVEGAHTYRYAANISTELQKRQESLSKEIVDIAWQAQLRLCRRYQRLMQRGKHYNVVVTAIAREMVAFIWAISREVVLSPVDPKQRLARLPA

SEQ ID NO: 140848 - protein, 371 aa, unidentified
MEHTRFIGLDIHKERISVAVAESGRSGAVEYLGEIANEPGAISKLCDRLRRPGKPLAFCYEAGPCGYGIHRQLTRLGHRCDVVAPSLIPTKAGDRVKTNRRDATMLARLHRVGELTPVWVPDADHEAMRDLIRLRSVIRQIVTRARQHLQGFLLRHGRKHGRGTAWRMAYRRWLSTLAFEHPAQQIALQDYVDAVMDAERRLKRVEEQVFGLLPDWNLRLVVDGLQAMRGIALINAVVLVTEVGDFTRFSNPRQLMAYFGLIPGERSSGETVRRGAITKTGNAHVRRALVEGAWAYRMKARIGRHKVDRIEALPKVVRDIGWKAQVRLCTRYRRLRARGKTANVVNVAIAREMVGFIWSIACTIQSAPRAA

SEQ ID NO: 140849 - protein, 349 aa, unidentified
MTMTTLEATRGITGGVDTHRDVHVAAALDPLGGVLGSESFPTDVAGYQALLKWLEAFGQVTKIGVEGTGSYGSGLAGYLRRSGIEVIEVDRPDRQKRRRTGKSDPLDAVEAARAALSGRATGKPKSRDGAVEAIRVLVVAKRSARQARVKALLQMRHLGITAPDQLRCRLSGLSVEALIAEGIKLRPTRSGDPVMSATKASLSSLAHRICALDDELAELDERIEGLLVATVPSLLDLFGVGPDSAAALVVAAGDNPERIHSEAAWAHLCGASPIPKGSGKSSGRVKVHDGGDRQANSALWRIVVVRMAHDPETRLYVERRLKEGKNKHEVIRILKRYVAREVYRHLPRG

SEQ ID NO: 140850 - protein, 417 aa, unidentified
MEIVYPICCGIDVHKSFLVATIVSVTKLRTLKYKKERFSTFNKDLRRLKHWLMENNCYDVCMESTGKYWVPVLNVLEPELRVVIVNPKWVKAIKGNKDDVKDSKWIGELFCFGLVRSSFVPEKPIRILREFTRYRCKLVNMRSSEKNRFQNGFTVCNIALDSVVSDMFGKSASCITDYLLTNENPNAEHCATFLQRSLKKKAVAVVESIEGFQLTEEQKFRMLQVRQHMDYLDSAIEAVDRKLKEMASPYAAAIQLLCTIPGMKHDSAVTIISEIGTDMSQFGSSKRLCSWAGLTPGNNQSAGKKKSVKITRAGVYIKPMLVQVAHAAVKCISQPYYKTKYESIMRRRGKKRAIIAIARMILTAIYHMFCTGEVFNPTDLRQIDMPEELKKKNVANAIRLLKQQGVLPENFTQASYA

SEQ ID NO: 140851 - protein, 344 aa, unidentified
MITIGIDPHKASHTAVALDPEGRVLGELRAPATRTTTERLLHWAERWPERIWAVEGASGLGHLLAQQLTACDQAVLDVPATLAARARLLDRGHGRKTDAIDAASVARVAQSQPDLRRVRAEDHTAVLRLLSDRRDELNQERRRVINRLHRLLRDLRPGGAPTELSTSAAARLLSGVRPETAVDLERKAMARALVADLRRIDRALLENRARCAGAVAASGTTLTAIFGISEVLAAKILGHTGDVGRFASADCFASYSGTAPIEVSSGEVTRHRLSRNGNRSLNTAFHLAARVQTMHPGLGRDHYERKIAEHKSSREALRSLKRQLAKVVYRRLVADQAHRLALTA

SEQ ID NO: 140852 - protein, 389 aa, unidentified
MRFAGVDIASLTHVIAIMTETGKVLVKPTSFGEDAAGYEKAFALLGPSTDVLVVMEATGHYGRNFMAALWVRGYQLALINPIRTRLFAHEDLRRAKNDPIDALGLARFGIQKGPLLPTPPFDEATDQLREFVYLLERLTQDFGDRVRQLHRLIDLGFPEFTRHVPNPSAQRATAILAAYPSAQAFSDSCLRELATLRYDGSHHVGEPLASALVETAKASVGRHHGPAYHLETRYICQDIDRLRSELRQIQQEIERRLAENPVAVLLATIDGLGAIAIARIIAAVGDPARFRSGAALASYVGAVPGTDRSGKGHRRSDPLCPLGNARLRRTLFMTTLGAVRRNPWLGAYYARLRARGKPPKLALLAAMRKLLMAIYSVAKHRKPFVPQLP

SEQ ID NO: 140853 - protein, 336 aa, unidentified
MQQPVTVGLDLAKSVFQVHGVGPDGSVVYRRQLRRSQVPSFFAGLEPCLVGMEACAGAHYWARELTRYGHEVRLMPPAYVKPYVKRGKTDAHDAEAIAEAVTRPSMRFVPVKSAEQQAALLDHKTRDFLVRQRTQAVNAIRAHLSEFGIVAAKGIQNVDRLLTAADDIPKEARPAVQMLADQLSDLERRIADLTARIAATQKANPLAKRLATIPGIGPIASSAFAATTPEVGAFRSARDYAAWLGLTPRAHSSGGKERLGRVSKAGNRYLRRLLYLGAMARISARRGRRSTATSDWLDRMLERKPVKVVAIALAARMARTIWALIARGGSYRAMTA

SEQ ID NO: 140854 - protein, 347 aa, unidentified
MTPATPIRMTDETTDRPALFLAFELGANQWKLGFTTGAAQRPRERNVPARNIEAVREEIRKAKERFGLPADAPVISCYEAGRDGFWLHRWLVTQGVANCVVDSSSIEVNRRHRRAKTDRLDVQKLLTMLLRHAAGERKVWRIVRVPSVEEEDRRQLHRALTTAKRDRTRVINRIKGLLASHGLVMPPGGDFSQQLEHLRLWDGTPLPAGLRHRLGQEWEQVVALTQRIAQLEAERRAVLQMAEDAVTQKVQQLLMLKGIGINSTWLFVMEFFGWRAFRNRKEGGALSGLTPTPYASGNTAYEQGIAKAGNAHIRAMAIEIAWGWLRFQPQSALTQGYQQRFGHGSSR

SEQ ID NO: 140855 - protein, 351 aa, unidentified
MRSLGVIGNREESVRKLVKKLGPVEDLRFCYEAGPTGYALYWQLSALGAKCEVVAPTLVPMKSGDRVKTDRRDALKLARNHRAGELTAVWVPDAAHEALRDLVRAREAAKKDQLRARHRLSKYLLRQGRRPPMGVKPWTATYLEWVKREVHFKQRAQEATLVDYLHEVEHVTARIARLDGEIGEAVKLAPSKMRAVIEALQALRGIAQISAVTIVAELGEVSRFGRARQLMGYGGIVASEHSSGEYTRRGGITKTGNAHLRRIVVESAWAYRHRPSVGASLRHRQEIVSEEVKEIAWKAQHRLHGRYRKLMARGKNKTVVVTAVGRELLGFIWAIGVKVEAAHEQSLQQAA

SEQ ID NO: 140856 - protein, 339 aa, unidentified
MNRIVVGVDIAKRVFQLHWVELETGEIVALQLKRERFLEHFANRASCLIGMEACGGSQHWARALQSLGHEVKLLSARMVKPFVGGNKNDAADARAIWTAVQQPGIKEVAVKSEEQQAVLGLHRMREQLVKFRTAQINGLRGLLTEYGEVMPQGRAGMRRDIPGALGRLADRLPAIVIETLREQYARLGALDGQISQIERRLAHWQREDPASQRIAAIPGVGLLSATAAVATMGDAKAFKSGREFAAWLGLVPRQSGTGGRVRLLGISKRGDKYLRTLLIHGARSVLTRSKAPPEWLTELVKRRPKNVAVVALANKMARTIWALSAHERTYQVGHVGRPG

SEQ ID NO: 140857 - protein, 399 aa, unidentified
MLAVGIDVSKSKSAAAILNPDGTVHTKPFEFRHSQPEMDALIRYIKDQNQPVTILMENTGHYHYPVLKALEAAGLPVCLINAYQMKKYGDMELRKAKTDKKDALRIARYALEKGYSLVPHTSMDQKYEDLRFLARQYDQRMGTLTTNKVFLINLLDETMPGITKLLSLTTRDPETSLTMLFIKRFKSYDRIKKMGRTRFLDSYNKLARKSRNRRAYGYGLAIYELAVNSITTRGENEFTLAAQDQCVDLVSESQKAADAIILKMQTLAETLPEYAVLRSMAGVGDRLGPLILAEIGDIRRFHSGKALNAYAGNDAPPYQSGTFESHNRHISKRGNAALRKYCFEVMQALKLTRPQDDPVYLFLIKKEQEGKPYNVAKMAGVNKFLRIYYARAMEALRLQ

SEQ ID NO: 140858 - protein, 366 aa, unidentified
MKKISTMQVFSNEILKEQKLTIGVDLGDRWSFYCVLDEAGKIILEQKLPTTPEAMKQTFAKIPRSLVALETGTHSPWVSRLLTELGHEVIVAHAQKVELITKSNRKDDRHDARTLARLARIDPQLLGPVRHRSAKAQIHLTVIRARAELVSARTALVNAARGLVKSYGQRLPKRGTYQVSRELATGLSAELRDVLGPLLKEVESLNERIQEYDERMEKIAKEEYPEVSLLKQVKGVGTQISLTYVLTIEDPYRFPKSRAVGCFLGLRPGRRNSGESEPQKGSSKEGDRYLRTMMVQGAHYILGPFGEDSDLRRWGLKLAERGGKNAKKRAVVAVARKLAVLLHRLWVSGEVYEPLRNSQKAMRAVA

SEQ ID NO: 140859 - protein, 343 aa, unidentified
MKIVRIGLDLAKNVFEVCGVDTRDVVVLRQTLRRDAIPQFFAKLPPCLVGMEACSSSHYWAKVLTDLGHQVRLIAPQFVTPYVKSNKNDQNDAEAICEAISRPSMRFVPPKSSEQLEIQAVHRIRQRLVSSRTQLVNQIRGLLAEHGVVVGRDISRLRRALSEIVEGTESALGEILQELVSEIHQELAALDERISSYDRRIRNLFRTNEMCQRIGKIEGIGPITATALVAAVGDQSCFKNGRQFAAWLGLVPKQRSSGGKSRLFGISKRGDRYLRTLLIHGARAVLGKAGGKQDARSVWINRMRERRHPNVVAVALANKNARIVWSILSKKEDYRGPDMMQAT

SEQ ID NO: 140860 - protein, 408 aa, unidentified
MPDLEQAVRFGAIDWAKDAHAVSIVDERGAEVLAESFPHTEAGVCALTRVLADADVLRVAIERPDGLLVDRLLGAGLCVVAVHPNKLASARERHSASGKKSDGFDAYVLADLLRTDGHRFPSLRPDGDETRALRALSRTREDLVGARVALANQLRAGLEAFWPGAAVIFSDIDSPIGLAFLHRYPSPEDACRLGPRRLEGFLARHGYCGRRSAEELLARLRQAPEGAGAEAEVEARRQAVLSLVACLRPLVEQIGLLESEIAGAVRAHADGAIFRSLFRSGATVTAARLIGEIGDVRERYPSADSLAADAGMVPVSKSSGRSRVVSFRWACDKRLRAAVACLADATRHHHRWAGSVYRRARARGCDHPHAIRILGRAWLRVIWRMWQDRVPYDPALHRGLQQLNPAGG

SEQ ID NO: 140861 - protein, 353 aa, unidentified
MAKIKSKIFFRGKKIFVGVDVHKKRWVVTVRTYNLELKTFSMIPSAEELERFLVKNYEGAIFYIVYECCFSGFWVYDYFHQRGYNIIVTPTNRVYRDGSIVKTDKIDSRKLAFQHSRDLLREVKVPEMKIREYRSLFRIYDKEKMRQGQILRQIRSILEVRNHPLKWERFNKEMVRKLKSVKFQEEIFNKKFASVLMEYEYVQKQIKDTEERIKEIAEDKELSERIRRIEKINGIGIVSAVRLVVYLFDQKDRFESGEKLVHYLGLTPGEHSTGEQIIRSRTGLIGNKQLRSIIIQLAWIAVRKDGSLLDKFERVYKSSGCKQKAIVAVARKLMMKVQSVIEKEEDYEINKAA

SEQ ID NO: 140862 - protein, 344 aa, unidentified
MSEVSIIGLDIAKHVFHAHGADERGRAILSKRISRGKLLDFFAAQPRCMVALEACGGAHHWARQLTQLGHEVRLIPPAYVKPFVKRQKNDAIDAEAICEAAQRPSMRFVAVKSEQQQAAGLVFRTRDLLVRQRTQLINAIRGHLTEYGWVAPKGPSHVAMLADLIEEEEMVNSLPEAARAMFRVMLDLLAGLNSKIADLDKEIARRAREDEVSRRLMTVPGIGPISATAIAALAPPAETFAKGRDFAAWLGLTPLQRSTGGKQKLGATSKMGERTLRRLLIIGSSAVVKQASKRGAPRGSWLEQMLARKPRMLVTVALANKMARIVWALLVKQENYRAPVAAKA

SEQ ID NO: 140863 - protein, 422 aa, unidentified
MLEQTRDEQEIIERVAALDIGKAELVCCVRVPDPGGGRRRVQEVTTYSTMTRSLQVMVDRLTDLGVTRVVMEATSSYWKPPFYLLEAHGFETWLVNAKDVKHLPGRPKTDRLDAVWLCKVAERQMLRPSFVPPIPIRRLRDLTRYRMSLVSDQGAEKNRVEKLLEDAQLKLSVVASDIFGMSGRDMMAALIAGERNPQALAQLARSRMRGKIPQLEEAFVGQFTDHHGYLLTKMLARIDALSVDIADLDTKIEARLAPFADTVARLDEIPGVGAVTAAVIIAEVGLDMTRFPTPAHLSSWARFAPGVKESAGRKKGTGSTGHGDRYLARVLGEAAVAASRTNTFLGERYRRIARRRGKKKAIVAVGRSILLIVWSLLSDPETRYYDLGPGFYDSRINPERKKRNHIRQLEALGYKVTLEPAA

SEQ ID NO: 140864 - protein, 326 aa, unidentified
MEHELHYIGIDTAKEKLDVDVLRPDGRHRTKKFANTTKGHDELVSWLKGHKIDHAHICIEATGTYMEPVAECLYDAGYIVSVINPALGKAFAQSEGLRNKTDTVDARMLAEFCRQKRPAAWEAPHPLERALRALVVRHQALTDMHTQELNRTETAREVQRPSIDAHLLWLEAELKRLEKEIKDLTDDDPDMKHRRKLLESIPGIGEKTSAVLLAYIGLKDRFAHARQFAAFAGLTPRRYESGSSVRGTSRLSKAGHVSLRRALYMPAMVATSKTEWGRVFRDRLAANGKKGKVILGAMMRKLAQVAYGVLKSGVPFDASRHNPVAA

SEQ ID NO: 140865 - protein, 362 aa, unidentified
MEYFTGLDVSIDETAICVVGDDGKVAFETAVETDPAAIAEALRPYADRMRRVGHEAGSLSPWLHTELLAEGVPAVCLETRHVRAALSAQRNKTDANDALGIAHIMRTGWFRQAHVKTDACYRIRLLLVQRRNLKRKFLDLENAIRHSLKVFGIRLGKVGRGAMEKAVRESVAGDAMTAGLMDCMLRARAALWAEYLTLHKLVVQIAMRDELCRRFMAIPGVGPVTALSFSSAIDDPQRFRRSRNVAAYFGLTSKRWQSGTSIDVHGRISKAGDPDVRRALYEAASAMLTRFKGRDMIKTWGLKLAKTKCHAKARVAVARKLAIVMHAMWRDGTFYVGDPDATAQDIDASNAAKLQRLSLANS

SEQ ID NO: 140866 - protein, 316 aa, unidentified
MSISETFIGIDVSKERLDCASRPNGTTSSFKNSVTGIDALIKQLQEQRPRLVVLEATGGLERALVAALVVAQMPVVIVNPRQVRDFARAVGQLAKTDRIDAAVIAHFGEAVKPEVRTLPDQLTQEMDALMKRRGQVVAMLAVERNHLVSATSPVSNHVKEHISHLEELIKRLDQEIDQMIGKSPIWKAKDELFQSVKGVGPVLSRTLLAELPEIGQLSRQKLSKLVGVAPLNNDSGKRKGKRSCWGGRSRVRAILYMSALSATRFNPVIKEFYQRLLAKGKTKKVALVACMRKLLTILNSMVKNNTPWDPSFAQRG

SEQ ID NO: 140867 - protein, 346 aa, unidentified
MKVLIGVDPHKTSLAVAAIDEATGQLLERASFPQNRTGLRALERWAKRFPERRWAMENASGLGRHLAGRLTAADEAVVDVPPKLSARVRVLSTGNARKNDGLDALATALAASGNERLAAVDPEAASEVLRLLSERREDLVAERTRALNRLHGFLRDLVPGGVAGKLSAARAARILRGIRPQGSSSRVRRGLASEVLRDVRTLDRKIADLNERIEAEVEASGTSLTEIFGIGPILAARIIGTVGYVGRFPTKAHFASYSGTAPVEASSGEVVRHKLSLAGNRKLNYALHMVAVCQARSDARGGGYYRKKMAEGKSRKEALRCLKRRVSDAVYRSLMADSRAHSQSAA

SEQ ID NO: 140868 - protein, 342 aa, unidentified
MKNHQIGIDISKEKVNICLRKEKKSVWEHECPNTIASIKKAIRKGMKDHGVATDDVVVCAEFTGRYIYPLVCACDELGFFLWMEDPTRIKNSFGIARGKDDRIDARRIAEYADRFSDKAVAYGMPDRTLASIKSRLADRDMLLEDRKRYETQLHDQKGFMDPKDYAQKSRLWTAVIKTLNKQLAILDEQLNELIASDEKISHQVELLKSVDGIGDRIAIYMVAVTMGFTRFENPRQFYCYAGLAPFRYTSGKSIHSKSKVSQRANKHIKALLHLAAVSAATHMKDSEYKQYYERKTADGKHPMSVLNVVRAKLVSRMFAVIRRDSEYQKNYAFSNNFEKIHA

SEQ ID NO: 140869 - protein, 370 aa, unidentified
MRFYQGQHPFYCGIDLHARTMHVCILDQAGQTVFDKGIPCRPEALLRAIQPYRDHLVIGAECMFAWYWVADLCVEQDIAFVLGHALYRKAIHGGKAKNDRSDAGKIARLLRGGTFPLAYAYPKGMRETRDLMRRRTYLVRKRAELLTHLQILNAQYNLAPFPKKLACAANRTEMNVAERFADPSVQKSAAINLALIDRLDELIGDLELYLVRTAKVDDIQTFYRLRSIPGVGKVLALILLYETHDIGRFDTAGQFLSYARLVRCAHESGGKKLGTGGKKIGNAHLRWANACAACLFLRSSERAKKWKQKQAAQRGEGKALAILAARLGRAVYHMLRKGEAFDEDRFWSGARRTRTGSSSLSRKEARDAGH

SEQ ID NO: 140870 - protein, 351 aa, unidentified
MLYAGLDLSRKRLDYCLLDAQGERVEEGAAPPDVDGLRVLVHRLARHRAPIGAVIESMNGARFVHDHLEQAGWKVEIADAAKVKGLAPLACKTDRIDAFVLAELARRDLVPAIWLPSPGVRAERERARFRLYLVRKRSSLKNRVHATLMTFGHACPVSDLFGVQGRQLLASLSLPEPWAGTVAASLRLLDELEHEIAASERELRSLGADHPYVPLLLTVPGIAWVLAYTIAAEIGDIARFPSPRKLAGYSGLCPRVYQSGDSDRRGPLAKAGPRYLRWALVEATSHACRYPLYRERYERLKAGHGRQRGPRLAQVDLARRLSEAIWHMLTRNQPFAPAGATRALVSEKTPS

SEQ ID NO: 140871 - protein, 351 aa, unidentified
MPRIKKNAIVAVTAEDSVYVGLDVHKASIHVAVWKNGMLAAAWVTTADYATLADQLEPLRPALRQVAYEAGPTGFVLARLLASRQLPVMVCAPSKTPQTAGDETKCDRLDARKIAEYAAKELLSAVTVPTEREEHERALVRHRSHVVRNISRVKARIKSTLLFHQCGELASWTQAERLRLLNSELPLELRFELEALFQELSFFEAQKKQAEEKLQAALAHRDHAATVKRLESHPGVGKVLSACFVLELFRPGRFKDGDSVARYVGLAPRVRQSGATCRGGPLLKSGQGKLRAVLIEAAWRWRACDERARAIYGRLVANTGNGKKAIVGLARRLAIRLWTMWTRGEAYDPAS

SEQ ID NO: 140872 - protein, 334 aa, unidentified
MAADWKGEPMKEQQFVGIDIGLRDLAMSSWPSQQRLQVANDDCGRARMSEWLTAMSPQFVVLEASGGLEATLAAEIHAAGLRVAVVNPRQAREFARSLGRLAKTDRVDAQVLAQFGQSAAQSGRLRETRVADAAETELKELLARRRQLIAELVAETNRKPRAGKLVRKSIVQNIKWLKRLVEQVNNQLQDAVKASSLWQTRVNLLMTVPGVGPQVAMVLTAELPELGQLNRRQIAALAGVAPHAHDSGQFWQRRIWGGRASVRCALYMAALVGSRRNQILRACYQRLLSKGKARKQALVACMRKLLVILNAMVKHDRAWQLPQQQFSPCPPNHA

SEQ ID NO: 140873 - protein, 348 aa, unidentified
MSRHSVQAGDIAGLLRRFAQLKEKARVRTGRDFPIIVIQEAGLDGFWIHRVLQSEGIESHVVDAASILTSRRRRRAKTDRIDGETLVRTLMAFKRGEPRVCSMARAPTPQEEDRRRVCRERKTLVGERVQHVNRIKGLLFAQGVFGYEPLRKRRRERLEDLRTGDGRPLPVHLKAQIIRELDRLEVVLAQLKSVAAERDALLKPATDEAAAPAAMLARLKGIGPETAAVLWSEGLFRQFDNRRHVAAYAGLAPTPWQSGSIDHEQGVSKAGNPRLRTTMVELAWLWLRNQPTSALSLWFHERVRRLGGRMRKTTIVALARKLLVALWRYTTAGVVIEGAVMKAVPATI

SEQ ID NO: 140874 - protein, 265 aa, unidentified
MDTETGELSERRLAHREQAEQFYRERKQQNLCARVGMESSGHSRWFERLLHELGFELWIGDPAEICSKRVRKQKTDRQDAQLLLQLMLEKRFPRIWVPDAENRDLRQLLWHRHRLVQMRTRVMNQLHVVPLHEGLQRKKALWRPAGRKELESIALAPWASRRRQDLLDLLDQLTPKIQELTPALEEEVEKRPVTRRLMTHPGVGPLRALAYELMIGTPERFHCGKQIASYIGLVPAEDRNGSLLSFLMYHPPSCRCLLFQFAKCV

SEQ ID NO: 140875 - protein, 429 aa, unidentified
MNSTQNKKIEQVKETTMIVGIDVGSEKHYFRAFNWRGIELTRKPVAFSNSMEGFNSFYNSVVELMQKNELKEALVGIEPTGHYWFDLGQFMGEKNIKFVMVNPHHVHKTKELDDNSPSKNDRKDPRVIAGLVRDGRYFYSYMPTGVYAELRNASNRRFVLVEEQTRAKNRLQKWIAVYFPEYKGIYTHIDAKGGLLVLKQAPTPEEIVRLGVEGIIKIWKEAKLRGNGHKKAMLILNAAMKSIGLKAGLTEARMEIQDLIEDYELQTKRLERVNDLIKELCQQVRYADKLLEIKGIGITTVAGFIAEVGDITRFDSTKELQKLAGLELVADSSGKHDGKTKISKRGRKRLRYLLFEAAISVVGKNEEFKEIHRYYTTREKNPLKKMQSLIAVACKLIRVFHVILTKGISYDASKMLKDIRRPGEQLKAA

SEQ ID NO: 140876 - protein, 533 aa, unidentified
MARTLPTPLSRPPDTRWPRAAPLTWAPVTLRRLDEPVAGRDREADGTPRSEKEAMEGGQSSTEAPIAGRDGRSSRAALEKSSPSGGNASSSDAREGQGRSRRTTDKRVTSPPPRAEAVDTPACSKAQIARRLGAQGRLVMRSVGLDLGVRHIAYCEVADGKVVDRCTVRSLSELASRIGPDSAPARVAFEACREGWHVHTKLAEWGHEPRMLDTTRIRQLGVGQHSRKNDAIDAEAIAQAVDAGRFPEAHVLSPERRALRAQLSVRGALVETRAQYVTTIRGLARAAGVLLPTCATEDFVTKLEKTMLDEPTRHLIAPLVALLRTIEPELARVEKTLADFAQKDPILNLCATVPGVGLIVAATFVSVIDEAKRFKNAHAVGAYLGLVPSESTTGGPNKRRLGSITKQGNSMARAMLVQAAWLILRSRDRDDPLKRWGEHLANTRGKRIAVVALARKLAGVLWAMWRDGTVYDRAEQAEKTAHGLKVDARKQHHRADALERAAKKLRRKEVTENASTSKRVSKARSTSSEMSTT

SEQ ID NO: 140877 - protein, 457 aa, unidentified
MAQRRKKAKSQTFKMTNLPAELQHINLNAAGIDVGSERHLVAVPAGRDDISVREFGTFTSDLEALAAWLKKCGVTTVAMESTGVYWIPLFEVLDRHGFEVKLVDARHVKNVSGRKSDVLDCQWLQQLHTYGLLAGAFRPPDEICVLRSYLRQKEMLTQASSMHIQHMQKALQQMNLLLHNVVSDITGVTGMKIIKAILAGERDPHQLARNRDGRCHNSSTTIAKSLVGNYREEHLFALGQAVDLYETYQKKITDCEQAIIKHLEKQPNVSDDEPPPATKETQERSRVRAGVDVRDLLYQKSGVDLFAIPGLAADTLLTLASEVGFDMRPWKTEKHFASWLGLCPGTRRSGGKVLNSKTKRNPNRAAQAFRMAANTLSRSATALGAFYRRIKMRTSGQQAVTATAHKIARIYYAMLTKGANYIELGQQAYEERYKQRRLDHLKSQAKSLGFKLVPGAA

SEQ ID NO: 140878 - protein, 319 aa, unidentified
MDPDHALVPTYVGIDVAKEHLDVAVDGTSTAQRFAYTAQGLQQLLVQLRALAAPLVILEATGGLELRLMSELWAANLPVARINPKRVREFAKASGRLAKTDRLDAQLLARFGVALQPAVTPLPSEQAQVLAGWVSRRRQLVDMRSMEQNRLATATAPLQPSLRQHIAWLDSAIAALEADIDDFIQGTPAWAAKDALLQSAPGVGPQTAHTLLAEIPELGTIDRKQVAALVGVAPFNRDSGRSHGKRGIYGGRRSVRSVLYMAALSATRFNPVIRTFYLHLLQAGKEKKVALVACMRKLLTMLNAMLRDDQPWCPQRTSY

SEQ ID NO: 140879 - protein, 321 aa, unidentified
MKKQEITFVQVVKVGCGIDVHRDIIVATIRKSNYEYETREFGAYTSSLKSLRDWCKTEEVTHICMESTGVYWKPVFNVLEEDFEIILVNARHVKNVPGHKTDKKDSAWLSKLLLSGLLKGSFIPPCDIRELRDLVRYKKKVVAQAASEKNRIIKILEDANIKLSSVLSNVDGAVGTKIINSLIEGQTDVEVLLKFYHGKMKVSKAEFRKALEGRITKHHRFMLQLHKDSIVDKERLIARIETEIDEATKAYQVEIDLLQTIPGVGKDSAISIISEIGVDMSKFPNDNHLSSWAGMSPGNNETGGKKKQQKQSMETNIYKAH

SEQ ID NO: 140880 - protein, 373 aa, unidentified
MPRYSTAFGMDVHLRSTTVCALDAETGETVTRRFRGNPWGEVAEWMSGFPGPSLAAYESGYLGFAPQRELSGLGIDCVVAAVSKVPRSAADFSSKNDRNDAARMAKAILSHDISPVWVPSPEIEGLRDLAGAHDAATARLAAAKQRLLAFLARRGYAYGGTTPAGNPRKYWTYDFLRWLDKVRPADDGGIRALAALRSEVEAASETRDDLLAEYRAAVAAGPLSAEVEALQSIKGCGFALAAAFASEVGDFSRFRSGRQVTSYFGLAPKQRSSADSVRLGGISGAGNALVRRLAVEGSWSYVQASHQPKLMPKGSGVPLEVRMHGRKGSERLLRRREEMLARGMPQAKANAATAAELVRWLWALGAMCREATE

SEQ ID NO: 140881 - protein, 347 aa, unidentified
MSEVITIGVDLAKSVFQVHGVDVSGTAVIRRQLKRSQVLGFFRKLPPCLVGMEACASSHYWAREITQVGHEVRMMPARYVKPYVKRNKNDAADAEAICEAVTRPTMRFVEIKTPEQQSVLMLHRTRQLFVRQRTALINALRAHLAEFGIVAGVGRNGLEKLMEVIADEQDERVPAAARDCLLALRDQLAFVQQQILGADRRILICHRASPLSRRLAEIPGVGPLIATALVASIPDPHAFRSGRDLSAWIGLVPRQNSTGGKERLGHISKAGNRYLRSLLVVGALSVIRRAKQVGYTRRPWLVTLMERRSTKIAAIALANKIARTAWAMMAHGTCYQEPQVKPPAQAA

SEQ ID NO: 140882 - protein, 391 aa, unidentified
MIYIGIDVAKDKHDCFITNSDSEVLFKAFTIANNLDGFNDLYQKIESVMDDVTKVKVGLEATGHYSYNLLGYLIDKGLPTYVINPLHTNLYRKSLSLRQTKTDKVDARTIASMLMSDVNLKSYSDTFYHNEELKSLTRYRFDKVKERAKLKTSVSRLVCILFPELEKLVPTLHIASVYALLSEFPSAKHVATAHLTRLTNLLSKSSKGRYGKDTAITFRDSARASIGSNMPAKSLELKHTIKLIQELDSEIDEIENEIKIIMDEINSPILSIPGINYRMGAMIIAEIGDFNRFDSPDKILAYAGFSPSTYQSGQLDGAYAHMEKRGSRYLRYALYNATKYVCHWDPTFAAYLAKKRAEGKHYNVAISHAVKKLVRVIYHLEKTKQQYIKAA

SEQ ID NO: 140883 - protein, 402 aa, unidentified
MNAVGIDVSKGKSMVAIMRPFGEIVSAPFEIKHTASDINSLVELINSVKGESRIVMEHTGRYYEVLAHQLSEANLFVSAINPKLIKDFDNDSLRKVKSDKADAVKIARYALDKWQNLKQYSVMDKLRNQLKTINRQFGFYMKHKTAMKNNLIGILDQTYPGVNTYFDSPARSDGSQKWVDFASTYWHVDCVRKMSLNAFIDHYQNWCKRKKYNFSQSKAEEIYGKAKELVPVLPKDAITKLIIKQTVDQLNSASTTVESLRTLMNETASKLPEYPVVMAMKGVGTSLGPQLMAEIGDVSRFTHKSAITAFAGVDPGVNESGTYEQKSVPTSKRGSADLRKTLFQVMDVLIKTHPQDDPVYQFLDKKRTQGKPYYVYMTAGANKFLRIYYGRVKEYLSSLPES

SEQ ID NO: 140884 - protein, 427 aa, unidentified
MKYKQNSRIEQIGESTLIVGADIAKNKHYARAVDFRGIELGKTIAFSQSQSGFNQLLFWIKSLMKQHSKQQVLFGIEPTGHYWLSLAEFLKKHGIKLVMVNPMHVKKSKELDDNSPTKNDVKDARVIARLVQGGRYSEPQVPEGINAELRNGMNLRDRLTQDLASIKGRIQTWLDRFFPEFLDVFRDWEGKAALFSLQHFPLPSDVQTMNAEQIVLAWRQEIKRSVGIKKATNLLEAAKASIGLTTGLSMARKELQLLLQQYLLLLSQIDELMEQLEEFVYQIPGSAQMLTIPGVGFTAVAGFLSEVGDLQRYDHPRQIQKLAGLNLTENSSGKRQGRTRITKRGRPRLRALLYRCVMVLVAQIPEFKALHAYYTKRPVNPLQKKQSMIALCCKLIRVLFVLGRKQIPYDPAKLQGALPQDQLQEVA

SEQ ID NO: 140885 - protein, 381 aa, unidentified
MHASNSCPPIADHNGTIFVAIELSLKRWLVTLRSPDRSRVSRYRVNGGDHAGLLKLIDEVRGRAARGLGRVPAVVSCYEAGYDGFWLHRLLSAAGITNFVFDPASVPVEQRRRRVKTDRIDGELLVRSLMAQCRGEPRVVRVARVPSREAEDARRASRERDRLVKEQTAHINRIKGLLRTVGLAAGNPRRRDWPRWLAEQRDWSGEPIGARLRRELEHEHARLLLVGEQLAELEREPACCDETAAAMAQQKIELQRLKSLGAAFAGTLVDEVFYKDFDNRRQVASYFGLAPSPWQSGGLEREQGISKAGNPRARRAAIEAAWLWLRHQPESALSRWFEQRTVGASKRQRRIAIVAVARKLIVALWRYLTTGLVPEGAVMKA

SEQ ID NO: 140886 - protein, 402 aa, unidentified
MAYCGCLDWGSAEHGICIIEHDSGKIIARFPVPHDAAGIADLMRRLARLAPPADLPIAIERPSGLIVDALVAAGHPVVPIHPNVVKASRPRYRAAGGKSDRGDPYLLADLLRTDGHRFRRLIPCSDEIKALRALVRGRDALVAQRLVLANQLRALLDSFWPGAVAIFADIDSPIALAFVQRYPTPDSAARLGEKRIKAFMAQHRYCGRRSASELLARLRRAPPGLAGDSEADAKGELVRAWAAVLTALVAQIAELASRIEHTIGELPDGKIVTSFPRAGRICAAQILAELGDVRERFQAEDQLAAEAGVCPVTHQSGKSRGVVFRWACNHRLRAAVTCFADNSRHSSPWASDIYQRAKGRGCDHPHAVRILARAWVRVLWRAWQDRTLYDPARHRGSRASAA

SEQ ID NO: 140887 - protein, 336 aa, unidentified
MGIDLAKRIFHVAGMDNTGRVVLRKRLTRGDLLSYMAQLAPVVIGMEACGGAHYWARRLRAHGHTVKLIAPQFVKPYVKSNKNDPADAEAICEAVTRPPMRFVPLKEIDQQDLQALHRARERVGKARTALVNAIRGLLGEYDIGLPPSVTKFRHTFLAPLEAERAKLTALSQELFGHLDEEFCALEKRLAYYTAQLEAISAAHPVCQRLETIPGIGPLTATAMVAAVSDVTRFQNGRQFAAWIGLVPRHHATGGKPRLFGISKRGDGYLRTLLIHGARATLRWIGRKTDRRSTWVRGLLDRRGKNKAAVALANKNARIAWALLKTDAVYIAEDAAA

SEQ ID NO: 140888 - protein, 396 aa, unidentified
MARIWAGTDIGKTHHHCVVLNAEGERLLSRRVLNDEPELLALLADVLALDEDVVWAVDVADGMAALWISMLLNHGQHLVYIPGLAVNRASVGYRGMGKTDAKDATVIADQARMRRDLTVLQPDDEQAIELRVLTSRRADLNADRTRRINRLRGQLTSIFPGLERALDLTNIGPLILLAGYQTPAALRRTGGKRLVTWLRNRSVRNPEALATAALEAAERQHTAVPGEKITAQVIHTLAKEVMSLNEQISEIDKLIAARFRDHELAEVISSMPGIGPLLGAEFLAATAGDMSRYGTADRLASLAGVAPVPRDSGNISGNLHRPRRYHRGLQRVFYTSALISIRSCADSRRFYERKRAEGKRHTQAVLALARRRVNVLWALIRDGQCYQANLPVTATA

SEQ ID NO: 140889 - protein, 315 aa, unidentified
MTLIVAQSAGVDISKDSLDAHLHPAGRRRRFSNDAKGCAALIAWLGDVTVARIAFEPTGAYHHAFERRLAAAGLPLVKVNPRQARRFAEALGQNAKTDPIDADLLARFAALLEPPVRPVVSAALDTMKELHIARRALVKDRVAALNRESTRRSALLKRQARERLRQIDRQIAAIDAALRVELSADPALEARFDILQSIPGIGAATALAILIEMPELGAIEHRSAASLAGLAPIARDSGRTRGKRFIRGGRAQLRHALYMPALVAARCNPQLKAKYEALRAAGKPPKVAITAVMRKILILANALLRDRRTWTPGLA

SEQ ID NO: 140890 - protein, 375 aa, unidentified
MKKTLRFLGLDVHAETIAVAVAEPDGEVRSLGTIANREESIRKLVKKLGPPKQLRACYEAGPTGYVVYWQLTQLGVDCAVVAPTLVPTKSGDRVKTDRRDAAKLARCHRAGDLTAVWVPDAEAEALRDLVRAREAAKQDQLRARHRLSKFLLRTGRRPPFAGKAWTLPYMAWVRQLRYEQAAQEWTRLDLLHEVEHMTERVKRLEEAIREAVKLAPAGMREVIRGLQCLRGVAEISAVTIAAELGQISRFESPRQLMGYSGMVPSEESSGKRQQRGGITKTGNAHLRRIAGEAAWSYRLRPAVGPRLRRRQQGAPEEIKEMAWKAQLRLHKRYARLAAAGKDQRKIVTAVGRELLGFIWAIGVKAETAASQARAA

SEQ ID NO: 140891 - protein, 369 aa, unidentified
MSVIYIGVDFHARQQTVCYLKTETGELVISELNHQNKEEVRAFYAQFEGQVIVGLEASGYSPWFEQMLTALGHEAWLGNATEIRRRGNWRQKNDRRDAELILDLMLHDEFPLIHRPSPESSEILRMLRYRQKLVKMRTIGKNSLQALALQSGLSLRTKLFTKAGKDAFCRATMSPVMEQQREQWLAIIETLNQRILETMLWLKVQSQNDERISRLRTHPGIGLLTSLGLVHTLWPVSRFRNQRKVAAYAGLEPMERSSAERRHFLGISKAGSRLLRFLVVEAAHTAIKKDEELKRFYQRLAARRGRPKAKVAVGRKLLVRSYIMLRDEIDYAEFQRRAVAARLARQSSRPTMPDSLIGQPASPDSEERE

SEQ ID NO: 140892 - protein, 391 aa, unidentified
MKERKSELSLVMQDRSECCSLSLRFLNLNGNIRSGTCITYHDDRLKEVLRKNQYTNKEGFIMSTYKVFIGIDVSKKYLNAAILNGDTTVTFKSLYCPEEFEKELNRHLKEIEKSELLIVMEHTGVYHLRLAHYLYESGYNVGVINPYLMRKFFEAKGKRAKTDKVDSIVIAEYGRQFFDGKLYRPKTEAQKQIETRLRLLDDFQRQINMVKNQREALSHVPMEGIKKVLRYYDGIIKALSSSMKKVEKEIQKLCREKFKKQRELLESIPGISDRAISVVVSMLRGFEGFSRAKEVGSFVGICPSPYESGDTVRGRGSIMKRGNSYVRKVFYMCTLSAIRVNVYCKGLYERLLKKGKSKKLALVAVGHKLLRQCFGVLRSGKEFNPSLVKST

SEQ ID NO: 140893 - protein, 366 aa, unidentified
MLYLGIDQHAKQLTISLRNDAGDIVLKRQVSTEPKRCAEFFAKLRDKAGDEGFIAILEVCGFNDWLLKFLPTVGCTQTILIQPTKKLKVKTDKRDAHALSELLWVNQHRLRVGEPVRGVRQVILPSKHHAESQRITLLRKDAGRMRTRATNRIKNILRKHNLQWQMPTKTFPSVRAVAWLKTVELPPCERAEMDWHLDELERWTTRMNDLEVQIIERSKDDPVVTRLRTIPGCAHYSALSLVCRVGDPHRFPKGKSLAHYWGLTPGVNDSGEGTGRRGRITKAGSTMARWVLAQITLHCLRRDPVLKAWYKPIRNRRGSKIARVAVMRKLAVIIRNMMVHEQTYSECRDAMLARRKRQVAIHKQTA

SEQ ID NO: 140894 - protein, 416 aa, unidentified
MKKRTYRTKNVNKIDWPQLKTRLSGKAISLAIDIAKENQYAMLADDESNALELIRWKHPEQTPVLLEALKNLCCPVVVIMESTSTYGDALRYQFRQLGFTIHQASAKRVHDAREVYDGVPSLHDAKSASIISRFYHDGLTKVWVEPSEKERKLNALRREHEMHQSQYQRNQNRLEAYLSRHWPEVGRLLSLDSAALEGLLQHYGSAQRITENAEQARQQMRSRGKNLLSQEKIDQVISSASATLGAPCTEPELEYMQALAAEMAHSRQQKSRAKRALEAVIEEDSELDGLSVLLGKVTTAVMLSLNLDPRKYPCARTFQKAMGLNLKEKSSGRYVGQLKLTKRGSAKARTYLYFAALRLLQNDAWVKQWYQTKLDPKVKMKTVIAIMRKLSKAMWHVARGEAFCAQKLFSLPESAA

SEQ ID NO: 140895 - protein, 347 aa, unidentified
MSFIGVDLHQNSFTVCRRKTDGAESFETLTLSAADLERFCLSLDADDELAVEATGNSAWFRDCVLPCVGRVVVVNPSQFKVIRKSVKKTDRNDAAALALFLAKDMLPETRARTQGENELASLTQTRDLLVKQRTRLLNKIHALHVRKGLKLRKESLGSKRALASIDLALFSACEVIEIEVLREQALSLTASLARLDREIEGVASTFKGYAGLTSIKGVGPRSAAVLLSTIGNVHDFESADKLAAYFGIVPRVSQSNETDNRGRITKRGNKLARTTLVQCSLIAMRYSSYLKTYYDRIRQRRGTGKAIIATARKLLAIIYDTLKNGWVFDDFTQFSRRDPLIPAGQTS

SEQ ID NO: 140896 - protein, 314 aa, unidentified
MSEKTFVGIDVAKDTLDVAIRPEGIQRNFPNDEEGWHSLLLFVRPLGPSLIVLEATGGYQMGIVRVLAAAALPVVVVNPRQVRDFAKATGRLAKTDSLDAGAIAHFAEAVKPDIRPLKTGEAEKLDALMTRRRQLIDMITSEKNRLHSATEWTKQDIETHIAWLEHALEKTDSDLDNLIKKSPLWKEKRSILLSVPGIGPVTAATLIVDMPELGTLNRKKISALVGVAPFNRDSGTMKGKRTIWGGRASVRSSLYMATLTAVSFNPVIKPFYQRLVKAGKLPKVALVACMRKLLVILNTMVKTNTNWRINPCAP

SEQ ID NO: 140897 - protein, 408 aa, unidentified
MEVLHPRCAGLDVHKDTVVACVRIQEAAIGRHLVESFGTTTKELLRLADWLAEHEVTHVAMEATGVYWKPVWHVLEESFELVLANAMHIKNVPGRKTDVNDATWIADLLAHGLIRGSFVPPTAIQDMRTLMRTRKQLVRERAQHVQRLQKTLEDANIKVASVVSDITGTSGRAMLRALIEGETDPGRLLAVTTGRLRADRKTLAEALRGRIRAPHRFLLKLHLEQIEMLEKAVDSVDTEVGAVLEPFRAKVARLVTMPGISDIAAQVIVSEIGVDMSRFPTAGHLISWAGLCPRNDESAGKRRSTRLRQGAPWLKTTLTQAAWSAARTKSSYLQAQFLRIKSRRGPKKAIMAVAASMLTAAYYMLRDDVDYRDLGPDYFDRLDRTHAAERLVRRLQNLGFQVEVKAAA

SEQ ID NO: 140898 - protein, 387 aa, unidentified
MPQLNDLSRSLVALAQDSTIIAVVELSQSSWLVAGVLPGIERQPQKKLEPSAERLLGLLHRWRDEAVRAGKKITRIALAFEAGRDGFWLARWLNARGVEAHVIHPSSVAVSREHRRAKTDRLDTELLKRGFLGWLRGERGHCSMARVPTIAEEDAKRPNRERECLVGERTRIVNRMKATLARLGVRNFKPTLRKAAERLATVHTPEGTPLPRNVLAELQRDMARLGFVVSQIREIEQARQKRLEQETETGPHAMVRQVARVIGIGIETADMLVHEVLSRPMRDRKAVARYAGLTGSPDESGARRREQGLARAGNARVRRGMIQLAWRFLRFQKQSALAQWYRARTADSRLGTRKTMIVALARKLLIALWRFVTTGETLEGVILRPAS

SEQ ID NO: 140899 - protein, 454 aa, unidentified
MPVHRPAKPKKSRRPADPLAGLPPLHLNAAGIDVGSAAHYVAVPPDRDPEPVRRFDSFTADLHALANWLAACGIDTVAMESTGVYWIALYQVLEARGFEVRLVNARHAKNVPGRKTDVADCQWLQQLHTFGLLKDSFRPEDSICVLRSLLRQRENLVAAAGTCVQHMQKAMVEMNIQLANVISDITGETGLAIIRALLAGERDPVRLAQLKNPRIQASTDTIVRSLQGNWRDELLFILGQSLWLYECYQAKIAECDLRLETQLRSFDEKVTPLPLRPRRPSRGSNRPAFDLQSHLHRITGVDLTRIDGLNVLTIQTIISEVGLDMSPWPTEKHFASWLGLCPDNRISGGKVLKRKTRKVINRAATAFRLGAWNLLRSRSALGANYRRLRARLGAPKAITAMANKLARIFYRMLKYGQDYVDQGMEHYESRFREQQLKWLQKQAKMLNMQVVPVQ

SEQ ID NO: 140900 - protein, 316 aa, unidentified
MGMTDTPAAARPILAIDVSKARLDGFDAATGETFSLDHTPSGHTALLRRAAAGGHLLALEASGGYERPLLAACLKAGLPTRLLDPRRVRHFARASGQWAKTDRLDARLIAAYAAAIPGDFHQPDPEAAQLAELVTYRRQLIDIETTLANQAEHLTDPELRRDAKRRLDTLKLRLTRLDARIDAAIAASPTLARKATLLRSIPGVGPVLCATLLASLPELGHLNRREIAALVGVAPMDNSSGQRHGAKTIYAGRPAVRATLYMAALVAGRFNPPLAAFRDRLRAAGKKPKVAIVAVMRKLLVLANALLRDNRTYAAP

SEQ ID NO: 140901 - protein, 350 aa, unidentified
MDQVEVVLGVDTHLDVHVGVVIDAVGRVKGTLSIETNTAGFERLLTWARGFGRLSRAGIEGTCSYGAGLTRFLEGSGVLILEINRPNRSRRRNRGKSDPTDAESAARAVLADDATGVPKAKSGMAEALRTLSVARRSAVKAKTQAVNQLRALLISAPSFIRDALLKVKPEQCVAACAALAHDDEKNPVLDSLKTTLRLLARRWNALHDELRELDKELTRLTKLAAPRLLARFGVGPQTAATLLVTAGDNPTRLRNEAALAALCGVSPLEASSGKTSRHRLNRGGQRQANNALWTIAMVRMRSDARTREYVVKRTGEGLSKKEIHRCLKRYIVRELYPLILADLADSAVSA

SEQ ID NO: 140902 - protein, 414 aa, unidentified
MQTERCIAGIDVHKKMLAVVVGQVQERSVKVERAKFGTTTEDLELLGDWLQTRGVEEVVMESTGQYHKPVWLQLEGRFRLHLAQARSNRGPKGRKRDFADALRMIKRFLSEDLILSYVPDAEQRLWRRLTRTKTSLGDQRQRVQLQIEALLEEMMIKLSSVVSDLLGASGRRILQAIASGEEDPAKLASLGDERLKASEQELQKALKGRVHAAHRLILGLFLKQIELLDEQIAVLEREISSALQPHQAVVERLADIPGLGLDSAQQIIAEIGPEAAAFPSAGQAASWVGVCPGREESAGESHNNRSPKGNRAMRRLLNQVAWAAVRTKGSYFQGLFQRLTVRKGVKVAIWAVAHRLLRVIWKILHQKVRYIEHGPRSGNGQAIQKRKRTLVRQLQRLGYAVQITPTQATSRIEV

SEQ ID NO: 140903 - protein, 232 aa, unidentified
MVYRGIDISKSSFVAAYPSTNGNPTKTFPNTTAGMRELIGTLAVAEHHCVMKATSNYGCCCTCYIRTVLPSVLPPPPKKKQIKHFSRMMMPVTKTDEKDAYMIAMYGEKMNPPIYKMPSQATIRILTTEGFTYFDNAKQLSRFIGICPTYQQSRTSVNIREHINRNDDERLRSLLYIAFWTALRYNSRECYIRLKANEKPFKVALIAVTNKLVRPVLTITTINSIYRWICPG

SEQ ID NO: 140904 - protein, 370 aa, unidentified
MVNWQNKTVSVGIDLHKTQFTVCAITSKKEILFEAVYNTETDGYKSFISRCHSLEEEYGAHVSMAIESTSNARYFRNLMENENFFIVVINTLKFKVITQSAKKTDKRDAFTIAEFLLKDMLPESYLCDQETEELRKLICERLDLVSLIVRTKNRIHNMMLGYGIVTTAAQFQSKKKRLLLLNGLENHALITKRTVPTLKRLIQTLDILNEQVKQIEALIEEFTLEDEDTQLLQTIPGIGKITSTTIRAYVGDINRFETYKQFAAYCGLTPFVKFSNEKGFTGHITKNGPVELRTSMVQAVMGMLRLQKSLRYMSLINDYKRMKKNKGSGKSIIAFARKLSRVIYAILKNKTPFDIDRLTVDYIRRQTEVV

SEQ ID NO: 140905 - protein, 360 aa, unidentified
MAAKKCNIMKTQTTAFNPKLYIGIDVHKKSWTYHYQTDLFDGKTITQPANPQTLVDWVGKHYPAHDVTCAYEAGFSGYSAARLFQKQKWNVLVLNAADIPRSQKQSIVKTDKIDCRNICKQLKNDALTSITIPEEQRESFRSLFRERNNFVVGLRHIKLQIKSYLMYCGITIPEEFDNANWSKNFIDWIRLQNQPYETGTLKITFLLKRYDFMYLETLAISNQLRAYARKYYKKDYDLLRSVPGIGGITATAILAELGDLRKYNRFDDLASSVGFVPGIYSSGDTTIVKGITPRAKNLLRSYLIEASWQAVRFDPVLQEYYRSHYGKQPNKIIVKVARKLLSRIHAVIKTETPYQIGVTK

SEQ ID NO: 140906 - protein, 394 aa, unidentified
MTKVRTWAGLDVHAAATVACVVDVPSGEMSVQRLAGRTSEVTAFCARLPAPVRVAYEAGPTGFELARALAAAGVACVVAAPGKIERPAQDRVKTDRRDAERLVRLLMIGGLHPVRVPSGEEEALRDLVRAREDIRGDLMRSRHRLGKLLLRHDVRYNDTASAWTTAHRAWLSRVDLGERAAQATLLDYLGAIDALVIRRDTIERMIAELVPHSPWAEQVARLRCLRGIDTLSAVGLCAEIGDFSRFDRPGKLASYLGLVPSERSSGQTRRQGAITKSAPATHADCSSRQPGITAGRRAEARRSSAATKASPRRCSRSPGRPSSASTTSGAASTASAANAKRSSRSPSPATSPASAGRSPPPLRRLDRPHPCHCSAEEAAEPARPPRARAPAVEL

SEQ ID NO: 140907 - protein, 342 aa, unidentified
MDAITIGVDLAKTVFQIHGVDATGETVVRKQLRRRQVLPFFKKLAPCLVGMEACATAHHWARQLEALGHEVRLMPPRYVKPYVKRNKNDAADAEAICEAVTRPTMRFVAVKSAEQQSVLMLHRTRALMVRQRTMLVNAIRAHMAELGIVARVGMPQVNALLAVIADEADDRLPPLARSCLQGLAAQLMSLEGEITAAGQRIHAWHRSNEASRRLETIPGIGPITASALAATITDPSLFRSGRELAAWIGLVPRQNSTGGKARLGRISKQGDPYLRWLLVVGAMTVIRHAKRRGTANPWLAELIARKPTKVAAVALANKLARTAWSLLRDGGTYQTPATAGAA

SEQ ID NO: 140908 - protein, 384 aa, unidentified
MKVVCGLDVHKDSVFCCILCANGEKIQHKFGVLTEELVTLRDLMVSEGVEECAMESTSIYWIPIWRVLEGSVKLHLVNPYFIKQLPGKKSDVNDAEWIATCLSKELIASSFVPDDKIQRLRQYDRRIFDLNVSISRNLVKLDQCIQRCNIRISNYISTTDSKGYRSIVKLISQGVTDAEVLVKELHGRTINRHGRETLVKALTGVVRETDIDIINQLVEEIELQQRHKDEAQKKMTALCMEWFPQEVENLQTIPGVKERSATSIIAEIGTDMTHFQTPKKLVSWVGLRPRNEESAGKIKARGITHGNRFVRKTMIECSWGAARMKESFFAEFSYRQCVERRKNKMKVQVAIARKILVAVWYVLSQGTQYIKPTDHYTAAHMTAV

SEQ ID NO: 140909 - protein, 423 aa, unidentified
MDILYERVAGLDVHKDTVVACVRSVTEGKTTRECRTFASTTDALGELRAWLEQYRCTHVAMEATGVYWTPVFRILGEGGFELILANAAHIKNVPGRKTDMNDAMWIADLLACGLIKGSFVPDEKVQHLRALTRTRKQLVREQTRHVQRIDKTLAEANIKLSSVICDIMGASGRRMIEAMIGGVHQPNRLAALAGKQIKATPKQLYDALHGRLTDHHRFLLELHLKQWDNLDETIRKLDREVDQRIARMEAPAEGGRAPFRALIELLTTIPGVSAVAAPSILSEIGADMSRFPTAGHLIAWSGLCPGHNESAGKRKSSRLRKGAPWLKTMLVQCAWAAKRKKDSYYRAQFFRLQSRRGPQKAICAVAASILTAIYHILKDGIEHHDLGAAYLDRRPIALNVSRLVARLKKLGFNVQLQPIAEAA

SEQ ID NO: 140910 - protein, 316 aa, unidentified
MSEALLPLGIDISKTDFHVALLKSAKRSKYEHFSNDTEGFRQLSQWLDQPGVGPVHACLEATSIYGHALALYLHQQGHQVSIVNPLRVKGYSKSQLSRTKSDRADAKLIAQFCRDLKPAPWQPSAVEVSQLQGYTRRLDALEHMLTEEKNRLQVTPQDFEADIVAHIQFLQGQVETVKKRLREHIQAHESLQSQQALLTSIVGVGESTAARVLAEIGSIEHFTSARQLAAFAGLTPQEHTSGTSVQGKTRLCKIGNRRLRKALYFPALTWWRRCPQARAFWRTALSRRQGQDAGHWCFDAQAHARHLWHPQVGKTL

SEQ ID NO: 140911 - protein, 416 aa, unidentified
MDDEVYYERCAGIDVHKKLLVVCLRIGRKSEVKEFGTLTHEIREVVAWLKANGCQMVAMESTGSYWKPIYNIFEQEGLPAMVCNAYHIKNVPGRKTDVNDAQWIARCLSQGLLNPSFVPDRQQRELRDMTRFRKSQIEERSRNVNRLQKFLEGANVKLGSWLSDVEGKSATKLLELIIGKPDFTIDDVASCMHGGMKSTAEELFLSLEGSIIPTQREFFAHVMNVICGQTAQIEKTDTMIQNSLNANYKAAVETLDAIPGIGRVSAEQIIAETGTDMGRFKSQHSISKWAGVCPGNNESAGKRKSGRTPPGNKTLKSTLTQCAKSAKKNKNSFFSAQYNRLVSHRGKNRATMAVAHSMLIAIYFVLSGCQFHDLGVDYYNQFNREKKINSHVKHLSKLGVTIPDEILRAAIERPPD

SEQ ID NO: 140912 - protein, 391 aa, unidentified
MRRIAPPVRSMAAAREYDNAIFVALELSRSTWLIAVSLPDSEKVSKYRVDAADTTALLNLLARLKAQAERRCSEAVRIVSIHEAGLDGFWVHRLLQANGIESHVVDAASIAVERRKRRAKTDRIDVEKLLRTLMGWARGERKICSMVRSPSPQQEDERRITRERETLIAERIKHVNRIKGLLATQGVFEYEPLRKDRRQRMEELRCWDGRPLPPRLQAELLRELERLELVLGQISKIETERDLALQQAATVETTSEGNNAGALLVRLRGIGPEIASVLSSEAFFRDFGNRREVAAYAGLTPSPWQSGGIDVEQGISKAGNSRLRRTMIQLAWLWLRNQPGSALSRWFHERVGDRRGKIRRITIVAVARKLLVSLWRYVAQGVIPAGAELKA

SEQ ID NO: 140913 - protein, 488 aa, unidentified
MSATGQQEGKKDPTLNARAPKRKARGSNCHQGKGHQRRSKLTITNPDAAGIDIGAQVHYAAVPEDRAPVSVRSFGAYTAQLDELVQWFKDCGIKTVAMESTGVYWIPLYQKLEEAGFEVLLVDARQAKHVPGRKSDVQDCRWLQQLHSYGLLRAAFRPEDSICRLRTLQRHRKNLVEYAAMWVQHMQKALNEMNLHLHHVLSDISGLSGLRILDGILAGERDPAKLASLAHHRVRKSRAQIEAALTGDYRPELLFVLEQSLQNYRQIQQQITQCDLSIEKQLVKMTDGPAPRQAAEPMPSSPELGGGKSGKRKPPVALETSLAGHLKRILGVDLTTIPGLNVLAILTLISEIGTNMTKWRNEKAFVSWLGLSPNNKISGQRVLSSRTRKVVNRAATILRLAAMIVGKTDTPLGSFYRRKRAQLGGPKAVTATARKLGCLVYRLIKNGQGYNAPDLHTYELKYKDQILNSLRKRANTFGFDLVELPKAA

SEQ ID NO: 140914 - protein, 350 aa, unidentified
MSQNLNSAVAVIGIDIGKNSFHVVGLDDRGAIVLRQKWSRGQIEARLANMPACLIGMEACVGAHHLSRKLKALGHDARLMPAKYVRPYSKGQKNDFRDAEAIAEAVQRPTMKFVATKTADQLDLQALHRVRERLVSQRTGIINQIRAFLLERGIAVRQGQRFLRAELPRILATPPEVLSARMVRVISDLAEDWRRLDQRIDCLSSEIAVLARQDAGCERLMSVPGIGPIISSAMVAAIGTGDAFAKGRDFAAWLGLVPKQISTGDRTILGKISKRGNRYLRVLFVQAAWVVLIKPMSWERHGLKHWIEAARKRLHRNVLAIALANKLARIAWGVLAGSGRTFEASKLQAA

SEQ ID NO: 140915 - protein, 419 aa, unidentified
MDSSKTQKVKRINPRTMIVAVDIGKGFHVGYFRAPNGEERKPFLFFNSAKSFNEFWHSAQEFSRNHDLEEIVVGFESSGPYAEPLFHYLRKKPVTLVQVNPFHTKRVKELTGNSPNKTDRKDPRVIADVISLGHALTLVVPKGPSAHLRRLTQARERVIKRRTAALNQMQDLIFVIFPEFLKIMKGISTKTALYLIKNHPTAESIVGLGLESLKTLIRTTSRGKLGPQRGEDLFHAAQSCVGVQEGKGSILLEIEHLLSQIGSDNRFVASLEKQMEEYLEEIAYSQSILSIKGIGTVTTAGLIGEVGDFREFGTISEITKLAGLDLFEISSGKHRGQRHISKRGRPLMRKLLFYAAINMVKSNGILHKPYQEMLSRGMLKMKGLIAIARKLLRIVFALARDNTVYMEDYCRYQHLKLAA

SEQ ID NO: 140916 - protein, 342 aa, unidentified
MVYVGLDVSGKSLVAYAVNERKQRVFEGEQPASRVGLRALVRQIGGGLKLVAFEAGNQMKWIADALKTLDGVQVHVVHPNEVKWITESRGKTDRVDAKKLAELARAGILPRAVHVVEGPVRELRELVSARQQLQRKRVALINTIRGYVYQEGHRLPEKFFAGAAWREKLARVSVSAPLRLIIQTFMTSIEALVVAEQQLTQRLLAIEDRRCPLLESMPALGALASRVVLSAVDEAQRFDDQKAVANYGALAPTIYQSGAVRHLGRINRDGRQEVRRVLLQCAHTVVRMKSAGAKPLQQFYARIAKRRGKKIAVVALARKLLTTAYGVLKSGTPYDPRKLQPA

SEQ ID NO: 140917 - protein, 334 aa, unidentified
MSYSYFVGIDVSKATLDVCIIFPGSGQEQIHLKINNDQKAFVKLFKDISIRFGKPDDSWLFCLEHTGVYALPICTFLAQNNLTYTLVPALQIQKSLGIRRGKSDKSDSRDIALYAMKFNDQMVFHTLPDQLLQKLQLLLAQRERILSTKLAMQVPIGESTGFVPEELMKTIKKSTQRVVEMLEKELKKIEDELSDLIRSDQRIYKVFKLIISIPGVGPQTAYHLIMVTKCFTTFDNPRQLACYCGVAPFERTSGTSVRGKAKVSHLANKKLKTLLNMCALSAKSVDPQIAAYYQKKIQEGKHVMSVLNAIRNKLLHRIFAVVNRGSEYVKLQKC

SEQ ID NO: 140918 - protein, 354 aa, unidentified
MSQKLNAAIAVIGIDIGKNSFHIVGHDHRGAIVLRQKWSRGQVETRLANLPPCLIGMEACVGAHHLSRKLQMFGHDARLMPAKYVRPYSKGQKNDFRDAEAIAEAVQRPTMKFVATKTADQLDLQALHRVRERLVGQRTGVINQIRAFLLERGIAVRQGLRSLRSELPGILATRTDVLSPRMLRIIEDLAGDWRRLDERIEGLSSEIETLARQDKACERLMTVPGIGPLISSAMVAAIGTGDVFSKGRDFGAWLGLVPKQISTGDRTILGKITRRGNRYLRVLFVQAAWVVLVKVKCWERYGLKSWIEAAKKRLHHNVLAIALANKLARIAWSVLARGRNFETRTINGEIAQPA

SEQ ID NO: 140919 - protein, 361 aa, unidentified
MNDTYYIGLDVHKQSVSYCVKTASGEVVQEGKLAARREDLRQWATGQPKPWRGAMEATLFTAWIYDTLEPYAQELQVGHPARLKAIGCAKKKSDRLDARTLSDLLRCDLMPTCYMLSPEMRNLRRLLRYRQLVVRQSVRMQNKIAGLLMETGAPFVKAKLQGRKYFNQLLQELEEVPDSVKDLLKMSRGALEMFDSCQKRLVKELLAAPELAARVERLATIPGVGTLTALTWALEIADPERFSSRGQALSYCGLTTALRSSAGQEQRGPLSKQRNAWLQTALIEAAKLAPRWNQQLAAVHERELARGHRNRATLQVARKLVAYLLAVDKSGQPFQMRSSPALAGVFSTKKELQASAALQPA

SEQ ID NO: 140920 - protein, 388 aa, unidentified
MHLTTNGFEDRTVIRADLGAIFVSLELSRSTWLITSLSPGAGEKMSKHSVAGGDVAGLLMRLSQIREKARGRTGKSFPFIVVQEAGLDGFWIHRVLESKEIESHVVDAASIATSRRRRRAKTDRIDGETLVRALLAYKRGEPRVCAMVRVPTPEEEDRRRVSRERKTLTAERVEHVNRIKGLLSSQGVEYEPMHRNRRQRLEQLRTGDGRSLPEHLNRQIRRELDRLELVLEQIKTVEAERDAMLAAAKEARAPTPAAMLMDLKGIGAEFATVLWSEGLFRKFDNRRQVAAYAGLAPTPWQSGTIDREQGVAKSGNPRLRTTMLQLAWLWLRHQPGSALSRWFLERVNRNGGRFRKTMITALARKLLVALWKYVTAGVVIEGATMRTA

SEQ ID NO: 140921 - protein, 428 aa, unidentified
MPYKIAGIDVHKRMLAVVVSDVEVHGEYAFERRQFGSNPAQLRLLADWLLEQPVEEIVMESTAQYWKPVWAALERYWTPTCKKREGAGAMSGTQHLAQAQSNRARQGRKNDFVDAERLVKRLVANELTLSFVPEPEQRLWRTVTRTKYQLTRHRVQLQNRLEALLEECHIKLSSLVSDLLGVSARRMVQALSDGETDPAALAALANYHLRATQEQLRDALGACQELNPVYRRLLKLALEELQLIEKQISQLDQEIADLLRPYQNQIQRLAEVPGLGVDSAQQIIAEVGPTAATFPSAGNLSSWVGASPGDDESAGVSHSHRSPKGNRQMRRLLNQAANAAVKYQGGIFQILYRRYVPRLGHKQTIGVIAHRLCRLIWKILYQGVRYEERGPDVRKKSQRHRAARMIRELQSLGYRVEQANSQSADVPA

SEQ ID NO: 140922 - protein, 409 aa, unidentified
MERLIERCCGLDVHRDTVAACVRVPGANGQRQQEVRTFGTTAAELLAVRDWLEAHGVTDVAMESTGVYWRPVFYVLEEAFTCLLVNAAHIKQVPGRKTDIKDCMWIAQCLEHGLLRGSFVPPAPIRELRDLTRHRKVLIQERTRAANRVHKLLQDAGIKLASVATDILGVSGRAMLEALVHGTTDPAVLADLARGKLRKKLPALRQVLAGRFRPHHAFLVGQLLAHVDYLDEAISLVSEEVEARLAPFVEPLTKLDTVPGINKRTAEVVIAELGVDMSFFPSDRHLASWAALCPGNNESAGKHKSGKTRKGNRWLRMALIEAARGAINTKDSALRARYRRVMRHRGHNKAVVAVAHAMLRAIYHMLAAGTTYRELGADYYDRRHQERVTRRAIQLLERQGYRVVLETAA

SEQ ID NO: 140923 - protein, 388 aa, unidentified
MIYVGIDIAKLNHFASAISSDGEELIKPFKFANDTDGFQLLISKLDPLDKDSLIIGLESTAHYGDNLVRYLVAKNYKVCVLNPIKTSTMRKNNIRKTKTDKVDTYIICKTLMMQESLRFVTFYDLDLMDLKALGRFRQKTIKQRTRLKIQLTSYVDEIFPELQYFFKSGLHQNSVYALLKEAPTPEAIASMHMTHLAHLLKVNSHGRFDKEMAQQLRVLAQKSVGASDSSLSIQVTHTIQQIELLDSQLERVEAEMTKIMKFNDSVIMTIPGIGYINGGMILGEIGDIHRFSSPNKLLAYAGLDPSVYQSGNFQAKKTRMSKRGSKVLRYALVNAAHNVVKNNTTFKAYYDAKMAEGRTHYNALWHCAGKLVRIIWKMMTDNLEFNLD

SEQ ID NO: 140924 - protein, 428 aa, unidentified
MTSQEDRLHRFHELRRTIRGDDSIMVVGVDVAKDRHHAFFGTANGKTLWKKLIFDNSIQGFNSLRTLADNLMTQHGLKRRVFGVEPTASYHKPLAEHLIQNDEQVVYVSNVVVKNNRASLDGRWDKNDTKDAANIADLISRGRCQFYDLAEGDVRELRSLLAYRAKLKKQEHALRMRIRNTLLAQYFPELDKQMPQGGQDGLILDILAQGFAPDQIAGLSLEAFRHQLRLQERHIVQEERLRTIWEASRKSIGCALPEAAAWEGQMLVEQLRQIRRIKQELEIQLKTVGKRFPSYRYLLTIPGFGPIVSTMTIAAIGDANRFTSRKQVLRLAGLDLCAYRSGNRSESAVPVISKQGKAGLRYALVQAAAIASYKDEVIRHYFTRLLKGRELERGIKLKMRVKLAAKLLVIAWTLMKRHEAFDPDYFRV

SEQ ID NO: 140925 - protein, 384 aa, unidentified
MRHVEQTEAARDRAVVFVAMELSKTSWLLAARASPSGKTSSHRLNGGDVAGLLALLRRLQAREQREGGHDVEVILGYEAGYDGFWLQRRLAAEGITCWVMDPGSLQVDRRARRAKTDRLDAAMLLRALMAWCRGDRAVCRMVQVPSVEREDARRTHRERQRLIAERVQHVNRIKGLLATQGIYDVQPLRRDRWERLDELRTGDGRELPPRLRREIEREFKRLELVLEQIEATEAERDAAVAVPAADDADAAKVVQLAKLGGIGTELATVLVREALHRSFTNRREVAASAGLTPSPYASGERHRDQGISKAGNPLLRKAMVELAWLWLRYQPDSALARWFTERVGTVRGRMRKITAVALARKLLVALWRYVRTGLVPEGARLKAA

SEQ ID NO: 140926 - protein, 347 aa, unidentified
MEHYAGIDVSLELSGVCIVDAKGKIVKEAKVVSDPDSVVAFLRELGLSIERIGLEAGPLSQWLHAGLTKAGFETLLLETRHVKAALSAMTVKTDRRDARGIARLIRMGWFRPVHCKSVDSQEIRALLVARKLLLGKLLDVEFSIRGILRGFGLKIGMVTRQGFEARVRELSAGQAMLEQVCAAMLAARSGLQTEYAKLHKTMLAIVRKDQVCRLLMTAPGVGPVVAITFKTAIDDPTRGAKSKAVGALFGLTPKKYQSGETDVTGGITRAGDEMVRTALYEAANILLSRVTRFSALKRWGMDVLKRRGTKRAKVALARKIGVILHRMWLDGTTFRWSKTERAAIGTA

SEQ ID NO: 140927 - protein, 459 aa, unidentified
MNRRERREMIRKMQSEDLSLEVVHPHAAGIDIGNESHYVAVPPTRDPQPVRRFGCTTAELKTMAEWLKQCAIRTVAMQSTGVYWIAVFDILEEAGLEVYLVNARETKNLPGRKSDVQESQWLMKLHTYGLLRNSFRPSRQIRMLRTYWRQRQDLVRSGGRHIQRMQKVLTQMNIQLANVISDISGTTGQTIIKAILAGERDPHELAAYRNARIEASEEEIAQSLEGNWQDDLLFVLGQEQSAYEFCQKQLMECDRQLSHCLAQLEDRSQGATMPQETRKNRLRSKKGNKPQFDLRAELFRRSGTDLTQIDGVDVMTAMTIVSEVGWDMTKWKTENNFVSWLKLCPDNKISGDKVIGKGRMPTNNRATSALRMAASNLRLSGTYLGAQFRRLRSRLGAPVATKAMAAKLARLIYRMLHYGMRYVDQGAEFYEAQYRKQQVSYLKRKALKLGLQVIEVVAA

SEQ ID NO: 140928 - protein, 368 aa, unidentified
MEAVRAFVGLDVHKATISVAVADAGRGGEVRHFGTIENTPTAIGKLARNLARRHGVVEFVYEAGSCGYNVQRQLAGMGLTCRVCAPSLTPRKPGDRIKNDRRDAIALARLHRAGELTYVWVPDALHEALRDLVRARHAACQDVRRDRIRIQAFLLRCDLRFDGKPWSTRHRRWLANRQFNHPAQQVAFQTYLNALEHDEAWKVEVEAQIRDLLAGSPWAKQMQALQALKGVGPVVAATLIAEVGDFARFAHPRQLVAYFGLAPGEHSSGGTVRPRGITKAGSSIARTVLCEAAWNYRTTPKVGQWMKERCPPVPQDINALAWKAQLRLHKTYSRLTARGTRSVVATAAVARELLGFVWSIGQRVPLGA

SEQ ID NO: 140929 - protein, 349 aa, unidentified
MIIGCDLHTRYQQIAMLEEETGEVVTRRLEHENGEAKAFYAKLVKPSRIGIEATGYTQWFERLVAEQGHELWMGDAAQIRASEVRRQKTDTRDAELLLDLLRTERFPRIWVPSAAERDSRQLLKHRAKLVKLQTSLKNQLHFLAMSQGLCRKRRLWSGRGRAELEALPLVPWASERRRELLALLDDLEPKIERLSEAVKAEAEGRADARALMQHPGVGPVTALAYVLTVGPVERFASSRALVSYLGLNPREHSSGGHQRLGAISKQGNTMLRWLLVEVSHNAAQFDPELRRKYQRLKFRRGGQVAQVAVARHLAVRLYWTLRQTSAPPTPVRMPGSPGSAVVDFGPSYV

SEQ ID NO: 140930 - protein, 452 aa, unidentified
MAQAKPQVIDDEEHERVYERVAAVDVAKDTGMVCTRTPHRSRPGARQSTVWTVKARMTAIRALGRQLTKDGIEMVTLESTSDYWRIWLYVLEACGLAVQLVNAAQARNLPGRPKTDKLDAMWLARLTEMGLLRPSFVPPAAIRALRDYTRARTRLVQERTRCFQRLEKLLEGALVKLSSVASKLTTESAKDMIKAMIAGERDPHTLAALARTRMKAKHDELVEALAGMFDDHHGELAQILLDQAAFCDARIAQLTARITAAVAAMPAAWGVDADGTTGPDAGTGPDAAALPAVQRLAEIPGVSPDLARSIIAEVGLDMSRFPTAAHLVSWAGLCPRARQSGPRTRAGKKNQGDSWLRNSLGQAAIGAARTTTTFLGERYGRIARRRGKAKAQVAVARSILTIIWHLLADPAVRYADLGAGYYQTRTDTDRKLRNHIRQIQALGFEVTLTKAV

SEQ ID NO: 140931 - protein, 412 aa, unidentified
MEVLYERCCGIDVHKSSVAACIVLERGQKPQRHLRRFGCTTHELRELAEWLRSFDVRHVAMESTGVYWKPVWNVLEEHFHMVLANAQHIKAVPGRKTDMMDCQWIAELLRHGLLRGSYVPSAVIRDLRDLTRTRATLSQEQSGISSRIQKLLESANIKLASTVTHTMGKSGQAILDAIVNGEDSPERLADLALGKLRSKIPQLQLALDGRIRDHHRFLLDSLLRQYRFLEAEIQALDTRLKQLGEQHQELADAVARWISVPGVERVAAWTLVAEIGSDMTAFPSAAHLASWAGLCPGNHESAGKRLSGKSRKGSPWLRRMACQSAWAAVRTKNCYLSAQFKRLAARRGSKRALLAVAHSLLVIGYHLQSKGCVYQELGGNYFDQLHAERLKRHLVKRLESLGVSVTLQTQAR

SEQ ID NO: 140932 - protein, 410 aa, unidentified
MEPILISCAGMDVHEKKVDVCIAHGPLDKPPKFEIRTFSTMTSDLEDLKIWLKKYDVTTIGMESTGVYWKPIFNVMEGELKIVLANAQRLKAIPRKKTDIMDCKRIANLLRYGLLPNSFIPPREIRELRDLNRTRRKFVGMMTSEKNRLVKVLEAANIKLSSVVTKIYGVSSLAIIRSLLEKNKLSKEDISKMAKGKLKKKVDLLEKAVNGKLTDHHRFLLEMHLQNIDYLAKQIKKLDEEIEKKMVPFQKESNLIQTIPGISEVNASAILAEIGADMSQFPDEAHLSSWAGVCPGNNESAGKKKSGKTQKGNSFLKGALTEAAWAASKTKNTSYNAFYHNLVRRKGKKKTLVALAHRMLIDIYFVLKTGEPYQDMGAEAVHERTSKRKERSMIRSLEKAGYSVTKAATA

SEQ ID NO: 140933 - protein, 367 aa, unidentified
MSETIVAYQSFIGVDLHKNTVTLAAVRPDGSLIDRVKIATKCRDRIASWLLTRPRPSHMAVEAVGFVEWFIDDYRGCVDRIDIADATELANRRGKRRKNDPNDARDIAQRLARGECPLGYIADDELMQLRKLGRHWHQLSRLLSRSKHSMRSMLLAANIAGPKLDGAAAQKWILARGYLLKPVQQQAFANFLDIIQLVERQRARLHLQITFANRAPRFRKTVDLLKSVSGIDEIWGCIIAAEIGPFDRFPNSDALEFWAGLTADLKESAGRTQSGHITKAGSRSLRWALCKAALTLCRSDKQQEAIRQRLIRRIGKPKANVAMGRRLLRILYAMIRDEKPFARGPATKHNLGANRARMARKQRKEVA

SEQ ID NO: 140934 - protein, 389 aa, unidentified
MKNTIVHHEGAASLEDAVGKVKLSGSIIKIGLDVHARLYVAVAQYDHLLPKPARRFAPMEFVPWVEQLLRAGHAVHVVYEACGFGFGLYRELKALGAHCYVIAPRKLDEHFTRVKTDPRDATTLCQRLSRYLDGNTRELAVIRVPTQEEEQDRHVSRQREQLLRLRQKLEAQGRSLLISQSLPSPAHWWKNQTWSRLRKLLPGWICIRLEVHRPPLLTLQKQIDALSAQLEAAAPADVPLGIGKLSTVVMTREICSWERFRNRRAISCYTGLCPGEHTSGTKRMPGSVTKHGNPHLRAALVECAWRMVRFQPNYPPVKKRLSVLAKGARATGAQRKKAIVAVARHLAVDLWRIHTGRCSAAQLGLSSAETSSCSRGTEKEARTASTIIT

SEQ ID NO: 140935 - protein, 443 aa, unidentified
MSELAVSAVAYVGLDVSQDEAVVCFLLADGREPVSRWAVANSASGAAALVARLAELAVEHGVGELRVGLEATSLYWWHLACALKDAPTLSAFRPCVYALNPKLVHDFRKHYGALPKTDRADAFVIAERIRFGRQLPPPFQIDVRYAPIQRLTRFRFHLAQTLAREKSYFLTFLFLKFSSFGQVHPFKDSFGATSCAVLEEFTTEELAQANLADLASYLDGKGRGRFADPDALAATLQRAARDSFRLDRVLDEPLTLVLGTTMATIRTLQAQLKALDATIARELRAIPQPLTSVPGLGPVWSAGLIAEIGEVGRFTDEAALAQYAGLVWKAHESGQFQAEDTPLAKTGNTYLRYYLVEAANSVRVHCPEYAAYYQAKFAQTPKHAHKRALVLTARKLVRLIDALLRTGALYRPPEARQDQTEVHLPATNRLSANRRSHRAAAVG

SEQ ID NO: 140936 - protein, 317 aa, unidentified
MYCIGIDVSKQELVTYDGERRRTFPNTADLEELAAFLKKKDGEVTVVFEPTSTYSRPLELLCRTRKVRCWCLNPRDIPQLREVSQGRSKTDRTDAELLWQYGQDHGPGQLLEEDNLGRALKASLSCYAQAQKARIACQELLEALSHDPTTPTGLIEDLREETKRLKAREKRELAHAQALIEKDERARKGFASLFEIPGIGGLTATVLVALFRRYPGTNRKEIAALVGMDPAEHRSGSSVHGRARIEKPGDGFVRKTLYEATLAAVRYNPAVRALYERLKAKGKPEKAARIAAARKLLFAHAVYHSGQPYQTLEPSGG

SEQ ID NO: 140937 - protein, 381 aa, unidentified
MRKKKCTSGRILKIPSRDKNKGGAPMYYAGIDAHKRTCTIVIIDDRGKKVKEGVVKTDENEIKGFFASYRENVSAVVETCLNWVFIHRILKGYIVDIKVAQTYKLRIIAEAKIKTDSIDAYTLAQMLRIDYIPEIYIPDEKTIKLRELIRARIYLVRLKTRMKNKIHSLLDKNGFHSHPGTDLFGKAGRNFLRTLTIGDPEEGIIARYLEIIEKLEENIKAFEIIVGNNIDESEEIKLLRTIPGIGRISSHLLLAEIGPIGRFRSKERLCSFAGLCPKIYSSGEVERRGHISKAGNAYMRWILTECAQVAIRHSPGLGKIFGRIQRKHGGKVAVIAVARRMLGIVFDVLVKRIEFSEVKAFPKLSRYASNLPISKERSYIV

SEQ ID NO: 140938 - protein, 370 aa, unidentified
MQNTTTLFVGLDVHKDSIAVAYAPEDRSADATFLGPIGTRQADIDKLVRRLQSKAPRLVFAYEAGPCGYVLHRYLTRKGLDCLVVAPSLIPRKAGDRVKTDRRDALQLARLLRSGDLTPIYVPSVEDEAIRDLTRARDDAMRNLKAAKLRLKSFLLRLGLNYTGKASWNDAHLRYLAKLVCPTPAQQIVFQEYLRAVSEQVDRLQRLDSELRDHVSSWRLFPVVEALQALRGVQHTVAVTTVAEIGDLTRFDSPRQLAAFLGLIPGEYSTGESRRQGPITKAGNGHARRALIEGAWAYRFPAKVSELLQKRLEKLPQSIQNIAWKAQVRLCKRFRRLIARGKHPNVAVTAIARELAAFMWAIAKEVKILV

SEQ ID NO: 140939 - protein, 390 aa, unidentified
MILVGIDVAKDKHDCCIINSDGKFPEEVFSILNNREGYETLYKRICSLAVDFTKVKVGLESTGHYSSNLLAFLLDKHLTAYVINPLRVNLFRKGQSLRRTKTDKIDSRNIAHLLMADSSLKPYSLSSYHMEELKSLTRYRGTKVRERTKLKTSIARLVTILFPELEQLVSSIHIHSIYAMLEKFPGSAYIAATHLTRLTALLLKASRGRFGRETAIRIRDTAKQSIGAVSPAKSMELQHTIAHLRVYDQEIGEVESEIEKIMDDVNSPITSVPGIGMQMGAVILAEIGSFRRFDSPDKILAYAGMSPSMYQSGKLTGSYSRMEKRGSRYLRYALFNVTRYVCHYDPGFTAYLSKKRKEGKHYYVAISHAVKRLVRVLYAMEISGNRYQMA

SEQ ID NO: 140940 - protein, 315 aa, unidentified
MSESKVFVGIDVSKDHLDVHMLPDGQSWRVANDEAGCTELSERLSGLSGVLVVMEATNVFWRLAATRLASAGVRAAVVNPRQVRDFAKAMGRLAKTDAIDAQVLALFAQRIEPPVRALPSEQCQVAAELLARRAQLMGMRVAEKNRLATARAAKVRKDISATIAFLEKRIGALDEEIDQWLKSTPIDQSRANLLKSFSGIGEHTAKSLLITLPELGSLSAKQIGALAGLAPFARDSGKKHGQRQIGGGRSAVRAALYMPAITAIRCNHVIRALYQRLVRAGKHHYVAITACMRKMLVILNAMLKSNQPWRNPQEI

SEQ ID NO: 140941 - protein, 353 aa, unidentified
MQYIGCDFHPSFQMIAQLDKKTGELVRRRLGHGEGQGEVQRFYQALPGSWVVGVEATGSTYWFERLLEKLGHQMWMGDAGKIRQQDGRKQKHDKRDARLILRLLLEERFPRIWIPSVAERDLRQLLLHRWHLVRMRARIKNQLQHIALNQGLQKKSKLWTKAGLEQLRKLELEPWARQRRDELLEMLEQMVERIEPLDQAVEQAAAAQPRTSRLQTHPGVGPVIALATVLTMGEVGRFPDSRSWVSYLGLNSSEKSSGEKRWLGAISKQGNPFLRHLLVEGASSAARGDKDLGRVYARLKARKHHGVAKVAVARKLAVRLYWMERTEKSYPEVVRMQGSLSHPVVSSHGRDLE

SEQ ID NO: 140942 - protein, 368 aa, unidentified
MNSITYIGMDVHSTNYTLCAFTIEGQKTFAQTSINPNIKELVKYLETLNIRQGGNAEFVCGYEAGCLGYALYHELTAKGYRCVILAPTTIPTTSVEIKTDKRDARKIAKCLAYGTYSPVYVPSDQDNAIKEFIRMRDDTQSMLKQTKQQINALCLRYGKGYNGNSRWTEKHMQWLRNVKFENAIVQETLSEYLATLEQLCDKVERLDKRIEEFSRMNDYAEKVNKLVCFKGVRTHTAMSLIVETSDFRRFPSAPQYAAFLGLVPGEHSSSDSCHRLPITKAGNSHLRRLLTEAANSYGRARAGRKSANLKQRQQGNAPEVIAYADKANDRLRRKYVRIATRSKANIAKTAVARELACFVWGMMNDKIF

SEQ ID NO: 140943 - protein, 482 aa, unidentified
MGHVGDIGESVATDIPFERVSTTMYLNQRDIPIEIMEDVMAKFKRSKLELIHPNAAGIDIGSASHFVAVPPDRDNKPVREFKSFTADLNGLADWLEACEIDTVAMESTGVYWIPLYELLESRGLTVYLVNARHVRNVSGWKSDVLDCQWLQQLMSFGLLSGAFRPKDEICALRAISRQRDMLIRYQARHVQHMQKALAQMNIQLANVISDIVGETGQKIVRAIITGERDGHILANLKSNRIRAGKDEIEKSLIGNWREEHLFALKQAMSLYDAYSERLTECDRQLETMLAALQVHKVEICQKKRRSNVKNAPKFDLRAHLIGMCGVDLTRIDGIEVTIAMKVLSEVGADMSRFKSAKQFASWLGLCPGTKISGGKVLSGASKRTANRAAQALRMAAVSLKSSQSALGAYYRRLCGRLDKAKAITATAHKLARLIYTMLTKGTEYVDKGQEYYEERYRQRVLHHLTVRARKLGFNLTPVPEAT

SEQ ID NO: 140944 - protein, 344 aa, unidentified
MNYYAGIDVSLELSSVCIVDATGEIVKEAKVESHPDALLKFFKAFGLPLTVIGLEAGPLSQWLYAGLTKAGFVTSLMETRHVNAALSATTVKTDRRDARGISQLLRMGWFRPVHAKSAGSQEARALLVARKQLQHKLRDIELSLRGILRGFGLKVGKVTDRTFEARIRELVTGHPMLEQIAEAMLAARAALLEQFNTLHKAVLKIVRQDEVCRRFMTTPSVGAIVAITYKSALDDPGRIKKSRNAGPLFGLTPKRYQSGETDVTGGISRVGDEMVRTALYEAANVLLSRVTRFSALKRWGLEVAKRRGLKRAKVAVARKLAVILHRMWIDGSTFRWTKTEEVHA

SEQ ID NO: 140945 - protein, 373 aa, unidentified
MPRYSTAFGMDVHLRSTTVCALDAETGEAVTRRFRGNPWGEVAEWMSGFPGPSLAAYESGYLGFAPQRELSGLGVDCVVAAVSRVPRSAADLSSKNDRNDAARMAKAILSHDVTPVWVPSPEIEGLRDLAAAHDAATARLAAAKQRLLAFLARRGYAYGGTTPAGNPRRYWTYDFLRWLDKVRPADDGGIRALAALRSEVEAAAETRDDLLAEYRAAVAAGPLSAEVEALQSIKGCGFALAAAFASEVGDFSRFRSGRQVTAYFGLAPKQRSSADSVRLGGISGAGNALVRRLAVEGSWSYVQASHQPKLMPKGSGVPLEIRMHGRKGSERLLRRRGEMLERGMPQAKANAATAAELVRWLWALGMMCREAGE

SEQ ID NO: 140946 - protein, 342 aa, unidentified
MNHYAGIDVSLECSSVCVVDASGKILREAKVASEPEALIAWFRQSGFEFERIGMEAGPLSQWLFAGMKAAGLAVELLETRHVRKAFEAMPVKSDRNDARGIAQLMRLGWFRPVHCKSISAQETRSLLTARKLVQSKLLDVENSLRGILRGFGLKVGKTTGQTFAGRIEELVHGHPHLQMIAKALLAVRAVLRTEFAAFEKQTRRMVRSDMQARLLTSVPAVGPIVALTYASAIDDPTRFKSSKQAGAHFGLTPKKHQSGETNYTGRISKIGDASVRTALYEAANVMLTKPLKGCSQLKSWAMRIKKRAGMSKAKVALARRLAVIMHRMLADGTPFNATAAAA

SEQ ID NO: 140947 - protein, 345 aa, unidentified
MLYVGLDLSRKRLDWQALDREGERVQIGAVPPDRDGLAGLARRLGDAPVLAVIESMTGARFVHDQLELAGWDVRIADAVKARGIAPLACKTDRIDCWVLAELARLGLVPEIWLPDPSTRAARERARFRLHLVKHRSSLKNRVHAILFQHGVPNGHSDLFGASGRRLLEQLELLEPWASTVAASLELIDTLDEQISGCEAELRRLGADHPYIPLLLTCPGIGTVLAYTIASEIGDIARFASARKLVGYTGLCPRVDQSGERDRRGPLRKNGPNYLRWALIEAAHAGVRWHPPYHDLAERMRTRHGRTRGTKIAAIEIGRRLSEAIWHMLTNNQPFAPAGAAASLAA

SEQ ID NO: 140948 - protein, 414 aa, unidentified
MGSGSIGGVIMFYCGIDWSKDHHNLCIMNAAGACVSQIQFKHTLKGFEQIEIERCKLNVPASECLVAIETTYNLLVDFLLEHAYEVYIVPPQATNAYRNRQRSSGAHTDWSDAALLASIMRTDRDSHRRLSPNTPLTQQMLVQVRLIEMLRRSIQRQENQLRDVLSRIYPQALGLFSELTAQISLQFLITYPTVQQAQMLSLETFKAFCREQHYSRPDLISRRYAHLIEPAPEANSAVVEAYRDHVSILAQLLLPQVSRRNEAKTRLSRLFEQHPDAFIFDSLPGTGDLLAPGLLVKFGDHRDRFPAPSSVQALAGTCPVTEWSGKRRIIKFRRGCDKEFRRISQQFARSSVRKSGWARAYWGEIRPRCASNSHAYRCLANRWLAIIWRLWQDRKPYDEAYHLQQRARRRRPRL

SEQ ID NO: 140949 - protein, 407 aa, unidentified
MEVLYPRCAGLDVHASSITACLRIATGHEVTHQHRTVATTTAGLLELAEWLEAAGCTHVAMEATGVYWKPVWHILEGHFTLVLANAMHIRNVPGRKSDVHDATWIADLLAHGLIRSSFVPPAPVQALRDLTRTRKQLVGEIARHTLRIQKTLEDANLKLTRVVSDILGTSGRAILRALIAGETDPERLADLTTGRLKATRAQLVEALHGRVTAHHRFLIELHLTQIETLETAVQKLERHLGEALAPFRAAVDLLTTMPGLSETAARVLVAEIGTDMARFPTAGHLVSWAGLCPRLDTSAGKRHSTRIRHATPWLKTTLIQGAWAATRKKDCYLHAQFGRLKSRRGPKKAIVAVAASMLTAAYFMLRDGVEYADLGGAYFAHRDVEQTKQRLLRRLRDLGVEVEVKVA

SEQ ID NO: 140950 - protein, 447 aa, unidentified
MKKETRKKNVVNLPLVNPNAAGIDIGDTIHAVAVPEGRDSSNVRTFGAMTVDLELIVKWLKKCKIDTVAMESTGIYWKPLFGMLIKSDFEVYLVNSKQIRNVSGRKNDEDDAVWIQKLHSCGLLKSSYLPDDEQESLRTLVRFRKTLISDRNRCVLRMQKALGMMNVKIHTVIRDIAGKTGLAIVQAIINGERVPENFLPYVDRNIRADRETIVNSLHGNWRPEQIFLLKENFAGYKYYEERIVVCDAQIEIQLQKYQLEAFPGAGVDSKVVSKKHANKNKPRFDTASYFKSILGVDVMAIYGVSDIIALEILSETGTDMTKWETPKHFVSWLNLCPNNKISGGKIISSMLMKKKPNTASQAFRNAANAVQRSDNWLGDYYRRMKAKGGNKYAMVATANKIATIYYKMVRYKQEFNPLDLKEYQQKYKMAKISYLERKLNDLKKDVA

SEQ ID NO: 140951 - protein, 321 aa, unidentified
MSWIGIDVAKHSFTAAQRSGQRFTIETFPMSVAGWRRFCQWAPEDSFQVCLEATGPYWLRLAQWLEQTAIPYSVANPRKVRRFAQASEQRSKTDPIDATILVRFAETFELAPVSPETGPSRTLRALSRRILQLQIELNRERDRLEKAQADPATPESVLSSYAVLHNELQRLIDDLEHQAKRLILQHSTLSPAYQLLLSIPGIGDKTARTLLAEYGQQLLSASPKQMTRFAGLDVVVYESGSSVRKQPRISKQGNWRIRRALYLAALSAIRYNPTLAPYYQRKRQQGLQPKQALVAVMRRLLHLVYGVLKHQQPYNPDYTMT

SEQ ID NO: 140952 - protein, 343 aa, unidentified
MKNSNVIGIDLAKKVIQICQVDKHGELISNKATSPSKLKSLLANSTPSIVAMEGCGSCHYWARLAQKYGHDVRIISPRRVKAFLQGHKTDANDALAIAIASTQFGMIFSQIKEEKQQSLQTLETSRKFLDKELTALNNHLRAYLYEYGITMNRGQRSLRETMVIVLDDLDTRLPMCLKSTLKLLWERYQFTVIQLKETEKCRAVLVKQLEPCNRLMALEGIGEVCAAMLYASMGDGREFKNGRQASVYIGLTPKQHSSGGKTYMRGIDKQGGNKALRAALYQGALSVISRLPSEPRTVKEAWLLKLVERAGIKRACIALANKTVRTAWALLTTGKSYEPVLLS

SEQ ID NO: 140953 - protein, 415 aa, unidentified
MEPMHQRVAGIDVHRMKHVVTILITREDGSVSSETREFGGFKRDLRALVAWLQTHRIQQVVMESTGIYWKSVFGHLEAAGIPALVVNAFYVKNVPGRKTDVGDSEWLAQLARFGLLRGSFIPPKDLRELRVVSRYRRKLTGMLAGEKNRLHKLLDDAGIKLGGVVADIDGVCASKMVKGLIAGGNPVELAALGRGKVRATTDILEASMDADLSARHRLVLDLAYDHLRYLEGKLAVLDRYLLAAMQPYAWAWRLLQTIPGIDAISAAMILIEIGDDPHRFGSAARLASWSALCPGNNESAGKRKSGKTRHGNPIVRYLLCEAANAARRTKTVFRAKYQSLVIGRGHKKTIIALAHKLVRTIYSVLSRRKPYRDSTVDYEAASVAKNAPRWIRALKKYGYWPQVAAPNPPTAATAS

SEQ ID NO: 140954 - protein, 343 aa, unidentified
MQAITTIGLDIAKSVFQVHGVDPDGHVVVRRQLKRRYVLAFFEKLAPCLIGIEACASSHHWSRQLQALGHDVRLMPPSYVKPYVKRQKNDGTDAEAICEAVSRANMRFVPTKTPEQQSGLVLHRTRHLCIRQQTSVINAIRAHCAEFGIVAPVGRRGIEELLNVIANANDEQVPEIARACLSALGDQLHRIKAQILAFDRMIGAWHRSCAASKRLDEIPGVGPALATALVASIADPRTFRSGRDFAAWIGLVPKQSSSGGKPRLGSISKQGDRYLRGLFTAGALAVIRYAKIHRIGHRPWLTALLARRPTKVAAIALSNKIARMAWAMMARGERYREPAALAA

SEQ ID NO: 140955 - protein, 341 aa, unidentified
MNAIGIDTHKATLAACVVDDLGGAVAERTFANDPPGHAALLGWIRTIAPGARIGLEGSACFGAAAARSLLEAGETVCEVPPQLSHRERLRTRRAGKSDPGDALAIARVAAREPDLPPVRTADATREIQLLVEAREDLVTEATRVRNRLHADLVVLLPGYQVSVANLVALRNRRSVGARLRALRGIQAELARGRLARLGRLMAEAKTLETRLDGLVGDHPLRTLPGVGALTAARIIGEVGDVGRFRSADAFAMLAGVAPIPASSGQTSRMRLNRGGNRQLNRALHSIALSQAWHHPPAKAFIARKRAEGKTWREALRALKRHLARVVYRLLVDPPIVAQPAA

SEQ ID NO: 140956 - protein, 400 aa, unidentified
MKTVLSVDVAKNKSMIMLMNNDGEILIDTKEIKHNLGEFEKVKEEIEEINPENLTVFMESTGTYHLPVERYFKENGFNTLVINSLTTKNNFDTIRKTKTDKKDCYRLAKLFFVNEVEYHEISKKDLYANLKAMTRQYFYLTQVNIRCKNRYKRLINICFPEFEGFFARNRIYEDTALNFIKAFPHAYIVREKRIDALYNNLQKVDARHDYYYKRLARQLKDTAMDSFPGVDKDHADVKNLSDMANILQENNKLIDEIRKNMIELAKQSPYFEIVNSFYGIGEVLAAELLGELGDITRFDNHKQLIAFCGLDPAIVQSGKSINVHGAISKRGDKYARWILFNISQMVVKLGHQYPSHPVYNYYLIKKAEGKYYYESLTACSTKILRMLYSMCKNNKRFLEE

SEQ ID NO: 140957 - protein, 313 aa, unidentified
MAQILPTVGIDVSKDWLDVAVRPTKDLFRVANDAAGWAELCRRLKAIEPRAIGVEASGGYERDLTHALLAADLPVRMVNAWKLRQFAKAAGLLAKNDRVDAHAIAWFTATLPSRGVRRDPAREHLAELVRARRQLVDARQAFANQLEHMRDGLLRRQMARRIRQLEADEASLDQRIVQAIAAEPTFAARHELVCSMRGVGPVLGSTLIALLPELGSVTNRQIAALVGVVPYDFDSGKMRGLRCIFGGRADVRRVLFMAAQAAAIWNPDLKAFKQHLRAAGKKPKVAIVAVMRKLIVTLNAMLRSGTKWHPKTT

SEQ ID NO: 140958 - protein, 386 aa, unidentified
MQKLNDLSRCLTPLEPDSTLIAVVEMSLSSWLVAGIVPGVERQPLKKLAVDESVLLKLLHRWREEAEKAGYMIKRIAVAFEAGRDGFWLARWLRARDIEVHVIHTSSVAVSREHRRAKTDRLDSELLKRAFLGWLRGERDHCKMVAIPTIKDEDGKRPNRERESLVGEQSRIINRIKATLVRLGIRGFNPKLKKAAERLEGLRTPEGEPIPPNTLSELYRDMERRRLVRGQIRQIESARLDRLEHAPGEGAHAMVRLLARVMGIGIETADMLVQEVLSRNLRDRRAVARYAGLTGSPDESGKKRREKGLARSGNARVRRGMIQLAWRFLLFQKDSALAQWFRARTENARGTRKTMIVALARKLLIALWRLVREDVMPDGVILRPAQ

SEQ ID NO: 140959 - protein, 326 aa, unidentified
MQGKEVSEQETEGEAYVGIDVCESWLDVHVLPAGKAFRVANTSQGQRQLKRRLVADKVVLIAIEATGKWHRQTHRSLHASGCRVAIVNPLRARLFAQAIGLLAKTDRLDARMLALFASNLAPSAKPPLSQAIEDLKELVQARDSAVGEQTALQNQLASAATTFLRRQLKRRLGRIAIDIAALAREILLQIKADEGFARRYAILVSIPGFGPIVAATLLAQLAELAECSDKQIAMLAGLAPVADDSGKRNGQRIIRSGRPAARRVLYLSALSATRCHAAMKDFYQRLTAAGKPPKLALVAVARKLLVLANALLSNDRVWQPLPPNHA

SEQ ID NO: 140960 - protein, 431 aa, unidentified
MPRRERYPLGRRARLELDGCRHDRRRSHWVSLAGSTRHDVALIDEHGTVVARTRIDTGATGFHMLLALIAEHGGSVDDTPIALETDKNLLVVALAKAGFTVYPINPRAVARYRERYGQAGGKSDPGDAAVLAHILRTDRHLHRPLPAVSEEGRAVKALARQHQEAIWALHQTVSRLRSVLLEFYPQALQAFPNLKHKAALTVLAAAPTPAAGQRLTRGRVVALLRRSGRGNHPALVEQILTDLHTPALGQPPRVEEAYGHTVRGLVAIVIAMGQAVDDLDTELAREFDQHPQAAILRSVPGLGPVLAARVLGEIGDDPARFDNPQGLRAYAGTAPVTIASGRLRYVKARKVRNKRFGDACHWWAYTMLTKSAGARAHYDRRRAAGDHHNAALRNLANKLLGRLWWCLVNNQPWDERGAWPDHGHTENPTAA

SEQ ID NO: 140961 - protein, 372 aa, unidentified
MLYLGIDQHAMQLTIDLGDEEGNLVDHRQVKTEPEKLTKFLEGMQQRTAPEGGYVAIVEVCGFNGYLLALLKQYGCVKTVLVQPEHRDKRKTDRRDARRLRHLLWENRRRIMQGKRIISLRIVRPATKRESDSCQLTMLRTRLIRLRTTAINKVKGLLRKHNLQHDCPTKGIQTKGALAWLQQIELDEIDRLEMDILLARWKLYNEKLSIVDNNINERQRQDAKATVIRSIPGLSAFGSLAVASRVGDHRDFPRSGSLANFWGLTPSSNSSGKTIRLGQITKEGSSVVRYVLGQAVLHVLRQDAWMRNWYQKIKRRRGSKTARVAVMRRLATIIWSMLTYDVPYVKGGPAELRKVIELKQAFPQKATATSLT

SEQ ID NO: 140962 - protein, 310 aa, unidentified
MDIIIDKGCGLDVHKETVVACVKGSGIKKEIRTFSAMTGDLLRMKGWLTDLGITHVAMESTGPYWKPVFNILEDSFEVILANARHIKNVPGRKTDVKDSEWICKLLRSGLLTASFVPPQAIRDLRDLTRYRQKLIQAASAEKNRIQKVLEDANVKLSSVVSDTFGVSASRMIKAIMSGNFDTDSLAELAVGRLKGKKEKLKEALQGHFRDHHGFMIQASLDHIASLEKIIADLDRQINEKLKDYHRERELLASIPGVKEQGSSSILAEIGAAMNVFPSEGHLSAWAGMSPGNNESAGKKKVARQPTAIKT

SEQ ID NO: 140963 - protein, 347 aa, unidentified
MNKQGPAWVFTRTVDKGAKLAALHDKPGNTLIMTDFTHFVGIDISKNRLDVHSAPDNRTFSVGNTEVGIADLLAQTAQEGVAYGCEATGGHEATLLVGLSEAGRSVWCLHPADVAAHKRLIGRRAKTDPLDARAIADATAAVCTQKPPTQLTRSRRAIKELSRVRRGLSQQCTTLASLAAAADDAVALDTVERLLASLKTEINALSREIERRIQSDTETARTAELIRSVPGAGAVLAAELIASMPEIGAVSSRVAASLSGVAPHPRQSGNTARTGRCTGGRAVIRRILYMGVMSLIAADSSSFSAKYRALRAAGKPHKVAAIAIARKLIVAINTVLKRGTPWEPFVA

SEQ ID NO: 140964 - protein, 414 aa, unidentified
MDVVYTHCAGLDVHKKVVVAAIIVPDGAGGLLRESRSFGTVTAELLALSDWLMGRGVTRVAMESTGEYWKPIFNILENNFEVILVNAQHISKVPGRKTDVSDAEWIADLLRHGLLSASFIPPVGQRELRELTRYRSTFVKERATLVNRVQKVLESANIKLASVASNVIGVSGRAMLKAIINSTATPEQMAELSKGRLRSKRTELSQALEGRVKPHHRFVLTELLCQIDSLDETIARFDQEIEEYCRPFEEAVVLLDTIPGIARKTAEIIVSEIGTDMSRFPTANHLASWAGVAPGNNESAGKTRSGRTTKGNKPLGVALNQAAHAAAHTKNTYLSAQYHRLAGRRGKKRAIVAVAHSILVIAYHLIKRKEPYHELGGDYFDKRRPDATAKRLVRRLEQLGFQVSLQQLSAPVSA

SEQ ID NO: 140965 - protein, 328 aa, unidentified
MCTLGIDVSKNKIDLCLLTAGPGGKKKHKVLTNEPAVARKVVDWLNAQKCVPESVTVVLEATGIYHENLAYGLHEGGVSVCMANPCRVREFAHGMDILNKNDAVDAFVLACYGELKSPAVWVPPSPEVRKLRALLRQRDAPREDVQRTVNRLEKANSTSTPQEVIRSLERTKSWLNEELARIEKLITDHTDNDPGLKADLDLLKSIKGVKEQVGREMLALLKDGTFKSASQVAAYLGLTPVEKTSGSSVRGRPHMSKTGPSGVRVKLYVAALTASRWNKQAKAIYERLVAKGKAKKAALGAVMSKLVHLCFGVLKTRLPWDENYVATA

SEQ ID NO: 140966 - protein, 451 aa, unidentified
MEILYTNCAGLDVHKKTVKVCLLTQGSNGQSHKEFRTYVTTTEELLKLSDWLREQGCTHVAFEATGVYWKPIFNLLEDHFELLVVNAQHIKAVPGRKTDIKDAEWIADLLQHGLLKASFIPSGPQRELRDLTRYRVRLTEEKAREVNRVQKTLEDTNLKLGDVVSDIMGKASRMILHAIVDGETDPVRLAALAVGRVHASQEALEAALTGKVTEHHRFLLGEHVTQIHHLEQAIDRVTAEITRRFTLPVPPEDTSTSETKASATPERVSDSALLPEAPSASQAALSWAQAVVLLSSIPGISERNAIGILAEIGLHMQQFPTAAHLASWAGVCPGNHESAGKRLSGKTRKGNPWLRCLLVQAAHSASHQKHCYLAEQYRRLTKRRGSKRAALAVAHSILVIIYHLLKNQTTYREKGETFFEERDRQGMEKRLVRQLSSLGYHVELQPIALAG

SEQ ID NO: 140967 - protein, 393 aa, unidentified
MRAGASLTEIRGLPSRGCLLGLSDSCGRPRLFTERTSVGLDVHARSVAAAAIDGGTGELVQARLTPSPGHIRSWLEGLPGPVAVAYEAGPTGFELYRVLTAAGIRCEVAAPSKLQRPAGDRVKTDAKDALHLARLLRMDEITAVAVPTIDQEASRDLVRAREDCRGDLMRARHRLSKLLLRHGIVYYGGDAWTSKHDVWLRREALPQLTSHATRLTFDSGYETVLAAKGRRERLDAAIEQMAADGEFTPVVRRLGCLRGISTLTGFALAVEIGDWHRFTGNTIGSFVGLVPSEHSSGASRSQGSITKTGNTHVRRLLVEAAWHHRPRYRVGKTMRDRWDLAPAAARARGDEGNRRLHQRWVTFSERRKKNTIANVAIARELAGWCWSLAVLEE

SEQ ID NO: 140968 - protein, 382 aa, unidentified
MDVVHRCCAGLDVHKATVVACVRRVGPDGAAEAQVRTFGTMTAALLELADWLAAAGVTHVAMESTGVYWQPVYAVLEGLFVPLVVNAHRIKHVPGRKTDVKDAEWLAQLLQYGLLTASLVPPRPVRELRDLTRQRAQLVADRARVVNRVQKVLESANVKLACVATDVLGASGRAMIAALIAGQTDPAALAELARGRLRGKRAELRLALRGQVTDHHRFQLAALLDQEAHLEGQIARYEARIAAVVAPFAQAAARLRQVPGVGPRAAEVLVAELGTDMAKFPSAGHLASWAGVCPGNDRSAGKRRSGKTTKGSRWLRSTLVQVAWAAARTKGTVFQAAYRRWSRRLGAKKALVAVGHKVLTVIYAMLKDRTDYRERGAPGLAA

SEQ ID NO: 140969 - protein, 309 aa, unidentified
MNHDQKAYCGIDVSKHHLDAWVNGKPKRFSNTVKGVEALMAHAENVHFVFESTGGYERMAAWMLMAANKPASIVNPALVRHYAISVGERAKTDRIDSRIITEFASHVHPEPAKKPSKRQRMLCAYVDRRQQLTEMHTAEVNRLDTAGDPVFRRLVQKHLRWIERELKALETKITETIREDVHMNEASKRIQKIKGLGKICAATLLAHLPEIGTLTRQEVAALAGLAPYCRDSGTTSFRRHIQGGRKRLRGCLYMGAVCAIQHNPVMKEFYHRLVEENHRPAKVALTAVMRKLLIAANSSVKNPDFGLVA

SEQ ID NO: 140970 - protein, 339 aa, unidentified
MLHAGIDVHKRCTQICIENQDGTITERRILTERRRLVEEFGSRPPTRILLEAATESEWVARCLEGLGHEVIVGDPNFAPMYAQRSRRIKTDRRDARALFDACRLGAYRPAYRCSDAHRSVRARVGVRDVLVRTRTKCISMVRSLLRQDGIKPARGSTATFASRMRELGLHEPLASDIAPILALLDTLTEKIRAADQEMAKIASNEVPQRLMSVPGIGPVTAVAFVSALDRPSRFRSAKQVRAYLGLVPREHSSGERSSRGRITKQGTGRMRYLLVQAGWAVLRSRETPASEPLRRWATAVAGRRGKVIAVVALARRLAGILSLCGETGHHSCPDRAAGR

SEQ ID NO: 140971 - protein, 376 aa, unidentified
MREKLRFLGMDVHAETIAVAIAEPDGEVRSLGTIANREDSVRKLIRKLGSPEHLRACYEAGPTGFVLYWQLTQLGVECAVVAPSLVPKKPGDRVKTDRRDALKLARSHRSGDLTAVWVPDEDSEALRDLVRQREAAKQDQLRARHRLTKLLLRTGQRPPLGLKAWTERYMRWLAQVRYTQPAQEVTRLDCMNEVEHMSLRVKRLEEAILEVVKLAPQPMQELIRGLQALRGVAHISAVTIASELGNISSRFESARKLMGYCGVFPSEDSSGKRIRRGGITKAGNAHLRRIVVESAWSYRHLPRVGEKLRKRHEGVPAEITEIAWKAQHRLHKRYRTMISAGKEQRKVMTAIARELLGFIWAIGIKAEAAGKQRLAA

SEQ ID NO: 140972 - protein, 430 aa, unidentified
MKSNTQNAKIEAITEKTLVLGIDVGSETHYVRAFDYRGIEYSKKPFKFSNTEVGFATFKEWILDLKERHEKDKVVPGMEPTGHYWFNLGKFLQDNEMKPVLVNPHHVKKSKELDDNNPTKNDRKDPKVIAGLVREGRYMIPYLPDGVYADLRTASNIRFQLQAELTRIQNRISRWFNIYFPEYKTVYGKPDAKSGMLILKAAPLPEDILTLGIDGVNQIWRDAKLRAVGKARAKTLIEAAEHSVGSKEGAVSARMEIRMLLEDYESRNTRLQEVMVLIEELVRKIPMAEKLLEIKGVGIRTVSGFLAEVGDISRFNNPKELQKLAGLALVENSSGKHKGETTISRRGRKRLRYLLFEVAMSLVAKNPEFRELHNYYTTRRLNPLKKMQSLMAIAAKLLRVFYAILTKGVGYDPKKMVNDIRRPAAYAQAA

SEQ ID NO: 140973 - protein, 428 aa, unidentified
MSKTKAQSVIQTDDDTLYYERCAGIDVHKKLLVICLRIGRKTETREYGTTTGEIREIVKWLKDNGCQMVAMESTGSYWKPLYNIFEQESLPAMVVNAYHIKNVPGRKTDWNDAFWIAKCLSQGLLKPSFIPDREQRELRDMTRFRKSQIEERSRNINRLQKFLEGANIKLSSWLSDIEGKSATELLELIIGKPDFTVDDVKARMHGKMKSSPEEIFAAVEGYITPTQREFFDHIMNIIREQTRLIEATDDMIKTSMNDEQREAVKALDAIPGIGIVSAEQIIAETGTDMSHFRNQHAFSNWIGVAPGNNESAGKRKSGKTTYGNKTLKSTLTQCAKSAVKNKRTFFSAQYSRIVSHRGKNRATMAVAHSIAIAIYFVLQGCVFKDLSADYYNQFNREKKINSHIKQLSKLGVTLPDGVLLSADVLSSA

SEQ ID NO: 140974 - protein, 352 aa, unidentified
MNQEDRRVIGGVDSHADSHHAAALDERGRLLGSKSFAVSVAGYRELLAWLASFGLIERVGVESTGSYAAGLTRHLLAEGVRVLEVNQPHPHTRRRRGKTDAIDAELAARHALSLTSTVTPKQTSGIVESIRQLRVARDSAVKSRTAAIVQLGDLVRTAPSELRERLAIRSTLKGKAALCRQLRPDTDRLSEPANAAKLALRSAGRVALLDDEIAELDRQLTPLVATAAPRTTALLGISTGHAGQLLITAGQNIDRFHSEAAFAALCGASPIPIASGKRGRHRLNPGGDRQANRALHMIAVCRLRHCPETRAYARRRSNEGKTKKEIIRCLKRYIARQTYSTLRDDLRSLAIG

SEQ ID NO: 140975 - protein, 355 aa, unidentified
MKNRAVQYLAMDVHKATVVAGVRNEQGAITMRATVATEARAILSLIRAVGARVMVAFEEGTQAQWLHDLILPHAEGVVVCNVRGKSELTNKSDRIDADALSELLRLGALKAVYHGAPSMLTLKELVRNYNAVVEDATRAMLRIKALFRARAIPTRGTSIYRVSDRAGWLDQLTNQGARVRAESLFKQLDLLRELRPKAKRAMIAEARKQSGWKPLRSIPFLGEVRTAQLMAIMATPHRFRTKRNIWPYAGLAVVTRSSADQEFAGGKLRRRNRPPQTRGLNRNHNPMLKSIFKGAATSAAAKPGPLKDIYAACVARGTKPDLARVTLARKIASIALRLWKKGELWDPTKLTMQTT

SEQ ID NO: 140976 - protein, 358 aa, unidentified
MNNIKSSRLDFRGQPIYIGLDVHKKSWSVSIHTKYGEYKVFSQPPEVDKLVHYLQHHFPGGEYRSVYEAGYCGFWIHDQLREKGIQCLVVNPADIPTKNKERRTKRDRIDCRKLGRSLRNGEIEGIYVPSRSRLEDRTLTRTRQSMVRKQTRCKNQIKGMLLFYGVVIPEEREMGHWSRRFIQWIEGIRMERASGDIALEAHLEELSHLRQLIASLNRSILRLARTEEYRPLVHLLKTVPGISTLTAMILLTELGEITRFPSLDELSCYVGLIPDTEQSGEKEYVGSMTQRRHSQLRWLLIEASWVAIRKDPALLMAFQEYCKRMRKTKAIVKVARKLLNRIRYVLKNQAEYVPCVIQ

SEQ ID NO: 140977 - protein, 316 aa, unidentified
MDNNNAVYGVDVSKAKLVIARYDVQTPVEVDNLPESIAAWLAGLPKGAVVAMEATGIYHRLLAHLAHAAGMRVYVLNPQTLKHYAQAIGQRGKTDGCDARMIARYAVHEQAKLRAWQPPARAADRLSQLLERRHTVVGVRQTLAQSLSGMPMLKAVRQSALASLERTVGRLDILIQHEIAQLPGAAALYKRLKSIVGIGPVVAAQLVAVFSTLSFARAGAFIAYTGLDPRPDDSGNRRGRRRLSKHGPPLLRCLLYNAGMAAANSKVFKPVYKQLRERGLQTTEAIVILARKIARIAFALYKSGEVFDAQKHLKTA

SEQ ID NO: 140978 - protein, 388 aa, unidentified
MLLVLARTAIVRPFREERPGPGGRLDRAAGRRIGCSRAARAAAEQDRDRFFIGPGWLKEPRVRITRKGSTKMSKDTTVCAGIDTGKHKLDVAIDGGAERAQVDNNSEGHRSLLAWLRQREVERIGIEASGGYEQAVVSSLRADGFVVIIFQPVQVRAYARFVLQHAKNDTIDAVLIARCTAAATDIREPPDARLALLAQHLTMIEQLTEDVGQVKTRREACREERIREFWKREVDRLKGLLNSELKQLVAAIREHRDLSHRLDLITSVDGVGLRTAVAILVRMPEIGRVTREQAAAIAGLAPYDDDSGLRRGSRHIKGGRQRLRQSLYAAALPAVFYWNPQLKAFYRRLLVAGKPHTLALVACARKLLIFVNTVVARGTSWRSSEVTT

SEQ ID NO: 140979 - protein, 412 aa, unidentified
MFVGDDWAEDHHDVEVQDHSGRRLGKARLPEGVAGIVGFHELIAGFLDDHTVEDTGAEQVLVGIETDRGSWVAALVAAGYRVFAVNPRQVARYRERHGTSGAKSDAGDAHALADMVRTDAHQLRPIAGDSPLVEGIKVVARAHQTMIWERHRHMLRLRSSLREYFPAALEAFDDLTAPDTLELLAAAPDPHRAARLSRSRIGGALKRARRRDVAAKAERIQALLRAQQLTQPDELVAAYAATTAATVAVINAFTDQIVTLQGQVEACFGRHPDAEIYRSQPGLGEILGARVLGEFGDDPSRYQGARARKNYAGSAPITRASGKKTVVLARFVRNQRLAGALQWQAFCALRASPGARAYYDQLRDRGIGHQAALRQLSNRLVGILHGCLKTRTLYDEHTAWGHHNSHDQQAAA

SEQ ID NO: 140980 - protein, 452 aa, unidentified
MAHQKTERTRKKKTRPAPGRTNPDAAGIDLGATVHYVAVPADRDENPVQHYGTLTEDLIELADWLKQCRITTVAMEATGVYWIPLFQILEDRGFEVCLVNARHVKNVPGRKSDVQDCQWLQYLHSVGLLNASFRPPADICAVRSLMRHRESLMRTACQHLLRVQKALDQMNVQLHHAVTDITGYTGLAILDAIVAGERNPESLASLRDYRCKKSEAEIAKALRGDWREEHLFTLRQSLEAWRFHQNLMADCDQQIASRMDALEDRGAGPPPVTGKKKGNKPHEEPMREQLYEKFGVDLTAVEGVSIQTCLAFLSEVGTDVEKFATAEHFASWMGLCPDNRITGGRTHAAHTRKVQNRLANALRMAAQSLHRSKAGLGDWFRRLKAKLGTKAAVTAAAHKLARILWAMVKHRRPYDPQRLGNPELARLRKERYLRRQAEQLGFALTPVGGEVS

SEQ ID NO: 140981 - protein, 366 aa, unidentified
MKKNSTMVIRRKQIFKQKKLTIGMDLGDRFTYYCMLDEAGEVLVEQKLPTTQPAMKQAFSRIPCSRVALETGAHSPWVSRLLTQLGHEVIVAHARNVRLIGESSRKDDRLDARMLARLARLDARLLSPVQHRSAEAQVHLTVIRARAALVAARTALVNSARGLAKSYGERLRKCGTQQVSQGLAAGLSPELQSALQPLLAEVASLNQRIAEYDRRIEQIATQVHPEVALLKQVKGVGTLIALTYVLTVGDPHRFRRSRDVGCYLGLRPGRRNSGSSHPQMHISKEGDGYLRTLMVQGAHYILGPFGQDSDLRRWGLKLCERGGSNAKKRAVVAVARKLSVLLHKLWVSGEVYEPLRNSSAAVGAVA

SEQ ID NO: 140982 - protein, 377 aa, unidentified
MGDYSEAFVGIDTSKLRNAVAIADAGRDGEVRFLGEIENTAAATAKLVRKLAAKYERITFCYEAGPTGYGLHRQIKGLGFECAVVAPWLIPKRRGDKVKTNRRDALSLAKLLRADELTPVWVPDGPHEAMRDLTRARETAMLDLRTKRQHVSAFLLRLGKPYPESRKTWTRTHVSWISSQKLDHPQQRLVLEEMMLAIRQAQDRLARLEQAIAAAVPEWSLAPLVTALMAMRGLDTISATTLLAEIGDLSRFQTPTELMAYLGLVPSEASTGDTVKRGPITKAGNRRARRMLVECSWSYQHPPRVGQAKQPKVDAAPLAVREIAWKAQCRLYRRYRMLIGKGKLKTVAVVAIARELAGFIWAVARAVSTMRIAAATT

SEQ ID NO: 140983 - protein, 347 aa, unidentified
MTIVEAAPGITGGVDTHLDKHVAAALDPLGRLVGTESFNADAGGYKALLVWLEQFGQVTKVGVEGTGSYGVGLSRFLRRKGVEVVEVNRPNRQSRRNQGKSDPLDAVEAARAAISGRASGAGKTKDGPVEAIRVLVVAKRSARQARVKAIVQMRHLGITAPDQLHSRLKGLTVTALVTESAKLRSTRSPDPVTAATKASLSSLAHRIQGLDQELAELDEKIESLLLATAPDLLDRFGVGLDTAASLLVAAGDNPERLHSEAAWAHLCGVSPVPADSGKNAGHLRRHDGGDRQANSALWRIAMVRIAHDPETTHYFDRRVKEGRTKRDVIRILQRYIAREVYRYLPRG

SEQ ID NO: 140984 - protein, 424 aa, unidentified
MKTHWTEQAYFAALDWAKDHHDVVVVDRIGTIGAEFQFAHTAAGWTQFEQQMQAFGRCPIAIETSSGPAVDQLLQRQYPVYPVNPKAAERYRERKAPSGNKTDRHDAWSLAEALRTDGQGWRPLVPQDEATATLRLVCRDEQALIEQRTALVNHLQAALGEYYPLALESFEDWTQPFAWAFVRAFPTPKALQQAGKRAWEKFLHLHKLWRSDTAPQRLAAWAQGQPLNASAAIVNAKSLLALSLASVLQTLQKQIDEYRARIRAAFQAHPDHEIFGHLPGAQDKLAPRLLAELGSQREVFPDAQSLLCYAGVSPVSFQSGQICKARIRWACDHFLRHTVHLWADQSRRRCPWAQAYYRVKRDKGHSHASALRCLGKRWLKLLWRLWQDRQTYNESIHLQSLRTHGSFVAKLLASQSPQPAAPCE

SEQ ID NO: 140985 - protein, 345 aa, unidentified
MENMYYIGLDVHKKTISYCVKDGSGRIHAEGKIPTTRFDLDRWMKTLPQPWTVAMEATIFTGWIYDHLRPHAAAVKVAHPLMLRAIAAAKKKNDRIDAKKIADGLRCNFLPECYMAPTAIRERRRTLRYRNLLVRQTVQLKNRISGLLMEAGVNYNKEKLHKVGYFRELLKSNPDIDESLRPLLQLCRETLVRLQKTESALIRSLARDRFLVERVEHLMTIPAGGPITALTWALEVGEVSRFSSIKKAISYCGLCGAEQSSGEHVKRTPISKQRNKHLQCVLVEAAHMAPRLSPELALLYDREKQKGNANRATLAVARKLVAYLVAIDRSQRDFLLVEKENQAAA

SEQ ID NO: 140986 - protein, 458 aa, unidentified
MKVKQVSALRERGLHPAGRDAEPQVVGLAPQTTNERKADTMKKYILRETQTVEPQKSPRPPRPEPGLTALVDVICGRPVPPPPPLAGLVLFIGLDVHNDSIAVSIAPSDSTEVRRYGIIGGEHDDVLKLVKKLQAVHPGATLKFCYEAGPRGFALCRCLRSHGLDCILVCPSKVPRKPGERVKTDRRDADQLARLFRAGELTGIYVPEPEDEAMRDLIRARFQVGKAQHRARQQLKMYLLRHNLRYGGQTSWSAAHLRYLAQIKMPFPVQQIVFQEMLEVISEATARLERYDQEIERAVPGWRWEPVVRSLMSLRGMALLHAATLVAELGDFHRFEHAGQLMGYLGLVPSEHTTGTDRQQGGITKMGNGPARRALIEAAWQYAVPARISPHLKKRQEGLPKAITDIAWKAQLRLHHRYQHLTRVGRKKSQVAVTAVARELAGFVWAIARQVEPRPAKP

SEQ ID NO: 140987 - protein, 367 aa, unidentified
MKELFFGIDLHKKQFTVYMMNINDEGTYGIFNTDETGYNNFMNILKESLKSGFKINIAVESTGNTRYFKNKIESVGVVVKVINTMKFKVVNESINKTDKRDAKTIAEFLKKDVLPEAKLCSEDSELLRRLVKIRSVMVSTKVKMKNQIHGILLGMGVETKSGQLNSKKGRLRILNELKASNNHNIIEILVNNIEDIEKNIKNIEKEMEELTKEDRVVKILKSISGTGKICAITVRSQIDDIKRFDHYKKVSSFAGLVPWVKCSDEKKYYGNITKRGPSELRVALVQMVLGMIRCKDEKDNILMIQYRNIKKRKGSGKALIATARKFTKLIWTLLTNDELYDKEKLSKEIYLEKIISMQENQRIKDAA

SEQ ID NO: 140988 - protein, 412 aa, unidentified
MADRVALAGVDWGDKENAFEVRGTDGSIWQGAFEQRPEAIGAWVAKLRAAYPRGTIAVAVEQSRGALLFALSAYDFLELLPVHPTRMAAYRAFVRPSGAKDDPADAGLICDYAQKHPEDIRPWKPADAVTRELQVLVEWRRKLVDQRTAFSHQLRDTLKQYFPQALDWIGEVASPMALDFLERWHTLAELQRSRSATIRGFFTQHGSRLAELIEGRVSQIALATPLHDDQALIGALSLIVRSLVPMIRTLCEQIHRLDARIEQLWAVHPDRKVFDSLPGAGGVFAPRLAVALGTDHSRWTAEAMQTFSGIAPVTVKSGSNRWVHSRWSCPKFLRQSFHEFAALSIPHCSWAAACYRQQRARGKGHHAALRALAFRWIRVIVRCWKDGTPYDHDRYVKRLTATHSPLAAALSS

SEQ ID NO: 140989 - protein, 398 aa, unidentified
MTESSDYESVQVFIGVDVGKDTHHAVAINRSGKRLFDKALPNDENKLRSLISDLKQHGQILLVVDQPATIGALPVAVARSEGVLVGYLPGLAMRRIADLHAGEAKTDARDAAIIAEAARTLPHALRTLKLADEQIAELSMLCGFDDDLAAQTTQASNRIRGLLTQIHPALERVPGPRLDHPAVLDLLQRYPSPEKLASLGEKKLAAQLCKLAPRLGKRLAADIAQALAEQTVVVPGTNAAAVVLPRLALQLITLRKQRDEVALEVEQRVLAHPLYPVLTSMPGVGVRTAARLLTEVACRAFASAAHLAAYAGLAPVTRRSGSSIRGEHPSRRGNKALKRALFLSAFAALRDPISRAYYTRKMSQGKRHNQALIALARRRCDVLFAMMRDGTFYTPQAS

SEQ ID NO: 140990 - protein, 315 aa, unidentified
MAMRVTLEKPIIGVDVAKNELVIYHDQYDRLEAIPNTKVAITQCLKALASSCAIAIEATNVYHVLFADAAHEAGCDVYMVDGYQLSHYRKGVNIRAKTDAQDARLLARYLKNELDELRPWIPASPLYRQLLSLFRRRTALVQARTGLVQSWTNEPFLRTAFANQVNSMKRFEALVEKKIRDVLQEAGLMRQVNRCMKVEGIGFLTAARLVTSFQRGEFSAANAFIAFLGLDLRVSKSGQSDGPRRLTKRGDPEARRLLHNAAMSGSRTPAWKPFYEEQRKRGFSTTQALVMLSRKLARVVFALLKNQSEYQTKVA

SEQ ID NO: 140991 - protein, 270 aa, unidentified
MEPTTIAIDLAKRVFQIHYVEPETGAIHSKALKRAQLVPFFANRPASRVVMEACGSAHHWARVLARLGHDVRLIAAQFVRPFVKSNKNDAADAAAIWEAAQRPGMRFVAVKTEDQQAMLALHRIRQQLVRIRVMQVNQLRGLLYEFGVVLPQGRRASIEAAKVALTSLADQLPAMLTDSLQDQFSRLRSLDEQIAQIEQRILEWRRNDDACRRISEIPGVGVLTATAAVSVIGQAKTFRSGREFAAYLGLVPRQNGSGGKIKLGGISKAV

SEQ ID NO: 140992 - protein, 419 aa, unidentified
MVQDDDNSLVSVVHPICCGLDVHKETLAACLLITGADGRIQSEIKEFATFTDELLRLREWLVVNDCPVVAMESTGVYWRPVHNVLEGQVTVILVNARHIKNVPGRKTDVADSQWLAGLLRLGLLKGSFLPPQEVRQWRELTRLRKHYQESIGDFKRQVHKLLESANIKLAAVLTDIFGATGRLILERLAHQDGIPDLSDLERGAGGPRRQKTQELRRAVGGFFTAHHRFQLCLLLRSIRQLEGQLGEVLVRLEEQLTSHQELRQRLQVVPGISQVASAGILAEVGPSLADFKSSNALSSWCGLCPGNNQSAGKRKSGRSPVRSHPLKTLMVQVAWAAVKKKGSYYKDKFHRLRYRLGPKKAIVAIAHRLLKAVYHIIKDGAAFRDLGEDYLQRRHHPGRLNYLKKQAQLLGYELIPATA

SEQ ID NO: 140993 - protein, 423 aa, unidentified
MSYRIAAIDVHKKKLAVVAADVDVEDEYQFERRWYGSNPEQLRVLSEWLREQQIEEVVMESTAQYWKPVWGALERYWKPRCQSRESAGRMSGTLHLAQALSNRGRRGRKKDFRDAERLVKRLVSQELVLSFVPDTEQRMWRTLTRTRYQRTRDTVRLQNQMEALLEEAHIKLSSLVSDLLGASARRMLKALADGETDPAALAALADQRLRATPAQLHDALGACTELNPVYRRLVKMTLEDLQLVEQQISQLDQEMASLLRPHQDAVERLAVVPGLGVDSVQQIIAEVGAKAATFPSAEKLSSWVGACPGEEESAGVNRSRHSPKGNRQMRRVLNQAANAAVKHKGSIFEIVYRRLVPRLGHNKTIGVIAHRLCYLIWIILHKGVRYEERGPSVSEKSRQRRTARMVRTLRILGYRVEPLANPA

SEQ ID NO: 140994 - protein, 328 aa, unidentified
MTASLSNNQSTLGVNVGIDVAKDTLEIAVRPDNEQWTTKNRVEDFPALIEKLQQLAPERIILEATGGWEVPLANHLAAAGLPVVIINPRQARDFAKATGKLTKTDKVDARVLAHFGEAVKPQVRPLPDEQTQALSDLLTRRRQLVGMLAAEKNRLVTVQHRPALKRDLEAHIKWLEKRIDQLDDDLRQQLEKSTVWRVNDQLLQSVPGVGDVTSRTMLSQLPELGTLSDKEISALVGVAPHASDSGQRKGQAHIKGGRANVRSVLYMATMAAIRCNPVIKAFYQRLLAKGKLKKVALTACMRKLLVILNSMIRKQKSWSPAQIPAAQD

SEQ ID NO: 140995 - protein, 322 aa, unidentified
MIVGIDTSKDFFDATAIKEDNVIFQKQFSNDAKGFNLFLNAVKNHSVELVCIEATGPYHLRFALFLNGNDFKVSVVNPLVIKRYAQMKMSRAKTDKKDAYLIAFYAKEQKPELWRAPSNASLEIRQLDTHLDLLMKHKRALINQLHAFTCRGTMVEGLKKQMEEQINQLNANIKKIEKEIEALVKSSYQEMADQLQSIPGIGKKSTYMMIVSTNGFSSFDNYKQVISFFGLAPRHFQSGTSVKGKTRICKMGMSRVRKTLYMAGVTSIKCNKSCKDLYERLRVKGKSHNLAIIAVVNKLIKQSFAIAKNNTYYQVDYNLQSA

SEQ ID NO: 140996 - protein, 382 aa, unidentified
MNRILKIGMDVHSTSYTLCAMEPVLGGEDRIFANIQVTSDYRNVIQFIDKLKEKLGSSDSYSIECGYEAGCLGYSLYHQLTKAGVKCMILAPTTMLTQQGKRVKTDKRDAVMIAQCLSYGGYHAVHVPADKDVSVKEYLRMRDDHKVALKKIKQQINAFCLRQGYFYAGNKWTIKHLNWLKKLVLSDLYRETLNEYLTSYEEQTAKIERFDKRIEELAEDSDYQENVKKLGCLLGIKTHTALSLIVETGDFKRFRKGNTYAAFLGLAPGESSSGEKISRTGITKAGNSHLRMLLIEAARGMCRGRIGYKSKVLRSRQDGNPTEVIAYADRGNTRMRSKYYRMIRHGKKDNVAVAAVARELACFIWGLMTNNITPKEEGTKVA

SEQ ID NO: 140997 - protein, 347 aa, unidentified
MGDKYSHLCLIDSQSAEVIEEGRLRTTPETFRRRFASEQLMRIAIEAGTHSPWVSRVLEECGHEVLVANARKLRLIYANKRKTDEIDAENLARLARLDPKLLYPLKHRGEDSQAHMALIRSREALVSCRTQLVNHVRGAVKSFGGRLPKCPARSFHKKASEHIPEALWPALGPILEQIGSLTQRICDYDRKLEEISKAHYPETELLRQVEGVGPLTALTFVLTLEDPYRFEKSRSVGAYLGLVPAMDQSGDRDPQKRISKEGDQMLRKLLVGSAHYILGPFGSDSDLRRHGEKIASRGAKNAKKRAAVAVARKLGVLLHRLWVSGEVYEPLYKAHRCGDVATPLYVK

SEQ ID NO: 140998 - protein, 628 aa, unidentified
MARTSSSAPSSSAPSSSAPSSSVPSSSVPSSSVPSSLDRIGVGIDTARYGHRVSFLRPDRQPAAKPITVMESQAGYQTLREQLECLHRQHSQAHFHVRIDAAGQYAVNLERFLRGLALPMTISIGEPKRNKDYQKAHFPKRTTDDTESQAMARFAVVELPEATLPLPPQMVLLREVAGRLQAQVKQTTQALNRLHNLMARVFPELATLAKDFDAGWVLTLLDKYPTPQRLRQARLVSLENIPFLPQDKAQTLHQAAQQSVGSLSGTVAETLVRDLVSQVRHCEQAEQKMRDLLNTAFADLPASGHRQLISIPGIGEATAAVLTAKIMDIDRFETANHLVGYFGIFPQESSSGVDKDGKPLPAGTMCMSPKGNDLIRSYLWNAARVGIRFNPALRALYARLKAKGRRGDVAMGHCMRKLLHLVFAVWKTNRPFDKKYFPWEPNDSKVSQPAPNTPGSPAPVAVTEPVVIPSANQPVCANEKAAGHKREAPAEKVVATATSSVDPLMPAVNPATKPALTTAARPRVDFAFLREQVTMEQVLRHLGLFDQLRGHGQQRRGICPLHAKPDDREPTMSIHLGKNVFHCFQAKCATEGNVLDFWAAVHHLPLYEAALHLADTFHLPRNREEAPV

SEQ ID NO: 140999 - protein, 347 aa, unidentified
MRKIVKQVAAIDVDQKLLVTTLGRMYDDWSPELYAQKTFANTQKGFEAFLVWVKNSTVNEVSVRFVMEATGVYHEGLAYYLDDQGEEVTIVLPNKISNYMRTLETKTITDKTASEAIAQFGLERKLELWKRPKDIFKKLRQLSRERDQLITERTMVKNQLHAEQAEAEPSKSSITRIKARIKMLVKQEQEIKAELSALVSSNDEIKKIVVLLCSLTGVGILTATSVLGETNGFELIRNRRQLASYAGFDVKEKQSGTSVKGKPKISKKGNKYLRKAMHLPALSAIRHDERFKAVFRRIVSRHGIKMKAAVAVQRKLLEMMFTLYKTNTPYDKEYLINKQMTTAALSA

SEQ ID NO: 141000 - protein, 385 aa, unidentified
MATSTTSRIEQDSLPQPTLYLAFELGQNTWKLGFTIGVAQQPRERTIPAGALDTLQQEIARAKQRFGLPENARVVSCYEAGRDGFWLHRSLVAHGVQNHVIDSASIEVNRRQRRAKTDRLDVRKLLTMLLRHTAGEKKVWSVVRVPSVDEEDRRQLHRELTTAKQDRTRVINRIKGLLAGHGVQLALQGDVDAQLDQVQQWDGSPLPSALRTRLKRAWQQVGFLTTHIQTLEAERRALWRCREDPVIAQVRQLFTLRGIGVNSAWLYVMEFFAWRDFQTPKQVGALAGLTPTPYQSGQSRRELGIAKAGNRHIRAMAIEIAWAWRRFQPDSHLSQWYERRFGAGSARLRKLGIVALARKLLIALWRFVKTGVLPEGAVLKTAPSQ

SEQ ID NO: 141001 - protein, 239 aa, unidentified
MDQQKTQTGVVLGVDTHLDVHVAVVVDALGRVLATESIAPCEAGYQHLFEWASSFGSLAQAGVEGTGTYGAGLANYLAEAGVEVIEVNRPNRLRRRLRGKSDPTDAENAARAVLSGEANAQPKTQAGIVEAIRAVSVAPDRLRNDAALAALCGVSPLEASSGKVVRHRLNRGGDRRANNALWTITLVRMRSEPRTKAYVARRTQEGRSTKEIQRCLKRYLVRELYPLIVADLRSLAATA

SEQ ID NO: 141002 - protein, 414 aa, unidentified
MQQIYERVAGLDVHRDNVVACFRRLGSRGGVVFEKDRFATTTAGLRVLEAWLAERQVELVAMEATGVYWKPVLYALESKFTVWLCNARNVKKVPGRKTDMSDAEWLTDVAAHGMIRPSFVPPPPIRELRELTRYRKTQIDARAAEVQRMEKVLQDAGIKLTSVASKVLTQSGRAMVEALIAGERDGAKLAELAKGKMRPKMAALAEALSGHFGSHHAVACERILGHLDFLDASIGALTEQIDARTAAFAPVYASLLPVPGLDRLTIDVIIAETGADMARFPSAGDLASWVGVCPGSHESAGKRRRVATTAGNQWLRRALVESARAAARTKHSYFGAQYRQIARRRGPNKAAIAVAHSLIELVWHLLSTGEVYNDLGEDYFSKRQDPERRAHRLVAQLEQLGFKVTLEAAAAATT

SEQ ID NO: 141003 - protein, 310 aa, unidentified
MKDTIGIDISKATLDAHRLSTGEAAHFTNSPAGLRALRLWIGAQMPHLVVYEATGAYHAALEHCFAGVLPLVKVNPLQARRFAQACGTRAKTDAVDARILAVMGSALDLEPDMPADKNQHALKQLQIARMALVKERTRLLNRMKTQTLAILKRQSKARLDQIKRQLAEVEEASLALLRRSPKRVRALDILSSIPGLGQITAVAILVECPEIGTLGRKQAASLAGLAPMTRQSGQWRGKAFIQGGRKFLRDALYMPALVAARYNPDLRQKYQAMIQAGKPAKVALTALMRKLIELANTLIRQDRNWTPKTA

SEQ ID NO: 141004 - protein, 355 aa, unidentified
MKYYTSTTEFNCGIDLHARQMYVCLMDRQGKKLVHTNIKDNDFKFFLKLVQPYRHDLTVCAECMFGWYWLADACQEAGVTFVLAHALYLKAIHGGKNKNDRIDSEKLAHLLRSNLIPPSYVYPADKRPLRALLRQRLYYVWRRAELTARIHSLQLAHNRPSPRCNTRTRDVWEARLLESEPHPLRQIALQNDLAMIRHFDQQITQLEEELHRQTKRVAARDYTLLQSTPGIGEHLGLTILYEIGTIERFPTVKDFLSYCRLVKGTVASAGKIKGLRGAKLGNPYLRWAFGEAAVIAKRDHNVIGPLSQRLEARMGGNKFKANTVVAIKLARAVYFMLKNKTVFDSDRLVAALARN

SEQ ID NO: 141005 - protein, 359 aa, unidentified
MIVIGVDPHKQTHTAAAVDRQTGELLGELTVRGNEEGHARLLEWARELGGERGFALEDCRQVSCRLERFLIGRGEPVVRVPPKLMAGARRSARSRGKSDAIDALAVARAAIREPDLPEAHLEGASRELRLLVDHREDLVCERTRIQNRLRWHLHEIDPELEPSRRSLGTLKVLDGLGRRLARRPQSVQVRVARELVAHCRELSRQADRLEREIETLVRREAPQLLALPGCGALTAAKLVGEVAGIERFRTDAQLAMHAGVAPLDVSSGRQQRHRLNRAGNRQLNRALHTIAIVQKRTYAPAKAYIARRQADGKSNKEALRALKRQLARRVFNILHLIAARANNPQRIQTSTPPQVPCLT

SEQ ID NO: 141006 - protein, 344 aa, unidentified
MKHYAGLDVSVKETSICIVDEVGRICREMKVVSHPEDLLAVLCDPAWRLERVGLEAGPLSQWLFSGLAEAGVPAICIETRHAKAFLKAQVNKSDRNDARGIAQMMRVGLFQPVHVKTLASQKRRALLAARKILQEKALAIENDIRGLLRNFGLKVGIVGVVGFEQRIHDLVEGVPELADIMEPLLAARRVLREKFAKLHRKVLLLARDNEVCQRLMTIPGVGPVVSLAFISTVDVPARFRNSKAVGPSLGLTPVLNQSGESHRVGRISLCGDEAMRALLYEAAQVMLTRVQKWSWLKAWAMNIAKRRGQKKAIVALARRLAVIMHRMWSDGTEFRWTREMAPTI

SEQ ID NO: 141007 - protein, 505 aa, unidentified
MDIVGIDISKAKFDAALLLGERLRHAAFSNTEAGFEQLLAWLAKHRPDAAAPMHACMEATGNWGLELADFLHAQQARVSIVNPARIKAYGDSELARNKTDKLDAGLIARFCRAHAPSAWVPAAPHLRELRELVRRCDALKSARVQELNRQKSGFASSAVARSIAAHIDWLGGKIEAVTDEVRHLIAADQVRTRVDLRPIEPATEIDLEIRLLVSRRGDLVQAQTQRLSRMHDLLVGIVPGLEACLDLKTSATWRSDCEAAGGGATGGGPLHLLTRYVTHSELRAAGKKRLVRHLQAGGGLPNVDALADRALAAAAEQTILAPAERMTARLIRELAAEALVSRARLVELDRELEALLGRHHRPLAIRLRSSRWRSHRRDAALIRSLPGMGVVLTAELIAEAGNLSRFRSADALASAAGMAPVLRQSGRTRFLRRPNGGNKGLKRVFYQSAFCSLNHDDSRTFDDRKRREGKRHHQAVIALARRRVNVLWAVLHSRTRFQSGFKTAA

SEQ ID NO: 141008 - protein, 322 aa, unidentified
MIFIGIDISKLTFDAAYILNSRYIHKQFANNAKGFEVFLKWMNKSEECIYTCLEATGIYSFNLAQYLSQHKINVMVVNPIITHAFFKMELNRNKTDKADAQLIARYCQHAVINGDFEKKSYQLKGSDYEAIQRLVTRCDQLEKSKTQENNRLEASVNKQASRSIKRLQKAIDSEIIQVKKAISNIVKNNLQLKKQVELLISINGIGERTAWSILAYIGDINFFSNSKQIASYAGLTPKVIQSGTSIDKSSLSKLGHKRLRKSLYMPALVAIRYNPTLKVVYERLVSNGKPKKVAIIAVMRKLLVLSYGVLKSEKAFDVNYQP

SEQ ID NO: 141009 - protein, 270 aa, unidentified
MDEAGEIVEEVRVENANLDDLAQRYAGAQAVLEATSNYYHIHDTLSEHLDVTVAHPKKINQIADTDKKTDRVDAKELARMLRLNSVPESYVPSEEVREARALVRGRQTLVENRTKYANKVHGLLSDHGITEDVKPLSVEGREFLRELSIPTPWDELLESYLDLIESLTEEIQKLEETIEQRAGSPSETQLLMSIPGVSYFTALTIYADLGNITRFDGDKAVVSCVGLNPEIHESGDSRIEGSISKRGLGRVRWPLVQVANTAVHTVTTST

SEQ ID NO: 141010 - protein, 352 aa, unidentified
MQYLGIDWAYRRAAWCARSEGGAILDEGFVPADEDGLAKLVLSVGPDVHACVEMMSGAVWVRDRLQSAGWHVEVADARKVKGLAPLACKTDKVDARVLAELCRRDLVPAVWLPSLDDRALRERLKRRMHLVRMRTMARNRIHGVLTQWGLKISVTRLRRPDGLALLEARGVPEVWRRSVAEALAVIDWLDERLAPLERELGPLAPADARVVLLETIPGIGPLLGLTMATEIGDIARFPSARKLIGYAGLAPKIKQSGQSSRTGPLSKAGSKMLRWAAVEAAQQAWRETNPWHELYRDVAKRQGKTNAGKAAVARKVLIAAWHVLSREQPFKPCRPRGGADPVPASSHFHLAA

SEQ ID NO: 141011 - protein, 521 aa, unidentified
MPRPRTSRPRKVRKAFVLQKPCGQLTPRVQAVGAEHFGIVAVDCAKARSRYFLADFYGRTLLEPATVAHNRGDFQAAIDRVRQAMRQHQLADLVVAIERTGEYHRPVQHAFRQADFETRLVHPFTSKQYRQPADPGNKTDDTDLAAIWRATTHGFGLLEPTWPDDYLTIQLLRRHRRDLVDKNTILQCQIREVLHAAMPGYAELFCHFWDDSPAPLVFARHTTSADAVRQQGIAGLQQIANQAGLRCRTETLHKILAWAEQAAPASGNVLDRRRILIGLDDDRLAKTRQILELERDLAHRVVHTPYLLLMVIPGINVVTVADLAGELGPISLYVNANAITGRAGLMPSRYQSDQVDCANGPLRRRGNRRLRAVLMQTADNLVQCNYYFHARADQWTRAGKDARWVRVKVAKIFSRLAFAMVAGEQLFPHPCCQKRHYIIGKLLSFHSGHGTELQAMRHDLEVAAAQLPAKQRALEAEPLQKQLDDLANRRGPQPLAEIIPLVLARLAGRVVQSTPSESAGP

SEQ ID NO: 141012 - protein, 385 aa, unidentified
MQNKISTLFVGVDTHKETHTLVGTNIACEKLCELTFENTGIGFQKALQNILETSRVNSLKPMVGLEDSGGNGSSFARFLHGQGVAVKTVNPVLVKRNRRYQTHPEKSDSQDAMEIAIVSVQRTDKLPDFTLTKNTEFAKGVNILVQEREDLIHEQTRVKNKLHWALYETWGLNYKTIYQKNIFGKRALDFWSKYPSVRDFKKTTRPMISKPEWLLETPIDDLPAISDIEKRRVERLVNRLKMIISQTKEIDGELEDIASKNYAYLATCPGCGVLTASKLIAYVKDIDRFKSEKQLAKYAGIAPRKYESGKIKRSISSVRGHSDLRRAIKTIALSQIGRRGNVLGKEYFEKKIKEGKSKRQALKCLMRQNVKIIFAMMKEQREYYT

SEQ ID NO: 141013 - protein, 350 aa, unidentified
MDEVKFYVGLDVHKDSIAIAFARAHSRDDPQFVGTTRYSVISLTKALSKLGNPSQLSICHEAGPCGYGLVRALRKQGYHCEVIAPSRVARRPADRIKTDRRDALLLARLHRAGELVPVAVPEPADEAIRDLVRAREDAVNDQRRVRQRLKSFLLRHGHAYTGTRWGPKHELFLSKIKFEDPAQHVVFTEYRMAVRFATELVERLTQSLRTHAEIWRWLPTVKGLMTLRSIDFVSALTIVAELGDLRRFPHPREFMGYLGLVPSEHSSGNSKQRGGLTKTGNTHVRRILVEAAWNYRLPARIGESLQPRLEGQPRPIIDIAWKAQLRLCPQIPPPSGKRSSSKQDVCGNCS

SEQ ID NO: 141014 - protein, 355 aa, unidentified
MNQEKYIGMDVHQATISVAVMDAAGKLIMECLLETKAATIVEFIQGLHGTLSLTFEEGTAAAWLHDLLKPHVSRLVVCDPRKAALLKEGNKSDRIDARKLAEMLRTNQLHSVYHGEHGMRTLKELGRSYLTVTQDVTRVMNRIKALYRSWAIPCSGTTVYASRHRAEWLAQLVEPGVRVRAEHLYQQLDSLQPLRMEARRELLGESHKHPAVKLLRQIPSIGPIRAALLVALLQTPHRFRTKRQLWAYSGFAVETHDSGEYRYVRGKPQRNRERITVRGLNDNYNKDLKNLFKGAAISASTSPGPLHDFYVALVAKGMRPTMARLTVARKIAAVSLTIWKKGVSFDPKRLQQQAV

SEQ ID NO: 141015 - protein, 415 aa, unidentified
MALKIVYPVCCGIDVHKTFIVACIASTNSKGVTTYKRHRFSTFTKGLNELSQWLCENGCKDICMESTGKYWIPVFNILEHSCHITLAHPKYVKAIRGKKTDKKDAQWIADLFKHDLVAASFMPPLPIRQLRDLMRYRFKLTNFSSSEKNRLQNSLTVSNIQLGNVVSDTFGKSSMNIINKLLNNPLDTSFDIEPLIHGSMKDKLPELELAIEGTITPEQAGKIKVIQQHYDDLESRKADLEAIILSLAESYSEEINLILTVPSFKNLFSAIAVVSEIGVNMDVFPTAKHLCSWAGLTPTNNESAGKKKSVRISRAGCYIKPLLVQCATAVVKSEKHPEIRNRYLQLKRRRGHKRAIIAIARMLLTAIYHILKAKEPYNPDLYKKSDGRPVNREITIEQAILLAQAHGYRILAAAT

SEQ ID NO: 141016 - protein, 341 aa, unidentified
MKNKSFIGIDISKNVIDVSIFCEETPIKDFSHDVFNNSRKGFGEMCTWLKKNHVVLSNSLFGMEFTGSYSMELEKFLNTRNYQFCMLSTHVVKLYPMGPKDKSDKIDSAKIADFLYRYNGTECVKPYNMPDKTMQRLKALMNERKFLVEQRTCFMNRRQLCITKEDAQLYDGYIKKFSRDIENIELEEQKLLATDDSLLSTYKNLLTIPGIGFVNAINVIVITRNFTAFETARQYASYVGVAPHFRTSGTSVKWRPRPSARCDGQAKADLSMAATVVVQYDAELQSFYNRKLGGKQDSDTKRKALNAVKFKLVLRMFAIGKQNRKWEPLDSKSSNEKLAIS

SEQ ID NO: 141017 - protein, 372 aa, unidentified
MDEGIKFFIGLDAHKDSTSVAACEAGREPARFAGTVGPDVRPLLKVLAKAGDPAQVSVVYEAGPTGYGLYRELRRRGYRCEIVAPSLIPRRPSDRVKNDRRDCTRLAELSRAGELKPIWVPDEAHEAMRNLWRAREDGLGMRLRARQQLKAFLLRHARRYPGKTSWTTRHERWIAEQCFDHEADRIALAEYQLAAQSADQRVQRLTFALTEATRGWRFEGVVAALRALRGIDTVSAIGLVCEIGDIGRFASARHLMGYLGLVPSEHSSGNSIHRGSITKTGNAHARRLLTEAAWNYRFPARLSGQLRERSKALPEPVRNHAWKAQLRLCKRFANLSSRGVQPNKVCVAVARELTGFVWAIAHQASPKASPVQ

SEQ ID NO: 141018 - protein, 338 aa, unidentified
MFTIGIDPHKGSHVAAVLDEREQLLGEVRVRADRRQRERLLCFAQPYTPRVWAIEGARGLGALLAQQLVAAGETVLDVPVKLSTRVRLLDNGCADKNDSHDARSAAIVGMRHRNLGVVTFETNTSVLRLLAKRHHDLTARRTQAICRLHAVLAMMTAGGLPRLLSAERAGKELARIRPTDSVGHARHLAALELLDEVRHADAQLATLRTRIVAAVAAANSTVTAIHGVGPIVAAYLIGYTGDIARFPTKGHYARYNATAPLNASSGPNPRHRLNDRGNRQLNHAIHIAAVTQIGHDTPGREYYQRKRADGHSDNEALRALKRRISDAVYARLCADAHR

SEQ ID NO: 141019 - protein, 323 aa, unidentified
MNKYNETFGIDISKDVFDCYGSVQGHLQFNNSETGFKKFQELLSKDSLVVMEATGYYHYRFAQYLYKKKVAVSVVNPLSVKRFIQMKLAKVKTDKSDAKAICEYGLIQEVPLYNALTDTQSECLQLFRLMDSFLKKRTATKNKIHGEEVLGVPSSWVYRSLKRDKKHLDKELKGIEQKLLSLVKQDQQQQLTLLQSIPGIGMKTALFLIIVTDGFKKFETASQLCSYVGITPTIRESGSSVRGRARISKVGNKKLRNLLFLCSFTACKHNKGCSEIYDRIVNKGKSKKLALIAVSNKLLKQCFAIAKSGHPYDPTFVSVFVVK

SEQ ID NO: 141020 - protein, 402 aa, unidentified
MNAVGIDVSKGKSMVAVMRPFGEVVVSPFEVQHSESELNKLAKLLKSLNGETRVVMESTGNYHIPVVQVLTDAELYVSVVNAILVHNYGNNSLRRTKTDKKDALKLANYALDHWLSLPGYFSEEAVRRTLKSYYRQYEKYAKLRTVLKNNLISLLDQTFPEVNRLFSSSPRADGSEKWIDFISYFWHCKCVCELTENMFTLRYQKWCKKHGYHFSKKKAQDIYSFSSERIGVMPKVTASKVLVEQAVLQLQASSAALATLRQQMDEMAASLPEYHIVMQMFGVGSILGAQLMAEIGDVRRFHSKRALVAFAGIDAPPYQSGQMNIQSRSISKRGSSSLRRTLFLVMSVILKCSPVDEPVYQFMDKKRAEGKPYRVYMIASSNKFLRIYYARVKAHLELIDAS

SEQ ID NO: 141021 - protein, 319 aa, unidentified
MLRHPRAVHVGIDVARDHLVGHARPLDDCFTFANDAAGCRSLVKRLKRLKPQRIVLEPTGGYERLVLAALRRAELPVFLVNPHKLRAFARSTRGLAKTDPLDAEALAHYAEIWQPPTPILRSPLAERIAEYISWRELLVDRRTALANRSTQLQVPLLRRRARADLARLDAEIAKLEVEMRRLVAADHGLAALWRRLKTAPGIGDLTAFALIARLPELGHLDGKRIASLVGVAPHPWDSGRLKGRRIIQGGRFDLRRNLYMPILAAVRSQGSLRDFFLRLQANGKPAKVALMAALRKLLCRLNAMLRDNVDWREPPANPA

SEQ ID NO: 141022 - protein, 360 aa, unidentified
MNNHKYVGLDTDQATIIARVEDAKGNFIMEAAIETSASSIRQFFKGLDGTIHVAFEEGTQAAWFYDVIRPLVADVTVCDGRRNKLIQSGNKGDRIDAAKLTRLLRLGELHAVYHGERSTRGLKELVHGYESLVTDTTRAKNRLKAVFRSQAIRCRGDLVYSHQERKQWLGKLEAAALNARASILYEQYDCLTKLRDKAHKGMTTEARTHPAYKRIKKVSGLGEVRTAQLIAVVGSPHRFRTKRQFWPYCGLAVVTRTSSEYEIVDGQRRRKRNKQAQTRGLNQNYNRTLKAVFKGAAATAIERPPFKQYRQRLIDKGIRPELALLTVARKIAAITLTIWKKGEEFDPERVNQAVPGTGNK

SEQ ID NO: 141023 - protein, 296 aa, unidentified
MNIVFLGIDLAKNVFQLCGLNQAGKPVYTKRTGRKELLLTLANIPACLIGIEASTGAFYWQREFEKLGHKVKVISPQYVKPFVRGQKNDGNDAQAIAVALMQPTMQFVPPKSPEQQDIQALHRARQRIVNHRTASVCQIRGLLLDRGIPIGNAVSRARRAIPLILEDAENGLSSRMRRTIAELYDLFNDLERRIHFFDKEIETVFRQSEACQRIAKVKGIGPKTATAVVAAIGKGTEFKNGRHFAAWLGLVPRQHSSGDRQVLMNMTKKATSIYGHFLFMVPALSSGLLRITMMVI

SEQ ID NO: 141024 - protein, 321 aa, unidentified
MNDPIYCGIDIAKRNFVIGFSHQKKTKTETNNAKGIQHTLDYLSQFNVALITLEATGGLETPVAKALARAGYRVFIANPLKASEFAKSQTRAKTDAKDALNLAFYGLTCDLKGEVEHQLYIPLTEQEEQLEALVVRRRQLVDMRVAELNRLQQSHETQLNNITQHIEMLDKLIAELDKDIDDHSQHFNDKAELFSDIKGVGKNAVAVVMSHLPELGKLSSKRIASLVGVIPHPHESGEHKGKSFCSGGRAMVRNALYMAVLSAVRFEPVFKAFYGRLIAKGKAKKVVLVACMRKLLTIMNALVKRNEKWDPTRHLSTETMD

SEQ ID NO: 141025 - protein, 415 aa, unidentified
MALKIVYKICCGIDVHKTFVVACIASTNDKGVTSYESHRFSTYTSGLKTLLQWLLDRNCKDVCMESTGKYWIPVYNILEKDCSIVLAHPKYVKAIRGKKTDKKDAKWIADLFKHDLVAGSFMPPAGIRQLRDLMRYRFKLTCFKSSEKNRLQNCLTVSNIQLGNVVSDTFGKSAQAILDKILENPADTSFDLEPLVFKSLKKKLPELRDAIDGYITPEQAGKLKVIKSHYENLEARKAELEELILALATPYQQELAILQTAPGISSDFTAIGIISEIGTNMEAFPSAKHLCSWAGLTPTNNESAGKKKSVRVSKAGCYIKPLLVQCANAVVKSTKHPEMRNRYLRLKKRRGHKKAIIAIARMLLTALYHMLKNGENYNAELYRKSDLPPVDREITVEQAILIARNQGYKIKSATA

SEQ ID NO: 141026 - protein, 344 aa, unidentified
MVTIGIDPHKSSHTAAALDEAGQLLGELRLPATPSTLVRLRRWAEPWPERTWAVEGANGLGRLLAQQLLAAGEIVLDVPATLSARARQLQRGHGRKSDGIDARSVATVALRSADLRRIVGEEHSAVLRLLSTRRDELTGERRRVVNRLHRLLRDLHPGGARTDLSAKAAASLLAKLRPRSAADLERKAMARALLVDLRRLDRALADNRARCAAAVTASGSSLPSILGISDVLAAKIIGHTGDVGRFASAQRFASYTGTAPIEVSSGDVVRHRLSRGGNRALNNALHLAARVQVMHPGPGRDHYRRKLAEHKSSSEALRSLKRQLAKVVYRHLVADHVRRLVSLS

SEQ ID NO: 141027 - protein, 312 aa, unidentified
MAQPLFAGIDISKARLEVALGDKCFSMEHTEEKISVLVEKFKAASPQLIVVEATGGLEGPLVAYLAEAELPVVVVNPRQARDFAKATGQLAKTDKIDAQTLSRFAEAIKPQQRPVKDAQRRQLSDQVARRRQIVGMISQEKNRLSRASFQVRNDIEHHISYLKERLDRSNKDIEKIIKTSSLYQETAELLSTVPGVGPVTIASFIAFCPELGNLNRRQIAKLVGTAPLNRDSGPKTGVRCIWGGRKTVRNQLYMATVSAIRCNFKIREFYLRLSAAGKKPKVAITACMRKLLTILNTMVKQHKPWDIGPVTN

SEQ ID NO: 141028 - protein, 418 aa, unidentified
MGRFIGLDIHRDFAQVAVVEDGFVTDWGRVGCRPEALREFAAGLRPDDEVALEATGNANAVAVLIEPHVARVVISNPVKTRAIAEAKVKTDKVDARILAQLLAADFLPGTWLADERTRMLRRLSTHRAQLVRGRIRVKNEVQAVLHRNMLPHPPVTDLFGTRGRAWLEHQTLPVDERETVAALLRQLDFYGAELAQVERRLAVEALDDPIVRRLMTIPGVDAMTAVTLLAAVGDFRRFSSADKLVSYLGLNPRVRQSGGQPAHHGRITKAGSGKARGMLVQAAFAALRSPGPLRALHQRIKARRGMQIAIVAVARKIAVISWHLVTKQEDYAFARPGLVTFKRRKLELTAGAERRIARRGPGYDYNNKELRRQEREIAEQAERAYAVLTAHWQTKRPPGKPRLPAIPGTGGEAVTWEA

SEQ ID NO: 141029 - protein, 395 aa, unidentified
MKSNELQVAVDVGARAHRVAVGDASGRLFEEFDLEHTAAGLRGFFDRIEALRGKRKTPVAVAMEGFNGWARPLDRQVLEHGWRLYNVNNLKLARYKEIFPAPAKTDAIDARRILELFRLRGELPVARDVLQEVLAVTEEAERLKRLTRRRRQLVNERTRVLNRMQADLQAVCPGLLALTADAENLWFLSLLGAREDIRRLAGLRAGSLRALAGVGRAYCAKIQAWQRTALFSHEAEWAGPMIVADARRVLALKREIAVLEDLIEPLTDACAMARRLRSIPGFGPICSGELAGEIGTMERFGGETSLALYLGMATLDCSSGTHSGTKRPRQVNTRAKAAMMIAVARHMEQVPVSRAYYEKKRAQGKTHNQAVRALGRQLTRVIWSMLKHQRDYQLR

SEQ ID NO: 141030 - protein, 365 aa, unidentified
MASVSHPAPIHLGLDVHKDTISVGILDPDQQVPDVERITHDEASVRRLVARFPDRGWLRACYEAGPTGFELARLLHGMGVRCEVIAPSLIPRAPGDKVKTDRRDCRRLARLHRAGELVAIRIPSSEEEAVRDLCRTRSDMVEDLTRARNRLGKSLLRHGRPWRGGSTRTKVYQAWLRAQRFDQPAMTQTFGHYPAVVEVRNQALDAVEADLVGWCGRPPFAWQVTRLAAYRGVTRLGALTVAAEVADWHRFAHASQFMGFCGLVPSEYSSGSRVHRGRLTKAGNAHLRAQLVESAWSYQHRPSVGAEIARRQQGLPPEVVARAWAAQQRLSGRFRTLAARKHTKSIVAAAIARELAGFLWAEMTA

SEQ ID NO: 141031 - protein, 316 aa, unidentified
MQSIRNLGADVDSRSVMFACAEGSFKPHRIANERKAIRAWLHTVPPGSRLAMESTGSYHELLAELADRAGLQVFIVNARHLRRYAQGIGRRGKTDRLDAEVIARYIAREHGELHTYVAPTPAQRTLTRLIGRRAKLVKTKDSIRQSLRGLAALNAPARQLIEHIDRVIARLDLLMQRTAQQMPAVGEAAHHIATIPGIGALTSMCLGNRFTKVPYATSDAVVASTGLDPRPDDSGEKTGRRRLSKCGPAEERRLLFNCARAAARMKLWRPYYDAQLAKGLSKTAATVVLARKMLRVAFALYKHHQPFNPLLISAGA

SEQ ID NO: 141032 - protein, 437 aa, unidentified
MDEVTDEPLYRDRVCGIDIGKAGLAATIRVPSDQNPARRAAETRSFGTTKREVLALADWLRSWQVPAVVMEATGDYWKGPFYRLEAEGFDCVLADARQVKHLPGRPKHDPGDSRWLAACFERGAVTSCFVATPEFRVIRLHTRYRRDLTDERTREKQRAEKLLESAAIKLSSVVTDLHGVTGRDIMDHLIAGERSPKVLAQLARARARRKISELEAALEGAEFFTAEHAALLAAMLGRIDRVNAEISQLTEVIERLLAPYEEQLQQAESMPGWGRRSAQDALAETGADMTRFPAGAHLASWAGRTPLDNQSGKRTGRAKAKKGNRYLGGLLGETAVAAGRTQTREGARYRRLARRRGKAKAQVALGNTQLKVYHKLLSSPGMRYEDLGPDYYDRQASTRRQIAHHVGKLGALGFDVTLCRIPGADPDPSGSANTHAA

SEQ ID NO: 141033 - protein, 466 aa, unidentified
MEPFYLGIDVSKGYADFMIINSKKQPVVKAFQLDDTFEGHRTLYNTLGAFMAKHEDATLFAGMESTGGYENNWYHALIQFQGSLNIQTARLNPLGVMHNSKAELKKNTTDKISAQNIAEYLVAHPDKVVYQQEDSLAGLRKQWGFIRMLTKQCTQFLNQLNSLLYSTYPELLSFCQDGVPNWALKLLAKYPSADNLKKARAATVAKIPYVSIEKAQDLIAKAKCSVASATDLTTQQLVVATVQQILHLRKTIAGQTDLMLQECSIPEIELLKTFPGISDASAIGLMIEIQTVKRFASAKKLASFFGVHPVYKISGDGTGGYRMSKQGRIAPRQILYMTALSAIRCNPLIREVYEKHKNQGKHSRAAMGVCMHKILRILYGMLKHNQPFNPHVDLANRLRSVPMQNDSAIDKTNRQLQAYDQTAPVSRRQRIKRLERERSHNVNDTKSGITAPAPLADIIAELLPQL

SEQ ID NO: 141034 - protein, 316 aa, unidentified
MNLNTTLIAVGIDVSKLHLDVYHSGTEDYRQFANTTSGIADLVVWLNTLPDAHIAVLEATGGYEMACWQALCTANLPTARVNPKRPRDFARAAGMLAKTDRLDAKVLALYGAMMGVKPTKPKAEDLQAIEEKLLRRSQLVEMRVAESNRRRLASATIQKQIDLHIEHLQKAIDQIDKELVTRVKKTEAGQTKLALLAAIKGVGAHTQAWLIAGVPELGQLNRRQIAALVGLAPMARDSGQYKGRRRIHGGRASVRTALYLATLSAVRFDDRLKAFYQRLLEAGKPKKVALVAAMRKLLTIINAIFRTGEPYRMAAV

SEQ ID NO: 141035 - protein, 316 aa, unidentified
MTAQCVAGIDVSKARLDVFVLPQRLAFEFANDEAGIAKLRQELKGLGVERVVLEATGGLEYCAARTLADAELCVERVQPGRIRAFRTVLGKRAKSDPLDAKLAARFAQAMSEEHAHSVPSRQAETIRSLSARRRQLVDLLVQEKTRLKMSRDLFVLESLKITIAHLKQERARIEALLESAFEKDAAIARKNALLRTIPGIGPVVATTLITDLPELGRLNRHEAASLSGLAPHPERSGIARPGDHIGGGRACVRTALYMAAVCAIRCNPALKTFYKRLVEGGKPHKVAIIAVARKLIVLANALIRTDTPWNPASSIG

SEQ ID NO: 141036 - protein, 440 aa, unidentified
MNHSTHPFDLVIGLDRSDQKADLHLIDTHAGTSRAQTIGTAPEALHDWLLPLRQQHPEARVAICLEQPAASLILFLETYAWITLYPINPVTLQKFREAFVTSRAKDDGKDARYLAELLFTHQEKLQAWQPNDAQTRLLEQLVSHRRAVIDERTALTNALQSLLKTYFPQALELCGQDLWRPLATALLLKWPTLQSIQKVQPATLKAFYYRQGSRSQTLIQERLEFIAKAIALTDEAAVLQSHTLRVQLICRQLEQVQRTVAEFEKRLSALFAQHPDREIFASLPGAGPVLAPRLLASLGSERERFENAASLQSFSGIAPVTKQSGGTRRVHRRYCCPVFMKQSFHEYAQQSVLHSRWAAAHYQQQRAKGSAHHAAVRSLAFKWQRIIWKCWQSRTPYNEAIYEAALKKRGSPLVARLTQIQVGNSPVKKLKKPLVGSPQR

SEQ ID NO: 141037 - protein, 458 aa, unidentified
MLGMAGAALRPAYGEYTMMTSPATSNVRYVGLDVHKRMIVACILDAAGNVVWTAQLSTTRHAIESFAKHVLEPTDHVALEATTNCWPIAALLKPFVKSVTVSNPMATRAIAKAKVKTDKVDAQVLAHLLRCNYLPPVWHPDEQTQRMRQLTGRRAALVQQRTKLRNRIHSVLHMRLIDTPSQLFSPKGIEWLKKLLAGEQLDDAAVFMIESDLRLLESLQQEIDRFEELLAKEAYACDQVRLLMTLPGVDMLVAMALLAALGDISRFHSPREVAAYLGLVPSTRQSANKRYHGPITKCGNVQARWMLIQACQHLGRNPGPLGNFFRRIKKRKNHNIAVVAAARKMAMIAFLMLKNNEPYRYAIPRSTETKLARLRVRATGQKRKGGPGKGQKAVAKLPGGSRTIKSLDRVYAQEGLPERKQDLPPGERQMLKETGCDKFAAALASDRVVPRKSTKTSC

SEQ ID NO: 141038 - protein, 357 aa, unidentified
MNTKSVPQIDQAAEGVIVAVDLAKSVYQLRVANQQWRGIESHRLTRTQFERWFLNRVVSLVIMEACGSAHHWARWLTSLGIDVMLLPPAYIRAYVRRNKTDAADAQALLEAARNSEIKPVRVKTVEQQALQGLHRTRSLWMGVRTQHINTLRGFCREFGLHIPVGAKTGLTQMAGLIGDADSALPQVLRPAMKMMLEEVRQLEAHIEQITAQLKEVARHSAGCQLLMTVPGIGLLTGTGMTAAFADVTHMQSSRHFASWFGITPKENSSGKNRRLGRISKQGDTYLRMLLVHGARSVLRAAVVAQAAGRKLDALHEWALQVLARTNQNKAACAVANKLARICYACLKHQAPYNPRLA

SEQ ID NO: 141039 - protein, 388 aa, unidentified
MNITTDQPEAPTAIRTDLGAIFVSLELSRSSWLITSLSPGGGEKMSKHAVRGGDVSRLLERFLQLREKARARTGKVFPLIVIQEAGLDGFWIDRVLQNEGIESHVVDPASIATSRRRRRAKTDKIDGETLVRSLLAYKRGEPRVCSMVKAPTPEEEDQRRLCRERKVLTAERVLHVNRIKGLLFCQGICGYEPLRRDRRDRLEELQTGDGRPLPPHLKAQVERELDRLELLLKQIKTVEGERDALLAVAITSMPAPAAMLLDIKGIGPEFAAVLWSEGLFRHFDNRRQVAAYAGLAPTPWQSGAIDREQGVSKAGNPRLRTTLIQLAWLWLRNQPQSALTIWFHERVLRNGGRLRKTTIVALARKLLVALWKYVTTGVVIEGATMKAP

SEQ ID NO: 141040 - protein, 328 aa, unidentified
MSYLGIDVSKLKLDCTLLLDPENDKRKSKVVPNSRDGVHDLVRWCAKHGAAADQVHAVLEATGPYHEQAATTLHDGGLMVSVANPANVHDFSRALAMRSKTDALDSVVLARYGVAMKPPAWQPPPAHVRELRALITQLEALSKDRLRTMNRQEKIEASSPSELVERSISDTLSFYGKEIARLEKAIDDHIDRHPDLKEDARLLATIPGVGPKMTRTMLRVMHTHHFKCAEDLAAYLGLVPVQRQSGTSLRGRSRMSKAGPADVRALAYMAGVVASKHNPHVRALYQRLLAAGKSKMSALGACMRKVVHLCFGVLKTRQPYRPDYAFST

SEQ ID NO: 141041 - protein, 383 aa, unidentified
MPMRQVCGLDVHKDSVFVCILNEKGVVFQEKFGVLTPELEQLAAKLQELDVGEVCMESTSVYWMPVWRVLEPYVAEMKLVNPYFIKQLPGKKSDVKDAEWIATCLLKDLIRGSYVPADIIQQLRQYDRRISDLNAECVRKLGKLDAALQRCNIRISNYVSTTDGKSYKEVIRLLSEGIRDPNELLKVIHSRTVNRVGRDIILASLTGVFSDTDIDIIRQLREEVELAQRHKDECQSKMDAICQQHFPKQLKNLQTIPGVKGRSVTAIIAEVGSDVSSFQDAAHLVSWCGLKPRNEESAGKIKARSITHGNKYLRKTMIECSWGAAKTQGCFLNKFSYYQTVVRRKNKMKVQVAIARKMLVAIWHVLHDNVAYRDYTPDIAPAA

SEQ ID NO: 141042 - protein, 355 aa, unidentified
MIQEKYIGMDVHQASISVTVMDAQGKLIMECLLETKAATILELIQGLHGTLSVTFEEGTSAAWLHDLLKPHVSRLVVCDPRKAALLKEGNKSDRIDARKLAEMLRTNQLKPVYHGEHGLRTLKELGRSYLTITKDVTRVMNRIKALYRSWAIPCAGTSVYAPRHRAEWLAKIEQPGVRVRAERLYQQLDSLQPLRLQARCELLRESHKHAAVQLLRQIPSIGPIRSALLVALLQTPHRFRTKRQLWAYSGFAVETHDSGEYRSVRGKLQRNRERITVRGLNDNHNKDLKTLFKSAAISASTRPGPLQDFYVALVAKGIRPTMARLTLARKIAAISLTMWKKGVSFDPKELHRQAA

SEQ ID NO: 141043 - protein, 382 aa, unidentified
MNRQYFIGLDTHGSFCEMAVVTSDGKLAQRGNCKTTICALREMIGKVPAPRHLVFEEGLLANWLYRNLAGHVEALTVAEPRRNRLIACEGDKDDPVDAEKLAKLLRGGYVKSVHQTETLEETLFKQLVAQYQSRVRRRVAGGQQVTAILKQHGVMARAKHFNHAEDRVEILQQLPEERLLREMVTASWKEYDAFLAHEDAWRKRLVRQAKKDDVVVRLTALPGISWVRAATLRAYLDTPWRFRSVKASWKYLGIGLDRRHSGNGPELSAVPKQTNRLLKSTILGAARSAIAQGENPFAGQYEGWISRGVSAKMANRNVARSLSATLWGLWKSGTVYHPEWVGVNMAATQGIETFSRCANDAMFPRRGRSSDAKHGPASAESP

SEQ ID NO: 141044 - protein, 412 aa, unidentified
MTATNQFAAHVGLDWADKKHDVCVQFKNGERVFDVIEHTAEALDAWLTELHQKVKGRIAIALELKKGPVVYALQKYPFITVFPVHALSLARYRQAFSPSGAKDDPQDAELALELMLRYPQKIKAIEPDNADIRLLQQLVEQRRQLVEDKRRFVNRIINTLKQYYPQPLEWFSHRGSLLLCELIIRWPSLQQLKRARRDTIRNFLNAKGGRAMALTEQRVASIDNAIPLTTDPSVIEANALMAAALATQIKVVSEIIKTYDERIETLFDTLPDAGLFKSLPGMGPCMGPRMLAALGDNRDRFNSAEEIQNYAGIAPVTERSGQKSWVHWRWQCAKFVRQTFVEWAAKTVNSSYWAKLYYQGLREKGKSHQSAIRALAFKWIRIIYRCWKARTCYDEAKYLLALEARHSPLLKP

SEQ ID NO: 141045 - protein, 348 aa, unidentified
MAMTIVESTRPVTGGVDTHADVHVAAAVDANGGVLGVQSFATTPAGFGELHGWLTGFGGLVRVGVEGTGAYGAGLARFLRTRNLEVIEVDRPNRQLRRRAGKSDTIDAIEAARAALSGRASGIAKTADGDVEAIRVLMVARRSARDVRIKYLNQIRHLGFTAPDELRERLRGVPPDQLARTAASLRPAPTTGTVMHATKLAIRSLGRRVLDLEADADHLDRRIHELVRRTAPSLLDVYGVGTHTAAILLVAAGDNPHRLNSEAAFAHLCGVAPLPASSGKVIRHRLDPGGNRQANHALWRIVFTRMSSDERTRKYVARRTSEGLTTREVMRVLKRYVAREIYPHLAHA

SEQ ID NO: 141046 - protein, 376 aa, unidentified
MYSITKYVGFDVSKEKIAVSVADFGIAPARFFGLIENIQGDIGKLLKRLGKPEELYVCYEAGVMGYGLARFLKALGIKCMVVAPSKIPQAPGPKVKTDRRDSMRLAELLRAGELIAVWVPGEDDEALRDLSRARKARKEDLKRAKQRVKMFLLRHGIRKPDGMKAWKEPYRAWLRSIEFPFRAAQMAFQEYLIVVEEIEQSVRRLDLEVHEIATDSPHAPVIQALQALKGIKETAAVTILAEIGDFTRFSNPEQLMAYAGLVPCEYSSGNKTWRGNVTKTGSSCLRWILTECAWSYRYKPRISLDLMKRLEGLSPHIQAISWKAQVRLNKKFTKLLIRGKSGSVAVTAVARELLGFIWAVAMQVNYEMEGGQGEVA

SEQ ID NO: 141047 - protein, 344 aa, unidentified
MNTITGVDLAKAEIQVCVCKHNQVQSNRDMTPNEFSIWLANSKPMMIVFEACSTSNYWKQVALSHGHDARLISAKLVSTVRQNQKTDKNDALAVAQAAQLTDVTFINGKTHQQQELQTLTRLRELAVKQKVASQNQLKAILLEFNIRISPQKGGLNGVVQDLLEDAENGFSDLFREAIHTAWQTLLANIQLVKQYDNLIDKAANEHPDCKKLQGIEGVGPMNAINLYLSLGCSDIGVFKKGRDASACIGLTPIQHSSGGKTKLGSVGKHIKNGKIRSCLVNGAMSAINHTVKRKARTTKEQWIQSLVARRGKKCAAVALANKTVRTAFAMLQNNTEYKAELLPA

SEQ ID NO: 141048 - protein, 346 aa, unidentified
MNQSTLIAVDLAKEVFQVALARAQGKAYAHHRLSRTRFEAFLAKADRSIVLFEACGSAHFWCRQARELGHEPIMLPAQFVRKYRLRNKTDQTDTEALLDAYRSGRVHPVPVRSVDQQQIQQLHRVREQWKSTRVARINGLRGCLRELGHAIPAGPNAAKRHAQAIIDQEGFPAGLRAVFSELLQEITDLEAKITLAEQQIHALTRDNDEVSLLQQVPGVGLLTSTALVACAGSPDHFKSGRHFASWLGITPLECSSGNKRWLGRITKRGDKYLRMLIIHGARSALCRAKTLAKAGKPLNRLQRWALRLEQRVGFNKATVALANKMARICWAVWKQRAPFNPGPVLS

SEQ ID NO: 141049 - protein, 322 aa, unidentified
MATLGIDISKADFHAFLIDGDRKAKHSFPNTAAGFKQLLSWLKNRGVTEISACMEATGSYWEALAIHLYEAGHRVSLVNPRQTKSYAQSELLRTKTDSVDAAMIARFALAHKPEAWEPPPAESRMLQGLVRHLEDLKTTRAQELTRIQTPGLPAFVEQSIQRLIDSLSGQIDEIERAIRDHINRHPALKDRYDALRSIKGIGETTASLLMAEMPTIERFSSGKAVGAYAGLSPRLVQSGTSLRKRGKISKTGNSRLRKALFFPAMTAMRFNPVLKAFAQRLRNVGKPRMVIVVAVMRKLLTLAYGVLKSGHGFTPALAGRAA

SEQ ID NO: 141050 - protein, 441 aa, unidentified
MAMRTQDEEIVFPNAAGIDIGGSSHWVAVPRRSTDEPVREFGPMTDDLNAMADWLIACGVDTVALESTGVYWIPVYEVLEQRGLSVWLVDARQMKYVPGRKSDVQDCQWLQKLMTFGLLRAAWRPKGDVCTVRAVARLRDVLLAEQASWVQRMQKALVEMNIQLTEVLTDVMGLSGQAIIRAIVAGERDPKALARHRNARVKASAVEITKALTGNWRAEHLFVLGQALAMYDDIARHLVECDARLQVLLSELGHSEVDLGKAPRAGSKVRQEFDARQTLANWAGVDLTRINGLGLAAVMKILSEIGPDVSRFETVKHFCSWLGLSPGTKISGGKVLSAKTKRSANRVRQVLKLAAMSLSRSDSALGAFYRRLCGRMDKPRANTAVAHKLARMVYYMLTRGEAFVDKGQQHYEEQQRQRSVAALKRRAAALGFVITSTAAPA

SEQ ID NO: 141051 - protein, 384 aa, unidentified
MFQNDENGLLSLLAWAESLKEKHGMNDTILGVEPTGHYWFPLFHFLKPQGVQVVLVNPHHVKRSKELDDNSPTKNDIKDAKVVAKLVIDGRYTEPQLPEGIYAELRVLMNQRDRLNGDFNRVKGRIHNWLDRFFPEYTQVFKDWEGKASLITLKYFPLPQEIVRAGETSIVALWKREGVKRAVGPKRADLLFRKARKSIGLTEGAMAAKHELAMYLEQYAMLCRQIEELMVLVAELVKQIPGAAEMMTIPCVKLVTVAGFLAEVGDLAKYEHSQQIVRHAGLSLRENSSGMHKGETTISKRGRCRLRAILYRAALVLVSKNPEFRALHTYFTTRRDNPLKKKQSMISICNKLIRVLFELGRKQKVYDATKVLGPHREAQLQAAA

SEQ ID NO: 141052 - protein, 393 aa, unidentified
MQTAADRPEAPTTIRTDLGAIFVSLELSRSTWVITSLSPGGGEKMSKHSVAGGDIAGLLERFAQLREKARARTGKNFPILVIQEAGLDGFWIHRTLQKEGIESYVVDPASIATSRRRRRAKTDRLDGEALVRALLAYKRGEPRVCAMVRAPTPQEEDRRHTCRERKELIAERVKHVNRIKGLLLSQGVSGYEPLRRGRRAQLDELKTGDGRILPAYLKARICRELDRLELLLAQIKVVDGERDALLGAEEVTALAPAASTPAAMLRDIKGIGPEFAAVLWSEGLYRHFDNRRQVAAYAGLAPTPWQSGSVSHEQGVSKSGNPRLRTTLIQLAWLWLRHQPQSALSLWFKERVERNGGRFKKTTIVALARKLLVALWKYVTAGVVIEGVVMKTA

SEQ ID NO: 141053 - protein, 302 aa, unidentified
MLVANSTKGYKALLKWFRKINRDLSEVIIVMEYCGVYTYSLEKFLHEHQIDFVKRSALDIKRSSGIKRGKTDKADARMISQYGWYRREELKPMKPVSREQRQLQQLMAHRDKMVADRSSYQSRIKELHQQMGSDLNEKITHSTRHIMDVLKDEIKEIELQIEEVIKSEQALQSNYSLITSVKGVGFVSAVHLLIVTENFTRFTDVRKFACYCGVAPFKNESGTSIRGKTRTSHLANRKIKSLLTMAAISAINHQPELKAKYEKKLKEGKAKMVALNMIRFELIERTFAVIKRQTPYVLKTAA

SEQ ID NO: 141054 - protein, 300 aa, unidentified
MRRSRSWKGVPLNVGMDVHKGTIVVAERDPSGSERERTLPNEPKAVSRGIRKVVREAPGPVRCAYEAGPCGYALQRQLESEGVHCVVIAPSLIPRKPGERVKTDRRDARKLAELFAGGLLTEVHSPTPEAEAVRDLCRAREDAKLDQTRTRRRLGKSLLRHGLIWGRKNWTQAHQQWLRGLLLEHPAEQATFDAYCTAVDQAANRLHAIGRELAVWAEMGPYASPVARLRCQHGIDTTTAMTIVTELHDSHSFRRARELMGFVGRVPSEHSSGEQRARGAITKTGNAHVRRVLVEAAWPY

SEQ ID NO: 141055 - protein, 387 aa, unidentified
MPQPNDLSRSLVALDQNSTIIAVVELSQSSWLVAGVLPGVERQPCKKLEPNPEGLLVLLHRWRDEAVRAGRTITRIALAFEAGRDGFWLARWLEARGVEAHVIHSSSVAVSREHRRAKTDRLDTELLKRGFLGWLRGERGHCSMARVPTIAEEDAKRPNRERECLVGERTRVVNRIKSTLARLGIRNFNPTLRKAAERLASVHTPEGIPLPPNTLAELQRDMARLGFVVSQIRQIEDARQKRLEQQPETGSHPMVRLLARIVGVGVETADLLVHEVLSRPMRDRRAVARYAGLTGSPDESGAQRREQGLARAGNARVRRGMIQLAWRFLMFQKESALAMWYRARTADSRRGTRKTMIVALARKLIIALWRFVTTGETLEGVILRPAG

SEQ ID NO: 141056 - protein, 394 aa, unidentified
MGKIYVGIDIAKDRSSAHGIEEGGRSCFDLTFDMDGSGFAELLKTIASNGGTSGNIIAAMESTACYHINLYSFLSAKGIKAFIINPLLIANYAKLSLRKTKTDKKDARTIAQFILAHKDSVTQLAVSQDLQDIRDMARERESLCHQISAVKVEIQRVLQTTFPELAAMTNPLTKVMLHFIQRFPSARLVSAAKPSAIEKTLKEKPCSCRLRFTPKELIEVARTSIATVSPAKELILSGKIETLLHLQKRRDELTKALTEYCELSIVEDLKIVTSIGGISNNTATTLLAEIGRIDNYASHKNLIAFAGIDPTVYQSGKYEGASRISKRGNRHLRRVIWIMTVSVIRHNPTFRKYFFKKRNEGQPFKKAVFATAHKLIRVIFAMLSKRAYFKEECV

SEQ ID NO: 141057 - protein, 367 aa, unidentified
MNQRTYVGLDVHARGIRCCAIDERTGEIIRQRLPANNAGVVDWVAGLGQPVRVVYEAGPTGFGLARDLKGAGFPCLVVAPSKLQRPAGDRVKTDARDAEHLARLNLLDQITPVAIPAVGREAARDLVRAREDVRSDLMRARHRLSKLLLRHGIVYSGGQAWTGVHHTWLHQQRFDDPNLQAAYEASLETVELALDRRDRLDARITALAETEPYAEVVRALMCLRGISVLTAFGLAVEVGDWTRFTGRTIGAYLGLVPTEHSSGTTRSQGSITKTGNTHARRLLVEAAWHHRRSYRPSREMMARWNKADEASRIRGHQGNHRLHRQWENFEARRKRRVIANVAIARELAGWCWSLAVPVQRQHPWPAE

SEQ ID NO: 141058 - protein, 459 aa, unidentified
MLAWTSLKVKQMLLSSRSVIVDLLNLNSCVKNYLLSLLNQKLLLFLETVRSYSDVNCTSICFALEVTGIYSTNVYDYIKANLYENESIKFLNTDFVNQWRIAHNIAKSDPLDAQTISTIIGTDSDVQYVNDNVFENKNGYQDLKALVHRHYQIKKIYSQEINRLIAQCDCLFPELQYVFEPKSAAFIAVLSSYPTTHDIINASRVEVFDVVYEATKHRCSMDKVDKLFELCQDTLVPDDISSYGKSIILDLVENIKNIKGQLKSIERYIKDIASLNPAYKLLLTITGCGPITAATVIAETGNIRRFKNADCFVSYSGTSPRNKRSGTSVETMGKISKKGSRYLRHAIYMIAEFARRHNPVLKHQFERIKNGNKKRHKLANIAIANKIARYIYSIMKNKSSFVILHDHIMRLPEETRDTFFNSISLDFPKNTRKQIYQYSDINGELHRFVYIKTDEMIPA

SEQ ID NO: 141059 - protein, 342 aa, unidentified
MDHYAGIDVSLECSSVCVADANGKIVREVKVTSEPSALIGWFHSLGYDLARIGLEAGPLSQWLYAAMKQAGLAVELLETRHVSDAFKAMPVKSDRNDARNIAQLMRLGWFRPVHCKSLSAQEIRAMLTARKLIQTKLLDVENSLRGILRGFGLKVGKPTRTSFASRIEELLEDHPNLREIGKALLRVRAVLLAEFNGFEKRVRAVSRLHERARLLMSTPAVGPIVSLTYASAIDDPSRFTSSKRAGPLFGLTPKKHQSGETDYSGRISKLGDASVREALYEAAHIMLTKPIKGCAQLKSWAMRIARRAGMSKAKVALARKLAVIMLRMLKNNVPFNPAAKAA

SEQ ID NO: 141060 - protein, 325 aa, unidentified
MIIGVDYHPSFQTIAFFVEETGECGEQELNHSDGQAEKFYRDLKQRGICVQVGMEATGYARWFERLLAELGFELWIGHPAEIKAKRVKMLKYDREDARLILRLMRENNFPRIWVPGPENRDLRQLLWHRHRLVQMRTRILNQLQALAMNEGYHWRKKLFSEQGRALLEKLSLAPWASRRRQELLELLDRLNPTIEELTAAVEREARKRPEALRLMTHPGVGPITALAYVLIIGTPARFECGKQIGTYVGMIPCEESSGGKQRLGHISKQGNSLLRYLLVEAAQAAAHLHPDWRRRYMHLAMRRHKSIAKVAMGRRLEYHIRTKRA

SEQ ID NO: 141061 - protein, 361 aa, unidentified
MIVQGTSVGLDVHARSVVAHAIDEDSGNVIRETLVPDAATIVSWLHSLAPPVRVAYEAGPTGFGLARAITAAGMECVVAAPSKLQRPAGDRVKTDARDAAHLAKLLRLGEVVAVGVPEEGTEAARDLVRAREDARSDLMRARHRLSKLLLRQGIVYSGGKPWTGVHQQWLQRQRFELPLLQAAFDNDLDAVLSVTARRDRLDELIEQTAATDPWRAVVTRLSCLRGVSTLTAFALAVEIGDWSRFSGATIGPYAGLVPSEYSTGGTRSQGSITKAGNAHVRRLLVEAAWQHRRPYGTPGQTMRRRWEAASPSARARGHAGNRRLHKRWQQFDRRSKHPCVANTAIARELAGWCWSLAVLDD

SEQ ID NO: 141062 - protein, 337 aa, unidentified
MEQVTTIGLDLAKRVFQVHGVDESGRVVLRRQLKRRQVVPFFAKLAACRVGLEACGTAHHWGRQLQALGHDVRLIPPAYAKAFVRRNKTDPADAEAICEAVSRPWMRFVPLKSQTEQAIASVHRVRERLIAQRTMVQNMVRGQMAEFGVVAPKGAGHVKELVGALADDSAVPEPLRRVLLGLWQVLGELARQIAAIDAELLAWHQASARSRQLATIPGFGPILASAMAVRVQRPERFASGRDLAAWIGLVPKQASSGDSMRLGRISKQGDVYLRRLLINGAQAVLNSKRARLDPWIARLLANKPRLVAAVALANKMARIAWAVMVRATRFRAVPAAA

SEQ ID NO: 141063 - protein, 419 aa, unidentified
MSFKILKFKCCGLDVHKTWIYACIGITDSNNRTEYKQARFSSFTKGLNELCDWLAKYNCTDVCMESTGKYWIPVFNILEQHNLWVTLSHPKYTKPMKGNKTDRKDAKWICDLYMCGMVKPSFIPPADIRELRDLVRYRYKLTCMITGEKNRAQNCLTVSNLKLDDVFSDVFGKSSRSITEQILQHPGEKFDVAPFVHGRCKTPIEEIQAAVDGAISKEQAVKLRQCLDHIDELNKHISELEQEILRLSDKYEAALNLIRTVPGFDKNPMTAVQILSEIGGDMSVFPTAKHLVSWAGCCPCNDQSNQKIKSTRISRAGSYFKPVLVQVANALIKSKKHLEFTNRYKRIKARRGHKKAIIAICRMILTAIWHILSDLKPYTPEGFLESHPVKEGKVLSSSQALNFFKQRGYIIKDEPLSVS

SEQ ID NO: 141064 - protein, 316 aa, unidentified
MNSQVFIGLDVSKQHLDVAVRPQNHHFVTPNDDRGIKQLVKRLAALKPQLIVLEASGGYEFLVTAALAEAQLPVALVNPQAVRKFAGATGKLAKTDKIDAQVLAHFAEALRPEPRPLPDQAQQRLKAALQRRLQVVKMIGQEKNRLEKTFMPAVRQDIQAHLTWLSQRREQLDRDLSDQIRQSPLWRDRDRLLRTIPGIGPIVSRAVIAQLPEAGALPGKKTVALVGVAPYNRDSGRFRGKRMIRGGRSYLRRMLYMAAVVASRYNPVIRAFYQRLLAAGKPKKLALTACMRKLVLILNAMLKNNQPWNQFINQVP

SEQ ID NO: 141065 - protein, 355 aa, unidentified
MPKLTTHSIVIGIDVHKYTHTAVALDCLGKEHERLTFSNDELDKCVGWLSRLGSTENLLIGLEDVNGHGLHVAKRLEKEGFSLIYVPPVLTDRERAHSVHKDKSDELDAKRVGKVILHKKEETLPATPSIPQQKERIRAIDLLLQERRDLVREQTKLKNQLHMLLHQHYGNGYRQGFSSIFSVKSLRWYSASLKKEKASSPLLKGILRRIERLELIYNQIKEIDQTLYKESRHIPAISKLKAKLSGCGHLTACKVVAEIVEIDRFQNRDKLAKYTGIAPITRGTGKTNRVYTNPYGNRKLNQAIHTIALSQIGNAGFFEARIYYEKKLSEGKSKLWALRCLKRQIINQVYDILTT

SEQ ID NO: 141066 - protein, 424 aa, unidentified
MNLTQNDRLKQVTSDTLIVGVDVGSQTHFCRAFDWRGFELSRRVFKFSNTGMGFLTFLRWTEELMNKTEMKKVIVGCEPTGCYWLTFQKFLQDQDIQLVTVNPFTVNRSMELDDNSPEKSDLKDPKTIALLVKDGRFSTSYLPSGVYAEIREASVCRDQIMKQHVRLSNQIQGCLQKFFPEYFECYTDWDSTSGLMLLREAPLPQDILKIGAGGINQIWRNAKVRAAGIKRAQTLVEAAQNSVGLEAGEAARLEIWVLVNDYILKAEQLKRLDEYLEEKVKEVPNVEKLLAIKGVGMSTVIGFIAEVGDIGRFTDPKQIQKLAGLEIVKKSSGKKKGQPRISKRGRRKLRRTMYESARALMTWNPAFQDVFLYYRNRTKNPLGGMQAKIAVACKAIRIFYAVLQTGCDFDEEKFRKDIIRPEAA

SEQ ID NO: 141067 - protein, 458 aa, unidentified
MGEYMMKGKKNRTNTHKKRLQQHLEHVNLYAAGIDIGSREHYVAVPPSLDEDSVKKFGCFTPDLEAMADWLVKIGITTVAMESTGVYWIPAFEILESRGLKVILVNARHVKNVTGRKTDVKDCQWLQQLHTYGLLHGAFRPEDDYVSLRAYMRQRETIVSHLASKIQHMQKALRLMNVLLDNVVSDITSQTGMAIIRDILSGIRDPKELAKNRDCHCKNSAEIIAKSLVGNYRDEHLFALKQSVELYDFYNAMLDECDQVICQYLSTLCTQADASEKPAQKKRKKCNSNALRFDASINLYELCGVDLTAIDGMEEHGLLKIIAETGIDMSKWATENRFTSWLGLSPNNKISGGKVLSSSSIKTKNRAKQAFKMAAFSLSNSRSGLGAFYRRLRARIGAPKAISATARKLAVIFYKMLKNKTEYRKQSQEEYDELHKSRVLKQLKHKAKLFGMELIASE

SEQ ID NO: 141068 - protein, 327 aa, unidentified
MFDKEGYMSDSTERFVGIDVSKDSLDLFADPPAPQLSTHCGYDDATVHKLANALADLAPTLVVMEASGGLEQRLAAELAACGVQLAVVNPRQVRQFARALGELAKTDALDARILCAFARAIRPQARAPHDADTRDLADLLSRRRQLVDMRVQELQRQHTASSRTMQKSLTEHIAWLDKRIAQLDEDMGQRLRASDIWRAKDDLLRSIPGVGPVLSLTMLGLCPELGQLNRREIAKLVGLAPLANDSGKYRGPRRIWGGRADIRRVLYMGTQSAIRHNPVIAAFAARLHLTGKKPKVVIVACMHKLLTIMNTMLKTGQSWQPPEQRTQ

SEQ ID NO: 141069 - protein, 344 aa, unidentified
MYFIGVDHHKQVSVMTVLDEDGRELRNERVVNLRSHVQRFLEGYRPFTAVLEAGRASYVMADLLRELGGEVKMANPLQVKAIAHARIKTDKRDSRTLAQLLRANLIPEVYQRGQWNRRAQRVMRMRAYWVGKQTEVRNKIRALLAQQREEVRLEVEKREGGLFSPKGLEFLRLLALEGQDKLVLDDLLQGHREIQAHVKVTDGLVKALYGELEDAARIDTVPGFAQTLSVLVAVEIADIRRFPRPADLHSYAGVIPSTHASGSRTYHGHITKQGSAWLRWAILEAVYPAIKKDLALWALYKRLARRKGANVAKIAVARRLLTIVYRVLSERRNYIPGLRKQSAA

SEQ ID NO: 141070 - protein, 443 aa, unidentified
MNELSTAHLRGPRGQAFADLVRGIAPEHVLCVSLDISKYFHVVMIHNGLGEIVMPPFEIDMYQSGFDQLGQAIERAKAGTQAQVVLVGLEPTSHYFENLARHLLQQAQPVTLINSFAVKQNREQHLMRREKTDQIDVAAIGDLLRRGEGTPYHPATGVYLALQQLDRVRLGKVRLASILKNQIIGHLDRIFPGLLILDEAAQRRSTPLFNTDFWHCQTLQDLIRVCPNPHDLSRLTPQQLVQLFHAQQRRLGPATAAKIIAQARKTLLPDAELATIRCELLQHDLALLETVQAHLTQLESRLVELVVPTPYHIWTQCKGLSAVQVASLAAAIGDPTNYPEAAQVFRRSGLVSGRNDSGNRQRHGKGNSILKTGDVYLRRALMSATATLILHQPVLAHYCKHLQVTKPAGVARVATARKTIGILWAVLRDQSSHTLLTRKEADM

SEQ ID NO: 141071 - protein, 344 aa, unidentified
MTDVSILAIDLAKHSFQVCAVNAEGVVLYNRKYSRGKLSELLASHPRCLVAMEACATSHYWGREAQGHGHDVRLIPPVYVKPFVKRSKNDANDAAAIAVAVRQPDMRFVAIKSPEQQAQAMLFRTHQTFTRQRSQLLITLRGHLAEHGIIVAKGNAALLAYEDVLEAQPDLVPNLVLEAARFYFHHIAQINTTIATFERQMRDTAKRDDTARRLQTMPGIGPINAAAFLAFAPPMENFRKGRDFAAWLGLVPRQHSTGGKTKLGRVSKMGQADMRRLLITGATACLRWAVAKGIDPQSWLGRLLARKPFKMVAVAMANKMARAMWAMVTKEQDYSGGLVQYAKA

SEQ ID NO: 141072 - protein, 470 aa, unidentified
MAAVMIGVDPHKASHTAVAISAAEEPLGELRVRACVAQAERLLAWAAAWPQRTWAVEGAGGTGHLLAQQLVSAGERVLDVQPKLGARVRLLAAGDVNKNDPNDARSVAVAAMRSAGVQEVRADDHAAVLKIWSKRYRDLGRSRTQVVCRLHAVLGELIPGGVPKAITAARAARVLKAIRPEGAVQAARWELAAAFLEDLRRIDAGIRETRKKLAAAVAAAGTSLTGLFGVGPVIAAAVIGDVRDVSRFPGRDHFAAYNGTAPIEVSSGQRKVYRLSRRGNRRLNHAIHMAAITQIRNRHSQGRAYYDKKLAEGKTPKEALRALKRQVSNAIFACLQADARRAAARAKGPGGQQGNDSVASAADSHPRRRLFGQATPGPGHHPTAKPGGPPPGPARSRDRAGHSPVAATLPPATPKVQVERLQRSEDERPGGAARRRPHSAARKATGQTAQVKTQRPKGTSQAAERTDGTS

SEQ ID NO: 141073 - protein, 304 aa, unidentified
MFGIGIDVSKATLDVAVHEEQFRQFSNDKRGIASLIKWLKKWPIKQVVLEASGGYERAALDVLHAAGLPMVRINPARARRFAQGTGRAAKTDRIDAMVLAQMAHLLPLTRYVPPAAWQKRLAEFAQSRRHLVQMRVSEMQRLRRLVDPDLIAMKQRHIAQLSDDLKQLDKAIAEQLEGQPGWQGIGSVKGVGPILVSTLACELPELGSLGSKAIASLVGLAPMNRESGSWQGQRRISGGRAVVREALYMAALTAIRYEPRLRDFYAGLKAKGKASKVALVAVMRKMLVILNARKRDAEVALGSP

SEQ ID NO: 141074 - protein, 511 aa, unidentified
MAPVLAVTLSLLILEPDMPTRKAPHPARTAPAPAAAKAAARKGRQPPASPDPAAAALLQALNPHAAGIDVGTTELWVAFPPGTPLPPPPPGHPDNLPANVRRFGTFTADLEALAEMLQGAGVTTAALEATGVYWIPLYDVLEARGLRPLLADPRQTRDTPGRPKTDVKDCMWIQRLHSLGLLRAAFRPDDPIRVLRDYQRHRKSLVEDQSRCVLRMQKALEQMNVKLTEVVSDVTGVTGLAIIKAIVAGERDAKVLAGLRQRGCKNDEATIALALQGNWRAEHLFELGQCLKTYEHYRGQVAECDRAIEAHLKTMALPEKPEPLPAGKEAGRRRCGNEPHFDARQRLYEAVEVDLTAIEGIGAGTALAILSEIGTDMSRWASEKKFGSWLGLAPNPKKSGGRLKSAKTRPGASRAALAFRLAARSLIHAKSGLGAFLRRIAARRGMPKAITATAYKLARIVYGMLKHGAAYAAKGAEEYEKAYRERAVRGLRRKAAELGLEVVEKQAAQPA

SEQ ID NO: 141075 - protein, 323 aa, unidentified
MLPVLGIDVAKAKCDLALQCPDGKLRHKTVTNTAAGHADLLAWVGRQVSGAVHACLEATGVYGDAVALALADAGHTVSIVNPLAISAYAQSELRRAKTDRTDADLILRYCRAQRPPAWVPPAPEIRTLQALARRIVAIDQMRQQELNRLEAYPTQDVVRESITAVLAELTSELEHLKQLVRDHIDRHPDLRGRRDLLITIPGIGETTAITLLAELFGPMPYLSVKQAVATAGIAPGVKQSGSSVRGRGALSSLGSRRLRKALYFPALAAIRCNPVIAAMAKRLEARGKCKMVIVVAAMRRLLHLAFGVLKSNRPFDLSIALSD

SEQ ID NO: 141076 - protein, 463 aa, unidentified
MTDKKLWRNRKERKEWARRLQSEDPGLEIVHPHAAGIDVGNGAHYVAVRPDRDPEPVRRFECFTADLHHLADWLQSCKVKTVAMQSTGVYWIPIYEILEERGFQVYLVNARHTKNLPGRKSDVQESQWLLKLHTYGLLNNSFQPPSEIRVLRTYWRQRAEHVHGAATCIQRMQKALTQMNVQLANVISDVSGLTGQAIIRAIVSGERDPRKLAELRDPRIHATHEEVAKSLEGNWRPELLFVLQQEVEMYDIYQRRIAECDQQLQKHLASFVDIIPSPTSQVEPKRKKAKPAKNAPRFELSSELQRITGVDLTRIDGIDIMVAQTLVSEIGLDMSRWKTEAHFASWLGLCPDNRVSGDKVLGRATRRVINRAATALRMAAVTLMRSRTYLGAQYRRLRTKLGAPKAITAMAHRLARLVYRMLKYGQGYVDKGAEYYEQRYRRQQIEFLTKRATKLGLQITVAP

SEQ ID NO: 141077 - protein, 343 aa, unidentified
MQTITTIGLDIAKSVFQVHGVDADGHVVVRRQLKRRYVLAFFQKLPPCLVGIEACASAHHWARELQALGHTAKLMPPAYVKPYVKRQKNDATDAEAICEAVSRPNMRFVETKTPEQQSYLMLHRTRHLFIRQQTAVINAIRSHLAEFGIVAPVGRNGVDQLLGVVADAGDKRLPEIARACVAALGAQLQTLKAQVLQFDRLITAWHRSSEASRRLDAIPGVGPALATALVASVANPKAFRSGRDFSAWIGLVPKQNSSGGKDRLGSISKRGDRYLRSLFTAGALAVIRYAKIHGTKHRPWLTSLLSRRPTRVAAIALANKIARMAWAMMAKGERYKEPAALAA

SEQ ID NO: 141078 - protein, 275 aa, unidentified
MKLRTIGIDLAKNVFQACGVNEHMKSQFNKRLKRNELLDFMRQQAPTMVVMEACYSSHYWGREMAKLGHDVKLIPAQHVTPFVRGNKNDPNDSFAITEASQRPYIRFVPVKTEFQQEILCLHRIRERLIKNKGALSNQARGLLSEFGVVFPCGHKALLNGLNGVIDNAQYSHRLQNMMIDMLIEYETTQKRLKGIEQQLEIFVEGSESGRILLSIPGIGIINASALLASIDKGQAFSHPKEFAVWLGLTPKQHASGNISKMGGITKRGDRYLRKQ

SEQ ID NO: 141079 - protein, 401 aa, unidentified
MGTQLDKAWVGVDVGKTHHWVCVVDADGKTLLSAKVANDEAEIMALLASTGSLAGQLIWAVDIIGAPSALLLALLAQAGQSVRYASGRVVAAMSAAYAGEGKTDAKDAYVIAETARLRRDLSVIDTGTDLVRHLAVLTGHRADLVADRVRMINRLRDLMTSVFPSLERAFDYSSHKGALVLLTGYATPDRIRHLGQTRLTAWLRSRNVRGSANVAARAVAAAKAQTVVLPGQDLTAGIITELANGILTLDERLKSLDTQIAATFAEHPQAAIIESMPGFGPFLGASLLVGANDLRAFPSAGHLAAAAGLVPVPNDSGRRIGNLHRPSRYNRQLRHVFYLSAQTSMMRAGPNRDYYLKKRAQGATHSQAVIALARRRIDVLWALLRENRMWTAAPPPLAQAA

SEQ ID NO: 141080 - protein, 441 aa, unidentified
MAMRTREDDEVYPNAAAIDVGASSHWVAVPRTADHQPVREFGTMTDDLNAMADWLLACGVDTVALESTGVYWIPVYEVLEQRGLTVWLVDARQMKYVPGRKSDVQDCHWLQKLMSLGLLRAAWRPAGEVCVVRAVVRQRELLLTEQGSWVQRMQKALVQMNLQLTEVLTDVMGTTGQAIIRAIVAGERDPKVLARFRHSLVKASTEDVIRALTGNWRDEHLFVLAQALAMFDSLAERILECDAKTEALLVPLGRHDVELSGPDKKRQKNTPRFDARTALARWAGVDLTRINGLSVATVMTILSEIGPDLSRFASVKHFCSWLHLCPATKISGGKTLSSGTRRSANRARQALKMAAMSLSRSDSALGAFYRRLCARMDKPRANTAVAHKLARMVYFMLTRGEAFVDQGQQRYEEQQRQRSIAALRRRATALGFQLQPNPPTP

SEQ ID NO: 141081 - protein, 345 aa, unidentified
MKQYAGIDVSLEYSSVCVVDADGRIVREAKVLSESDALIAWFGKLGVAMERIGLEAGPLSQWLYAGMAKAGLAVELIETRHVRAAFKTMPVKTDKKDARGIAQLMRLGWFRPVHCKSLPAQEVRALLTARKLIQGKLHDIEMSMRGILRGFGLKVGPTTRRTYAARIRELIEGHPTLEAIAASLLKVRDALADEFARFERKLRAIARQDDNALRLMTTPGVGVLVALTFVSAIDAPERFRSSRAVGPHFGLTPKKYQSGETDYSGRISKIGDVGVRTALYEAANVILTRPVKGSDLKNWALAVAKRAGPRKARVALARKLAVILHRMLRDGTNFIPRKAVSAMAA

SEQ ID NO: 141082 - protein, 343 aa, unidentified
MYNAVGIDVSKGKSTVAVLQSGGTVIRKTFDVSHTSQNLNELADYLSSLDGTTKIVMECTGRYHEPMVKALSEAGLFISIVNPHLIKNFGNNSLRKVKSDPADARKIARYTLDNWTELRQYSGMDNTRTQLKTLNSQFSFFMKQKVAAKANLIALLDNTYPGVNKLFDSPTREDGSEKWVDYAYSFWHADCVRKIGLKAFTERYMSFCKKHHYIFQQDRPEKLFNASKELVAVFPKEKTYKLLIQQSIQQLNLASEHVERFRREMNELASTLPEYSTVMGIYGVGKTYGPQLIAEIGDVSRFTHREALTAFAGVGPGVDESGQHKSKSNRASKVGSARHCFRS

SEQ ID NO: 141083 - protein, 315 aa, unidentified
MSEIVVEKFVGIDVSKGTLDLCIEPAAESLHVAHDEAGIAQVVKRLKEVAPTLIVMEATGGLEVRLASELAGQGLPVAVINPRQARDFAKATGQLAKTDAVDAAVLAAFARAIRPAVRPIKDADVRELDDLVTRRRQLIEIRVQETLRLGTASKVQKKSLTAHIAWLDKRIVDLDDDLTRRLRSSDVWRAKDDLLRGIPGVGAVTSLTMLAKCPELGTLNRREIAKLTGVAPLADDSGKHRGKRFIWGGRADVRAVLYMATVSAIRCNPAIKAFAERLKQAGKPAKVVIVACMRKLLTIMNTMVKNNAPWNPKIT

SEQ ID NO: 141084 - protein, 408 aa, unidentified
MPGPGISVQPVIVMRFAGIDVASQTHVLAVTTETGDILVKPTPFGEDRAGYEKLMTLLDSATDLLVAMEATGHYGRNLFGALCEWGYQVALLNPLRTHRFAQEDLRRAKNDSIDALGIARFAAQKRPAPTAPFDEATDQLREFTHLYERLTQDFGDRVRQVHRLVDLGFPEFTRHIPNLGTHRATSILAEYPSAQAFCGSCLPTLASMRYDGSHAVGQPLASALVEAAPSSVGRHHGPAYRLAMRFLCRDLDRLRQQLRELHQEIDARVAQHPVGTLLTTIDGLGTIAVARLLSAVGDPAHLRSGAALASYVGAVPGSNKSGLRWANRASLSPLGNARLRRTLFMTTLGAVRRNPWLRAYYERLRARGKLPKVALLAAMRKLLMAVYSVAKHRQPFVPRLPVNRDPPK

SEQ ID NO: 141085 - protein, 365 aa, unidentified
MAHVEDQRGAKPTHYGKVKTTKTAITKLARQYQSKYPHATLHFVYEAGPCGYWIYRLLTSLGHCCYVVAPSLIPKKPGERIKTDKRDALKLAKLLKDEELTPIYVPEPEDEAIRDLSRARETAMKDLKDAKYQLKALFLRNNITCKVNDNWSGQHLRWLTELILPHPSQQIVLQEMIQIITERIGREKRLANELFHQVKLWRFYPVVKALQAIRGIKLLIATGVIAELGDLRRFDHPRKLMSYLGLVSKEHSSGDNRRLGSITKCGNGRARRLLVQGAHTYKHKANISTELQKRQEDLPKGITDIAWQAQLRLCRRYSRLMSRGKHRNVVVIAIAREMAAYIWAIAREVVISPVNPRLRVSRVPA

SEQ ID NO: 141086 - protein, 399 aa, unidentified
MITKLSLYVKGFGVAAVRKSAAMKNFAIKLKIMKQQTSATSETLIEGRNIIDFTGKTIYVGIDVHQKDYQVAKVYDGICLGNHRMAANSEALIEHLRSHYQGADFKCVYESCAWGFNLQRKLTAANMECMVVHAADVSTNDKERKRKTDKVDALKLARNLAAGELKAIHVPDETIQKERNLIRYRTRLVGDINRSKNRLKSLLKYQGIEIPAPYLKNNWSRNFMAWVEDQAAKDDLLKYRLLLMLEQMKLLRQLLLKIERKLGVLRKGKYESKAKLAMSVPGIGPLTAMLFLLEVGDVKRFKGFDTLNDFVGFCPDTASSGETDRNKGISARRHKQLRSALVEAAWQAIRIDPAMMNTYQMLTKRMKGSQAIIRIARKLLRRLRAVLLTGIEYQKGVVA

SEQ ID NO: 141087 - protein, 341 aa, unidentified
MSVYVGIDVHRKRSQVAVINEGGEVLANRNVPNGTQPVLGVIGGLPPGTPVAFEAAFGWGWLVELLEDYGFAAHLVHPLQCKAIASARLKNDKVDAAILAQLLRADLLPEAWIAPPPVRQLRALLRHRAQLVRLRTLLRNRIHAVLADHGYDRPGGCWSGPGRAWLASLPLPAISREVIDDDLALIDALQVPIDRLDWEVHQQARRDPRVKVLTHLPGVGPYTALVLLAEIGDITRFGSARKLAAWAGLTPTVRGSDRTVRHGHISKQGSAWLRWILCEAAQTAKRHPSFAASYQATARRRGKKIATTAVARKLLTRAYHLLTDAASGGTPTSPEGSPGPG

SEQ ID NO: 141088 - protein, 400 aa, unidentified
MRAVFGIDVSKVSSEVAILVNGEKVHGYTMSNDAIGFSRLLGDLKTVHKPEIIFEATGVYSRRLQAFLEDNGYAYTRLNPLEAKKQLDSLRVRKTDKIDAEKLAQSQFVLNRKPTYVQEEVYQDLRDLSRFYQNLTEDIVRAKNRLHKVLQVTFPELENILSIPTGEQYWNLVTAFPCKDFVLELSKDELSKSIRLSTSKRISDKRVAYLAEKLTALANQSYCAVKKTSPMLEEVRYYAKELLRLSEQRQAVLDKMVTLAKPLPEYDILLSIPGIAETTATSIIGELGDIRRFQSANQINAFIGIDLRHYESGNFLAKEHITKRGNPYARKILFKCIHNIASASHTNPCHVADFYEKRKRQSQTTSTKPHTIASIHRLIRTMYYLITHNKLYDYTSTQNQ

SEQ ID NO: 141089 - protein, 361 aa, unidentified
MNRVQINKLDFKGQNIYVGIDVHLKSWSIAVLSEHSVLKKFSQSPNAEALYRFLVNSYPGASYHSVYEAGFCGFWIHEKLAKLGINNIVVNPSDVPTMIKEKLRKTDSVDCSKLARELRSGTLKGIYVPCVETLEMRSLIRLRNTIVKDSTREKNRIKSLLRFHGVEIPEQFMRHSIGNWSKRFLGWLREVELSTEYGKKALGLHIEQFVRLRGMLLQETRAIRSLSRKAPFVEPLHLITTVPGIGITTGILLLVEIDDVSRFKDAYQLASYIGLIPMCHSSGEKDGVGDITIRKHALLRCCIIEAAWIAVRKDPAMTMAYEEYRKRMNPQKAIVKIARKLVNRIYFVLKRRKEYVPCIVE

SEQ ID NO: 141090 - protein, 345 aa, unidentified
MSHFVGLDVSVQETAVCVVDEVSRFIYEHKVPTEPDDIAVLLTSVDGDYVRVGIEAGPLSQWLVNGLAEAGLPVVCVETRHMKALLKAQQINKSDRNDARGIAQMMRVGLFKPVHVKTLAAQEQRMLLTSRKLIQRKLLDIECDMRGTLRNFGLKVGVVSTGNYEARIRELVDGLPRLAAIVGPLLAVRQVMRQQLAVLHKMLLDAVRDDPICRRFMTVPGVGPIVALTYRASVDQPHRFVHSRDVGAHSGLTPRRHQSGEIDYDGGISKCGDVMLRTMLYEAAQSMLTHSKKWSWLKAWAMRVAQRRGLRRATVALARRIAVILHRMWIDGTDFRFSNSAAKEA

SEQ ID NO: 141091 - protein, 354 aa, unidentified
MTEVIRDGAVRVGVDLAKRVIQVHAVDANERMLTSRLLRREQFLPWCARLPAGCVVVMEASSGAHHWCRKLRALGIDARIVSAQLAAPYRQEGRSGKNDANDAAAVCEAAGRPRMRFVPVKSVEQQSMLCVHKLREGLKEERNACINRIRGLLAEFGLVFAQSPEALRMHLPDALEDAGNELGSLARLSLQRAAQHWRELDEHIAWCTERIAQHRRDNAEVRRASELIGIGPITASAAVATVGEFKQFKSGSQFAAWMGLVPRQHSSGGKTNLGGITKHGQTYLRTLFIQAAKSAVMTAHRRSDRISRWVLALRERSGWQKAVVALANKNARILWAVMTRGQSFDANHLSVKPA

SEQ ID NO: 141092 - protein, 413 aa, unidentified
MRVMIERCCGLDVHQETVVACLLIGAPGVRPTKEVRTFRTMTRELEALRDWLKAAGVTHVGMESTGVYWRPVYAVLEGHFELIVGNARHIRNVPGRKTDVKDAEWIADLVRHGLIAKSFVPARPLRELRELLRYRRKLVESQSAERNRLLKLLETANIKLASVASDVFGVSGRAMLKMLSEGNATAEEIAGLAKGQLRRKHDDLVLALEGRVEEHHRFLLAIQLHRLEAAEHDIEALDSRIAERLEPYRTQHALLMQIPGVDWVVGAVLIAEIGIDMSVFLSAYHLASWAGVCPGNHESAGRQKSGRAGKGNVHLRTILVGAATSASRTKGSYLKDKYHRLKARRGALRAALAIAHKILVAAYHMLAKGLEYRDLGEAYLDQLHQTRTAANLKRRLERLGYTVALQLREATTA

SEQ ID NO: 141093 - protein, 349 aa, unidentified
MEEITTIGVDIAKNVFQLHGINAEGQVVLRKALRRGQMQPFFEALSPCLIGMEACATAHHWARTLIASGHDVRLIPPNYIKPYLRRQKNDAADAAAICEAVTRPSMRFVPVKTEDQQATLMLHSARELLISQRTALINALRGHFAELGIVAPQGARNVRQLIAILEDERYSPQAVRTALAPLATVLIEIEGQITKLDKALLAAHRNNDVSIRLATVPGIGPVIATCLSASVSEPKLFEGGREFAAWLGLVPRQHSTGGKPRLGSISKMGNRHLRKLLVVGAYAALYRMKKGTADTPLANWARGLLSKKPFKLVAVALANKIARIVWAIMARNVNFQSEHVSRCSDLIPA

SEQ ID NO: 141094 - protein, 431 aa, unidentified
MKNRTSQRIDEITQGTLIVGVDIAKYEQWARFVDYRGIEIGKAFMFKNDRKGFESIVAKIQEICNMTTLRYPIESVIVGMEPTGHYWKPFANYAMEKEYRVVGVNTYHTKKAKELDDNSPTKSDKKDAITIARLVKDGRFFDPYLPEGIYAELRNLTNARVSIMKRSGAVKNTITAILDEYFPEITTVFKNPIKGKASRQIMRSCPFPAFILAIDEGDILAEIRKAVKKTVGIKKVRELIGTAKGSIGVQYGLEAAKMRLGWLLDELELKEKQLEEVEQAMEAALHKTGYAAQILGIKGIGVVTAASFLGEVGDPLRFQNARQIGNYAGYNLVEDSSGKSKSGTCISKRGRKQLRSVLYQMAFTMVGTNAEMKALYQHLITRKTNPLKKKQALVVVSKKIITVIYSLLKKQETYKPELVLGTTRKELMLAA

SEQ ID NO: 141095 - protein, 422 aa, unidentified
MLQEDPQNEEIIARVAALDIGKAELVCCLRVPHEGKAGRRLQEVETYSTMTGSLLGMADHLRCLGVTRVVMEATSDYWKPPFYLLEAYGFETWLVNARDVKHLPGRPKTDKLDAVWLCKVAERQMLRPSFVPPAQIRRLRDVTRYRVDLVTARTAEKQRAEKMLEDAQIKLSVVASDIFGVSGREMMRALIDGQTNPKALAQLARGRMRSKIAVLEEAFTGHFTDHHGFLLAKMLSRVDALDADIAELDAAIEEMIAPFASAVTRIDEIHGLGAIAASVVIAEIGIDMTRFPTAAHLASWAGFAPGVKESAGKKKGRGSTGHGNRYLARVLGEAAVSAGRTDSFLGERYRRIARRRGKKKAIVAVGRSILVIIWHLLSDPEARYADLGADFYDKRIDPERRKRAHIHQLQALGYTVTVEPAA

SEQ ID NO: 141096 - protein, 344 aa, unidentified
MTTIDYIGFDIHKKTISFCAKAPDGAILEEGTIPSLRNRLLAWAKARPRPWIGAMEATLFTGWIYDFLKPLAQELKVAHPPMLKAIAVAKKKNDKVDARMIADLLRCNLLPECYMAPVAIRDLRRVLRYRNLVVRQATRIKNRIAGLLMETGTAYNKERLHGKAYFSELLGSLQEMPPSVVELLKLSRGQLELFAVIQRRLLKGLNEHPDLSERVMRLQTIPGVGEILALSWALEVGEVGRFASIGQAASYCGLTSAQHNSAGTEQRGPISKQRNKHLQTILIEAAKLAPRRNPQLAVVHERELQRGDRNRATLAVARKLVAYLMAVDKGGKPFAMRARTEVAA

SEQ ID NO: 141097 - protein, 421 aa, unidentified
MKVVYPVCCGIDVHKSFLVATIVSVTKMRTLSYKKERFSTFNKDLQRLKHWLIENDCYDVCMESTGKYWVPVLNVLTPELHVVIANPKWVRAVKGNKDDVKDSKWIGELFCFGLVKSSFIPGKEIRILREFTRYRCKLVNMRSSEKNRFQNGFTVCNIALDSVVSDMFGKSARQITDYLLTDKDPTAQHCSTLLHRSLKKKAVAVVASIEGFQLTEVQKFRMLQIRQHMEYLDAAIQTIDEKLDHMTTPYAAAIRLLCTIPGMKRESAITILSEIGTDMTQFDSSKRLCSWAGLTPGNNQSAGKKKSVRITRAGVYIKPMLVQAAHAAVKCTRQPYYKVKYENIARRRGKKRAIIAIARMILTAIYHMFKTGEVFCPTDLRQIDMPEEVKEKLRLRKIHNAIHLLKQHGILTETFVAPSCA

SEQ ID NO: 141098 - protein, 329 aa, unidentified
MTDQKVIPKRFIGLDVHKYYLIAYGVDQQLNVLLPTQRVELSRLENWIRKTLTEQDALVLEMTTNTWVLYDELSPHVHSVTVVHPPHVALITRAQVMNDKIAATTLARLLAKGLLVGIWVPPQEVRELRTLVAQRSKMTRLATQAKNRLQALLQQRHLAAPDGNPFSPEQSPWWEDLPLGKLEKINLQSNLHTLRFAQEEVKRLSKLMNEIAAQDERATRLIHLPGFGVVTVLTVLGAIGEISRFADPNHLVGYAGLGARVHDSGMTTRTGRITKAGRKDLRTALVEAAQIAVNTHPHWKAELARLEPRLGRNKVPSINYLTLEGVAVV

SEQ ID NO: 141099 - protein, 354 aa, unidentified
MKKHTQELSKDLANAKFAGIDFHKRTSVVAIGDTHGGLIQQVTLINEERIIREYFQGFVGLECVIESCRGYEWLVELLEELGHTVHMGDSRSIKLIAVTRCKTDKIDSKILMELLAKQFLPTCYQPSATERLLRELVRHRAQLVRTSVKHKLRVHANLAKENKCIYAPFSLKGRQQLKEVKLSEPRRQKVDDDLEVIDFLELKIAEQDAKVKYVARSNPDVALLKTIPGFDVLTSIAFIAEVGDISRFRKANQVAAFLGLAPRVYSSGDTRRNGRITKCGSKLMRWMLVQSAWSAIRGSSNLRACYSQIGRRRGQKTAIIAIARKLATIAYHVLKEKAEFDERMLDAGPDRAVF

SEQ ID NO: 141100 - protein, 344 aa, unidentified
MDHFGGLDVSVKETSICIVDDTGRITKEVKVASELEALLKVLGNPAYRFKRIGLEAGPLSQWLFSALAEAGLPVVCVETRHMQAVLKAQINKTDRNDARGIAQMMRVGLYRPVHVKTLRSQKLRMLLTHRKLLQSKAIAIENDLRGTLRNFGLKVGMVGKVRFEARIQELVENIPDMAVLVESLLIVRRALREQIVILHRRLLAIVRDDEVCRRLMTIPGVGPVVALTYRATIDVPARFRKSKSVGAVFGLTCSRYQSGEIDWSGRISRCGDEMMRVMLYEAAQSMMHSKKWSWLKAWAMQIARRRGMKKAIVALARRLAVIMHRIWVDGTEFRWTREQTTAAA

SEQ ID NO: 141101 - protein, 383 aa, unidentified
MKAVCGLDVHKDSIYLCILHPDGELFEQVFGVLTFQLHEMCKLLKKHHVSEVSMESTSIYWIPIWRVLSPHFTLRLVNPYFIKQLPGHKSDVKDAQWIAECTMKELVNGSFVPPEIIQQLRQYDRRIFDLNEEIVRKESKVDAVLQRCNIRLSNYVSNIECKSYRTVVRRLSEGVTDPQELIKEIHGRIINKHGRETILASMEGVVSQAEIDVLRQLREEIDIAESHKKECQDKMSEICQKYFPEELRRLQTIPGIKERAATSLIAEIGTDMSKFETANHLAAWSGLRPRNDESNKKVKSRKTTHGNSYLRRTIIQCAWAASRQKDCFFSWFSYHQTVVRRKNKMKVIVAVARKMLVAVWHVLHDNVEYFDFKHDCEESANNG

SEQ ID NO: 141102 - protein, 401 aa, unidentified
MVSDFRKGRYNLMKIYVGIDIAKLNHFAAAISSDGEIIIEPFKFTNDADGFQLLVSKLESFDKNSLIIGLESTAHYGDNLVRYLVTELYQVCVLNPIKTCQMRKNNVRKTKTDKVDTYVIAKTLMIQDNLRFVSFFDLDMMDLKALGRFRQKTIKQRTRLKIQLTTYVDQVFPEIQYFFKSGLHQNAVYALLKEAPSPKEIASMHMTHLANLLKVNSHGHFTKELAKELRVLAQKSVGANDSAISIQITQTIQQIELLDSQLEKIEAEMTDIMKFNDSVIMTIPGIGYINGGMILGEIGDIHRFSNPNKLLAFAGLDPSVYQSGNFQAKTTRMSKRGSRVLRYALVNAAWNVVRNNATFKAYYDAKRAEGRSHYNALGHCAGKLVRVIWKMLTDEVEFNLE

SEQ ID NO: 141103 - protein, 367 aa, unidentified
MGKIRLIEGGGQQGPNTPRRPDPGSQVWIAIDISRTKLVCCVRWGGAEQRQLSTPMGLEHVRALVEQYRDCCVHVAYEACGFGYEIAWWLQEHGVGVTVIAPSRVERVAGLSVKTDRLDAGKLARKLEKGELKGIYVPSRTLHEQRAFGRTYAQCLKERKRAQARIRALMQEHAQLGPLPAQGWRAYSEWLRLQPLPDPLEVSVDALLALRALADQQARRLRAQLEGLAVSEPYAPLVQALREQSGVGTMSAIRLVVELGQIDRFPTTGSLPHYLGLTPSQYSSGDTDRRGHILKCGPGTLRALVLQCAWVAVRRGGDEELGKVFAGLAPRVGRKRAIVAVARRLAIKLRRRWLEVEQSAPVVAATA

SEQ ID NO: 141104 - protein, 355 aa, unidentified
MNDAKYIGMDVHTATISAAVRDSAGNLVMEATLETKAETILEFVHGLRGSLHVSFEEGTWAAWLYDLLKPHVTEVLVCDSRKNALLRVGNKNDREDARKLSELLFLNKLHPIYHGETGIRTLKELARSYLTITRDLTRVMNRLKAIYRGWGIACAGQQVYAPRYRAEWLAKITEAGVRRRAEIYYQQFDALAALRQEVRRELLAESRKHPAMRLLRQIPSIGPIRAALLIALMQTPHRFRTKRQLWAYCGLALRTYDSGEYRFVGGQLKRSKKAVTIRGLNKNHNHDLKNIFKGAATRAAATAGPLQNFYEARIANGMKPPMARLTLARKIAAITLLVWKKGVCFDAEQLKQQAA

SEQ ID NO: 141105 - protein, 351 aa, unidentified
MSMVCGLDLHRQQITFDALTPESGEVWRGRVWQPDRERFRRWLNHDVAGRADGQPVAMAVEGCTGWRYVVEEIAAAGFEAHVAEPADTQAARGRKHRAKTDRSDARLLRELLQRGELAESWIPPTIVLEWRERVRLYKSLTDQRRMWIQRIHAELFQHGVAVPEAAITSPSTRASLAGDNVTLSTAARQRIRIGYAMIDAGDAEAIPLREQLRRFGMRQPACRTLVKSVYGIGGLTAVAIWSELGDCRRFSRSLQVVRHTGLDVSVDSSDLHRAGGHLSRQGPGTLRWALFEAGMCAARTGSPDHAYYTAVKQRHDGKLAAISVARQLARRCYHLLRQLDPDVVYAAPSAP

SEQ ID NO: 141106 - protein, 320 aa, unidentified
MDQEKVYVGIDVAKHNMDVAVYPSGHQWSFTNNDKGISQAVTRLQELSPALVVMEATGYIELPLTAALAVAGLPTVVVNPRQIRDFARAMGRLSKTDAIDAQVMAYFAATVQPKPRPMPNSQTRELSAVLARRRQVVEMIVAERNRHGIANAAVRESIQDHIRWLEEELTNVDNNLTRIIQKSPLWREKDELLRSVPGVGPVLSTTLLADLPELGSLNRRQIAALVGVAPLNRDSGTLRGKRRVWGGRAKVRAVLYMATLVATRHNAVIRAFYQRLNAAGKEKKVALTACMRKLLTILNAVIRYRTPWCYTSSQVLGSCP

SEQ ID NO: 141107 - protein, 314 aa, unidentified
MADPATVPLAFIGCDVGKAEIVVFDSRDKRIRSIPNRAENLAAFAQTLDVDCFVVCEATGGHEQALLAAMVAAGIPCHRADARKVKAFIRSYGTLGKTDAIDATALHRYGEERHSSLIRWRTRDTWRDTHQTLILARQDLVATRVAYANRLGAPSDAAVRPFFEALLASLEGQIAAIEAAIRTLVDDNAPLKQAVTLLTGVVGIGFKTASSLFALMPELGGLTGAQAGALGGLAPHPNQSGAREGYRRTKGGRPEVRKVLFMAAMSAARHHKTLRPFYERLIAKGKKKLVALVAVMRKLLVICNAVLRDGAVAA

SEQ ID NO: 141108 - protein, 380 aa, unidentified
MSVLSAVPADGCATPSLALKESLLSTLPCLPVEVILGADTHRDTHAVVLVDLLGRLVATETFPTHRRGLRALIKWAQQRGTIRRAGVEGTGSFGAGLTRALRMEGIEVIEVTRAARVGGRHRGKNDTRDAEAAARSVLSGQATAEPKARDGIVESIRVLRNTRASAIKARTQAILHIKNLIVTAPDELRESLSGMTNRQLVKRCARMRRSARRDSLSATRHALRSLARRHQTLDTEIAELDQHLAELTAQAAPRLLKQPGIGPEIAARILLVAGDNPTRLRNDAALAALCGASPIEASSGKTTRHRLNRGGDRQGNSALWLIANNRMIHHPETRAYVKRRTEQGKSTKEIRRCLMRHVARGIYPLLLADLHDAHQQSALT

SEQ ID NO: 141109 - protein, 408 aa, unidentified
MKALHRRCAGLDVHQQEIVACRRIVAGRKVQTEVGRFSTTTQGLLELADWLEDGKITHVAMEATGVYWKPVWHILDGRFTLILANAAHIRNVPGRKSDVNDATWIAELLAHGLIRASFVPPQPIQELRDLTRTRKELTREIVRHTQRIHAVLEEANIKLASVITDILGYSGRRMLKAILAGETDAGRLAELGSSRLAAPREALVAALNGRIRDHHRFLIGQHLKTIEQVETTVGEFDARIEAALAPFRDAVERLTDVPGISRTAAQIVIAEIGFDMSQFPTADHLISWAGLCPRLDESAGKRRSTRLRKGATWLKPVLVQSALAAGRKKNSSFKTRYCALKGRVGPKKAAVAVAANLLRVIYHMLKDGTCYKDLGESYRRPRNPARAAANLANRIRALGYQVDIRRAA

SEQ ID NO: 141110 - protein, 340 aa, unidentified
MTAYAALDVSMEKTSICVMDADGKMLLEAVTISDPEAIARCLEPYKSELQRVCFEAGPLSEWLFRGLQEEGIEAVLMETRQVRAALSAMVMKTDRNDARGMAQLLRSGWFRPVHVKTIPAREQRTLLAARSTLMRRQKDIENSVRGLLKGFGLRLGRLLRGRWDDAVRDIVSGNTMLASIMEPLLVVRRALREQLAVLDKQARDIARTDTVCRRLMTAPGVGAIVALTFRATVDEPARFRSSKAIGPCFGLTPRKYQSGEIDRNGGISRAGDPAVRVALFEAAHVLMTRVAKWSAVKAWAMNVAKRRGAKRAKVALARKLGIILHRMWVDETDFRYGQPA

SEQ ID NO: 141111 - protein, 348 aa, unidentified
MMVILGTDAHKKSHTVVATDEAGAMVASVTVAATSEGHLRVLKWAAQWRERRWAVEDCRHLSRRLERDLLAAGELVVRVPPKMMAGARRSARTRGKSDPIDGLAVARAALREPDLPMARLDGPSREIRLLVDYRERLVRERTGLQNSLRWRLHELDPTFDPPAGSLDRYVMLDQIEAFLAGHAGLVAELAGREVARIRELTRDANRLQSDIRGRIKTVAPSLLELTGCAALTAGKLVGEAADIRRFTSRDAYAAWNGTAPIPVWSANRERFRLSRGGNRQTNAAIHRIAITQLRCHPDAQTFIARRLAGGNTKKEALRALKRRLSDVVYRTMLEDTRHHPQAAPATAA

SEQ ID NO: 141112 - protein, 430 aa, unidentified
MHNKNYISVGIDVGSAFSFMTILAPDETVILKPFKITHNNKDSLERAVSEIKKAEELYSLESRTFLESTGIYHFPLFCYLVDCGFNASIINPIITHSTKNGNIRKVKNDKIDSKGIAKLGLSKDIPVSQFPAKLVLELRSLTRKYYDLTDERSAHINKLKGDLHTVFPQYLDVFCDVTGKTSTMILRQYGTPDKILRGHKKTMIEKISKASRKGLAKASERYEKLCAAANAAKTFGCQIDSIYFNIFLTLDLVEKLDSALDSILNRIRQLITFNKNEKFIQQIKPLNTIPGVGFLTAVTIMCEIGDFSAFRNPKQLFAYFGLDPEVNESGKFVGTQLHMSKRGSRIARRAIFAVALASIRTKRNGEGINPYLRKYYELKSGQKPKMVAIGAVMHKVCNIVFAVLRDEKAFELRSPEEHCKQYQRPALAAA

SEQ ID NO: 141113 - protein, 346 aa, unidentified
MYQDNLFAIDLSKSSHQGVLFSKSHQIKFNREFSTRKLIEWVSRQQPLTVAMEACSMSNHWARVFDRIGHRVLLVPTRTAARYRQGQKTNGTDAEGIGVAARQPTTKFVAPKPINLQELQALMRIREHLKDHRLATSNLIRSLLAEFGLLIPKGWKALRERVPELLEDAENELPMELRFQLRDQLDDYLELEKRFAEVDRACTQRVNQDEACHQLLQLEGIGPVNAAGLLLALGEQGDSFRNGRNASACIGATPKQHSTGDQVRIGHISKDCANKRLRANLIQGAWAVIQQLRKRDPRNGKEAWLKGVINRRGEGIAAVALVNKTIRVAWAMLHYGENFKLHPNMA

SEQ ID NO: 141114 - protein, 314 aa, unidentified
MAEENVYVGIDVSKARLDVAEEPREQIWQADNQAASIALLVKRLAKLKPTLIVVEATGGYEAHLVEALCSANLPVARVNPGRVRKFAQGMNWLAKTDRIDARLLARFGEKANPRLTQLPSEQEKRLAALVKRRKQVLDMLVAEQNRLENADPDVLAYILGSISTLKSQLQELDDAIQSHINQTPDLKIRQDLLTTVPGVGKVTASTLTAQLPELGSCDRKQIAALVGVAPFSHDSGKMRGRRFIRGGRPPIRSVLYMAALSAIRFNPVIKTFYTRLISSGKQFKVALVACMRKLLAILNSMIRNNQPWNPCFSS

SEQ ID NO: 141115 - protein, 340 aa, unidentified
MDKLYGAFDLHSTNNYLAITDHKDKRIYKKKLPNYPDVILAELEPYRQRLEGVVVESTFNWYWLVDLLMKEGYRVHLASPSGIQKYTGLKYSDDNHDAFWLAHLLRLGILPEGYIYPRGDRPIRDLLRKRCHLVSLRTSLINSLQSIIERNTGQKLNANKLKQLSEDHVSPLLADQEDLALSGFVSKEIIDHLSCHIKRIETAVKEKVKIRKPYKKLQTMPGVGNILALTIMLETGDIKRFSKVGNYISYCRKVPTEWTSNGKKKGKGNKKNGNRYLAWAYSEAAEFARRFDETARRYYNRKASRTKAIVARGALAHKLAKAAYYILRDDVDFDHQKLFV

SEQ ID NO: 141116 - protein, 424 aa, unidentified
MKVTYQTCCGVDVHKSFLVATIVKTTGGIEPSYQKKRFSTFNNSILEFKQWLLDNDCHDVCMESTGKYWVPVFNLLEDDINVVIANPKWVKAVKGNKDDTKDSKWIGDLFRLGLVRGSYVPCKKIRILREYTRYRYKLISCRSSEKNRYQNALTVCNVALDSVVSDIFGKSSTSIIDYLLEQSGTSINHEEIASKLLRSLKSKEDAVIESVEGYQMTDAQKYRMRLVRAHMDYITAEINDVDKMMENMISSNPDFENAVQFLCTIPGVKRDSAITIISEIGTDMSQFSSSKRLCCWAGLTPGSNESAGKRKSVRFTRAGVYLKPALVQCAHAAVKSDKSPYYKKKYDSLVKRRGKKRAIIAIARMILTAIYQMMSTGEQWNPSDLYKIDMPVALVEKQKAKAIKQAKKLLQREGLLPPDEPLAS

SEQ ID NO: 141117 - protein, 359 aa, unidentified
MRIIGCDLHARQQTLAMVDSTTGEIVNLTLTHEGDNVREFYSNLPRPVRVGIEATGSMQWFLNLMEELGIECQVGHPANIRAAEPRKQKHDRRDADLILKLLVEKRFPSIWLPSKELLDLRGLLLHRHQWVRMRTRVQNALQAIALANGLRRGPSLWSHAGQDKLASLSLAPHTAHRRSELQALYAKFDREIEKLNQRVEEQAWERPTALRLMTHPGVGPITALATDVFLGDATRFVDGKALASYVGIIPREYSSGGRQRLGGLTKQGNPLLRFLWCEAAIHAVRKDPELQRFYLRKLFQKGLGKARVAAARKLGIRLWILLRDQIDYNEFCRRGQMRQKNGGTCAGMPARVIAQTVAD

SEQ ID NO: 141118 - protein, 351 aa, unidentified
MIIIGVDYHPSDQYIAFVDTETGEYVERQLNHSDREAEKFYRELAARGVSVRVGMEATGYSRWFERLLAELGIEVWIGDAAEIRTKRVRKQKTDREDARLLLRLMRENNFPRIWVPSPENRDLRQLLWHRHRLVQMRTRIMNQLQAIAMNEGQRRKKKLWNEQGRAQLEKLPLATWASRRRKDLLELLDRMNPTIEELTRAIEQEAKKWPEVLRLMTHPGVGPLTALAFVLIIGTPERFKCGKQIGSYVGLIPCEDSSAGHQRLGHITKQGSSLLRFLLGEAAQAAARWDSDWRRRYIHLAMRRQRNIAKVAMARRLAVRMYWMWRNGWEYSEWVKFGSHAGQLGTRHGVN

SEQ ID NO: 141119 - protein, 317 aa, unidentified
MKQGKSNTKIAGVDVCKPWLDVAVWGSQEALRTDNTAAGLAELGAWLKAREVRRVGLEATGGYERALVAWLGAEGYEVVVHQPAEVHNFARFKRLKAKNDKSDAQLIAVATAQVDAVKAANHPRLVELAERLTAYEQASDALAHHKTTMEHLTLADLKAEAEIERRRLTDRKKKLCLDLIRRVKADPHLAGRYGLLLSLPGIGPLIATALVVRMPELGAMKRGQPASLLGVAPFDRDSGLHKGKRFIWGGRARPRRLLYLGALAAKRWDPGLRAFAERLIAQGKAPKVAIVAVMRKLIEAANIVLARGQPWQARPAN

SEQ ID NO: 141120 - protein, 341 aa, unidentified
MEQVTTIGLDIAKHVFHAHGVDERGRRVFSKRVSRAGLLAFFARQPRCVVALEACAGAHHWGRELQRLGHEVRLIPPAYVKPFVKRQKNDAADAEAICEAAQRPAMRFVAVKSEEQQASAMVFRGRDLLVGQRTQIINALRGHMAEHGWVAPKGPSHLARLAELLEDEAAVPVSARPVLKLLIGMVEELDRRIADLDREIARRAREDETAKRLMTIPGIGPITATALTALAPPPESFARGRDFAAWLGLVPRQHSSGGKQKLGAISRMGERSLRRLLIIGASAVVLHASKRGAPRGSWLEQMLARKPRMLVTVALANKTARIVWALLKRNEVYRAPAPAAA

SEQ ID NO: 141121 - protein, 352 aa, unidentified
MAKTEFDELMSIGIDIGKDTFHLVGFDHDGQRVLRKQIKRLALIATFEKLPRCVVGMEACLSAHFVSRKLRKMGFKPRIIPAIYVKPFNKGQKNDYNDAEAIAEAALRPNLKAVSEKTQDQLDLQALHRVRSRLVSRRTATINQIRAFLIEQGITVRKGLRALKNSFETILEERKDEISPRMRRILIGLYGDWMWMDDRIDTVSKEIEEISRSEENCVNVMTVPGIGPMISTAMVAAIGEGEAFDRGRDFAAWVGLVPRQYSTGGRTILGRISKRGSRYLRMLFVQAAKVIMMRPHRWPDFSFGEWLARASERMHRNKVAVALANKLARMAWSILRHKTAFDAPRDEFAIGV

SEQ ID NO: 141122 - protein, 375 aa, unidentified
MYQYSKYVGLDVHKEKIMLAVAETNRRGPVYYGEIVNTPEAVAKAIKKIAGQENVAFCYEAGPCGYGLYRQITAMGYQCDVVAPSLIPKKSGNRVKTDRRDSISLAGLLRAGELTRVWVPDREQEAMRDLTRAREDMKMMERHSRQRLGGFLLRHGKVYPGRSKWTKAHFRWLEGIRFETATQQIVFQEYVDMVKHTQGRVAAMEEEMRKAVDGWKLKEVVEGLMALRGVDLIAAMTIIAELGDISRFSSPRQLMAHLGLVPSEHSSGEKRKRGGITKTGNSHARRVLVEASWSYRLPARKTAHLQRKAAKASKTVQEIAWKAQKRLCNRYWHLINKGKLPVESCTAVARELVGFIWAIVCEVMGKGTVSAEVNG

SEQ ID NO: 141123 - protein, 402 aa, unidentified
MVSIGIDISKEKSMVCILRPYGEVVASPYEVKHTEQSVRELIQKIESIEDEVRVVMEATGSYHLPLLEMLVQEGIFVSVINPLAMKKYASSSIRKVKTDKMDSVRIANYGLDKWFKLEPHVLSEDIRTELRILGRQYAHYISVKVSLMLALTNLLDRTMPGIKSLVYSQHSSVSDKDKLCDFVQEYQHYDRITKMGKKRFVASYGKWAKKKGYRQSEAKAEAIFALASEGIPTLPSGAQSTKIMTLESVRVLREVSMTVNAILSQMQAMAQTLPEYHVVRAMSGVGDTLAPKLIAEIGDVRRFRCGSSLVAYAGIDSPPFQSGAFDGTRRKISKRGSSLLRKTGYEAMKCLKNTKPSHDNAVYLFMLKKESEGKAKKVAKIAALNKFLRIYYARVMEVYAEA

SEQ ID NO: 141124 - protein, 408 aa, unidentified
MVVEAARVTSSTVVVAVDVGKTEFAFSVSDGARVSLLKLRTGCPMTGPSLAQVVADIARVLPGGAGVKVGIEAAGHYHRPLLRAPWPVDWEVLELNPGHVTEQRRVLGKRTIKTDVIDLQAMTELMLAGRGQPVRDRSLVLGGLAAWSAHRTGRVSLRTATKNQLLGQLDRTFPGLTLALPDVLATKVGRLVAAEFADPAGLAALGSSRFLRFGATRGLQIRRPVADRLVQAARDALPTADAAVARAVLAADLALLSDLDAQVDQATDQLARLLPSSPFAPLLTVPGWGQVRAGTYGGALGDPARFDNHRQIYRTAGLNPIQYESAGKRRDSVISREGSVELRRSLIDLGVGLWHCDPAAKVYGTQLRARGTKGLVIACAMANRANRIAFAMVRDQCPYDPTRWLQGA

SEQ ID NO: 141125 - protein, 410 aa, unidentified
MELLHRRCCGLDVHKETVVACQRLVSDGKVTTEVRTFQTTTADLLHLSEWLAANGCTHVAMEATGVYWKPVWHILDDGEFGLVLANAAHVKNVPGRKTDVNDAMWLAELLAHGLIRASFVPDTQTQEMRNLLRTRKQLVREQSSHVLRVQKTLEDANIKLDSVLTDLMGKSGRAMIEALIAGETNPTKLASLADRRAKASHEEFREALRGRVTKHHRFLLRLHLNQIDALDAAMATLDAQVEENLGPFRTAVGLIISIPGIKNLGAHVIVSEIGIDMSRFPSHAHLISWAGICPRNDESAGKRRSTRLRKGAPWLKTTLVQCAWAAVKKRDSYLQAQFYRIKARRGPKKAIMAVAASILTAIYHMLKDGTMYKDLGHDHFDRRSTDQQKQRLVKRLAELGYVVEIKPLAA

SEQ ID NO: 141126 - protein, 353 aa, unidentified
MWIIGCDFHPRYQQIAALNQATKEFMERRLSHEGKEATIFYESLPSGALIGMEATCTAQWFERLLERCGHTLRVGDAAQIRASVVRKQKTDTRDARHVLDLLVSDRFPSVWIPTPAERDARQLLLHRHTLVRWRTMVQNQLHALARNQGILPHTTFWTRTGRQQLESLALDPWAARRRQDLLAQLDQLNPQIEELTRQVQQEARRRAESTALMNQPGVGPIVSLAFVLTLGTAKRFPRGKQVASYLGLNPTEHSSGGTQRLGHISKQGNRRMRWLLVEAAYIAVRKDPQLARVYKRLAFRRGRKIAAVAVARKLAVKLYWRLREVQEQQNVPPAPMQGRSGSGLVKAVSSPSV

SEQ ID NO: 141127 - protein, 349 aa, unidentified
MLADEVDYVVGVDTHRDQHVLAVVVAPSGAVLAEQSLCASARGYAQALRFVEQQTNGRRVWAVEGAGHYGAGFARHLSSHGETVLEIGRGPRDEQRLRGKDDSLDAIRAARTALGSQTLTLPRAGERREALRLLLLARRSAVGVRREALVQLRSVIVTCPDRLREQLRGLPGQRLIVRCVRLRRSSPCTPDQLASKLVLRSLARRVEAATAEAAELEREILAHIRALAPRLLEEPGVGPIVAAQLIVTWSHPGRVRSEAAFARLAGVAPIPASSGQTIRHRLSRGGDRQLNCALHTVILHRRQHDPATKDYIARRVAEGKTTRDAVRSLKRYLARHLYRTLNAETPLMT

SEQ ID NO: 141128 - protein, 312 aa, unidentified
MDAIYVGIDVSKDRLDVAVRPNGESLFVSRNGAGIDKLIGRLKTVSPRLAAIEATGGFETVVAAGLAGAGLPVVVVNPAQVRAFAQALGRRAKTDPIDAAVIAHFAEATKPQVRQLPDETTQMLADLVSRRRQIVEMIASESQRARRVTSARLKKSIARLHKALEKELSDLDGEIGDHVRGTPAWAEKEDLLASVPGIGPTIARSLIAELPELGSLDRRQIAALAGLAPWTRQSGQWRGKSFIGGGRANVRRVLFMGAMVAARFNPELKRFRDRLVAAGKPKLVAIIAVARKLLTILNAILRDKTPWQLKNA

SEQ ID NO: 141129 - protein, 356 aa, unidentified
MNTIGTDFHKRTSTFYVLNHDGTKMKSCKIENNRDNLRTFVSQIPGPKQLAVEATRSWSLFYDTVNDLVDHFYLAHPKKLKAITQSETKNDQNDAREITKLTHSGFLPTAHITSVDTRQLRNLLRCRRFLVNQRRSIRNQVQTLIDRNIWAADRPKSFKSPFCSRGLKWLNAIDLPQRERFILNELLKTYQHLLKQISTLEDFIQTQTVDLPGLQFLRTVPGFRMSKINAYIILVESSDISRFYKARGYARYVGLIPREFSSGDKHRTGRLIKDANMHLRTAFIESTLAAIRADKGLKAYYKQVKSRQGSGPAIIATARKLAYAVYHVLKEQRAYRPEPIIPPAAVCHSFPISNCN

SEQ ID NO: 141130 - protein, 416 aa, unidentified
MNDLTLSVGADVHLEDIVLRAVDQSDGHEVIEPLTVTNNLPGARSAADTIARAATELGYRHVHIGYEATGMLWIPFHRFLSTSPLLEPFNLKLVCFNPKLVADFKDALVLRGPKSDERDTFDVAARLRFGEWPESYVPGPFWQGLRRLTRYRFKLAQNLSREKMRFRSYAFLKWSDWKRARLFSDLFGATSAALLTEFTAAELREMTHDQLADLIAQRGRGHFHDPHAKARRVQRSLRSSYPIDPQADELLTATLATQLDHIRFIQHSQKRLDQHIAHAIDPVPNPIISVPGLGPVITGGLLAEIVDISRFPKDSHLAQHFGLTWERRSTGNFVSQNTRLTKVGNPYGRYYFIQGADKVRRYTMEYKAYYWRKYNEVSKYQHKRALVLTARKLVRLVHALLTKNEPYVRPQMPTNT

SEQ ID NO: 141131 - protein, 365 aa, unidentified
MKKISTMRTSGKNILEGRLTIGLDLGDRSSAYCVLNEAGEIVLEHKLATTPEAMEQVFGSMPRCRIAMETGTHSPWVSRVLTALGYEVIVGHAQKVRLITKSRRKDDRLDARTLARLARIDPELLSPVKHRSAQAQLHLTEIRARAGLVSARTALVNAARGLVKSYGERLRKCGTQQFGRETTSALNAGLRQALEPLVQEIESLNERIQEYDRRIAKMAKEEYPETALLKQVKGVGDLIATAYVLTVEDPQRFRKSRDAGCFVGLQPGRRNSGESEPQMRISKEGDEYLRTLLVQGAHYILGPFGEDCDLRRWGQKLSARGGKNAKKRAVVAVARKLAVLLHRLWISGEVYEPLRNSQKAMSAAA

SEQ ID NO: 141132 - protein, 355 aa, unidentified
MSQEKYIGMDVHQATISVAVRDSSGKLIMECILETKAATILEFIAGLRGTLSVTFEEGTSAAWLHDLLKPHVSQLVVCDPRRNALLKDGSKSDRIDARKLAELLHGNQLHAVYHGEHGLRTLKELGRSYLTITKDLTRVMSRIKALYRSWAIPCSGATVYAPRHRAEWLAKILEPGVRLRAERLYQQLDLLQPVRQEARRDLLVESHKHHAVKLLRQIPSIGPIRAALLVALLQTPHRFRTKRQLWAYSGFAVETHDSGEYRFARGKLVRNRERITVRGLNHNHNHDLKNLFKGAALSASARPGPLCDFYGALLEKGMRPTMARLTLARKVAALTLTIWKKGAEFDAKQLHRQAA

SEQ ID NO: 141133 - protein, 442 aa, unidentified
MALSDSTAPPPAPVFAAFIGLDWGDKKHAWSLQEQGSTLIQRGELENTPEAMELWAIAMAQRFGGRLIAVALEQARGAVINVLGKYAHFYLYPVHPTTSANYRKSFSPSGAKSDPSDADMLLDLLLKHREQLRPLRPDTEETRSLQILVEERRKQVDLQTSQTHRLTMHLKQSFPQILQWFDDIKAPLVANLLERWPSLEQLQKARPETLRKFFHQNNCRSEERIEERLVQIREAVPATHDQAVLSTGILIVRGLFQILAALRGVIVGLDVRIATIVKAHPDFFIVDSLPGAGPVMAPRLIAVLGTDRDRWNSAGELQCRTGIAPVVERSGKQYWVHWRWACPKFVRQTIHEWAQHSMKSCEWARQYYCLQRSREKSHHAAIRSLGFKWLRILFRCWKNREPYNEARYEASLGTHTVKADEKAKKTTLELQWKNCGGFSKLV

SEQ ID NO: 141134 - protein, 371 aa, unidentified
MDEFSKTLYVGLDVHKESIAVAYAPEDRSAEVVSLGSIGTRQCDLDKLIRKLQSKGAALVFVYEAGPCGYWLYRYLTQKGLPCQVVAPSLIPRKPGDRVKTDRRDAVTLARLMRSGDLSAIYVPQLEDEAIRDLSRGREDAMRDLKATKYRLKAFLLRQDIRYEGRANWNAAHLRWLSEVVCASRAQQIVFQEYVRAVTEQHERLQRLERELHEEVKGWRLYPVVEAIQALRGVELTGAVILIAELGDLTRFDTPRKLMSYLGLTPSEYSSGERRRQGGITKAGNTHARRALVEGAWAYRYPAKVSRHLQLRLEKLPAEVQAIGWKAQVRLCKRYRQLTARGKHVNQVVVAIAREMAAFAWAIARAVPLAP

SEQ ID NO: 141135 - protein, 350 aa, unidentified
MRRPTDKVIAGIDLHGNNLVIGVINQDGTRLGHRKLDCQLDDVLEFLQPFKARLQSMAVESTFNWYWLVDGLHQQGYAIDLANPAKIEQYSGIKHADDKHDAFHLAELQRLKILPKAYIYDAELRPVRDLLRRRTNLVHQRTALFLSFKSLYARTTGQPMPLATLKSMEPKEARTLYEHPANQLIAKVQLEHIGALDRSINLIEKAVLASAREIPLYEKLLTLPGVGKILGLTITMEVGEVARFKTDGDFASYCRAVDSRRLSNGKQKGQNNQKCGNKYLSWAFVEAAHFAKRSDEHCRRWYDRKKARTSTVIATKALACKLAKAAWHVMAQETDYDARRMFPELAVKKK

SEQ ID NO: 141136 - protein, 392 aa, unidentified
MITTDENVLEDSELRVFQTFTDDLCRLRDWLLDHNCPIIAMESTGIYWRPVHNILEGFFEVILVNARHFKNLPGKKTDMSDCLWICGLLRVGLLKGSFIPQKHVRHWRDLTRYRRSKTEDLGDVKRQVHKLFESANIKIDSVASHLFSRSGRNLMELLLEKDRELTLEDVRKCLKGTLKSKSQELYRAVQGFFEEHHRWLLEKMLAHADHLEHLITDIQVRLRSLLEAHEDTIDRLIEIPGISFISAYAIISETGPTLSTFPNTASLCSWAGVCPGNNESAGKRHSGRSPVRRGNLKTILIEVAWGAVRTKGSYFRAKFFSLRSRLGPKKAIMAIAHRILKAIYHVIKHGEKFKDLGEDYLNDLHKKSKIDYLIRQAGKFGFKLMPCAILEK

SEQ ID NO: 141137 - protein, 351 aa, unidentified
MPRKTDVAVVRTIGIDTGKNTLHMVGLDERGAIVLREKVSRHRIAARLVNVPPCLIGIEAGMATHYVARELSALGHDVRQVPPTYAKPFRQGHKNDFRDAHAVAEAVQRPSTRCVPIKTDDQLDLQALHRVRSRLIGDRTAVINQLRGFLLEHGIAVRQGHRFLRQQLPQILATRSDVLSPRMTRIAGDLVNDWSYLDERIERVTDEIEGLAQADVSCGQLMTVPGLGPIIASATVAAVGNGAAFAKGRDFAAWLGLVPKQMSTGDRTILGRITKRGNRYLRMLFIQGARAILLRPASWAKHSFGPWLTAAALRLHHNVLTVALANKLARIALTVLVEGRNYETRIAPAAA

SEQ ID NO: 141138 - protein, 400 aa, unidentified
MLLFFEVITMIFVGIDVAKDTHYAAVSDDSGAVLVKPFAFQNNAGGFCLLLKKLSEFDRSKLLIGLESTGIYSENLICFLYESGYKLAVINPIQTATLRKTAIRKTKTDKVDTMLIIKSLMVNSYRLYSLRDADSLKLRTLCRFRQNLKKSKARLKIQLAGYVNLVFPEFGKFFKSGIHIAASYALLKKYSSPKEIAALRTSTLCTLLSKASHGRFGKDTAEALKSLALSSVGVKNPYISIQIAQTIAQIELLEQQIKDLNSAIEEAMESINSVLMTVPGIGAVNAACILGEIGDIKRFSKPCKLLAYAGLDPTVRQSGQFTAKSTRMSKRGSALLRFALINSAWQLTLNDTTFKAYYDLKRSQGLNHYGALGHVAHKLTRVIFKLLTSDTPFNPAKLVA

SEQ ID NO: 141139 - protein, 348 aa, unidentified
MKDTIFFGIDFHKNKSVICALYQDGSAVFPIKSIQSKKIYEFFNNKEPAKLAIEASGGTNEVVSKLRAMGHEVLLVNSNVFRGIGIGGKKTDSRDAKALANYLRLGGVSEVHVKSLYSRNIKSLIVSREMVLRSKVNLMNHIRGTLKEYGILIPVGPKNFFKEAPQKIASLESVLIRETLEEILKTILSFVDRQKFIENQLKQQILNNPQVELLQSIPGVGELGASMAVSVIDDISRFRNSREFASYLGLTPRVHSSADKRMMGSISKSGPEILRRYLIHGARAWMKYSPDKDPNRKWAEKVKERRGMNKATVALAHRMSRIMFAVLRDEVEYNGRKKKKAKVTKMAA

SEQ ID NO: 141140 - protein, 392 aa, unidentified
MEKIADRPAEPTAVRTDLGAIFVSLELSRSSWVVTALAPGSGERMSRHGIPGGDLAGLLARFAQLRDKAQARTGRHFPIIVIQEAGLDGFWIHRALVNEGVESHVVDPASIATSRRRRRAKTDRLDGETLVRTLLAFKRGEPRVCAMVRAPSPEDEDRRRITRERKVLIAERVEHVNRIKGLLFAQGIRGYEPLRRDRRARLEDLRTGDGRDLPPHLKAQILRELDRLELLLEQIKAVEAERDAALAEEPQDGETPAAAKMLLDIRGIGPEFAALLWSEGLFRHFDNRRQVAAYAGLAPTPWQSGAVSREQGVSKAGNPRLRSTMIQLAWLWLGHQPQSALTRWFRARVEQNGGRLRKTAIVALARKLLVALWKYVTSGVMIEGAAMKPSTP

SEQ ID NO: 141141 - protein, 386 aa, unidentified
MAHSTNILPRSVDYDQTLVLAIELSNKSWVLAAQVPGLSQTKAKRTIDPDKNDLLAAIDGYRTRAAAAGRSVKRVITSYEAGWCGFWLARWLMAHGIEVHVVQPSSVPVDRRMRRGKSDGIDAELLLRTLLAWLRGEPRVCSMVPIPDEADEDARRCVRERSELVSERVGLVNRIGAILATLGADDYNPLLQSRRRRLTELRTGLGDPIPPNALAKITRLLTRLELVLAQIAELELERDAVARTDAPDHAGEMIQQLISLRGIGVQSATVLVREAFVRRFANGKALGSYAGLTSTPYSSGGIDREQGIGKAGNRRLRTVMVELAWLWQRYQPGTAQVAWFRERVGSTGRRVRKVMVVALARKLLIALWRFVIDGVMPEGAVTKPSI

SEQ ID NO: 141142 - protein, 356 aa, unidentified
MKKYIGCDMHKKYSVFITMDEHGRLSEARKVANDSLELDSYLKTLEPATPVAVEASGGWYWFVDRLEQAGLDVRLVNPLEAKKRMGGRYKTDPRDAAGLAMLLRNGTLPEVWIPPADLRDLRGLLRARLALRRHTTMLKNRVHAAIRRYGQWEPGEAKNLFAGKGRVQLAVYIGALPPETRIATRHEWQLIDEVEQHIQELEKRIRLGIGQTGYVRLLRSLPGVGAILSATIYLEIGDVRRFGCAARLASYAGLTPTVHSSGGKTRMGPTSSIANHYLKWAFVEAADCIVMRKQRYQGRHVVALYERLRAAKNHGKAAVAVARHLAESSWWMLQKKQAYREPAPASRSSSENGSAR

SEQ ID NO: 141143 - protein, 346 aa, unidentified
MRYFAGLDVSLEETAICVVDETGRILKEVRAASEPDRLVTALQRTGLPLERIGLEACSLSAWLNEGLRQAGLPAICIEARRANAAMKTMPNKTDRNDARALAQIMRTGWYREVHVKSRQCRFWRSLLVARRTVLNEMRAIENVVRAILREAGIKLGTPSRTNFADRVRELAGADVLLMPLVEPLLAILATMLRELARLTKQVLDTVRTEKVCRRLMGVPGVGPITALTFRATIDRPDRFRRSRQVGAHLGLTPARYQSGDTDVQGKISRCGDELARTALYEAAHTLLVRSRKWSSLRAWGVKIAKQRGMARARVAVARKLAVVLHRMWSDETEFRFGKEPNTPAAA

SEQ ID NO: 141144 - protein, 311 aa, unidentified
MTNFNSKVYIGIDIGKFSLDVFISGVNKYLKLENNNKGHNILLKNINKYQIEMICMEATGGYEKTILKILSEAKAPVARVNAKWVRDFAKAKGHLAKTDKIDAKVIAEYAEKMTPAPYQKVDEIRSQLRDLFMRRQQVVQMLVAEKNRLEKVTNKIIQSSIKKIIKHLEQEIEKLGKDISTKMAGDSCLTKQIQAITAIKGVGNVTATALVSLLPELGSLDRQQIGALAGLAPVNRDSGTFKGKRFIKGGRHAIRSAMYMGTLAATRTNPIIKKIYDRHLAAGKLKKVAITACMRKILIYVNTTIKDLTYA

SEQ ID NO: 141145 - protein, 373 aa, unidentified
MAYQHYWVGLDAGHLETAVCLIDAEGGILFEAICETKSGPIRDILRRFGVEAAQCLTIEAGNGTQMVRELRSYGFPVQVVDVRKSSKFLAIRRQKTDVHDARGLAELGRLARSMGSQVFVKPMEHQNIRTLINVRRTMLKNRARTDALIQSIFRLYGGNVKLLNGRGALAAEVNNQVRKMRQHGLEIGVNLQPLVEISEALREQISALDRQMRDIASNNPTCRNFQTIPGVGAVIALSFYSAIGDPHRFERSRDVGAYLGLTPTLYQSGVTSRRGRISRHGNKLTRMHLITAATVLLCRIEIESRLRTWGLELAQRVGFLKARVAVARKLAVIMLGMWKSGSPFRADGEPSLFLQQEEAGLDPVLISGTQISL

SEQ ID NO: 141146 - protein, 425 aa, unidentified
MHSISNKKINQVTDQTLVVGMDIAKKKHYACFVDERGRVLKKPFPVLQSREGLEWLYQCIVEAMKEFGKTEVIVGIEPTGHYWLNLAYFLDEKGIPLVMTNPMHVKRSKELDDNLPTKHDAKDALVIARLVKDGRFSYPRILKGMEADLRVGATFRSKLVEEQGAIRNQMIRWLDRYFPEFSQVFPSFGKMALAVLEYTPFPSDLAGKELEEVLALYRQSEGLQSPQKPKAKKLMELAQHSIGVTEGQQMARIEIATLVRRYRQLEEEIEALTEQLIELVQTSVEYEWLKTVPGLGDATIVELLSEIGSFSHYQDPRQLIKLAGLTLREHSSGQHKGQKRISKRGRRRLRALLFRVMMPMIRHNEAFRQLHEYYTTRPDNPLRKKQSIVVLCGKLLKVLHAVCTKRQAFDVKRMMWDIFGLETAA

SEQ ID NO: 141147 - protein, 370 aa, unidentified
MEQYSEAFVGIDTAKNKHALAIADPGRDGEIRYLGEIDSSPATVQRMIRKLAGRYEKLYFCYEAGPTGYGLYRQVRALGHDCIVVAPSLVPKRPGERVKTNRRDAVTLARLLRAGDLTPVWVPDAVHEAVRDLVRARTAASEDLRRKRQQLLSFLLRHGRIYRGRKHWTKMHLYWLAQQKFDHPAQQIVFQDAVDAIEDAATRLRRLDQQVAEIVPSWSMAPVVEAYQAMRGVSFGVAVTFVAEIGDLRRFDNPRQLMAFLGLVPSERSTGERVRRAGLTLAGNKRARRVLIEGAWSYRYPARVSQTLQARLEGLPKTVRAIAWKAQIRLCARYRRLTAAGKKRPLVIAAIAREMAAFLWAIAQHVAPAA

SEQ ID NO: 141148 - protein, 334 aa, unidentified
MENIALIGIDLSKNSFHIHCQDRRGKAVYRKKFTRPKLIEFLATCPATTIAMEACGGSHFMARKLEELGHFPKLISPQFVRPFVKSNKNDFVDAEAICEAASRPSMRFVQPRTESQQAMRALHRVRESLVQDKVKTTNQMHAFLLEFGISVPRGAAVISRLSTLLEDNSLPLYLSQLLLKLQQHYHYLVEQIKDLESQLKRKLDEDEIGQRLLSIPCVGTLTASTISTEIGDGKQYASSRDFAAATGLVPRQYSTGGRTTLLGISKRGNKKIRTLLVQCARVFIQKLEHQSGKLADWVRDLLCRKSNFVVTCALANKLARIAWALTARQQTYVA

SEQ ID NO: 141149 - protein, 384 aa, unidentified
MQASTVDTPTAGHCGTIFVAIELSQKIWLVTLHSPDRDRISRHKLEGGDHAGLLMLIERMRERAARTLGAVPAVVSCYEAGYDGFWLHRLLLAAGITNYVFDPSSIAVDQRARRVKTDRIDGERMLRTLMAYLSGEPRVVRIVRVPSVEQEDARRASRERARLTKEQTAHTTRIKALLRLLGMAVGNPRRRDWLSWLVKQRDWQGQAVPPQIMAEIKREHARLMLVREQLDAPALAAADLTPAAAQMAQRSELLLRLKSLGPAFATTLTNEVFYKDFRNRREVASYFGLTPSPWQSGGIDRDQGISKAGNPRARCAAIEMAWLWLRHQPDSNLTQEYRRRTLNASKRIKRVAIVALARKLIVALWRYLTTGLVPEGAMLKTAEV

SEQ ID NO: 141150 - protein, 415 aa, unidentified
MESARNTLPEQPVNAVTGGVDWAKDDHAVSVVDACGRQVRRCLIEHSVTGLHQLIAMLGRAGVGEVAIERPDGPVVEALLGAGITVVVISPNQLKNLRGRYGSAGNKDDRFDAFVLADTLRTDRARLAPLIPDRPATVALRATCRARKDLITHRVALTNQLRAHLQSAFPGAIGLFTHLDSPISLRFLTRFDNQDRADWLSPTRLDTWLRSVGYVGGIPAATLHARMNAAPRGLTGPDAHAPTHITRALLAVLAALNAQIKTLSEQIAQQLTAHTDAHIFTSLPRSGTVRAARLLAEIGDCRARFPTPEALACLAGAAPSTRQSGKTRSVSFRWACDKQLRDAVTDFAGDSRHANPWAAQLYQQARTRGHDHPHAVRILARAWLFIIWRCWQDHTAYNTADHRALQKLLTQPQPA

SEQ ID NO: 141151 - protein, 412 aa, unidentified
MLFVGDDWAEDHHDVEVQDEDGRRLARARLPEGISGLARLHELIAEHLTEEDVDPETGFVAQSVLVGIETDRGTWVSALVAAGYQVLPLNPVQVARYRERHGASGAKSDRGDAHVLAEIVRLDRAHHRAMAGDSPAVEGLKLVARSHQAFIWDRTRHFQRLRSALREFFPAALEAFPDLMAPEALELLERAPDPARAARLSRSKITAALGRAHRRDPETKAEAIQAVLRAPALRQAPPIEAAYAVIVASAVRLIAQLNTQIDELQAVVAEGFGRHPDAEIVTSQPGLGPVLGARVLAEFGDDRSRYADAKARKNYAGTSPITRASGTRRTVLARYARNRHLADATHQWAFCALTASPGARAYYDAIRARGTGHHAALRQLGNRLVGILHGCLKSRTPYDEATAWPSATTAAA

SEQ ID NO: 141152 - protein, 346 aa, unidentified
MLYAGLDLSRKKVDVHVLDEAGKTVAVTAVAPEGWALQDLVRRFAGTGEEVTAVIESMNGAHFVHDTLELAGWDVLIADAARARALAPLAAKTDRIDAWVLAELGRRDLVPAIWLPDIATRSAREVCRFRQHLVGHRTALKNRIHATLIAHGHPVAMRDLFGKAGRAYLAELAVPEPWNTTLAQSLELIGETEERIKACERDLLARALHDPYVPLLVTVPGIGLILGSIIAAELGDIGRFASAKKFVGYTGLCPFVRQSGGRDDRGPLAKNGPRLLRWALIEVTTHACLHPLYRDHYQRTRKRLGKRRGPSVARVELARTLATAIWHMLSKNKPFAPAGPVRALVA

SEQ ID NO: 141153 - protein, 411 aa, unidentified
MENVFPCCAGLDVHKESVEACVRRIEPNGRVHSETRHWGTMTCDLLAMADWMTAQGATHVAMESTGVFWKPIYNILEGRFTMLLVNARHLKQVPGRKSDVRDCQWIAQLLQYGLLKGSFIPPRSQRELRDLTRHRTQLVEEKARAANRIHKVLQDTNIKLSSVATDVLGASGRAMLEALITGEEDPVKLADLAQRKLRGKIPQLEKALEGHLTEHHRFMLKLLWKQLAQQEELIAELDRKIEEQTCPFAAEIDRLDAVPGVDRRVAEVVLAEVGPDMKAFPRHENLASWAGMCPGNEESAGKRVRKRITPGNRWLKRTLAQATWAASHSKNSYLASQYRRLAGRRGKKRSLIAVAHSILVIFYHMLKTGTSYTDLGGDFFDRLEPRRLTHYYVKRLESLGHRVTLESYAAV

SEQ ID NO: 141154 - protein, 351 aa, unidentified
MTTMADDGWRVTVGIDTHGEVNVAAVLDARGRLLATASFATDARGYRHLERWALGFGTIDVVGVEGTGAWGAGVARHLGAAGYQVVEVDRPDRKTRRQRGKSDTIDAEAAARAVQAGTASGTPKTRTGPIEAVRALRVARRSAIKARSQAAQQLHCLVSTSPDALRDDLRALPIPQLVELVARFRPGDAHDALQATKASLRSIARRYQLLTHEIDELDAMLGPLVAAIAPNLVALNGVGTDVAGQLLVTAGDNPDRLRSEAAFAHLCGVSPIPASSGRTDRHRLNRGGDRAANAALYRIVLCRLRWDPRTRAYAEQRTKQGLTKPEIIRCLKRYIAREIYRELTRLPLDHP

SEQ ID NO: 141155 - protein, 346 aa, unidentified
MANDRIWLWFGLDVSKESFTAASYCAVNGRVCFPKAAGFPMNGTGARQFLTWRKSILNIFPSLAECHAVAMESTGPYSRRLMTLLLRQEPELYVSICNPHAVSLYTRSHRPDKSDKADAEFIARYGFDAQPPKTVQREEKERHLKELVRMRRQLIKMQTKLKNSKPTREFKDIQAMSAKVIADLGKQIKDIEKKMDELVATIETAKTEIQLMTTVPGVAKLSAAVIYAEMGSLTQYSRKQLSSLSGLCPANRQSGTSLKSSRLSRRGSPGLRQILYLDTTSAMRKIESIAKLRQRLLAREKSTKMTARCACMRKLLLIIRGVVVSGKPFEPNHTSSHPVEKSHEVA

SEQ ID NO: 141156 - protein, 431 aa, unidentified
MESRLNQRLMEITGTTMIVGIDIAKQVQWARFTDYRGVELGKAMRFENDRTGFESIVARIEMLRNNKILRNPFDKVMIGMEPTGHYWKPLAHYLIKAGYRVVGVNPYHTKKAKELDDNSPTKSDKKDALTIARLVKDGRYFDPYLPEDIYAELRVLSNGRVSIMKRNNAVKNTIIAILDEYFPEIYKVFKNPLTGKASRQILRSCPFPSLILSMDEASILAEIKKAVKKTVGMKKVRELIEASKVSIGVEYGLVSAKQRLGQLLDELEMVERHLSNTESSMEQLLTATGYGESLLSIKGIGVVTAASFLGEVGDPLRFSDARQIANYAGYNLTEDSSGKSKSGTVISKRGRSQLRSLLYQMAFTMVGQNAEMKALHKYLTTRDQNPLKKKQSLVVIAKKIITVIYSLLKKQAKYDPALALGTVRREMLKAA

SEQ ID NO: 141157 - protein, 349 aa, unidentified
MKTTSYEGKQVYIGLDVHREFFVASCICEGVVVKRCRMPGTAEAVVALVRKEFPGATVLAAYEAGYSGFWLHRKLEAAGVSCIVVHVNSIEVSSRDMVKTDKRDSLKIAEQLAVGRLRGIRVPSVEEEQKRLLTRTREQLMRKKRRVMVQIRMRLHYFGLFPESITGRLKLSDVTYILVSLEGELQRTIGMLRDEWRHLAGQIKEIDRILVEEGKNDPLDAVYRSVPGIGSLIARVLSSELGDMSQFPNERALFSFTGLTPTEYSSGGHICRGHISRQGNTRLRHMLVEASWKAVRKDPVLKEYYVKLSERAGKKRAIVAVARKLIGRIRAALRKHEQYQLGYQAALAA

SEQ ID NO: 141158 - protein, 308 aa, unidentified
MTTIYAGLDIAKSNLQLHLAGRFYDLTNTATGHRRLLKLLALQPEVQVVCEATGGYERNVVAALHQANVPVSVLNPARVRHFARAGGQRAKTDNIDAAVLSAYGGALTPKPTAPRTPLEQQLTELIRRRGQVLDILVAQRQQVEGLTVPALRRQAQSLVRRLESDLEQIQTQLKALRKQAPDLDQRVQKLEAITGVGTLTALGVLAELPELGTLNRRQVAALAGLAPHPRESGQWQGRRTIGGGRAPVRRALYMAALVASRSNRQLKEFYQRLRSAGKPAKVALAALMRKLIVLMNQILKNPNFVLQN

SEQ ID NO: 141159 - protein, 345 aa, unidentified
MKKIVKQVLGIDVAQKELVVCLGRMHDDWTPELYGHGTFANSRKGFDAMVKWVKKLTIEATAVRYVMEATGVYHESLAYYLEGKGYEVSVVLPNKISNYIRTLEVKTITDKTASEAIARFGLERKLDKWKRPKQIFKNLKQLTRERDQIVETRTMAKNQLHAEMAEAFPNPSSLHRIKAHIKFLDKQVAEITELVKQDGQVHESIELICSIPGVGRLTAATVLAETNGFELIRNKRQLTSYAGLDVREKQSGTSIKGKPRISKKGNRHLRKAMHLPALAAIRHEKKFKAVFVRLVSKHGIKMKAAVAVQRKLLEMIYTVYSKNTAFDKNYSNQNETELDKQLSLA

SEQ ID NO: 141160 - protein, 347 aa, unidentified
MEVTTVGIDLAKNVFRLHGCDARGRAVVRKQLGRRGLLAFVARLPRCVVAMEACATSHYWAREIEKLGHQVRLINPRFVRPYVKANKNDASDAEAICEAAGRPSMRFVGVKSAAQQDVQAVHRVRQQLVKSRTALMNQVRGLLAEQGIVIPQGSAQLRRALPRLLEDADNGLSGIMREILSEIGERFKFIEDRLRQYELLIQRLFRQDERCRRLAEVEGVGPLIATALVAAVGNAAEFKSGRELAAYLGLVPRHRATGGRTTMLGISKRGDRYLRTLLIHGARAALRVNQRKRTRRSVWVGRLKLRRGSNVAAVALAHKNARVLWALLRKGECYRPAPFSARVPQAG

SEQ ID NO: 141161 - protein, 341 aa, unidentified
MIAQNSFMRYQYVVGMDISKHSFDVAILSSDKPEAIFHSVFGNDTKGFSEMMIFITEVLPGFDSSKALFCMEATGLYCNALLQFFEGQRTNVWVENAVQIKRSLGVKRAKTDKVDSISIAKYAFKNTELVRVWQPSSEVLSKIKHLATLRDRMVQTQKRLITPLEELRDAGDQKMADFLEKSIKKSLAAIEGDLKKIEAKIIECLKEDVSLHHLFTLITSVVGIGFVTAINLIIHTHGFNIMCDSRKLACYCGVAPFPYQSGISIKGKTKVSHMANKKLKTNLHLAALTAIKFDPELKAYYDRKVLEGKPKMCVINAVRFKLLARVVSVIKNDREYVKKIA

SEQ ID NO: 141162 - protein, 312 aa, unidentified
MMTDDSIGIDISKDSLDVHRLSDGGTATFPNSPRGFRTLSTWLGCDIPTRVVFEATGPYHRGLERALSGKFPLVKVNPLQARRFAQACGTRVKTDAVDARMLASFGSALSLEPDQPVDGEQFDLRELFTARAGLVKDRTRLLNRLQTQTLALVKQQTKARIDQLTRQLKALQHDINKRLHECPSRARANTILRSIPGIGEVAASTILIEMPEIGKLRKKKSASLTGLAPMTQQSGKWHGKARIQGGRKPLRDALYMPALVATKHNPDMRKKYKAMVEQGKPKKVALTAIMRKLIELANALVKADREWLPNGA

SEQ ID NO: 141163 - protein, 351 aa, unidentified
MPRRSTVRAITTIGIDMGKNTLHMVGLDSWGAIVLRERVSRGRITSRLANLPPCLIGVEAGMATHYVARELAVLGHDVKQVPPAYAKPLRQGHKNDFRDAHAVAEAVQRPTTRFVPAKSNEQLDLQALHRVRSRLVSERTAVINQIRGFLLERGIIVRQGHRFLRHLLPDILAKRTDVLSPRMVRIVSDLAGDWRQLDERIETVTDEIETLAKSDDSCRRLMTVPGIGPIISSAMVAAIGNGSAFSRGRDYSAWLGLVPKQMSTGDRTILGRISKRGNSYLRMLFMQAARVILLRPANWPKHGFGAWLARAAQRLHPNVLAAALANKLARIAWTVLAQERSYEARVTKAAA

SEQ ID NO: 141164 - protein, 339 aa, unidentified
MELYAGMDLHSRNTLVGVIDSSLKRVFEQRVPNDLSLIVDKLEPFGDRLAGIVVESTYNWYWLVDGLMDRGYRVHLANPSAIKQYEGLKHTDDRHDAFWLAHMLALGILPEGYIYPKEDRPVRDLLRKRSFLVKHRTAHILSLQSMLEREKAYKLRGNEIKSLRAEDIGRIFSEEHLVLSAQANRASIEFFGHHIKRIEKAVRKRVKLSKSFEYLLTVPGIGDILALTIMLEVGDIARFSRVGNFSSYARCVSSQRLSDGKKKGQGNRKNGNRYLAWAFVEASHHARRYNERLRSYYQRKCAKRNQAVATKAVCNKLARACYYIIRDQVAFREEALFCS

SEQ ID NO: 141165 - protein, 363 aa, unidentified
MHYVTNTELSSHEGTRCQFNGGRCAIKLGIDVHQDFYVVVEQEGGSNPKPPQRFQKQAFLHWASKLKSRGAEVYAVYEACGFGFTLQRQLSALSIQCYVVCPQKLDDRNKRVKTDGLDAKALCLKLDRFVQGNRDALAIVRVPSEEEEQARAIHRQREQLVKARKQLEAQGRSLMVNHGLEPVHNWWKPRTFAALPAPQWMKELLANSQPILVSLQQKIAALTMQLQSAASPDQPRWLGKMTSVIIDREIGDWNRFSNRRQIASYTGLCPGEYSSGNTRLQSCVTKHGNPRLRAALVELAWRLVRFQPNYKPVVKWRPTLAKGALATGAARKKAVVAVARQLAVDLWRIKTGRLRAEELGLIN

SEQ ID NO: 141166 - protein, 379 aa, unidentified
MEIITRNEKILYVGIDVHKDTYSLCCFDFFRNELSDEMTIKATTKAVIKYLEAIKKKHKEEILFACGYEAGPTGYGLCRGLQKAGYGCVVMAPTTMSNPDGKKRVKTDRIDARAIARILAYKSYSQVHLPSEEMEALKEYTRARDAKKRMFKKAKQELLSFLLRNGKSYPESGNYWTEKFFKWIKTVQFSEKWMQEALNEYLSEVYSLKAKIELMDMKIREIAELEIIKDKVDKLVCFSGIDVTTAVETVVEIHDFTRFATAAQFVSYLGLCPGEDSSGKTKNMLSLTKAGNKRVRALFCESAKAIKRTNPYGQKSKRILERQKNASPEIVAYADKATKRIRTKMKHLEERGKNYNVSSAAGARELACFVWGMMNGKIA

SEQ ID NO: 141167 - protein, 455 aa, unidentified
MLKRTAGDRPELKLVNVGAAAIDIGSKMHMAAVDPACTDVPVRSFGTFTRDLHELADWFRACGVTSVAMESTGVYWIPVYEILEQRGFEVILVNARYAKNVPGRKTDVSDAAWLRQLHSYGLLRGSFRPDAEIATLRAYLRQRERLVEYAAVHIQHMQKALMEMNLQLHHVVSDITGATGMRIIRAIVAGERNPDVLATYRDVRCHSSIATIRAALVGNDRHEHVFALTQSLELYDVYQAKMLDCDRKLEVLIAALNNKGAKPVGKLSKPRIKTKQVNAPTFDVRTALYGVLGVDLTEIHGLGPSLALKLIGECGTDLRAWPSAKHFTSWLCLAPGNKISGGKVLSSRTRRSSSRAAALLRLAATTVGRSDTALGAFYRRLASRAGKSKAVTATARKIAVLFYNTLRHGMSYKDPGAAHYEQQYRSRVLANLQRRAKSLGFVLQAIPEDANPAVS

SEQ ID NO: 141168 - protein, 411 aa, unidentified
MDKVYDKCCGIDVHKKLIVACFRKGSKQELRNFGATTRELLELANWLQNGGCEMVAMESTASYWKPLYNILESSELKAMVVNASHMKAVPGRKTDTKDAEWIAELLQHGLLKASYIPDKQQRELRELVRYRKSLVSERTRELNRLQKMLEGANIKLSGTVSDINCMSARNILEYLLTGEFFDEAKYDEMYKQKIIAHNLKASKEQLIDDLNGVMTPLQRRMMKELLSHLDELNVHINNLEDEIDNFMKPEEKQATQAIQDVTGIGKNSSQAIISVIGTDMSRFPTAGHLAAWAGLCPGNNESAQKRKTGKMRKGNALLRSTLVVCAHSATRNKNSYFYAQFMRISSHRGKKRAYVAVAHSMLIAIYHILKDGVVFKDLGADYYNQFNKERKINAYLKKLKALGWEVPVVAA

SEQ ID NO: 141169 - protein, 322 aa, unidentified
MNKYKETFGVDISKDVFDVHGSISGHHQYKNDEAGFKKLLKYLPDKSLVVMEATGYYHYRLAQFLYKNEVIVSVVNPLSIKRFIQMKLAKVKTDKSDAKAICEYALINEVSLYTALTEAQSECLQLFRLMDVYLKHRTATKNKMHGEEVLGIPSKFVYRSLRRNRKHLDKEIQAIEQKILSLVKEDQQQQLSLLTSVPGIGQKTALFLIVVTDGFSKFENASQLCSYVGITPTIRESGSSVRGRARISKVGNRKLRNLLFLCSFNACKHNKACRALYERIINKGKSKKLALIAVANKLLKQCFAIAKSGIPYDETFVSVLAR

SEQ ID NO: 141170 - protein, 350 aa, unidentified
MKKNITVGMDMGDNNHRICILDAEGEVARRDGVANTTNAIRGYFKDWKPCLIAIEAGTHSAWVSRLLEEMGHEVLVGNPRKLRVIWDSDEKDDDRDAEMLARIARFDRHLLHPIHHRGKEAHSDLAVIKARDILVKTRSSLVAHVRGSVKSAGGRISKCTTECFHIRAIDEVPCELRDALTPVKKSIEDVTTRIRHYDKLIKQLSSDKYPETEVVGAITGVGPITSLAFILTLEESSRFKKSRDIGPFLGLTPKRDKSGDTDKQLRITKAGDAHLRRLLVGCSQYILGPFGPDCDLRRFGLKLGARGGKNAKKRAVVAVARKLAVMMHSLWKENAPYDPFYQQNRKKKAA

SEQ ID NO: 141171 - protein, 275 aa, unidentified
MQIAVLGIDLGKNSCSIVGFDDGGAVVLRRRMHREGVIKLAGKLRPCVVAMEACCGAHHLGRVLRAQGHEVRLMSPEYVRPYVKSQKNDDHDAEAIAEAATRPTMRFVELKSEEQLDMQTLHRARDRLVGERTALINQLRAVLLERGITVAQGRRKLERHLAGLDAQGGLSQRMRVLIEDMRLQWCELDRRIAELDKELTEWVRNEEAARRLMTIPGIGVLNATALIAAIGQGESFARGRDLAAWLGLVPRQLTTGGRPRLVGISKRGINISASF

SEQ ID NO: 141172 - protein, 355 aa, unidentified
MEQGSAMTIGLDVGDKHSQVCVLDAVTGEVIEESRIRTTQAGIRNYFASREPALITLEVGTHSPWISRELTGEGHEVIVANARKVRLIHASSRKNDKLDAEKLARLTRVDARLLSPIQHRSAKAQADLARIRSRDALVSARTGLINHARGSVKAFGARLPSGATSAFASKARESIPAELKPALEPVLATIEKLTASIKLMDKELVALAADYPSTSVLRQVAGAGLLTTLTFQLVIEDPSRFGKSREVGPYLGLTPGEHQSGDRNPKRRITKEGDPLLRRLLVQCAHYILRGKTDSDLKRAGLRIMSNGGHKAVAVTAVARKLAVLLHHLWVTGEVYEPLYNHQSETETLVAVTVA

SEQ ID NO: 141173 - protein, 337 aa, unidentified
MIVIGVDVHKHELTAVAVDELGRQLDALATTDDDALVAWSKRLGRGRLWALEDCRHVSRRLERVLQKRRERLVRVPPRLTAPQRRRGRSRGKSDLIDALAVARAALREPALDSPRPEEAQLRELKLLVDHRDDLVDERRRCQQRLRWHLHELDPALRVPLGALDRAVWLDRLGRQLARREQATQVRIARELLGRCRILTRSILELERELAQRTQALAPRLLELAGCGPLSAAKLLCEIGPIDRFRSDAQLARHAGVAPLDASSGKHQRHRLDRGGNRQLNCALHRIAVTQGRAHPPARAYLERKQAEGKSRRGAIRCLKRQLARTVYTTLKSEPLLT

SEQ ID NO: 141174 - protein, 346 aa, unidentified
MKITTIGIDLAKAVFQVHGVDVHGKTVLRKQLRRSEMAKFFANLEPCLIGIEACGSSHYWARKLSEFGHTVKLMSPQFVKPYVKTNKHDMADAEAICEAVSRPNMRFVPIKNIEQQAILSVHRARQGFVKARTAQSNQIRGLLSEFGIVMPQGIHSIMKRMPEILEDSENNLPGVMRKLLERLTENLKEIDHQVVELEKQIQLWHRENEASSKLAEIPGIGPLTASAIVATVGRAKEFKSGRQLAAWMGLVPRQHSSGGKQNLLGISKRGDTYLRTLLIHGARAVIRFAENKAKPESWLRKLMIRRNKNVAAVALANKNARIVWAILTNNQAFHPAYTSATIVAKI

SEQ ID NO: 141175 - protein, 400 aa, unidentified
MNPVIGLDVSKGESHAQAFLDRGVPHGKIFRFNHDLEGLSSFLNYVRAVESAAGMSPCIVMEATGHYHTPVVQFLDEHQYLYIVINPLISYEAKKTNLRRVKTDAADAYQLGALFYKEEFEPIKKRGQHLMNLRYLTRQHESLTGMYVQAKLQFQAILDQVFPEYHGVFGDLYSKVSLRFLALHPTSKEVLDMTVEEITATIQRLTGRGRSALWCSEHAQILVAAARRNPFKKTVFPSHLISMQLLIKLLLQYQDHLADLNKSIETLAEELLEYDLIQSIPGIGTKIAATILAEIGEIDRFDHAKKLVAFAGVDPSVFASGKFVATQNRITKHGSRRLRTALYQAVRCGIRSNRNKKLRAYYDKKRAEGKLFKVAVIACVNKLIHWSFAILTSKEAFRLE

SEQ ID NO: 141176 - protein, 387 aa, unidentified
MPQPKDDLSRCLVALDQNNTLIAVLELSSSTWLVGGLIPGIERDPLKKLVPDEEALLKLLHRWRDEALRVGRRITRIVVAFEAGRDGFWLARWLRTRGIEAYVIHPTSIPVSREQRRAKTDRLDIGLLKRSFLGWLRGEKKHCTMAAIPTLEDEDAKRPTREREQLVGKRTAVVNRLKAALVRLGIRGFNPKLRKAPERLAALRTPEGGPIPPNTLAELGREMAHLRFIDEQIKQIEAARLSRLKQEPRQGSNAMILQLQQVTGLGIETADMLTHEVLSRDLRDQRAVARYAGLTGSPDESGRRRREKGLAKAGNARVRRGMIQFAWRFLIHQKDSALAQWYQASVAAGGKRRKTMVVALARKLLIALWRFVTTGEVPQGVILRPAT

SEQ ID NO: 141177 - protein, 354 aa, unidentified
MIIIGVDYHPSFQQIAFVETETGEFQERRLTHREEAEKFYRDLASSGGKVRVGMEASGQGRWFERLLGELNIELWIGDASEIRAKRVRKQKTDREDARHILRLLLEDRFPRIWVPSWDNRDVRQLLWHRHRMVQMRTRIMNQLQAVALNEGLRCKKRLWREKGRQQLESFPLAPWASRRRSDLLQLLDRLNPTIAELTQVIEQEVEKYPAAQRLMTHPGVGALTALAFVLIIGEVERFGCGKQIASYVGLVPTEESSGESRRLGHISKQGSGLLRFFLVEAAQVTVRSDPEWRSKYFHLAMRRGRKIAKVAMARRLAVRLYWMWREQWDYEQLKKFGPHAGQPGTGNVVQPNTA

SEQ ID NO: 141178 - protein, 424 aa, unidentified
MKRTQNEKILQIKNETLVVGVDIGKDTHYARAFDNRGIELAKLLRFSNTVIGYDALDAWLKTIMQQHMKTEAMVGFEPTGHYWFTLGDHLRREGHQLGIVNPFHVKCTRELDDNSQTKSDSKDPKTIAMLVKDGRFRDVYIPDDVYSELREAVSERERLQGQIISLSNQIVRWIDIRFPEFSLVFKDWSGKTALATLKELPTPAKVVSVGAQGVRDVWEKSVKRSSLKKAESLVNVAKVSIGRTAGSEAAEAALKNLLAQYELMSRQSQEIEQLMQELLVQVPHASKLMEIKGIGMVSAAVIVSEIGDIHRFQDPRQIIKMAGLSLRENSSGKHKGKTTISKRGRKRLREGLFRVMIPLLANNEAFQVIHKKNLTREQNPLSKMQSIIALCGKLVRVIYAILTKGCAYDATKMINDMKQIKMAA

SEQ ID NO: 141179 - protein, 425 aa, unidentified
MNYKQNEKINQVKESTLVVGIDIGSTTQYARAFDWRGIELGKVFTFSNSREGFEAFKAWMQHLQDKYRKSDVIAGIEPTGHYWIDLGAYLEDEGILLVMVNPYAVKQTKELDDNSQSKNDRKDPKVIAKLVTEGRYSAPYTPDGVYADLRIMVTNRKRLIREMTQIKNRFARWFAIYFPEYTDVFGDYEAQSSMLLLKKVCTPEAIVELGAEKINQIWRDAKLRAVGMKRATTLCETAKRSIGLKKGSSAARYEMKLLLEDYEYKKAQLDAVMEEIEKLCRKIPESEQMLAIKGIGVITVAGFLAEVGDVRRFESPRQIQKLAGLSLRENSSGKHKGQTTISKRGRSNLRAVLFNAAIPLIATNPEFKSLHEHYTTRANNPLKKKQSVIAISCKLIRVFYAILANGVTYDAQKMLSDIHRQPQAA

SEQ ID NO: 141180 - protein, 352 aa, unidentified
MPRTFAVHAVTTTIGIDMGKNTLHMIGLDARGGIVLREKVSRGRITSRLANLPTCLIGIEAGMATHYVARELAALGHDVKQVPPTYAKPFRQGHKNDFRDAHAVAEAVQRPTTRFVPAKTDEQLDLQALHRVRSRLVSERTAVINQIRAFLLERGIIVRQGLRFLRQTLPDIIAKRTDVLSPRMVRIVADLAGDWRQLDERIEAVTHEIKTLAKSDDSCRRVMTVPGIGPIISSAMVAAIGSGAAFATGRDFSAWIGLVPRQMSTGDRTILGRISKRGNGYLRTLFMQAARVILLRPASWPKHGFGIWLARAAQRLHPNVLAAALANKLARIAWTVLAQERSYEVRIMKAAA

SEQ ID NO: 141181 - protein, 319 aa, unidentified
MAQNDQVVAGVDVAKDKVDACVRTLASRPIFPSSTQGRRQLVAWLRKYKVTKVVMEASGGYEREWAKTLRQEGIEVRIVDPKRVRSFALSAGRLAKNDAIDAKMIAWFGETFSEGPGQAYDADREELQALVKGRLGLIDLRTRLEAQGEHAAPGVVQKAHARILKDLNTEIGKLEAAISAKVKSTPDLVERTEIIESVPGLGRPSATNLAAGMPELGRVSEKVAAALIGAAPYDDDSGKRRGERHVKAGRRWVRNAIYMPCVGAATLNNPVLKAYYRRLIAKGKAPKVAIMACMRKLIVILNTMLARRQKWDPARYALS

SEQ ID NO: 141182 - protein, 386 aa, unidentified
MQKLNDLSRSLTALEPDGTLIAVIEMSLSSWLVAGIVPGVERQPLKKLAVDESALLKLLHRWREEAEKAGRRIERIAVAFEAGRDGFWLARWLKVRGIEAYVIHASSVAVSREHRRAKTDRLDTELLKRSFLGWLRGERDHCKMVAIPTMKDEDAKRPNREHDSLIGERSRIVNRMKAALVRLGIRGFNPKLKRASTRLDGLRTPEGEPIPPNALAELRRDMERRRLVNNQIRQIEEERLERIEQAPCDGPHVMVRLLARVMGVGIETADMLVHEVLSRNMRDRRAVARYAGLTGSPDESGRKRREKGLARSGNARVRRGMIQLAWRFLLHQKNSALTKWFRSRTENARGTRKPMIVALARKLLIALWRLVREGIVPDGVVLRAAQ

SEQ ID NO: 141183 - protein, 344 aa, unidentified
MSIVGGLDIHRKQITFDYLDTATGEVRRGQIAPADRAHLRAWLGRFAGRDAHFAVEGCTGWRYVAEELAAAGITAHVAEPADTAALRGRKRHAKTDKTDSRHLRVLLADGRLPECWIPPSHVLECRALLELYHDLRREHTAWVQRIHAVLFHQGAQYLGVGGLRTGEDLAALRAIAAAQLSPAGQLQVATALDKLSVLDGQLGALRHRLLAAARQLAGARELHARLYGVGPITALALCCWLGGAGRFSSARKAVRFTGLDVTVYSSDGKRSPGHLSRQGPEVLRWCVYEAGKAHARASAPDYKYYAAVKDRIDGKRAALSEARKIIRQAVHILAELGDGALAAA

SEQ ID NO: 141184 - protein, 341 aa, unidentified
MKNLFVGIDFSKEKFDVAIIFAEGLTETATRVFNEFKNSVSGFKQLIKWVERTAEGIDSSYWLFCGENTGDYSKPLSNHLYGKGYDMWLENAKSIKDASGLRRLKSDRADASMIAEYAMRNYDKAIMYEPLGGPLSQLRELYLYRQMVVRHRCSFQVRRGEKKLTLEKSPAKTTISQIGRHIVSELNKEIEKLDKKIAALIAGDVELTEVFAIVTSMPGIGTQNAVCLMVYTDNFRKFNYDSRKIACYYGLAPFGRDSGTSVHTDPHVHYMANRQIKAMLTLAALAAINFNPLIASYYERLIKEGKKKQVALNNVKNKLVHIVTAMVKNKQVFNPIYRISA

SEQ ID NO: 141185 - protein, 336 aa, unidentified
MNYCGIDLACKASAICPMDGTGAIVREEEIPTDADGFRIRLAGEEAMKCVVEASPLAEWVVQVLERLGHEAVIIDARRAKAVVCTKKKTDRVNARDLANMARTGWYTAVHRKSGAARELRTWLAARAGLVETANALNARIRGLLRAHGIKLGKVAEREFEMKVQAVVEAREPALAGALTPLLNLWRQSIDAAEVLRKEIKVRIRQDSVCRRLMSVPGVGPLTAAAYLATIDDPERFQRSDQVGAYLGLVPSVYQSGDIDYRGRITKEGDGLLRWLLVEAAHSLLSHTRRDCALKRWGERLQAQKGIGKARVAVARKLAVILHRLWITGETFDWQRV

SEQ ID NO: 141186 - protein, 338 aa, unidentified
MRLYCGIDLHSNNSVIVILDEADKVVYQKQLNNDLTSILEQLSVYRDKITAIAIESTFNWYWLVDGLMDAGYTVKLVNTAAVQTYSGLKHSTDKDDARWLAHLLRLKILPTGFIYPREERAVRDLLRKRSQLVRQSTTNILSLQNILARNTAQSLSSYKIKNLDDEHAEKLLDDPNITLALKCNLNVIRCLQGNITEIETTVLQQVRIRAEFKQLLTVSGIGEILGLTIMLESGDMNRFQKVGNFSSYCRCVKSERLSNGKKKGEGNRKSGNKYLAWAFIEAANFAIRYNDKIKAFYQKKKAKTNGIIATKAVANKLARACYHILKDQVPFDVNKSFS

SEQ ID NO: 141187 - protein, 386 aa, unidentified
MQKLNDLNRSLTALEPDATLIAVIEMSLSSWLVAGIVPGVERQPLKKLAVDESALLKLLHRWREEAEKAGHRINRIAVAFEAGRDGFWLARWLRERDIEVHVIHASSVAVSREHRRAKTDRLDTELLKRAFLGWLRGERDHCKMVAIPTLEDEDARRPNREHESLIGEQSRIINRMKATLIRLGIRGFNPKLKKAGERLEGLRTPEGEPIPPNTLAELRRDMVRRRLVSDQIRQIEDARLDRLEQAPGDGPSAMVRLLGRVIGVGIETADMLVQEALSRNMRDRRAIARYAGLTGSPDESGRRRREKGLARSGNARVRRGMIQLAWRFLMFQKDSALAQWFRIRTDNVRGMRKTMIVALARKLLIALWRLVREGVVPDGVVLRPAQ

SEQ ID NO: 141188 - protein, 359 aa, unidentified
METMIWVGMDVHARSTHAAAVVAATGELRRVRFGAGAESVVAWLQELPAPVRACYEAGPTGYGLARAALLAGVAVDVIAPSKTPRAPGERIKTDRRDAELLVRLLMAGQLRPVAIPTPGVEALRDLTRARDRIRADLLRARHRVSKLLLRYGRMWPADRGTWTREHHRWLEGQRFDDTNLELAFLDALAAVDALLRRRDALDQRLIVAAQDPDVAAAVARLCAFRGINTLTAVGLHAEIHDWQRFARPGRLAAWLGLVPSLYQSGESAQSGAITKSGSRHARRLLVEAAWHYQRPPSRGVALRRRQDGVDQRVVDISWRCQHRVHRIHTRLRDRGKPANVATVAAARELACFLWAAMRE

SEQ ID NO: 141189 - protein, 347 aa, unidentified
MKILALDLGKFKSVACVYETTSARHRFERTTTTAKALHDLLVEHEPERVVIEICSIAGWVSDLVRMLGIELQVTSTMHEAWRWRQVKRKNDRADALKLAQLSALNQLRLVHVPERETRQWRALINYRHRLIRQRTSSKNHIRDVLNREGLWLARGSAAWTSKGLEQLLELARPLAEVGVGELWRGELAVELLNLQTLEQQLRQVETKLDELGGAAAGVRLLQTIPGVGPRLAEALVALIDKPQRFQRAKEVGAYLGLTPKQIQSGESNRLGRITHAGSRVVRALLVEVSWVGLRYNSWMRGVYERTRRNSKTRKKIAIVAVARRLLIRCWAMLRDGTAWQPEYRAIR

SEQ ID NO: 141190 - protein, 447 aa, unidentified
MTDERDGFPVLRRDVAGIDVGSEEHWVCAPSRTGDGRDVERFPATTPGLERLIAWLQDRRVRAVALERTGVYWIVPHEMLEQAEFEVRLVDTRELRRVPGRPKSDRRDCEWLQRLFSCGLLRGAFRPPETVCLLRTLVRDRATLIAERADWLRRMQKALDQMNVRVHRAVADLDGVTGMAIVRAIVGGERDPHRLAALRDYRCQKTEAAIAEQLTGHWRADHLFSLQQGLKMYDAITDRLADYEREILQQLAAMAQTDDTPPPPTNVNKARMIQKRGEEPLRQALYRISGVDLTTIDALGVETVNVILSEYGPDLSRFPTEKQFIAHLRLAPHQAISGGKPVRTPKKPQRRSARVTMALRMAATSLRRSRSALGAYYRRIAQRLGADVAVFATARKLAQWVYRVLRWGQPYVDEGAAVYEHRYRQARITRLAATAKDLGYALVSVEA

SEQ ID NO: 141191 - protein, 406 aa, unidentified
MSNVRYVGLDVHKEFIVMAVADGSGAPAEVLRRFESSAPQVLAALRKLGPLSALKVCYEAGPTGYGLYRSLRAAGVDCQVIAPALIPKQNQRVKTDRRDARKLAHFLRSGDLVSVWVPDEQTEALRDLERARDDARLALRRIQQQLLKLLLRNGRVFTEGKEHWTKTHWNWIRRQRFAEESQQRVLADALQTVEQAQARLARLDQDLAECTIGWRLLPLVQNLQAFRGIKLLTAVGVAAEIGDFQRFPTAGKFMAFVGLVPSEQSSGAARRQGRITKTGNRHVRRLLLEAAWQYVGAPATVGPALAARRRHVPENVVAIADQALRRLRRKAWKMTLCKKPACQIATALARELAGFIWSAARATDVLPRTTTAGTNLQQRTRAPQPAGGGGSERVGVSLRPRRRPER

SEQ ID NO: 141192 - protein, 414 aa, unidentified
MEVLHQRCAGIDVSKRDAKVCLRVQGGRRHPTTRTVTTWGATIADILALREMLLAARVDAVVMESTSNYWKPLYYVLEDAFAVQLVNAREAKNVPGRKTDVSDAEWLADLGAHGLVRASLVPPPPIRQLRELTRLRTTVLRDRTRELQRLEKLLEEAQIKLSSVVTDLNGLSSRAILAALAAGESDPVALAGLARGKLLAKRDALIAALRGAPVSDHHRYLIGLHLRRIDAHTADAADLTVRIEEAMAPFHTLRELMVSIPGISADLATMIIAEIGDDISMFPTAQHLVSWAGVAPGSKESAGRAKPATVRPGNRHLKGAIGIAALAATRSKNTFLAARYHRLVARRGKMRALVAIERSILTAIWHMLTTGTYYQDLGGDYYSRYHPARATRRALRDLRAAGYQVTLTPLPTAS

SEQ ID NO: 141193 - protein, 391 aa, unidentified
MTEDASRPAQAAIRTALGAIFVSLELSRRTWLITSLSPGGGEKMSKHAVPAGEVSGLLRRFAELRRKAAARTGRDLPIIVIQEAGLDGFWIHRVLQSEGIESHVVDAASILTSRRRRRAKTDRIDGETLVRTLMAYKRGEPRVCSMARAPTPQEEDRRRVCRERRTLMGERVSHVNRIKGLLSAQGVFGYEPLRKGRRERLEDLRTGDRRPLPVRLKAQIIRELDRLEVLLEQLKTVEAERDALLKPASDEAASPAAMLARLKGIGPETAAVLWSEGLFRQFDNRRQVAAYAGLAPTPWQSGSIDHEQGVSKAGNPRLRTAMVELAWLWLQNQPTSALSLWFHERVQRLGRQVRKTIIVALARKLLIALWRYTTAGVVIEGAVMKAAAVTN

SEQ ID NO: 141194 - protein, 355 aa, unidentified
MQSNKISFKGQNIYVGIDVHLKTWHVTTLTESGCKYSFAQHADAKELFDRLNKKFPEAHYKSAYETGFCGFSVHYVLTELGFENIVVNPADIPTTGKEKAMKTDAVDSEKIAWSLKRGELTGIYVKDKRYMDDTNLMRLRQRFIRDLSRQKNRTKHLLYTQGVVYPERFSKKGTHWSRNFMKWLREDVELLSEEKRTLMLLCNQVEHIRKDILTITREIRRLSTTDKYKENFSLLSSVPGFGLITSMSVLTELDNDPIRFPNERKFVAILGLIPTCHDSGEKKSNGVKTFRGNKQIGPLIVEASWVAIHRDYQLGCYYTNCCQSMNPQKAIVKVARKLACKAYAVMKTKKAYVQS

SEQ ID NO: 141195 - protein, 372 aa, unidentified
MHDHDAFIGLDVHKDTISIAIAGAGRSGEVRFIGVIPNDPDVIAKQARKLADRHGHIEFVYEAGPCGYGVYRQLTELGFDCRIVAPSHTPKRPADRQKNDTRDAMMLARLLRAGELTFVWVPDPVHEAMRDLVRARQLAGNDVREARTHVQLFLLKHGLRYGRKPWGYNHRTWLSDRRFEHRGQQIAFQSYMNRLEQAESRKKEIEQQIAEVVPTWSLEPIVTALQALKGVGLVIAATLVAEIGEFSRFPNPRKLMAYLGLVPGEHSSGGTIRTRGITKAGNTALRALMFEAAWNYRTTPKVGQWMMRRCPEDVDQAVKDIAWKAQLRLNKRYRQLVGRGKKSNVAITAVARELLGFVWDIARRYEPKPTVA

SEQ ID NO: 141196 - protein, 353 aa, unidentified
MEQFIGCDAHKKCSVFVAVNEKGQAGEALRVMHDRQLYREFLAQLPAHSAIAVEASGNYSWLVDEMERSGHRPTLCNPLEAKRRMGLTNKTDKLDARGLAILLRNGTLPEVWIPPGELRDQRELLRLRIFLVRLRTRVKNRIHGTLARYNLQVPGADLFGVEARLQLEARLPELPTHSREAVEQELATLDFLETQIKSAEKRLEAIMKVSVEADLLKTLPCVGTILSMVLMLEIGRVDRFPTAAHLASYAGLVPRVHSSGGHTRMGQVCGNVNRHLKWAFVETGNLVVINQRRLAGTHVVRLYQRIKRSKNHQKAVVAVGRHLAEAAWWVLTKQEVYREPHGPRQQALSSTHG

SEQ ID NO: 141197 - protein, 361 aa, unidentified
MKGVYEVFGALARGKAIFVGIDVHKESFHVTAMCAGEEVFHGGMPSKYEVLGKVLDRFEGCRVKVAYEAGPSGFWLYDRLMADGFETIVVPPSLIPVESGNRVKTDRRDSRKLARLLESGLLKAVHVLTEQERADRDLVRTRRQLVQHRADVARQVKSKLFFHGIETPFSESRSLSREFREWLRGYPARHESLRRSFEPLLTLYEELTFHLREITREIVALSRSEGYRERVEFLETVPGIGTVTAMEILVELPRIERFSRDEELASYLGLTPSEYSTGEYIRHGRITRCGNKHVRTTLVQASWRLIGKDALMRERYESIKYRRGSKRAIVAIARMLSSRIYTMLLGNEAYSCKERRIVRVS

SEQ ID NO: 141198 - protein, 400 aa, unidentified
MPFYVGIDWASERHAVCVLDRTGRRRWQVTVAHSAAGLADLVRRLKRLAPPGQIRVGLERPSGLLVDTLMQAGVCVVPIHPNALKATRPRYSAAGGKTDPGDAFILADMLRTDGHRLRSLTAPSDGTRALRALVRGRDDLVAQRVALGNQLRAVLERFWPGAAAIFADLASPIALAFLREYPTPHSAARLGERRLAQFLAHHAYSGRRTPAALLARLHAAPISRVGEQEAHTSGEVVRALVAVLTPLVRQIQELGAAISAAVAQHPDGPVVMSFPRSGKVNAAQVLAELGDDRQRFTSADHLAAEAGVAPITRESGKSRGVGFRWACNKRLRQALTTFANNSRHASPWAAAVYTHARHRGCDHPHAIRILARAWVRVLWRCWRDRLPYDVSKHRAAVLAA

SEQ ID NO: 141199 - protein, 337 aa, unidentified
MKRYLGVDLHRTQFTVCTRLENGRTYLRQWPMRELKLFAAQLHQDDEIAVEATGNTRLFYDQVVKGVVGVVVVNPTQFKVISQSVKKTDRNDAELLALYLSKGLLPEVRMKDREHRNMSHLAQTRDLLVKQRSALKGKINNLLSAEGINLKRETLSSRKALDRVQALPLSPILATEVRVLVAQIRSLSGSIAELEEVIGEQGPKLAGHKNLISIKGIGPVSATVLLSAIGKIDDFAEPGKLAAYFGLVPRVQNSNETERSGHITKQGNKLARTALVQCSLVAKKYSPYLQKFYHRIQRRRGGGKANIALARKFLGVIYYTLKNNWVFEDFPNFVLAS

SEQ ID NO: 141200 - protein, 449 aa, unidentified
MKILALDLGKFNTMCCFFDTKTRKHSFLNAPTERNYLNTLFKNHKIDLVVMEACGPSGWINDLASSHGLKTLVCSTNEDAWKWSNVKRKTDKDDALKLSRMAAMNELKAVHMPSETHREFRSLVKYRKTLDCRINKMKCTIRAWFVNHGIEIDTGEKAWHSGRERINSFRKPLVDCEPHELWKGELDLELTQFDALTVQLESVVKKLEALGKADPRIQRIRTIPGVGPRTAEILVACIDDPHRFTTGRQVSAYFGLVPRQYQSGETDRNGRITKRGNPLARTILVECAWASLRYNDWAKGVYDRICGKQKTRKKKAAVALARKIAVLAWAMLRDEKDWAPTHMIQVTESFGKMKRELKQSLQSMKPKENSDQRKSRLRREAREAKAVADRPKKSVRTATAKRSRSKTTVVPNAAPPSNPTKRTTPKSTARTNLKPKPKPRRAGKLVSAV

SEQ ID NO: 141201 - protein, 316 aa, unidentified
MYLGIDVSKASIDCCLISDGFFYEHRFSNSPTGYTKLKTWLEGHKANPSLYCCCEATGTYHEPPAEYLNGHYKISVDNPRKIKGFANAVLQRSKTDKQDAKLIARYCKAMNPEAWQRPTSAQKQLQELTRYIARIKKQRAAELTKYQTAPDYLKRHIKATIDYLSRYLQTLKKDLQSFYKANPDYDKNRQRLKTITGIGENAAAVLLATVTAKMKTARQLAAYLGLDPKQNQSGTSINGRPRISKTGKSQERAALYMPALVAYRMKAFPAFIGRLKAKKKPPKLIIVAIMRKLVTIAFHLLKNQTEYDKTRYGLTA

SEQ ID NO: 141202 - protein, 440 aa, unidentified
MRPRTRMGICTLEDYHLPLSGQAIVMETQRNKVCGADIHKKFLVATILSRDGTKVTKRFGMTLDDLLKFKSWVIENQCEQVAVESTGSYWIPIHAVLEDSVDLIVANAYKIKHTPGRKSDLIDSEWIAELCLNGMIEPSRIFPKEDRELRRLTRSREGYVNDMTREKNRIHHALESCGIKISSVLSDIFGKSGRYLLNCLLDGVELEKMIKGIPVKSIRNKADQIREAVRGSLETTQIILIRGGLEQIASIQRRIDELDREIKNRIASREEDLKIAMSIPGIGFTSAATILAEIGDFKDFAKAEQLASWAGLVPAVYQSADKLVTGSITKHGSKHIRRILVEVAKAISQTNKSKLKRFFRRVQAKKGYNVATVALARKVLCILFHLLMSREMYREDDVIKTKSVVIDTSSLSSKLDFEEMIRVLAKAGYEIRKRDSGIGG

SEQ ID NO: 141203 - protein, 523 aa, unidentified
MGPEGVVLVAPPLDDDLGFLEGVEDFAVEKFVPELPIEGFHISVLPGTPGLDEKRVHIHPVQPLPDRMGRELGSVVHHEEAMTDRTFVGSKCVFNPHSGGPAMTSILSNTQPTTWVGIDIAKRHNDVLVERPGHRRRRFRVANRLDDYQRFSEFLTDLPERPVIGFEATGNYHRTLAFFLAKKGFSLRLVSSVAAARTREALYNSWDKNDPKDAQVIIHMLKTGVTQYYHDPLIHEINELQELSKTHFQISLHKVRIQHSILTHYLPLYFPEAEKYMTNSRAQWFTHLIERYPCRAAVTKFSQEEFIDDAWSFVGRKVNKTAFLEDFYGTATQTIGLPVSEDSEAIRMFRIVLREHQRLCVVRADIEKEAESFLGDNLDYIRLKTLPGIGPILSLTILAEGGDLRRFAHHRQFLKYCGFDLASQQSGQFRGRSKLSKRGNRRLRYAFWMAATIAIRMRENSFRDKYARYTQSDPTNADLKRKALTAVAAKMARVAHGMIKNETNYRPFHERAVPGGAIPSKGR

SEQ ID NO: 141204 - protein, 352 aa, unidentified
MLGIDVSKETLTATFVTAETRNCAWEMTVPNTAQGMRRLLARTAPTDAWVVEPTGISSQAVVRAGQAADRAVLLAQPKRAKAFLAAVQPQAKTDRVDSRGLVLSGLSAALRPFPVKSEAMERIAQLLTARKGISASLARLRQQREALPHAAAPLAAAITALAEQQRAVDRQLAQARTALPVVTALQEVPGIGPVTTTAVAACLTTKRFDHPDQFVASIGLDTRVRESGQQRSRRALSKQGDAERRRLLYLCAQANLRSRDPENPFKRQYEGEKAKGLTTTGALCAVARKLARTCWSLERHGTRDAATRVHHQPTMGMTDRTVECSKTLDMIHSIFPPREGEITVITSGSCYI

SEQ ID NO: 141205 - protein, 342 aa, unidentified
MKFYCGIDLSARDCHVCVIDEQLKIVVQQKLRNELPKICQLLAPYQGNLKIVVESTFNWYWLIDGLQAGGFDVVLAHTLGLYLITGAKVKTDRRDAYSLAKLLLVGAVPAAYIYPVETRPVRDLLRRRLHLVQVRAGEYGSLRRLLLRQGILSSKQQEIKTATEAELEQWFHHPLVRLHASQELQRIELYSQQIAELEKTVLLLAKTEQSYELLLKLPGVGQTIALTILYEVGELTRFANVKVFSSYCRVVPGIAQSGNVTRRGRASKQGNHYLKAAFSQAAVHAVRCYPKVRRYYERQLKRHQGRGRQMICYNIIAHKLAQAAFHVLKEQTEYREELLFGR

SEQ ID NO: 141206 - protein, 402 aa, unidentified
MNCVGIDVSKGKSMIAVMRPFGEVVVSPFEVRHTASELSKLARRLKSLDGETRVVMESTGNYHAPVARLLHDAGLYVSVVNAMLVHDYGNNSLRRAKTDKKDAVKLANYGLDRWLTLPRYVPEEDTRLMLKTCYRQYQQYSKVQTMLKNNLISLLDTAFPDVNRLFTSPPRADGSEKWVDFVATFWHCECVCGLSEKAFTAKYQRWCRKHRYNFSEEKALDIYASACGHFGVIPKTDTAKLLVEQAIFQLRATSAALAALKQEMQSLAASLPEYPVVMEMFGVGPTLGPQLMAEIGDVRRFHSKKALVAFAGIDAPPYQSGQIDVRSRSISKRGSASLRRTLFLVMSVILQCAPIDEPVYQFMDKKRSEGKPYRVYMMASANKFLRIYYASVKAYLESLEHD

SEQ ID NO: 141207 - protein, 402 aa, unidentified
MTDLEPLVAGGVDTHKDVHVAAVVDALGGVLATKSFPASASGYSALLIWMTSFGRIERVGVEGTGAYGAGLARHLELNDIAVREVNRPNRQARRSRGKNDEIDAIAAARVAMSNEELAFPKKRSAQVECMRLLLVPYRSFGETRTRMLNQLDALVVTAPEELREMLRNLSKNALVARCNGFRPTNDLDVTQTAKHAMKALAEQILSLQVQRLTIERQLLTLVLENNPSLLGARGVGIETAAVLLVAAGDNPGRLHSESAFAALCGVAPIDASSGKIVSHRLSRGGDRRANWALYVIALNRMAHDERTRRYVEAHPARSKKANLRCLKRFIAREVYSLIIDPQPVTDAAHFRVTRLQKRLTLVNAASALEVAPARLSEIERQVRFDTELASRYATWLNDQIAA

SEQ ID NO: 141208 - protein, 313 aa, unidentified
MNENPCYVGIDVSKESLEVALRPSGKQQTFQNDDKGVARLVQLLRAEAPALIVMEATGKYEQRVARALAVEGLLFNIINPRQSRAFAKATGILAKTDRIDALMLARFAEVLQPEARSLKTEETEALGELVTRRRQVVEMITAEKNRQGTASKRVRRDIQAHIRWLEKRLEDLNDEIDDLIRKSPLWRQKDKLLQSVSGVGPVLVSTLLGALPELGTLNRKQIAALVGVAPFNRESGRHRGKRTIMGGRGSVRSVLYMGTLAAIQHNPVIRTFYWRLFEAGKPRKVAITACMRKLLVILNTMLKNGTSWQYQPA

SEQ ID NO: 141209 - protein, 395 aa, unidentified
MKLVGIDIGKNKHFFCVMDKDTAELLVKPVSFPNNKEGFEFLINKLKPYSKNSILIGMEDTGHYHFALLKYLLDKQFTVALMNPKTTDFTRKMQGSITKNDKLDTLTICDVLDTPERKKQYRITKINSFDLYEQKQLTRHHHNLKEELNVYGNRLQKCIDIVFPEFNSLFKSKYGTVYMNLLRTFGGCAETIANTDIRTIRKCFEIKARGKRISLTPEQLKECAKSSIGISSTAEIIQIKHLVNQIELINEQIAETDKKIEEFSVKNNSPILSIPGISHFSGTSILAELGDISNYEKPSQIIKFAGVAPIHYESSQFTAQHTSITKKGSKYLRKTLYQIILPVINHNPIFKQYYELKISQGKGHRCAQGHCVRKLLRIIYHLLSTGQKFDPALLR

SEQ ID NO: 141210 - protein, 409 aa, unidentified
MYFIGIDIAKNFHVAAVLGIDSDKVLHTIKFNNDEEGFEKLFLLLSSLDEISNFTVAMEATGLFFENLYLYLKAKGFKVILLNPYQTNRFREMDTMKKVKNDNIDALMIAALIKSGRYSKAYVSEDSYQSIKSLYRHKSSLQDELKKHKRQVSTLLAVVFPEMEKVIKDPFNITGLALLEKYPTAKHYHHASVDRILKTFRGIKGNNFNEPKATKLLELAKSSIYQGNGVDERSFVILSHIRQIRFINNEIEQCESQMLALFNQQPKLDDTEEQEIMNIIDNLRTIPGVSDKTIFALMSECGDLSRFTNQNSFIGYLGLYPTLEQSGNKTVHGPIAKRGARLAKKALYQAAIASVRHNKELNKLFHDKVSLGRAKKEAIVIVARKLAHIILAIYKNNVAYNPNRVFVAS

SEQ ID NO: 141211 - protein, 370 aa, unidentified
MSQSSTLFIGMDVHKETIAVAYVAQEYGAEVIYLGTIGTRQCDIDQLVRKMPSKAKHLIFVYEAGPCGYWLYRYLTKKGYNCWVVAPSLIPKKSGDRVKTNRRDAVQLARLARSGDLTLVSVPNVEDEAIRDLTRAREDTISNLKDAKFRLKAFLLRQDIRYAGRANWGPAHLRWLSEVVCPTAAQQIVFQEYVRAITESTERLQRLEQELQAQVQVWRLHPVVEALQALRGVQFTVAVTMVAEIGDLTRFENPRELMKFLGLIPSEYSTGDHRRQGAMTKAGNTQARRALIEGAWAYRYPAKVSRHLQLRLEKQPKVIQDISWKAQVRLCRRYRRLGARGTHANVVTVAIARELAGLMWAIAKQVPVTP

SEQ ID NO: 141212 - protein, 366 aa, unidentified
MEVTTIGIDLAKNVFAVSAADSSGRVVMRRQLRRAQVLGFMRGLPRCVVGMEATGGAHYWARQLSALGHEVRLMSPALVMPYRKGNKTDRNDADAILEAVTRPSMRFVAVKSVAQQDLLGLHRVRAQLVKNRTALCNQLRGLLRERGVAVRAGVAALKRGLPAALADDSSELSGEMRELLCEMSQWLRTLEQRIASCEARITRKFKHDERCQRLAEVPGVGPLTATALVAAVGNAQRFRNGRELSAYLGLVPRQHSSGGKTVLLGITKRGDRYLRTLLIHGARSALRQCKLKGDARSEWAARISAARGPNVAAVAMANKNARVLWALLTRGDRYRSTSKITSAVLHPGSPPAINRARGAKLRVIRD

SEQ ID NO: 141213 - protein, 353 aa, unidentified
MPRERARRPLMEAYAGKQFVGIDLHRRRTVIVRITEAGEVLEAVRIVNDVQRLASVMARAGDCPEVVLEATYGWYWAVDALQAGGANVHLAHPLGVKAFEYRRVKNDVRDAQDLADLLRMGRLPEAWIAPPPTRELRELVRHRAKLVGLRSHCKAEVHAVLAKCGVQVLMSDLFGLAGTELLDRLELPAPYAARIALLRRLMDDLDFEINLFAGIIRGRMAHEPGYTAVQKIPGIGPTLAAVLVAEIGDITRFASASKLTCWAGLTPKHHESDTHVRRGRITKQGSRLVRWAAIESVKTISKTSEVGVLRERVADRRGRNIGSVAAGRRQLELVFYALRDGHVRALEHLPAAA

SEQ ID NO: 141214 - protein, 432 aa, unidentified
MNPFSVSPEPSPVAAWVGLDWADQQHVICLYEVATGQSTLTRLEQKPEALQDWLSQLRQRFGGAPVAIVLEQARGAVIYALLSADFVRLYPVNPQSLASYRKAYAPSGAKGDSADAVLLMEMVRKSPERFRVWKPDDADTRSLQLLTQNRRQLVNQKTALTNQLTSLLKTYYPLALELAGALDSLQACDFLKQWPTLEALQQARAGQIRQLYREHGHPSPEQLDRRLEQIRQARPLTADPAALLSGAMMVEALVQQLRPLLGAIERFDRQIAVLFRKHPDRPLFDNLPGAGAVLAPRLVAAFGTDRDRFHSAQQAQELFGIAPVTEQSGKQRWVHWRWACPKFLRQTFHEFAGHSRHWCGWAKALYQQLRRRGKGHHAALRVLAFKWIRILFHCWKTRTGYDEQIYLKALQKRNPTLWAEIQLLPPRKKKVA

SEQ ID NO: 141215 - protein, 346 aa, unidentified
MKKAKNILRISYGIDISSDDFAASYGILYSDLEREVTNISKFKNTRRGFDKFLAFTKKHQSKDNPDGNIQTWYVMEASGVYYENLAYYLNDKGLNVHVALANKVKSYIKTLENKSKTDDLDSIAIAQYGLEKQLLKWSPPAPEMKELKELSRELSALKDMRTSAKNQNHARNKAHEINNSSIKRIKDLIKFLNKQIKKSEKDIEIAVKSNSELKEKIDKITVLKGVGLQTAVMIIAETNGFEGITNRRQLTSYVGLDVKENQSGKKAGKASISKHGNKYVRKGLYMPALSCKKHDKKMKDLYERVCERHGWKRKKVGVIAVMRKILHIIYALWKNQTKYDPNYGIA

SEQ ID NO: 141216 - protein, 378 aa, unidentified
MKRILKIGMDVHTTNYTLCAMEPIIGEDDRVFATIKVTPDYKNILMFIENLKLKLGLNDEYDIQCGYEAGCLGYSLYNQLTAAGVKCVILAPTTMLTPQGVRIKTDMRDAYMIAQCLSYGGYHAVYIPTENDDSVKEYLRMRDDHKLALKKIKQQINAFCIRHGFCYDGTKWMQTHLKWLKKLEITNGLYRETLNEYMASYEEQEAKIERYDKRIEEIAEQTKYHDKVKKLECFLGIKTHTALSLIVETGDFERFAKGNQYAAYLGLALGENSSSNSIHRLGITKAGNSHLRQLLIEASGGICKGTVGHKSKDLRTRQNGNTTEVIAYADKANTRLRGRYYKFIRHGKKRNVAVAAIARELACFVWGMMTDNIEIKAA

SEQ ID NO: 141217 - protein, 373 aa, unidentified
MPRYSTAFGMDVHLRSTTVCALDAETGEAVTRRFRGNPWGEVAEWMSGFPGPSLAAYESGYLGFAPQRELSALGVDCVVAAVSKVPRSAADLSSKNDRNDAARMAKAILSHDVTPVWVPSPEIEGLRDLAAAHDAATARLAAAKQRLLAFLARRGYAYGGTTPAGNPRKYWTYGFLRWLDGIHPDDDGGIRALAALRNEVEAADETREALLAEYRAAVAAGPLSAEVEALQSIKGCGFALAAAFASEVGDFSRFRSGRQVTAYFGLAPKQRSSADSVRLGGISGAGNALVRKLAVEGSWRYAQAGHQPKLMPKGSGVPLEIRMHGRKGSERLLRRREEMLERGMPQAKANAATAAELVRWLWALGTMCREAGE

SEQ ID NO: 141218 - protein, 406 aa, unidentified
MPRRENYLYVGMDLHKKTHTAVLVNCWNEKLDIIVIENKPSEFNKLAKRVKTKANEMGLSPIYGLENAYGHGRALAVWLIEKGYAVKDINPALAYDQRKSAPMMKKNDEHDAYCVATVLINQLHTLPDAKPEDNHWTLSQLVNRRDILVKDGIRLKNGLHEQISVVYPSYHKFFCDIDRKTALYFWKTYPSPGHLKNKSAEKLTGELKAVSQNTLKSKAELVLECIQNDGNTIRDYQESRDFITQSLVRDLEHQIEEIAKINKEIEKMLQCFNYKLTTMPGIGTAVASKLIAEIGDIRRFPNPDKLARFAGIAPVKFSSAGKGRDESSRQGNRQLHGLFYFLAVTMVTVSKSGIPNHPVFHAYFLRKISEGKTKSQALVCIMRRLVNIVYGMMKNKTEYREPVIQE

SEQ ID NO: 141219 - protein, 342 aa, unidentified
MSAIYYIGLDIHKKVIAYCIKRIDGELVRQGIVAAERKALKKWLADLPGPWYGAMEATIFTGWVYDFLKPHALELKVAHPAMLKAITAAKKKNDRADAEKIADLLRVNLLPECHMMPEELRELRRVLRYRNMIVCTAVKMKNKMSGLLMEVGAIYDKRRLHGKKYFGALLERVEDVPDSVKALLKMSRNGFEMFNDIQKKLVSALRTNSLIRERVQRLMSIPGVGELTALTWVLEIGEVSRFSSSRDAISYCGLCSGQHESAGKEQRGSISKKRNKHLQTKLIEAAKLAPHWNEQLSQLHEKELARGNKNRATLVVARKLVEFMLAVDRRETDFELLKKEAA

SEQ ID NO: 141220 - protein, 342 aa, unidentified
MEYGAIDLHTRESEIRIVNEDGAEVFARRVATRPAALARVFADRPPLRVLLESGTESEWVAQCLEGWGHTVVVADPSYAPMYGARQRRIKTDRRDVAALAEANRQSWYRPAHRVSRAQQTVREALTIRRTLVNQRTQLIAAVRTIVRRSGARVSTGQAETFVRRVRQLGVPADLQTTVAPLLIALEGLAPLIAAADQAATVQARGDAVVRRLMTAPGVGPITALNYRAALDRVERFADAGAVTSYLGLVPREYSSGDHQRKGRITKAGPREPRAMLVQASWTIWRIRRGPGVYLSAWAHRVAARRGRRVAIVALARRLARILFAIWRDDQPYRESVRHQVAA

SEQ ID NO: 141221 - protein, 391 aa, unidentified
MFYIGVDIAKYNHEASIIDSNGKLVSESFSFSNSIRGLEKFQKFISSFSIDSNNCIIGMEATGHYWLSLYSFLIDLGFYCVVINPIQSDAFRKMYIRQTKNDSVDSFVIAQILRFGEFSLSHFSDEDTFALRNLSRFRFALVDEASDWKRKLVAILDQVFPEYSSLFSNIYGVASKELLSKYPLPEDMISIPADELAMLLSKCSKGRFGIDKAKEIQEKASNSFGVKFALKSFSFQIKQIIAQISFLEDQIIELEDEISSMINSLCPVITSITGIGDVLGAAIFSEIGDISRFERANQLVAYAGLDVAVKQSGNFNATDTKISKRGSPYLRHAIWLAAIVAAFKDPALSVYYQKLRQGGKAHGTAIGAVARKLTNIIFAVLRDNKAYIPNI

SEQ ID NO: 141222 - protein, 405 aa, unidentified
MIVYIGIDWSKDKHDIIFMNEQGGHILYLTVAHSPEGFERFNAEREKLGVSAEECVVGIETHHNLFLDYLSSHGYQQAYVLPPFQVSRSRGRHGASGASSDKSDASVIADMLRTDRRRLIPWRPNKPLTQQIASRVSLRRFLTRSIIQVTNRLRMVLWRYNPNATRIFSKLDAQIALRFIIAFPTPEHTEQLTYQAFLRFVKQHRYPDPKKLPACFARLQKPQPRADHATVLAFQDEAVRLSKLALHLVRERVTTEGQIRKLFALHPDAPIFESLPGAGERLAPALLAKFGDDRQRFPSAQTLQSVAGTCPYTKQSGKRKYVLFRRACDREFRHITQQWAKASLEQSVWANTYFQMVRPRCKSTSHAYRCLANRWLAIAWRIWQDSAPYDETLHMRQHALRAQPI

SEQ ID NO: 141223 - protein, 344 aa, unidentified
MKIKLLGIDLAKNIFQVCALNQANKVVFNRKVKRDKLSSLIANTPPTIVAMESCSSAHFWGRLFSQQGHQVILIPAQHVKPFVHGGKSDSHDALAICEAAQRPSIHSVPIKTIEQQDMQLLHRLRQRHIQHSTSLANQIRSLSREYGLIFPLGINKLIALIPAALEDASNELSTIARRALFDHYQELLHARKSATELLKQIQQLAAQHPDFEALKVVPGIGDLTASAYIASVGNGHQFKRGREVSAWLGMVPRQYGTGGKMQLGGITKNGDRYLRSLLIHGARAAISRSSKNCPPLKAWVEPIIARRGYNKAVVALANKLCRIAWVIVAKGEPFDLKRAFKPAT

SEQ ID NO: 141224 - protein, 341 aa, unidentified
MKNLFIGVDFSKEKVDVAIIFADGLTETAARVFNEFKTTVSGYKQLVKWVEQNSYGIDSSLWLFCGENTGDYSKGLCNFLYGKGYDMWLENAKSIKDASGLRRLKSDRADASMIAEYAMRNYDRAIMYEPLSESLAQLRELFLYRQMVVRHRCSFQVRRGEKRLTMEKSPVKTMISQSGRHIVSELNKEVEKIDKRIAELIKSDEELTEVFTIVTSVPGIGTQNAVCLMVYTDNFRRFNYDSRKISCYYGIAPFGKDSGTSVHSEPHVHYMANRQIKAMLTQAALAAVNFNPIMARYYMRLIERGKKKQVALNNVKNKLVHLVTAMVRNRQTFTPEYKISA

SEQ ID NO: 141225 - protein, 422 aa, unidentified
MFKIFRFNCCGLDVHKTWIYACIGITGSNNITEYKQARFSSFTKGLKELCNWLAKYECNDVCMESTGKYWIPVFNILEQAGVYVVLAHPKYTKPHKGNKTDRKDAKWICDLFMCDMVKPSFIPPADIRQLRDLMRYRFKLTNMIVGEKNRAHNCLTVSNLKLDDVFADIFGKSARSITEYILDHPGESFDVKPFLRKNCKTPAEEIQAAVDGAISKEQATKLRECLSHIDELKNHKTKIEQEILCLCEPYETVLSLIRSVPGFDKNPMTAIALLSEIGPNMSVFPSAKHLVSWAGCCPRNDASARKVKSTRISRSGTYLKPLLVQVANALVKSKSHPEFTERYRRIKARRGHKKAIIALCRMILTAIWHMLTDGTFYTPDGFTADNSKPAGKVLSTSQALALLRSHGYTIKEDASVTAFGTS

SEQ ID NO: 141226 - protein, 369 aa, unidentified
MGKYSEVFVAFDVAKKKHAVAIAEGGRAGEVRFLGDVENSPLPIERTIKRLADRYERLHVCFEAGPTGYGLYRQVQALGHDCMVVAPALIPKRSGERIKTNRRDAVTLARLHRAGELTAVWAPDAAREAVRDLVRAREAVGDDLRRKRQQLLSFLLRHSRIYSGGGHWTLAHRRWLANQKFEHAAQQIVFQEGIVAIEDALDRLRRLEKQIALIVPEWSMAPVVEAYQAMRGASFLVAVTFAAEIGDVRRFDTPRQLMSFLGLVPAESSTGDTIRRKGLTLAGNRRAPRALVEAAWTYRYPARVSETLRARLEGLPKPVRDIAWKAQVRLCARYRRLSATGKKLPIVVAAIAREMAAFLWAIGREVAPA

SEQ ID NO: 141227 - protein, 315 aa, unidentified
MLIHYIDIAKRNFVIAVSSLSKTKTETNNPKGIAHTIEYLKKHKVALVVTESTGGLEIPAAKAIRRAGIAVIIANPRQTHQFAQSQPLTKTDAKDAKMPAFFAQMTAQKEDSQTMPYQPPTEAEEVLEALVNRRNQPADMRTAEKNRLHQVHETQVGSVKQLIAHFDRLIDELDKQIDNHTHTHFDGKDQVAEQIKGIGSITTATLMAMLPELGRLSHKRIAGLAGIAPHPRESGETKFKSRCFGERSAVRKALHMATVAATRFEPLIRDFYQRLLSEGKPYKAAVTACMRKLLTISNARMRDYFAENDTAENGI

SEQ ID NO: 141228 - protein, 429 aa, unidentified
MSYRIAGIDVHKKMLAVVVCDVEIESEYEFERRKFSSSPEQLRSLAAWLLEQEAEEVVMESTAQYWKPVWEALERYWKPLCEKREGARRKSGTLHLAQALSNRGRRGRKRDFPDAERLVKRLVARELTLSFVPDAEQRLWRTVTRKKYQLRCDRIRLQNQLESLLEEAHIKLSSLVSDLLGLSARRMLKAIAEGETNPAALAALADERLRATPEQLCDALGACTELNAVYRRLLKMALEELRLIDEQIGRLDQEMASLLSEHQDAVQRLAEVPGLGVDSAQQIIAEVGPTAATFPSEKCLSSWVGACPGDDESAGVNYSHRSPKGNRHMRRLLNQAANAAARTKGSIFELAYRRSVPRLGHNQAIGVIAHRQCRLIWLILHQGVRYEERGPAVGKRSKQLRTWRMIRQLRNLGYRIEPPNPQPSQASPQ

SEQ ID NO: 141229 - protein, 397 aa, unidentified
MIAVGIDVSKSKSTVAILNGDGSIRAIPFDVHHTADELQALINYIEGTSEVPTILMEPTSHYHYPLLKAFQEADLPVCLINPYQMKKYGDTELRKAKTDKRDSLRIAQYALEKSYSLIPYTSQDQKYEDLRFLSRQYSQRISTLTAAKVQLLSLLDETMPGITTILPLKSRDPDNCVLLRFIKRFKSFDVIRKMGKIRFLDSYQVLVKKTKDRFAGSKGLAIYELVLNSITTRGENPLSAMTQDQCVDLVSTAQNAADEINLQMRSIAETIPEYKVLRSMAGVGDRLGPIILAEIGDIRRFHSGKALNAYAGNDAPPYQSGQFESRNRHISKRGNPALRKACFEVMQALKLTKPQDDPVYLFLLKKEQEGKPYNVAKMAAVNKFLRIYYARAMELYK

SEQ ID NO: 141230 - protein, 343 aa, unidentified
MVIFGIDAHKRSHTVVVIDEHGRQLAQRTTNHTATTDHIELLRWAERFDADRLWAVEDCRHLSRRLEADLITAGERIVRVPPKLMAHARDGARTYGKSDPIDALAIARAALREPELPAAHLDEDARQVRLLVDHREDLLAERTRHTNRVRWHLHEIDPHWDPKPRALGTLRHLDVAADRLAGDDTLVAAVARDLIARIRSLTIDIRELEKQIAQRVEHLGALLSIPGVGALLAGKILGEVAGVGRFRSRHAFARHNGTAPLPAWSGNRVRHRLSRTGNRQLNAALYRIAITQARVHPDAITYLERRRAGGNTSAEALRALKRRLSDVIYRALLVDTGPAHRLA

SEQ ID NO: 141231 - protein, 405 aa, unidentified
MGKVFVGHDWAEDHHDVFVEDEMGRKIGGGRLSEGIDGVARFHELVADHVDDPADVVIASETDRGLFVNALVAAGYTVLAVNPMSTSRYRERFSTSGAKSDPGDAKVLAELARTDAHLHRPIAGDSELGEAIKVLARAHQTLIWTRQRQTNQLRSSLREFYPAALEAFDELGGRDSLAILAIASTPVAGRQLSLSKISATLRRAGRQRRIEQRAAEIQTALRSDQLEAPILIADAMGATVAALVAVIGELTTQIASLEAKLADRFEQHPDAKIIRSLPGLGMTLGARVLGEFGDDPNRYEDAKSRKNYSGMSPITKASGKHKVVLARYARNRRLSDACYLWAFATLTRSPGARAFYDEHRARGDTHSRALRALANRLVGILHGCLRHHTLYDEHTAWAHRQQQAA

SEQ ID NO: 141232 - protein, 409 aa, unidentified
MEVIYPCCGGIDVHDEFVVVCLSRVQQGQRHKELRRFATYSAELRGMCAWLAAAGCTHVAMESTGIYWRPVYAHLVSQFEVTVVNAQHMKAVPGRKTDVQDAEWIADLLQHGLLTASFVPPVEQQQLRDLTRLRISLVQERARLVNRVHKLLQEANIKVGNVLSDVLGVSGTAILQALARGETDPERLANRAHASVQRKHEQLVRALDGHMEQHEQFLLQELLGLISAMERSLVHVEQQIEERLHPFEDCLGRLEQITGVSRKVLYVVFAEVGTDMSRFPDAAHLASWAGMCPGQHESAGKRHSGRLRKGNRYLRAALVQAAHAAGHTQTYLGEQYRQISKRRGKKRAAVAVGHSILVIFYHMMRTGEPYQEKGVEYLQARTHHRVQRRLIQRLERLGYQVIEPGSAIA

SEQ ID NO: 141233 - protein, 365 aa, unidentified
MYIQNNAEGFDTLLQTIRRCVCPGDKIKVGLEATGHYSYNILGFLLDKGLDTYVINPLHTNLYRKSLSLRKTKTDRVDARTIAAMLMSDVDLKSYTDTAYHNEELKSLTRYRFDKVRERAKLKQSVSRLVTILFPELEKLVPSLHMASVYALLSEFPGAKQVAGAHLTHLKAVLYDASKGRYGRDMATTLREAARCSVGSVMPTKSLELQHTIRLIRELDAEIEDIEAAIQSMMDEMQSPIMTIPGIGVRMGAMILAEIGDFSRFDSPDKILAYAGMSPSTYQSGQLSLSGAYSHMEKRGSRYLRYALYNATKYVCLWDPVFAAYLAKKRTEGKHYNVALSHAAKKLVRLIYAMEKSRQSYRNAA

SEQ ID NO: 141234 - protein, 352 aa, unidentified
MTSTITYRIGLDLAKGVFQVHGVRNEPGEAVAITKRLKRAQVEPLLAKLPRSLIGMEACGTAHYWARLAEQHGHEVRLMPPAYVKAYVKRNKTDAHDAAAICEAVGRPTMHFVPVKSEADQATLMLHRVRASFVEKRTAAVNQLRAAFAEFGVIAPVGARGFSALLELIEAQAERFSALPGALRLVLEELALQWKSCAAAVRRMDVEIAACVKKSERAKRLTAVPAIGPIGASAIDSLLPDPRVFRSGRDFAAWVGLTPREDSTATTIRRGPITKKGDGYLRRLLVLGATARLARVRRGQVKDASAWELRMAAHPKRKLAAVALANKTARIAWAMLARNEDYRAPAAVPQAA

SEQ ID NO: 141235 - protein, 467 aa, unidentified
MTPHKDFFLDPCPPAPTPTLPQSPVLADALQVCHPHAAGIDIGEAEHWVAVPPGCDPQPVRRFGTFTADLDALADWLIDCGVTTVAMESTGVYWIPLFELLEARGVQVLLIDPRQAKRAPGRPKTDRLDCQWLQRLPTYGLLAGAVRPADQVCVLRGYLRHRQMLITYAAHHMQHMQKALEQMTRKLTQVVSDITGVTGMAILRAIIAGERDPVTLAKLRNPHGQHDADDIAKALQGTWRAEHLFALQQAVALYAFYHQQVALCDQQITAHLETFADKSAGQPLPPKARRHTKTNEPRFDARTPLDRLAGVDLTTIEGIEENTALIILSEIGTDMHRWPSVKHFCSWLGRCPQHQISGGQVLSRRVRPGAHRVTVALRLAARSLHHSQSALGAFLRRMKARLGTPKAITATAHKLARLVSSLLQHGSAYVQQGLDAYEAQYRERKVTTMAKQAKALGYLLVPLVAQG

SEQ ID NO: 141236 - protein, 368 aa, unidentified
MGNGTPTSWVGMDTSAEKIHVAIFRGAEVKPAEEFEVGADAKGIARLKKMLEKESGTVKCVYEAGPCGYGLYRDLNNSGFSCEVIAPSLIPQKPGERVKTNRLDARRLGSYHRSGNLTAIHVPDPKHEALRDLVRARDDLRRDLQRSRQRLNGCLLRHGFHYTETSLWTRKHWAWIKATKIEDENLRMVIDEYISAIQVRIEQLQKFDDRIEELAQRSEYKSKVEAYSVLRGIRTLSAMTILAEGGDLRRYGTASQFMGSTGMVPSEHSTGNNRRLGSITKTGNGYLRRILIEAAWSYQRRVHAGITVERRRRDQPADLLAIARKADRRLHAKFSKLLFRYNKRPTVAAVAVARELAGFVWGIGQTLD

SEQ ID NO: 141237 - protein, 482 aa, unidentified
MKKKNIYTNQSQELLTLFEEAGNGSKVMCVPIDYAKKDHVAMLCNGNGHILRKPFSVKNSPEGIEYLTEQITRSCKHRQIDLKHVFFGGEDVGSYAENFVNTLRSGGWLVAGVNAHDAKEQRTNMQASTDRLDLMGIASMLLNRRGNCSPAQSGIYRNLRTCVRHRKKLVAMSTEVKNRMHTVVDRLFPGFLNEKKSGILSFSESSLYLMEDRFSPHQIRRRKRQKLIEILKRYGTAKPESTAAKLQKYAAHVLNTPNEYITTLQLSLTQHVKHFRCLQDSINQLEHEVAVWLAQTQGAFLTTFRGIGIVLAAGVSAEIGNPHEQAPLNNLVSYSGIIPRVKQTGGAEGKTYTGKVAKRCNHILKDYVVQSGNHMGLHGPEELMADYKRREAAGQHADFGIGRRYLRTAMCLMKTSQIYMPEQLRNTKVKPEERAGYYLTIWPYLRKKWKKAGALDAAFEKDRPLGQWRCMVQELYEIKLKL

SEQ ID NO: 141238 - protein, 400 aa, unidentified
MRAVLSVDVAKCKSMVMLSTEYGEVLIEPKEIKHNIKDFDELKNQINNFKLDDLTIFMESTGIYHLPVERYFKENNFNTLVINSLTTKNNYDTLRKTKTDTKDCMRLAKLFFVNEVEYHDLSKKDLYANLKAMTRQYFYLTQLNVSCKNRYKRLINICFPELEEIFKGSRIYEETALNFIKTFPHAYIVKEKRMDALYNNLYKTNSRHDYYYKRLANKIKEISLNSYPGVDKDHSDVKNLSDMASILQENIKTINELKYKMIETAKESPYFDIINSFYGIGEVLTTELLGELGDITRFDNHKQLIAFCGLDPTIIQSGKSINVHGTISKRGNKYARWILFNISQMVVKLGNQCPSHPVYNYYLTKKAEGKHYYESLTACSTKILRMLYTMCKNNTTFKIN

SEQ ID NO: 141239 - protein, 399 aa, unidentified
MERPIISCDVSKGSSHIRGFIGLSNPIGDPFVVHHVKSELKLIKELAKSLEKQAHQKVAFVFEYTGVYHESIVRYALKIGLIVYAISPLESAKVRKSSIRPVKTDSRDCTSIAETFYKREEKHLNKPYVSDQTDLKALSRHRRSLLDELRAVKCTYRRYLDLIWPCLDLYFKEVTGKIVTTVVRVYHHPDVLKRRTSQQIAEVLENNGHCSYKRGLSIADKIKDYALDSMSGVDEKSEYVNCLTSALDRIIDLEKQVLETDKKMDRLLNRGELYGLIKSIPGIGEKLSMVISAEIGDYTRFKTAKQLVAYIGLDPHIDQSGNDDGEHRSITRKGNSILRSSLYLAVTCMLGQYDNQITKFYYQKKSSGLPHKVAAVATCRKLACTIFGMFTSGVCFETK

SEQ ID NO: 141240 - protein, 356 aa, unidentified
MRNYTSKTIYLGMDVHKKTYAVTAICEGQVVKKDTLKADPVVLIAYCKKYFAGARIQSAYEAGFCGFHLHRCLEAEGIKNLVVDPAGMEVAVGNRVKTDKRDSLKLATHLAGGRLMGIHVPSVEREDYRAVTRLRETFSRQRSRFACQLKSLLYQHGLIQADDKRKVSEKWIKALETMPVCPGLKYAIGNYIAQWRQMDAKIKEIEKELAVQAQKDGSIEAIYRSVPGVGPISARVLANEVEDTLQFSNERRLFSYTGLTPSEHSSGENIRQGHITRHGKSILRKILVQVAWKAIHLDISLKEIFERLAAKVGKKKAIVAVARRLMGRIRACFRTGELYRIKTIQIHEDELANAAS

SEQ ID NO: 141241 - protein, 349 aa, unidentified
MTIVEDTRVITGGVDTHAERHAAAALDPVGGLLGVREFPATAAGYAELLGWLRSFGTVALVGVEGTGSYGAGLARHLAAAGVRVVEVDRADRQDRHRAGKSDPLDAVSAARAAQSGRARGAPKGRDGAVEAIRALMVAKRSARHERTQAINQARALIVTGPDELRARLAGHTPAALVSAIAALRPRGGDVPGYATRVALRELGRRARFLDAQLDRLDELIGPLVTARAPGLLSLHGVGPDTAALLLIAAGDHPERLRSESSWAHLCGVAPIPASSGKVSRHRLNRGGDRQANHALWRIVITRLSSRPGHPATRAYAERRSTEGLSKPEIIRCLKRYVAREVYHQLRGSL

SEQ ID NO: 141242 - protein, 341 aa, unidentified
MQVYGIDLSKDKFDVNFLDVNEKEKKKTVKNGISAISVFLSAVPKDSILCAENTGSYGDLLVFLCNQLNISIALVPGYNVKHSLGLVKGKSDEVDAGRLREYGERFFDKLSFKTYQSEQMSELRQLYSLRSQLVKSVKVLKTGEHGRSVMPMQSIAANRCLQASVAGIEEHIRGVEQEMLSIIESYAELQQTYKLAVSVKGIGPVIATDLIIKTGNFQDIDTAGKAASYAGVCPFPNSSGKMVLKTKISPFGDKKLKSLLYMGAKSAVKHNKEYKLYYQKKQLEGKPHYLIMNNVSNKLLRTIYSVVKSRIPYTQDHICLDPRERNLTGSEKKVAQKLVIN

SEQ ID NO: 141243 - protein, 370 aa, unidentified
MGGEPPTPRTNQFVAPWSLRFWRKPDGSWNGSSTVCCSNRCQNVPALSAGTVRITRMSPNMSIIIYAGLDVAKLSLQLHCQNQSHTLPNTTAGHRRLLALVHASGAPVHIICEASGGYEQSVVRALQEAKLPVCVVDPARVRHFVRATGQRAKTDRIDAAMLARYGEQMQPRPTAPPSAAQAQMRELVRRRAQLLEVLQLSRQHAQHLTLRALRRQSAVLVRQVRRQIVAVEKEIQKVVADEASLAQRSQQLQSVRGVGPATAAVLLAEMPELGTLNRGQAAALAGVAPFARESGKWRGRRWVGGGRAPVRKALYMAALVGSRANVVLRARYQHLIASGKPAKVALVALMRHLIIHLNALLKNHQPPLAS

SEQ ID NO: 141244 - protein, 335 aa, unidentified
MFFHKSVFMNKYKETFGVDISKDVFDVHGSIVGHNQYKNDELGFKKFLRELPKEALVVMEATGYYHYRLAQFLYKNEVAVSVVNPLSVKRFIQMKLSKVKTDKSDAKAICEYAMTYEVPLYNALTDIQSECLQLFRLLDAYIKQRTAIKNKLHGEEVLGIPSSVVYRSLRRTRKYLDKEVKAIEEKLLSLVKEDQQQQLTLLKSIPGIGEKTALFLIVITDGFSKFENASQLCSYAGITPVIRESGSSVRGRAHISKVGNRKLRNLLFLCSFNACKHNKACREVYERIVSKGKSKKLALIAVSNKLLKQCFAIAQSGRPYDMEYVSVLRVKPACR

SEQ ID NO: 141245 - protein, 399 aa, unidentified
MTDQEHEQRVVIGMDPHKRSVTIEVMAADESVLLASGRYATDAAGFAAMRAAVSGFTDRVWAIEGCRGIGRHVAHRLLAAGEEVVDVPPKLSAKVRVYAVGQGRKTDATDAHSIALAGTRAAGLRPLVADADLEVLRMLADRRRQLGEEHTRKVSQLHALLLELIPGGAKKNLSATQAKGLLAGVRPRDVAGKTRRRLAAELVGDLERIYARKKAADKELRELVATTGTGLLDLHGIGPSGAARLLVEVGDITRFPDRNHFASWTGTAPIDASSGDQVRHRLSRKGNRQINRTLHMMATVQLRSQTEGRAYYDRKKAAGKSSMEAMRCLKRRLSDTVYRTMFTDLATHDNPAQVTGPGGQRGNDSDSSATGSQPQHRHFGQATPGPVPSQPKPALPKVS

SEQ ID NO: 141246 - protein, 364 aa, unidentified
MSTITMGVDLAKRVFSVCEMTETGHVVGRRDLSRETFALWLAQVPAGTVVAMEACTGAHHWARRCHEHGLQPRLMAAQFVTPFRKSRTSKNDRNDAEAIATAARQGNMRFVPVKSIDQQARLAWHRVREGYKSEALAISNRLRGLLAEFGVVVAHGDLALRCVLAELAAMHSLPHEFKELLVELDMHWQVVRTRMQDCDRRIEAHAQSDQRCRRIRALVGIGALTADATVASIGSAKEFKNGRQLAAWLGLVPTQHSSGGRSRLGGISCRGDAYLRTLLIQGARSSLQRAKSARTDTATPEQLWIRELAVRMPFGKVLVAIANKHARQIWAMLAHDVDYDPHAMQRHAHHEPRSVATANNATSA

SEQ ID NO: 141247 - protein, 322 aa, unidentified
MYLFHLGIDVAKAKLDCALRLPDGKLRHKVVLNTPGGFAELLTWLQKQGAERVHVCMEATGTYWEAVAQCLAAREPLTVSVINPAQIKAFATSQMVRTKTDKVDAKLIAQFCAERQPAAWVAPTPAEQALRALVLRLDALQTMRTQETNRLQVARAAVREGIASHLEWLDQEIERLTQTIRAHIDRDPSLRDKQRLLDSIPGLGERTIAVLLAFYAEPSRFNNARQAVAFAGLDPRQHESGSSVKAKPRLSKVGHAFVRKALYMPAMVTAYRTDWGKRFAARLAAAGKPPMLIIAAVMRKLIHVAYGVLKSGKPFNPALHGA

SEQ ID NO: 141248 - protein, 382 aa, unidentified
MTTESASARMRYVGLDVHAETITAAVAEMDGAVHDLGTIANAPAALRKLMRKLGPIGALRVCYEAGPTGYVVYWQLVALGVACEVIAPSLIPTKAGDRVKTDRRDAVKLARCYRAGELTPVFVPDRATEGLRDVVRAREAAKQDLLRARHRLGKLLLRHGRQRPAGMRAWSVRHEQWLGTQRFALETVQLVYDEYRAALSVLVARVARLEEAMRTGVATLRPEQQAVVTGLTALRGVRDVTAITVVSELTTLTRFAGARSLMAYAGLVPREHSSGRSQWRGAITKTGNAHVRRVLVEAAWGYRHRPVTTARLRQRQQGQPAVVLAVAERAQHRLCARYRALATRGKAPLFIATTIARELLGYVWAIGQVLEHPRAPAEEHVA

SEQ ID NO: 141249 - protein, 378 aa, unidentified
MHSMTQQETLVVGGVDAHADTHHAAALDQRGALLSTKSFPTTTSGYRQLLDWLSSYGEIDVVAVESTGSYAAALVRYLREHDIAVVEVNQPHAHTRRRVGKSDPIDAEMAARLFQAGKATAVPKQTNGIVESIRLLRVARSSAVKSRSAALVQVRDLLITAPQEIRDQLSDRKTLRGKVTVCARLRPSGRGLRSPSQAAKFALRSTAQRIEALDHEITTLDRELEQLVATAAPRTVELLGISTGHAGQLLVTAGQNIDRLRNESSFSTLCGASPIPASSGKTNRHRLNYGGDRQANRALHLIAVCRLRYCERTRVYVKRRTAEGKTQREIMRCLKRYIAREVFNSLRADLAHITQPRPRVATTIMCGTPRSAINRTRT

SEQ ID NO: 141250 - protein, 318 aa, unidentified
MVAMESVKMDGVNVGVDVGKYKLLVALGSTGELWSEENEPRAIKRLCRRLAQTGCARVLIEGGSYQNVLVAALRAAELPVIIINPRRLRDFAKSIGQFAKTDRIDARVLALYGERNQPQLRELPDEQTQALRALWVRREQLLEMLGMEENRLEHAPKALQRGLHAHIDYLRKRIKQADDDLDQTVRNSPLWDKYEVLTSVPGVGPVLGAALLGALPELGRLNRAQIAALVGVAPFPDDSGTLHGARKIEGGRWRLRRVLYVATVAAVRCNPVLKPFYQRLRARGKLPKVALVAAMRRLLLMLNAMIKTHTTWRPPCLA

SEQ ID NO: 141251 - protein, 332 aa, unidentified
MYYCIGIDVSKATLNVHITKNSQDLQIDNTLAAVKKLYTKLKKIYKKELEELVFVYEPTGSYSEMLRKFCADKSIRCFIINPKQFSNYAKALGVEVKNDEVDARVLAQSIVLAKPHQIKVPVYDIDVEQIKELMSFYKFTCKQTAQLKGHFESLVAKDGDAFSMKELKKSIKASKEREKRIIEQVHQLIQSNAQYKKAYESITSIIGVGQIGGIALLHLFLKYPEANQRQITSLTGLNPVYRQSGSSLQSSHKISKSGSIFYRGALFMGVMTAIRYDENFKAFYDRLKANGKHTTQAQIAVMRKMILVAHSLYKNDTRYIKKETKMEDKPMD

SEQ ID NO: 141252 - protein, 359 aa, unidentified
MTGIVGHEGSRLDVQVIIGVDTHQDQHVAVAIDQRGVRLDEKHVPVATCGYEELERWSRNLGQVHAFGIEGTGSYGAGLARFLTSRNYTVVEVNRPDRSVRRSKGKSDATDAEMAARAVLSGIADAIPKSGEGEVEMIRMLKSTKDSAVKARTQAINQIKALVVTAPSELRETLNGLTTAALITRCKGLRSGRLDDPRAAAKYALRSLACRYRQLNEEVQALEAELERLTSAVAPVLVSAFGVGPDTAAALLVTAGSNADRLRSEASFASLCGVNPIPASSGKTNRHRLNRGGDRQANAALYRIVVVRLRYEQRTQAYMQRRTAEGMTKTEVIRCLKRYVAREVYSVIQRPNQILEKAA

SEQ ID NO: 141253 - protein, 429 aa, unidentified
MTGSNDTPQGVTLVAIDIAKHYHDVLIDPPPPKRRSRLRLANHRDAFEQLAEYLRTLKSSVLIGFEATGNYHRPLAYFLHQQGFALRLIPTLALARTREAMHNSWDKNDPKDAQVILHLLKTGLAQTWHDPVVNGINDVQELSKTHFQVTLARVRVWHTLRNHYFALYFPEIDRFVRSNHSVWMTQLLASFPTPAAITALSAEEFQKQAWNLVGRKVNKRALLAEIYAVAQQSIGVPVALDSAAITMFRLMLEQYLALDKLRERIAEQAAVLLGDNADSRRLMTVPGIGPANALTILAEAGDLRRFRHHRQFLKFCGLNLSTLQSGKSRGQSHISKYGNARLRTALWMAAQSAVRMRENSFRRKFDHYIRANPLNADLRRKAYTAITAKLARVVYGLIKQQRDYRPFFEHEFQVEEPLRTRAVGALATP

SEQ ID NO: 141254 - protein, 349 aa, unidentified
MSQTAQTAVAVIGIDIGKNSFHIVGHDERGAIVLRQKWSRGQVEARFANLPPCLIGMEACVGAHHLSRKLNGLGHDARLMPAKYVRPYSKGQKNDFRDAEAIAEAVQRPTMKFVATKTADQLDLQALHRVRERLVSQRTGIINQIRAFLLERGIAVRQGHRFLRAELPRILATPPDVLSPRMARVIEDLAGDWRRLDERIESLSSEIEAVARQDAGCERLMSVPGIGPIISSAMVAAIGAGDAFTKGRDFAAWLGLVPRQMSTGDRTILGKISKRGNRYLRVLFVQAAWAVLIKPKSWERHGLKPWIEAAKKRLHHNVLAIALANKLARIAWSVLAHGRNFEVSKIQTA

SEQ ID NO: 141255 - protein, 348 aa, unidentified
MIRYVGVDVGKAKCRAALMNQKGTVESEFFFENNTKGIERLVSRLTSEDKVVMESTGNLWLNLYDALDQKKIKVVLANPLKTKAIASAKIKTDKVDARILAHLLRADLVAESYVPQGSIREMRGLVRHRLGLVKMRTMVKNKVHALTDKYGYRCEYSDMFGKSGIAWMMALDFSELDRLLLENHLSLIESINLQIRKVDDVIKRKACEDEDVRLLLSLTGIDVYAALLIRSEVGPISRFSSYKKLISWAGLAPSVYQSGNVEYTGRITKRGSGMLRWVMVEAAWIAVRHDEKLGGFFERVRARRGDQKAVVAVACKMLKIVWFMLSRREAYGNVNGKRYGEKLKKIDA

SEQ ID NO: 141256 - protein, 467 aa, unidentified
MAARKQKQKRMSAQVVEDEDYQLRYEVVAGIDVAKESAVVCVRMPPAAGRKHRTSHLQAVPAMVPAIGELAAELKAAGVQMVSMEATSDYWRVWFAVLEEAGLAVQLVSSSQARNLPGRPKTDKEDARWIARLTEMGMLRSSFVPPPEIRALRVYTRHIWDLTADRTRYWQRLEKLLEDALCKLTSVVSRLAGHQTARAVIEAMIAGERDPRALAALGQGRMRNDRLPALAEALSGMRFGPQHAHAAASLLRAIDLLEAELRDLQERVTAHLAAIPASWGVDADGVTGPAAGRAGDAAVLAAADRLDEIPGLGREAAAALIAEIGLDMSRFPTPQALVSWAGLTPTARQSGPVKGRGKKGRGNTYAKRIAVLAAYAAANTDTFLGERFRRLAVRPGGGGRKKAGCAVGRSILVIVWHLLNDPAARYRDLGPDWHATHTDRSRKARNARRQLEALGYDVIITLREDAA

SEQ ID NO: 141257 - protein, 343 aa, unidentified
MQTITTVGLDIAKSVFQVHGVDVQGEVLIRRQLKRRYVLAFFQKLPPCLVGIEACASSHHWSRELKALGHTVRLMPPAYVKPYVKRQKNDAADAEAICEAVTRANMRFVETKTPEQQSGLVLHRTRHLFIRQQTAVINAIRSHLGEFGIVAPVGRNGVEDLLDVVADPSDKRVPEIARACLAALGAQLHRLKEQILEFDCMIRAWHRSSEMSLRLDDCPGVGPVLATALTATVADPKAFRSARNFSAWIGLVPKQHSSGGKNRLGSISKQGDRYLRSLFVAGALAVIRYAKIHGTKHRPWLTALLARRPTKIAAIALANKIARMAWAMMARSERYKEPVALAA

SEQ ID NO: 141258 - protein, 310 aa, unidentified
MSSLFDHLGVDVSKATLDCRLYKRHNRIPNNPKGFAQLIEQIKKSPQPLRVICEATGSYHLALVAALQQADIEICVINPRAVRDYARSRGLLAKTDKIDAAVLADFGNHFQPQPTAQLSPAHRQLVAAIERRSQLLDLITAEQNRLGQTSDPLARDDIQGLIDHLQKRKAAWDAQIQKLIAADPSLHSQVCRLSQVQGVGPLTAATVLALVPELGSLSRQQAAALAGLAPRNRDSGTFKGKRMIGGGRYKVRRALYMAALVASRHNPILKSFYQRLITKGKAPKLALTALMRKLLILLNSLIKNPPPLPT

SEQ ID NO: 141259 - protein, 324 aa, unidentified
MFVGIDVSKNTLDVALLQEGTAGKARHKVFANSTAGHHQLLSWLQEQGVTVAHACLEATGTWADAVALALHEAGHQVSVVNPALVRAFGQSQLKRTKTDKADAILIARFCQMHHPPVWSPPAPEIRELQALVRRLETLEEMRLMEENRLTSGVSCEAVRADLEEHLSDLQKRIDKTRRQIKDHIDQHPDLKSQAKLLESIPGIGAATAALLLAELGDISHFDNARQVAAFAGLVPRIRQSGSSVRSKPRLSKVGSSRLRKALYFPALTALRFNPLIKAFGLRLSAAGKSKMLILGAAMRKLLHIAYGVLKSQQPFNPDFVAQTP

SEQ ID NO: 141260 - protein, 333 aa, unidentified
MNYKLFVGIDISKLTIDVVFFLKEQPDCYQHQIFANDYTGFDGLLKWLKETGTDLQETLFCCEHTGLYILPLSTYLAAKGGNLWVENALQIKRSVGLQRGKSDKADARVIARYAFTNQDQARLYQLPSKTISTIKHLLAFREQLVRHQTSLKCTTSELKAFDKKQAAFCIKESQSLIKLYEQKIKKVDGQLIQKIEEDEELSHQFKLIQSVHGVGKQTAFFVLIHTQAFTTFDDYRKFACYCGVAPFPYSSGTSIRGRNRVSNLANKKLKTLLTMCALNTIKKDNEFKRYYQRRKEEGKSSLSILNVIKNKLLSRIFAVIRRGTPYQMELLAA

SEQ ID NO: 141261 - protein, 356 aa, unidentified
MSREVKYIGMDVHKEAIVIAVQNARGHLVMESIVETKASSILQFIHGLQGELHITWEEGTWAAWLYDLLQPHVHQVLVCNPRRNALLKEGSKNDKVDAGKLADLLRTGMLRPVYHGEHGLRTLRELARTYQTLSQDLNRVMNRLKALYRGWGIACGGTQVYAPRYREEWLGKIKHVGVRRRAELLYQQLDGLQGLRRTLRPELLAESRKHKGAKLLRQIPCIGPIRAARLLALMQTPHRFRSKRQLWTYSGLGIETRDSAQYRFVRGELQRAKKPQQIRGLNQNHNHEMKEIFKGAATRASCGMGPFREFYVSLLDKGMKPEMARLTLARKIAAITLILWKKEERFDAQQVKTQAA

SEQ ID NO: 141262 - protein, 334 aa, unidentified
MSLELLAIDLGKRSFHLYGIDTDGVILSQKVSRAKLADLVGNLAPTAIAMEACASAHYWARCWLAAGREVRLINPRFVKPFVKGSKNDAVDAEAIFEAAMRPTMRFVPVKSTDQQDLQSLHRARDRLICQRTAVINHTRGLLAEYGVVPPQGPWRFMAQAPTAIAGADLSDLARAIFGELMGQLDDLDRRIQKLDAMIVTLCRTNETCRRLAKLPGVGPIIATAIVGSVNDGRQFRSGREMAAWIGLVPRQYTTGGKPRLGGIGRRANHYLRRQLIHGARAIVSRSAKHDDRQSTWLKALVARRGFNRTIVALANKTARVAWVLLSRKEEYAAP

SEQ ID NO: 141263 - protein, 349 aa, unidentified
MLDTTTFVGLDVHARSIKAVSLDVMTGEVRCATFGYDAGAVAEWVRSVDPKARCVYESGVTGFDLQKRLSGLGVDCVVGAVSKMIKPSADRRRKNDRNDAEFLARMLSVGNVVEVWVPDDECEAARDLTRALEDARDDLSRSKQRLSKFLLRHGLAFDERTPTGRRKGNWTRAHWSWIESIRFAEGADNDVLAYYVDAVRRAAEEKARLEGLVEAEAPAADLVFEAGEFSRFRNARSFAAWVGLTPSEHSSGESDRRGAITKAGNKHLRKALVEAAWHYLTCSGRPKDLARGQAPDRVARRHAAKGVRRLVERREALLARGVHNNKANVATARELACWVWAVGLMAEEA

SEQ ID NO: 141264 - protein, 400 aa, unidentified
MNERRARVWVGIDAGKGHHWAAVVDETGATLWSKKIGNDESEILTALGEILELADEVQWAVDISGTSSALLLALLAAHGQQAVYVPGRTVNRMSGAYRGEAETDARDAYVIAETARHRRDFATIEVPAQLAADLALLTAHRTDLVADRVRMINRLRDVLTGVFPALERAFDYSAHKGALVLLTGYQTPAAIRRRGRARLTAWLANRSVRGADAVAATALEAAQAQQTALPGEDVAAQIVADLATQILDLDDRLKRIDKQIRDTFRSHPQAEIIESLPGMGPILGAEFIVAAGDLAAYADAGHLASAAGLVPVPRDSGRRTGNLHRPKRYSRRLRRVFYMSAQTSIIREGPNRDFYLKKRGEGCKHVQAVIALARRRASVLWALLRDNRVFTPELPVAQAA

SEQ ID NO: 141265 - protein, 390 aa, unidentified
MDYFYGVDIGKFAHHAVCVDETGSQLESRPLANTQPDIDDLVGRVSEAGGSVIVDQPKGGAALLIQACWDKGIPVGYLHGFAMARARGFYEGESKTDPKDAFVLADIARSHPSRIVWIQPLPEERAKLEVLVGYDEDMRADVNRQSNRLRALLSGYWPQLERAIGDRLATRPVLDLLDRYPNPEALRRLGKGRVTRFLSQRRMRKPDVFAEAILSAIHSQHTVVAGSRSAGRVVSELATEIGRLLSRRKELEGEIEECFLAQPEAEILTSLPGVGVRLGARILVEVGDISQFASPSKLASYAGLGPAPWQSGTVNTAYPSRRGNHRLKNALFLSAFASLRHPPSRTYYDRKRKEGKQHHDALLCLARRRVDVLHAMLTRGQSYYWEQQAA

SEQ ID NO: 141266 - protein, 271 aa, unidentified
MDHVAIDLGGRESQVCIRGSDGQVLEEHRMPTSSLSHWLAGRQVSKVIMETCAESFEIADGAKASGHDVRIVPSTLVRSLGVGSRRTKNDRRDAQALSEASCRIELPSVHIPSATARNRKVQCGTRQALVSARTQLINCVRGWMRQGTRSVTKGYPQTFPRRVRQKIETVPPQIERLLVSIETLSAQIHAADAELAQEAESDAVCKRLMTVPGVGPITAVRFVSTVDRLDRFADAHALQSYLGLVPGEYSSGERTNASESRKPGLPPHVQF

SEQ ID NO: 141267 - protein, 345 aa, unidentified
MKYFAGLDVSLEETAICVVDETGRIVKEMRAASEPQALSAALREVDLPMQRMGLEACSLAAWLHDELRAEGLPAICIETRAANAAMKTMPNKTDRNDARALAQIMRTGWYRQVHVKSRQCRLWRSLLVARRTVLNEMRTIENVVRAILREAGLKLGTPSRTAFADRVRDVAGADPVVLPLVEPLLTILGTMLAEFARLTKQVLDLVRKEEVCRRLMGVPGVGPITALAFRATIDRPDRFRRSRNVGAHLGLTPARYQSGETDIQGKVSRCGDELARTALYEAAHTLLVRSKKWSSLRAWGMNIARRRGMARARVAVARKLAVILHRMWVDATEFRQGKQPACAAA

SEQ ID NO: 141268 - protein, 343 aa, unidentified
MQNSTRIGVDIAKAVFEIAVSHFPGRVARTERLRREQFLAFFAQQPAATVVMEACGSSHYWARRLQQLGHHVILLPPNQVRPYVKRNKTDKTDAKGILEASRNEDIRPVPIKTVPQQTLTSLHRMRQGWMTERTARLNALRGLLRELGVFIPVGAEKVVPTVWALVEDADSELPDALRPCFAAACQEIRDIEARVKMVERQLEALAQQLPAVALLLSVPGIGLLTATALVAFLGDIRRFPSGRHLASYLGLTPREFSSGLKRYLGRISKRGDGYLRTLLIHGARSVLTHTKTHRPDRLREWAHQLAKTHSHNKAAVALANKIAPIVWAVWSRQQPYVQLQKAA

SEQ ID NO: 141269 - protein, 351 aa, unidentified
MSEYIAFDSHKRYTWVDRHEQGTGKHSGHRFEHAPGAVRHYLSGCQPGTAVAVEATGNWYGIIDEIEQAGLQPLLVHPGKAKLMMGQTNKTDQLDAQGLNRLQRNGTLPTVWIPPGPLRDLRELTRTRLVLVAQRTRLKKRLSATVAKWGLPASPCSDPYGKRGRVELEQHLARLPEQTRWVSGPLLAQLDFVSGQVRQLEQRLEGLVKVSPEMQGLLTLPGVGLILSATIALEIGEVQRFPSAMHLASYAGTTPRVHASGGKVRYGPLRADAHRYLKWAFAEAANSLAVNHARCPERRVSQLYRRLRARKGHAKAVGAVARHLAEAAFQVLRGQPMYQDPSLGRGRTSQR

SEQ ID NO: 141270 - protein, 429 aa, unidentified
MTRISVGVDVSKNRSTVCIMDQDGKFIMRPFLVWHSTEELDFLADTLKRLNGEVRVIMESTSVYQYPIALQLKERGLFISIVNAYEMKQFANTDFRGGKTDKKDSRTIASYGISYWDKLVEWQIPKDTYFNLDLLNRTYMNAKKHRQIILQELQHYIDCAMPGMDKELHSLNLSTKKDFMLDFVEKFWHRDEIVNMTEAEFTEVFTAWAKKKGYRPVEGKAAKIYAIAKSCIPYYPANPTVKTILQCIVDKLSGVNRTLVTIVTQMIEEAKKLPEYQIVREMPGVGDPLAARFFGSVGDIRRFKNSKALVAYAGIDSPPDESGDFSSTHRHITKKGSKVFRDTGYEIMMALRAQKRTWEKVRKNPEVYDYMLKKEAEGKPPKVAKIAALNKFLRIVYARIKELYDNMALAERAKAKTKSKTKAKTKATA

SEQ ID NO: 141271 - protein, 430 aa, unidentified
MKSNTQNAKIEAITEKTLVLGIDVGSEMHYARAFDYRVIEYSKKPFKFSNTEAGFVTFKEWILDLKERHEKDKVVPGMEPTGHYWFNLGKFLQDNEMKPVLVNPHHVKKSKELDDNNPTKNDRKDPKVIAGLVREGRYMIPYLPEGVYADLRTASNIRFQLQAELTRIQNRISRWFNIYFPEYKTVYGKPDAKSGMLILKAAPLPEDILTLGIDGVNQIWRDAKLRAVGKARAKTLIEAAEHSVGSKEGAVSARMEIRMLLEDYESRNTRLQEVMVLIEELVRKIPMAEKLLEIKGVGIRTVSGFLAEVGDISRFNNPKELQKLAGLALVENSSGKHKGETTISRRGRKRLRYLLFEVAMSLVSKNQEFRELHNYYTTRRLNPLKKMQSLMAIAAKLIRVFYAMLTKGVDYDPKKMVSDIKRPAVYLQAA

SEQ ID NO: 141272 - protein, 402 aa, unidentified
MSKFFAGLDWASQVHAVCVIDEHGTVKTRFEVTHDAVGLRELCRRLAAFGAIAVAIERPSGTLVDTLIEAGFTVVPIHPNAVKASRPRYRSHGAKSDTSDAYLLADLLRTDGHRFKPLTPHSDEIRALRALVRGRDDLIATRVQLANQLRSLLESFWPGAATVFADVDSPIGLAFIDRYPTPASAKGLGLKRMAAFCAQHGYSGHRSAEELVCRLRDAPAATCGALETQAKGELARALAHSLVAIVEHIRRLTNRIEHAVAALDDGRILMSFPRAGRICAAQILAELGSDRQRFSSDQHLAAEAGVAPLTYQSGKCRAVTFRWACNHRLRAALTCLADNSRHASTWAAHVYAKARGRGCDHPHAVRILARAWVRVIWRAWLDRKPYDPSQHRATQRLQLAGG

SEQ ID NO: 141273 - protein, 402 aa, unidentified
MNCVGIDVSKGKSMIAVMRPFGEVVVSPFEVLHTDSELSKLAKLLKSLDGETRVVMESTGNYHAPVAWLLHDAGLYVSVVNAMLVHDYGNNSLRRAKTDKKDAVKLANYGLDHWLTLPRYVPEEDTRLMLKSCYRQYQQYSKVRTMLKNNLISLLDTAFPDANRLFTSPPRADGSEKWVDFVAAFWHCECVCGLSEKAFTAKYQKWCKKHGYNFSEDKALDIYASACGHFGVMPKTDTAKLLVEQAISQLRATSAALAALKQEMQSLAASLPEYPVVMEMFGVGPALGPQLIAEIGDVRRFHSKKALVAFAGIDAPPYQSGQIDVRSRSISKRGSASLRRTLFLVMGVLLQCAPMDEPVYQFMNKKRSEGKPYRVYMMASANKFLRIYYASVKAYLDSLEHN

SEQ ID NO: 141274 - protein, 345 aa, unidentified
MATRTFIGLDVHQGSIYACALDRETGERRDGRFRSADRPELLAWLLGLPQPCEAACEVGNGSFVLARFLMDGGVPCAVVEHGAGRGERRHKTDARDALSLARLLSSGQVKGVFIPSAKQQARRSMSHRRADLVQRKGDTQRKIRAYIADNSLSEEAGCITWSKRGIERLRTLGIAETCGKLVFETLVDEWVELDGSIRRIDASMKREVSRDPLMAKLTALDGVGPIAAYVSVSEACEFSRFPTADEYVSYVGLAPVARNSGTLKAQRSGIGHSHTAACFKSGAASLFNSHSGPLIASPASAAERGVNAIRFKVRETLERGMKPRLRNAVIARTIAEEAWRLGNAD

SEQ ID NO: 141275 - protein, 372 aa, unidentified
MSHMSELNTKTIVAGIDVHKYSHTAVAIDCFGQKLADHEFSNDYLSEFVAWLDSLGARENLLVALEDVNGYGVHIVKRLANENILMRYVPGILTERRRKQSIHREKSDPADAMRVTKVILTNYEETLPAKESIADPGERSAAANLDFFLAERRSLVAGQTILKNQLHALLHQYWGDHYADNFAKAFNPKSMAYYQKNLKPKNMADPEQPALAMSIKRRLERLKLLVSQIREIDAAMRTAAKDCQPVQALRQNLKGCGQITACALLAEVTTIKRFRTKAQFARYAVIAPIHKSSGSHKRLYTSPYGNRKVNRALHTIALYQISRADGLGRLYYEKKLAEGKTKLWALRCLKRQLANRVFQTLKHEYESRIKPV

SEQ ID NO: 141276 - protein, 356 aa, unidentified
MVQLTTVGIDLAKDVFAICVLDATGAVLQRRVLRRDAFMRWAEQLPRCRVAMEACGSSHHWGRWFAALGHTARLIPAEFVKPFRPDGKNDAADAEAISVAARQPTMRFVAIKSVEQQAILAWHSVRNGWQEERTALLNRTRGLLAEFGVVIARSADRFISALPILIEDARLHDPVSAMLLEVREQLAALNLRLARCDQQIATHARSSDVARRAGELLGVGPVTSSALAATVPDAKVFRNGRQFGAWLGLTPRQHSSGGRTRLGHFNLRGNVYLRTLLVQGARSTLQAACVRGVGTQRRLQRWIRQLHERKGYHKTLIAIANMHARMLWAMLARDEHYDADAWQRHPMHPPLPPATT

SEQ ID NO: 141277 - protein, 370 aa, unidentified
MLDTTTFIGLDVHARSIKAVSLDVMTGEVRAATFGYDAGAVAEWVRSVDPRARCVYESGVTGFDLQKRLSGLGVDCVVGAVSKMIKPSADRRRKNDRNDAEFLARMLSVGNVVEVWVPDDECEAARDLTRALEDARDDLSRSKQRLSKFLLRHGLVFDERTPTGRRKGNWTRAHWSWIESIRFAERADNDVLAYYVDAVRRAAEEKARLEGLVEAEARKPRWRRRVDSLRCLKGVDTASAADLVFEAGEFSRFRNARSFAAWVGLTPSEHSSGESDRRGAITKAGNKHLRKALVEAAWHYLTCSGRPKDLARGQAPDRGARRHAAKGVRRLVERREALLARGVHGNKANVATARELACWVWAVGLMAEEA

SEQ ID NO: 141278 - protein, 403 aa, unidentified
MEVCYERCCGIDVHKKVIVCCLRVGNKRETRSFGTSTEDIRSMAEWLLENRCEKTAMESTGSYWKPVYNVLEVLGVEAIVVNAAHMRNVPGRKTDVKDAEWIADLLQHGLLKASYIPDRAQRELREVARYRKSLVEERAREINRLEKTLQGANIKLSSVVSDITGRSSRNLLDALTGDGLNEKNIDELLCGCLKEKRAELLKVCDGYLTILQKKLVRAILDHIDDMTRRIADMDDIVKGEMKAYEEAMERLEAIPGIAKRSAQVILSEIGLDMTRFPTAAHLCAWAGLAPGNNESAGKRYSGKTRKGNATLKTTLIQSAKTAKNKKGSFFKAQFERIAVRRGKNRAVVAVAHSMLIAIYNMLKHNCPYTDLGDTYYLHFNTERKIGYYLKQLDKLGWQNPTTA

SEQ ID NO: 141279 - protein, 366 aa, unidentified
MRKPSTTALRRRGKLQGEQLTIGLDLGDRSSFYCVLNGAGEVVLEAKVATNPEAMRKTFEKIPSSRIALETGTHSPWVSRLLTELGHEAIVAHARNVRLIGESRRKDDRLDAQALARLARIDPQLLSPIQHRSAQAQADLSVIRARYALVRARTALVCAARGLTKSFGERIRGSNPKGFSPATSEALSPPLQVALAPLLSALEAITARIREYDCQIEKLAEDSYPETALLKQVKGVGTLIALTYVLTLEDPRRFRKSRDAGCYVGLQPARRNSGQSEPQLHITREGDPYLRMVLVQGAQHIIGPFGEDSDLRRWGLKLAERGGKRGKRRAIIAVARKLAVLLHHLWISCEAYEPLHNTRKRKLAAA

SEQ ID NO: 141280 - protein, 333 aa, unidentified
MKDLSTLQHFVGCDVSKDTLDFAIYERGKDYRMFDHISVANTTEGFQAMRKWLRSFKINVKDAVIAMEHTGSYSNALAEWCFKKGITFVLLHPLDVKNAGARGRNKTDKTDAQFIADYAYTMREKLAPSLPEPQSIKKLRQLRNERQLAVRARTAYMNRLKTVTDRSTLHRMEKVTATFTAQIKAIEASIRTAVEADSRIKNTYDLLVSIPGIGMLNALTTIIATGNFTRFQTARQYAKFCCVSPLSRQSGTSVRSGDHVSHAGHNEIKSILTEGARSAIHHDANLKSYYERKRAQGKTHGCVMNAVKFKLICRMFAVVQRQTPYVNVERYRG

SEQ ID NO: 141281 - protein, 383 aa, unidentified
MKAVCGLDVHKDSIFLCILHSDGELFEQVFGVLTFQLEEMRKLLQKHHVFEVCMESTSIYWIPIWRVLSPHFTLRLVNPYFIKQLPGHKSDVKDAQWIAECTMKELVRGSFVPPEIIQQLRQYDRRIFDLNAEIVRKVSKVDGVLQRCNIRLSNYVSNIECKSYCDVVRRLSEGVTNPNELMKLVHGRIVNRHGVETILVSLTGVVSQAEIDVLRQLHEEIDIAESHRNECQQRMLEICEKHFPEELERLQKIPGIKERAATSLIAEIGTDMSKFETANHLASWSGLRPRNDESNKKIKSRKITHGNVYLRNTIIQCAWAASRQKDSFFSRFSYHQTIVRRKNKMKVIVAVARKLLIAVWHVLHDKTDYVDFKPDREESANNG

SEQ ID NO: 141282 - protein, 332 aa, unidentified
MSVFVGIDIAAKSVDVVARSNNKSSVVKRYEQTPQGHKKLADSLLKLQPTCVVMEATGIYYLNLAIVLHDAGINLSVINPKSFNHFAKLTLTNSKTDDIDAALLAEYAQRMTPKMWKRPSKDRLQLRDISRQINRLTHDCTKSKNRLHALLAYKDTNIIIIEDEREGIEQLTKRIKRLHQLALDVINADEFLKQKMENLTTAKGIGPVSAVTILGELMVLPDTLKANQVSRFAGLDVRLNQSGTSLNKPGRLSKAGNAYLRTALFMPALSALQHDPNVKAFHDALVARGKKKIQAVCAVMRKYLTGIWACLQSNTHFDSSKLFSEIHKQACV

SEQ ID NO: 141283 - protein, 482 aa, unidentified
MKKRNIYQNQSQELLSIFEAAGSSAKVMCVPMDYAKKDHLVMFCNGHGDILRKPFSVKNTPEGIKYLIDQLTRSCRRRGIKKEHVFLGGEDANSFAENFVSTLRFKGWLVAGVNAHDAKKQRMNLQASTDRIDLMGIATMLLNCRANCCPVASGIYRNLRTLVRHRRKLVVMLTEVKNRAHGIVDRLFPGFLNETKSGIVPFTQSSLYLMEDRFSPKQIRRRRRQKLIEILRLFGTSKAEETAFKLQQYAEKVLHAPDEYVDTLQISLAQHVKHIRCLQEGIVQLKKEIAVNLAQTQGAFLTSVRGIGIVLAAGVSAEIGNPYEQKPLSNVVSYSGIIPRVKQTGGVDGKTYTGHVAKRCNRILKDYVVKSAYHLGLSGPEDLMADYKRRDASGQHADFGIGRRYLRMAMSLMRTSQVYLPPRLRKADTALEERAGYYLMSWPFLRDKWKRVGALETAFSKDKPLGLWRQIVQELYDIKLKL

SEQ ID NO: 141284 - protein, 322 aa, unidentified
MAVIGVDIAKRSFDLAVLQSNGKHRTKGRLSNDPSGFAVFADWLQQHAEPGAWIVMEATGTYHEALAEHFHALGYRIAVLNPAQIARYAQSQLQRSKTDKLDAKLIATYGQRHEDSLRAWHPEPVSIRTLRALTRRLEDLQSLRQMELNRLEVSPEKVQDSIRAVVQRLDEQIAWTLEQIKRHIDDDPDLSGKRDLLVSIDGIADKTAALILAELGDIGRFADARAVTAFAGLNPRLQESGLYRGHTGISRMGSVRLRSALYLPAVVALTYNPAIKAQAERLKTRGKKGKQTVCAAMRKLLTIAYGVLKSGKPFDPALAIAH

SEQ ID NO: 141285 - protein, 395 aa, unidentified
MFIVGIDVAKRSHEVCMITSDGQTVQRPFSIRNNCTGYNLMLEKIRKHTNIKSQIVFAMESTAHYWLALFTRLRKDDYHVILLNPIQTSAMRDMFIRKIKTDAKDSFIIAELIRFGRYAESNVAQDRLLALKELCRNRFYLVDMAGDLKRKLIALIDRVFPEYEAQFDTIFCKSSVALLKKYPTPQKLSNAHLDKLTELLWNSSNGHFGEWKARELKELARNSFGVEDCDGAYSTLILLMLDQIQSLSGKADALEKEISRLFQSFDTTVTTIPGVGPIIGAVILSEVGDISRFSSADKLAAYIGVDPSVNQSGEFQAVHAHMSKRGSPYLRRCIWMASQVAVQRDPMFRAYYEKKAAEGLKYMTIIGHVTRKMTAVVFAILRDHKVYEPVLPTAA

SEQ ID NO: 141286 - protein, 338 aa, unidentified
MMYGAIDLHLRYSEIRVVEADGRVVRERRVVTSRETLTAAFAGLGELRVLLETGTESEWVAQTLEAAGHAVVVADPNYAPMYGEVRRRVKTDRRDVAALAEANRHGWYRATHRRSRAHRTLQQILRSRRQLVAMRTGSISVVRALLRQEGYRLPSGSAAQVPARLARVPLPDGFAATLAPLRQVIDTVTRAVAEIDTRLRTYAAADPVVTRLQTVPGVGPVVALTFRATLDEVARFQAAGQVSAFLGLVPREDSSAERRHRGHITKAGSRELRSLLIQAAWACWKSRGSGTLRAWAERLAGRRGRRIAVVALARRLSRILYAVWRDGTTFDGARVAAA

SEQ ID NO: 141287 - protein, 413 aa, unidentified
MFLHDRCAGLDIGKKDLKACLRTPSSTRRSRRQEIRTFGTTTNALLELRDWLVDQQVTLVVLEATGDYWRGAYYLLEDTLNVILVNAAHAKGLPGRKTDVLDSAWLAQLGECGLLKASFVPPEPVRHLRDLTRYRTTLTVERSREAQRLEKELEDAGIKISAVASNILGVSGRAMLAALIEGEDDAQVMAEMARGRMRSKIPALVQALTGNFGEHHSFLCRMHLTRIDELSATIEELSARIDQEMRPFAPQIEHLVTIPGVKKRTAEVIIAETGADMTRFRTPANLASWAGVCPGHHESAGRQSSGKRRHGNRWLGGALGTAAMAVGRTREHTYLGARYARLVPRLGKQKTIVAVQHSILIAVWYMLSDNVDYQDLGGDYFTKQDPARAMRRIIRQANALGLTVRSDPIPDVA

SEQ ID NO: 141288 - protein, 360 aa, unidentified
MNVPHDTSLSFKNQDFYIGIDTHARQWSLKIMSMNMLLKRHLSIDPYPAILLKYMQRHYPGGNYYAVYESGFGGFWAARELNRLGIRCIVVHPSDVPTSQKERLNKNDRVDSLKLARSLSNGELMPIYIPQKSAEEYRYLNRHRLKTIKDQTRLKNRIKAVLHQFGFDIPLPYQERRWSGAFINWLLTIKFDTEYAQFAYGDLVDQYIQTRTRITKQLRKMRLMAKEQAPFNILIPLLLTVPGIGFITAMTLATEIMDMKRFKTLDNLASFVGLIPSIQSSDDKEINSGISPRRNKYLRTMMVEAAWTAVRVDPALTMKFNQLSKRMNRNKAIVRCAKILLNRIRYVWNSEKPYEVSILK

SEQ ID NO: 141289 - protein, 356 aa, unidentified
MERYIGLDAHAASCTLAVISQAGRRLKDFPVETNGQALVEAIRMIPGRKHLVFEEGLQSAWLYETLRPHVDEVVVAGVTKSRGQKSDQRDAYGLAEKLRTGSLDKRIFKAPQEFTLLRELSRAHITATRDLVRVQARLKSLYRSRGIQTLGAAVYSSGQRDEWERRLPASARGRARRLYEQLEFFKEQKKRAEADLLRESRKHKIVRILETAPGIGPIRAARLVPIVVTPHRFRTKRQFWSYCGLGIVTRSSSDWVQTADGGWIRARVPQTRGLSRQYNRVLKDIFKGAATLVITQRNKGPLYPRYERMLAGGTKPSLAKLTLARILAATVLRMWKDEEEYRPERHRRLMEPDRSA

SEQ ID NO: 141290 - protein, 350 aa, unidentified
MVVVGADVHKRSHTFVAVDEAGRKLGQLTVKADAKGHDKAVRWAERTFGPDLKWGIEDCRHLSARLEMDLLDAGQRVVRVPPKMMAEQRRTARTHGKSDPIDALAVARAVLREPDLPEASHDEASRELKLLVDHRDDLVKQRTGDVNRFRWHLHRIDPTIDPGPKSLNRAVKRAELAEFLAGKDGIDARLARELLADIDALTGRINALEREISGLVAVQAPALLELPGCGALSAAKIVGETAGIDRFSHEAKFAMHAGAAPIPVWSGSTRGRVRLNKAGNRQLNAALHRIALTQIQREGIGRAYYEKRLAMGDSKTEAMRCLKRRLARTVFNILKNNPSTLATTGLAAAA

SEQ ID NO: 141291 - protein, 322 aa, unidentified
MNPKNYGGIDVAKKNFVIGIYGQDKTKTEANTPKGHAKAVEYLQKHNVDLVVLESTGGLEVPLANALHAADIRVVIANPQRTHQYAESFSLGKTDHLDAKMLADYAQALDSRKMADDMCYAPPSEEALALEALVKRRSQLVEMRKMEKNRLEQTHASQKASVVAMIKHLGELIAALDKEIDQSNRGGFNGKGEILSEMKGVGRITCATLLSMLPELGKVPHKRAALLVGVVPPPRQSGEKEKKSGCVGGRMVVRNALYMAALTATRSEPKIKAFYEKLMSRGKAFKVALNACMHKLLRILNARMRDYLASLKETEECEPQSA

SEQ ID NO: 141292 - protein, 356 aa, unidentified
MSEGSWVGLDVHARSVVAGVIDMGNGEVRSLRVPPGSEATVAWLKTLPSPVRVVYEAGPTGYRLARACAEAGISCVVAAPSKIGPAADRVKTDRRDAERLARLLRLGEITAVRVPGPDEEAARDLVRAREDARGDLMRARHRLSKLLLRHGAVYEATAWTRAHDAWLRKQRFQGGPLAIVFDECYSRMLDAKTRRDTLDKAITELAASEPYTDVVERLICLRGVSTLTAFALTVELGDWNRFRPESLGPFLGLTPSENSSGQRRRQGAITKTGNTHARRLLIEAAWHQRSAPRLSITLERRRTGKSLAVRAQADASARRLHGRWHALEARGKPRLIVVVAVARELAGHCWALATME

SEQ ID NO: 141293 - protein, 321 aa, unidentified
MSNIIGIDVSKVDFYASFNEQDQSKLFQNDKRGIKIFEKYLNKNNFKKDQTIIGLESTGIYHLPLSHKLTQAGFTVKVINPLITKKQNQTTLRRVKNDCKDASLVRYCTLNGAGYEFIDTPEMLTLKSLVRLRDNLSNMKNVLNLQQKSLEYKEKNLDISVSKANHRLNKSVSVEIEKLEKELKEYRKAEQKLLQTIPGVGPITAVSFISEVGNVSRFPFSQKLIAYIGLDSRVHKSGTSINGKGYISKRGNKILRTRLYNACSVAVLRPNIFQDFFQKKRSEEKTYKVALVATMHKMANVIYAVWKNNTPFQDRRGLTGI

SEQ ID NO: 141294 - protein, 344 aa, unidentified
MNNTIVGVDLAKEVIQVCIYTNQKVRSNKEMTTSEFLNFLANLKSVIVVFEACSTSNYWKQKASSLGHDARIICPKLVLSVRQNQKTDKNDALAVVQAALLPDVNFISGKNIEQQQLQSIMRFRELAIKQKTALGNQLKGLLLELNIRVSSRNGGLKGVIQSSLEEGENDLSFEFRSALKMAWTQYSGLLKSIAHYENTLTKISTKHSECKKLLKLEGVSTINAVNLYIALGCQPEIFNKGKDASACIGLTPIQYSSGGKVKLGSIGKHVKNSMLRSNLVVGAMSAINRIITREAVTKKEAWIQALVARRGKRCAAVALANKTVRTAFAMLTQGTEYKAELITA

SEQ ID NO: 141295 - protein, 345 aa, unidentified
MPIVGGLDIHRKQITFDYLDTVTGEVKCGQIAPADRAHLRAWLARFAGCGDVAFAVEGCAGWRYVAEELAAAGIAAHLGEPADTAALRGRKRHAKTDKTDARHLRSLLAEGRLPECWIPPAQVLEYRALLETYHDLRREHTAWVQRIHAVFFHQGAPPLGEGALRTEPGLEALRAAAAAHLSAAGQQQVATALDLLAATEAQLGPLRHQLREAARHLTGAKVLAERLYGVGPVTGLALTCWLAGKDRFSSSRKAVRFTGLDITVHSSDRKGPPGRLSRQGPPVLRWAVYEAGKTHARAAAPDHPYYAAVADRKNTKRAALSEARKIVRQACHILAELGDDALTAA

SEQ ID NO: 141296 - protein, 379 aa, unidentified
MSRFLKYSVGFDCSKDDFQACTSVIDDEQKVKVKASRKFKNIKKGYNDAVYWINKHCKEKIPVVITMEATGNYYEHLALFFHQEGYHVNVVLPNKAKKYMESRGIKTKNDPVDAKGLAQMGAEQNLRKWEPYTKDIYQLKLLTRQCERLAAYKTQVSNQLKSLEHGMFQNADIVKQLEDMLLLIKTQISESKKQIEIFIANDEEIKSKVEKILPTTGLGIQTIASVIAETNGFKLFRNQKQLTSYAGYDVVENQSGKRTGKTRISKKGNSHIRRAMHFAALSAVRGKEKTFLDIYKRVYEKTKIKMKGYVAVQRKLLCLIYTLWKKDQVFNSDFAQSSGNNEPKTLFQLSEEKKVASKELEATLDRLPCKKSPEALFQL

SEQ ID NO: 141297 - protein, 421 aa, unidentified
MPNIEIGVDSMDKENFIYVGIDLHKETHTAVMIDCYNQKLGEITFPNRPADFPKLVTKVKKCNTDGKEVVYGLENAYGYGRALAVWLIDKGYLVKDVNTAISHQRAKHRGAMYRKSDSDDAKAIALATLNMLDKLPDACPNDAYWSLGQLVHRRDNIMKQRTRLVNQLHEQLCIAYPSYKQFFNDISRPTALYFWEHYPSRKYLKGKSVEDLRAELVPVSHNKCSTKTCEKILDAVASDKVKNNAYQDARDMVTLSIVSDLQHYDSQLAEVDKMLEQMYKMLGCTLTTISGVNVITAVKILAEIGDIKRFSNANKLAQFAGIAPLHLSSSGKGKDVATKQGNRRLQATIYFLAIQMVQVSSKGTPRNPVVRAYYEKRKAEGKTSQQALICISRRLISIIYGMLKYGTEYRMPVVENAGEKL

SEQ ID NO: 141298 - protein, 449 aa, unidentified
MENQARMIKSSDGNKLAIVNPNAAGIDIADAEMQVCVPEDRDGDNNRRFGSFTKDLNTIVEWLIGCNITTVAMEATGIYYLSLFLKLQDAGIEVLLANPADVKNMSGKKTDAADAEWLMVLHRYGLLRPCYQPGNAARQIRNLTRQRSNLIRMADKEVLYMQKAMEQMNIKLSTVLSDITGLSGRRIITAILQGQRNIYELAALAEPNCKASQEDIALSLEGTWDVDLLFMLKQSLAAYDFFLSQVGECDMEIERLLSLYGAQIEAGSAELIRCKRKNKRSKNAPKMDIENFAYQLWGVNVFEIPGLKDTAVMHLIGELGHDFVDKFGSAEKFSSWCNLTPNNKISGGKILSSKIMKRKNPVGQIFRTAVAPLARDKGEMGNYYRRIKSRSGALQANVATAHKMAKIFYTMVKTKTSYNASKVGLSERELAERKIAKLECLLMKLKNVS

SEQ ID NO: 141299 - protein, 375 aa, unidentified
MKDSQKFVGLDVSKEIISVGIAEEGRGEPRFHGNIQNKPESIRKLFKKLGEPEKLLVCYEAGSCGYSIYRQLLSMGIECIVVAPSLIPKRAGDRVKTDRRDSLRLAQLLRAGELTSVWVPDETHESLRDLIRARHDVREDLQRVRQRLVHFLLRHEIRPPQGVRNWTVKHRTWLNSLTFEKTTLRIVFQEYFHSIYEVEERLKRIEAQIHEEAIESEHAPVIQALQTLRGIAEVTAVTLVAEIGQFSRFSNPRQLMSYAGLVPKEYSSGSNRWQGSITKIGNAQIRRALVECSWAYRHRPSLKGELLKRQSGQSVEAQRIAWKAQHRLNLKYNRITSRGKGGKFAVVAVARELVGFIWAIACSIENQHLKRPTVA

SEQ ID NO: 141300 - protein, 328 aa, unidentified
MFFIGIDVSKAKLDCSLLVDVASSKRKTKSVANAKSGIADLLTWVVKQGIGPTELHAILEGTGVYHESAALALCEAGVTVSIVNPAQVRDFGRGLAVRTQTDGVDSFVLARYGALLNPRAWTPPSAEARLLQALLSRREAIAQDLQRERNRLEKAEATETPDLIRQSIVDSITFHTQQLHKLQQDINDHIDRHPGLKADLDLLQSIPAVGPQVGTQLLAVIQQHAFQSAEQLAAYLGLVPVERQAGSSLLGRARLSKAGPARVRAVLYMAAIVAVRYNPHVKSLYDRLLARGKSKMAALGAAMRKLVHLCFGVLKTRKPYQVNYAISS

SEQ ID NO: 141301 - protein, 345 aa, unidentified
MYYVGVDYHRRFSYLTVMDKEGKILKEAKLPNTKEALHTFLENTLNGSSKKTKAVLEVGRNWQVMYDLLEEELGEVKLAHSYKIKAIASAKIKTDKIDSRILTHLLRTNLIPEVYVPPKSTREAKNILRQRLFFIRLRTMLKNKIIMILERHPEIKDKPQLTDLFGKTGLLWLKNLKISNPDNKLLKESLELLDNLNIRISKTEHLVEKLSEEHPYVKRLLTIPGIGKFFSVLIAYEVDNIRRFPNQKKFASYIGIIPSTYASGTFLRHGRITRQGNRYLRWALIEAIWPAINKSNYLRAYYERIKKQKGSNKAKVATARRLATIIYRVLSEDRNYREKYPAASY

SEQ ID NO: 141302 - protein, 404 aa, unidentified
MDEHTAGIDLASEEHRLVVVESNGRSIDERRVAHTEEGLATLTRRLLDLEVARVAIEQPNGLVVDRLLDAGIAVVAVHPNQLAAARDRYRSGGGKSDGFDAYVLAELVRTDMHRLRLLEPDSDETRALRTLTRAREDLVEHKVALANQLRAQLEAFWPGAARVFFDVDSPIALAFLERYPSPDDARSLGEKRLAGFLARNGYCGRRSANELLARLRTAPNGRTGTSDSEARRQVVLALVALLRPLVEQIRLLTSEIRGLLDQHPDGHIFRSLFRDPKSVVTAAELLAEIGDRRTRHPDSSSLEAIAGQAPVAVESGKKKVACFRWACNKTLRNAVSVLADSSRKHNPWANEIYRRARARGHDHPHALRILGRAWLRIIWRLWQDGTAYDPSRHGSLNRLLAAKG

SEQ ID NO: 141303 - protein, 341 aa, unidentified
MKQFIRIGVDLAKNAFQVHALEREDGSAVTRKLSRTKMFEFFSRAAPCRVGMEACGSAHYWARELRAMGHAVVLIPPSYVKPYVKRGKNDAADAAAICEAMSRPEMRFAPIKSADQQAVLMLHKTRELLIKQRTMSVNALRGHLLEFGLVAVRGRSGVEGLIALALEDGELPQEARDAVRLLASHLEGLDTKIDAVEATIAKASAQNPICRLLDAVPGVGPLIASAIAASVPDPGVFRSGRDFAAFLGLTPSQDSTGGKTKLGPITKKGDRYLRKSLVIGCTATLRVAHKRKGSLAEWIARLRTKKSERDLSVALANKLARICWAIMSTGEAFRTEIYAKA

SEQ ID NO: 141304 - protein, 423 aa, unidentified
MSYRISGIDVHKKMLAVVISDVEGDGEFEFERRRYGSNPEQLHLLAGWLLEQQVEEIVMESTAQYWKPVWGALERYWKPNCQKREGAVPMSGTLHLAQAQSNRGRRGRKKDFPDAERLVKRLVANELILSFVPDTEQRLWRTITRRKYQLRREHVRLQNQLEGLLEECQIKLSSLVSDLLGASARRMLKALAEGETNPEALAAMADKNLRATQAQLCDALGACAELQPIYRRLLKMFLEELQLIDQQIRQLDQELATLLSRHQDAVEHLAEVPGLGVDSAQQIIAEVGAKAATFPSAKQLSSWVGACPGDDESAGVSKSHRSPKGNRHMRRILNQAANAAAKAKGTIFEIVYRRLTPRLGHNQTIGAIAHRLCRLIWIILHKGVRYEERGPSVSAISRRRRTNRMIRELRALGYQIEPLLTTE

SEQ ID NO: 141305 - protein, 416 aa, unidentified
MAKKKNKSKLLRACHPDAAGIDIGSDQHWVAVPLDRDDQPVRQFGTFTSDLQKLADWLQRCGVRTVAMESTGVYWIPIYELLEERGFEVLLVNAAHARNVPGRKSDVLDCQWLQELHTFGLLRASFRPGAKVTELRTYARHRQTLVEEAARQIQRMQKALDLMNVQIHHVIADITGKTGLTIVRHIVAGIHDPGVLAQYRDPRCRASKEVVVEALRGHYKVEHLFTLEQALSLYDTYVRNQIAIDVRNPLERILGGVDVQSIVGIGPLTALNLLSETGHDMSRWPTEKHFTSWLNFAPGTHISGGRRLSSRRRPGRNRAGLILRQAASSVGRTNTALGSFYRRISARRGKAVGIVATARKLACAYYRLLRYGGHYVERGAAAADHDYQERRIKSLRRQAKTLGYELLPAQPEARVT

SEQ ID NO: 141306 - protein, 377 aa, unidentified
MGDYSEAFVGIDTSKLRNAVAIADAGRGGEVRFLGEIENTAAATAKLVRKLAAKYERLTFCYEAGPTGYGLYRQIKGLGFECAVVAPSLIPKRRGDKVKTNRRDALSLAKLLRADELTAVWVPDGRHEAMRDLTRARETAMLDLRTKRQHVSAFLLRLGKPYPESKKTWTKTHVGWIASQKLEHPQQRLVLEEMTLAIRQAQDRLARLEQAIAAAVPEWSLGSLVTAVMAMRGMDMISATTLLAEIGDLSRFQTPTELMAYLGLVPSENSTGDTVKRGAITKAGNRRARRMLVECSWSYQHPPRVGQAKQPKVDAAPAAVREIAWKAQCRLYRRYRMLIGKGKLKTVAIVAIARELAGFIWAVARAVSATPIAAAKV

SEQ ID NO: 141307 - protein, 332 aa, unidentified
MRNSYWLGVDLSKETFHAALAALDSSPSAWASLPNAEFENSPAGIDALCAWIAQQGLSLQSLLGICVEATGRYAWTFVAQLDGRLAPVSIVNPARPVAFAKSMGLRDKTDRIDACILALYAVAHKPRPTPVPTSIQQQLRELTAHYAQERREITACHQRLSEAIASPLVRKQLIARTRAAHKRIEAIEQELHRLIAQDPALQHDATLIQSIPGVAAKTCRIILAEFGDLRRYSRNELVALAGVFPKQYSSGKTIHRKPRMAKCGGGRVRAALYMAVLTARRFCPQINAFSNRLKSTGKHNAQIHGAAMRKLLLLIRAVVVNDTPYSPNYAFQ

SEQ ID NO: 141308 - protein, 334 aa, unidentified
MQNVTLIGIDLGKHSFHIHCQDKSGKAILRKKFTRTKLMQFLATCPSLTVVMEACAGAHFMARRIGGLGHEAKLISPQFVRPFVKSNKNDFVDAEAICEAASRPSMRFVQPRTETQQAMRALHRVRDSLIRDKVKTTNQIQAFLLEFGISLPKGEAVIKRLSRVLAEHEMPDYLSRLLMRLHTHYLYLVEQITSLEAELHQSLEADETDQRLMTIPGIGPITASLLSSQLGDGKQFSGSRDFAAATGLVPRQYSTGGKTTLLGISKRGNKNLRRLLVQCARIFMMRLEHQQGRLAEWVREQLNKKHSNVVACALANKLARIAWAITTQQNEYRI

SEQ ID NO: 141309 - protein, 321 aa, unidentified
MTEDAVCVGVDVAKSTLDVAVSGCEETRQFANDHEGISQAIRHISGLKPAGIIVEATGNLEMPLAAALQASHLPVVIVNPRQVRDFARTIGVLAKTDTIDARILALFGTRVKPDIRPLPDQKAREMARLLTRRRQLVEMLTAEHNRLLQASEDIRPGIETHIKWLEEALSEINDDLERRIRRSSSWCEKDNLLKSVPGVGKVVSSTLLIELPELGRLNRRKIAALVGVAPLNRDSGNMRGKRTVWGGRARLRAVLYMAALVASRRNPVISAFYQRLLDAGKAKKVALVACMRKLLTILNAMMHTMTIWQPEAIIRGVSVEA

SEQ ID NO: 141310 - protein, 403 aa, unidentified
MMQYNDGDVVGGVDTHLKVHVAAVVDHLGQILATESFPSTTAGYRQVLRWLVRHGRLVRVGVEGTGAYGAGLTRHLTAQGFEVVEVNRPDRQRRRLRGKSDTVDAEAAARAALNGDATAIPKTGDGEIEGLRALRMARKSAIKARTQATLQIRDLILTAPGDLRARLEPLPAVDRAHLCARFRPGDPADPTQAIKLALRHLARRYQALTHEIGELDKVIAASCARINPALLGAKGVGPEVAATLLVVAGDNPERMHSEAAFAALCGASPIEASSGQITRHRLNRGGNRQGNNALWRIAMVRMSTDPRTKTYVANRTADGKTKREIIRCLQRFVAREIHALLTKEHTTIAGADLRNQRHHTGRNLQDAANALGTWPIELSRLERGLTHNTDLATRYQHWIQQAA

SEQ ID NO: 141311 - protein, 427 aa, unidentified
MNDSRYKPTLCVGADVHLDEIVLRAVDKALGHEVLQQFRVTNNLPGAQLAASTIAQTATDLGYARIEIGWESTGMLWIPFHRYLSTEPLLQAFELDLVCFNPKLVAKFKDGLVLRSPKNDDRDAFDIAARLRFGELPVSYVPSDFWQGLRRLTRYRYRLSKALSQEKNRFQSYAFLKCSDWNRVQAFSDFLGATSVALLTEFTVAEVQNMTHDQLVDLISRRGRGRFDDPTATARAVRQALRTSYPIDPHMDEMVTAALAASWDHMHYLNRSMKRLDHLIARYIDLVPNPLITIKGLGAVITAGILAEIIDVLRFPEEKHLAQFMGLTWQKSSSGGFVSQNTRLTKVGNVYLRYYFIMGANLLRQHNLEYKAYYWRKYQEVSKYQHKRALVLTARKLVRLVHALLTKNEPYVRPRMTDPGQEDVGLQ

SEQ ID NO: 141312 - protein, 339 aa, unidentified
MKVSTLGIDLAKNVFQLHGVGCSGQTVLKKKLTRDKFLPFLMQLEPCLIGMEACASSHHFARVLRQYGHEVKLIPPQYVKPYVKTNKTDAADAEAICEAVARPNMRFVQIKTAEQQAILVLHTERNILIRERTACANSMRAILAEFGTIMPRTLSQLYKKIPEILEEYDNELSPFVRCSVARQLEHLQSVEDQITLIEQELSRWAKTQPACQRVMKVPGVGLMTATYLVASVGNGQQFHSAKQFAAWLGLVPREFSSGGKQRLGRISKRGDRYFRYLLVHGARAVAAVIERHKDNMPWLYRLLNKKAYNVAVVAQANKTARILWSMLVQHTEYRTLSVV

SEQ ID NO: 141313 - protein, 330 aa, unidentified
MADHLNNKPYRAWIAIDIAKDFNAVLSETNEGKRQHFRMANSAQDHDRFIDFLKSLPSPCIIGFEATGNYHRALGHRLVSEGFEVCFISSLASARYREVMFNSWDKNDPKDAAVLLELLKQEITQRYVDPLIAGHHDLQELSKTYYQVTLSRTRLQHSILTHYLPLYFPEMGKWWNSTRSAWWINYLLHFPIPSAVTKHSQETFCEIASPIVGRKVNKAAKLIELYETAQHSIGLPIEEDSLACKTFQIQLRRYQEINDCRTELEKTAQAVLANNPDSVILQSVPGIGPINALTILAEGGDLRHFNHHRQFLKYCGFDLAKNQSGNYRIQ

SEQ ID NO: 141314 - protein, 400 aa, unidentified
MDWADEFDQVWVSDADGNKVTEMKVLQNAPGLSDFGRWLHERKAQAIELWAAIEKPHGRIVDFLLNHGVVVYPVNPKALDRARDRFRMSQSKSDSFDAYVLADFLRTDHARLRALEPDSAPAQELKIVTRDHQRLMRQKNRLLNQIEVTLKEYYPRPLEVFGDLETKIALDFLKAYPTPQALSKLNRRGWNRFAKRQHHLSEVRANELWEKLNKAQLAVPEHVVRAKARLLAALVLQLEAALESVKQYEEQVKGFFASMPAADLVKTLPGGKSGTTVPIIWAELGDAKSRWESFRHLQAEAGVVPVTQSSGKSRFVQFRFACNKHLRHAIYWFSFNSLNRCEWANKYYRDQRAKGHTHPRALRALGTKWLKIIFVMWRDHKPYDENYHLANIARQQMRAA

SEQ ID NO: 141315 - protein, 459 aa, unidentified
MKKSISKRKKSTPKVSIDQNWSVLNPNAAGIDLGSREHWVAVPPEREAQSVRCFGTTTPELEALAEWLKKCQVSHVAMEATGVYWIPVYQLLERKGFKVLLVNARQIKNVSGRKTDVEDCQWIQRLHTYGLLGGSFRPADAYCVVRSLVRYRDELIAGSTTQVQHLQKALLQMNVQLRGVLSDICGESGLAIIGAILQGQRDPLKMAALAHRRVKSSREQLAQALVGDYRSEHLFVLQMAYELYQVYQQKISRCEQELAAALERLPDRVNLQERPLAAKPKGKKLDPDLRLNLYRKLGVDLTAIESIGTTVALTVATEVGPDLGAFPTERHFCSWLGLSPDHRITGGRILSSHTRRVANRLSDALRLAATSLEHSASALGAFYRRMKRKLGAPQAITATAHKLARIIYRLLTHGEAYVRQGLEEYEQKTKARALKAIQKTAATFGFKLVPQESLAKVVS

SEQ ID NO: 141316 - protein, 314 aa, unidentified
MTTSSGKFVGVDVAKEKLDIAVLGEIKASQVTNDAKGIASLIKEMTALRPELIVVEATGGYQRAVVLGLYEAGLPVAVVNPARVRQYARACGLLAKTDKLDAFNLAEFGKQVRPRQFEAKSEVGRYLSALLVRRRQVEEMLKAEKSRLRTVHVDMRVSLERMIEILQEEIKRLEKDLDRFMKEHADWQEQEEILCSAKGVGRVTAATLLAELPELGKLDRKKIAALVGLAPMNLDSGKKRGYRKTKGGRIEVRSVLYMATLVATRYNPLIQVQYQELLRRGKVKKVALTACMRKFLTILNAMRDRVPFRQTVAA

SEQ ID NO: 141317 - protein, 406 aa, unidentified
MLFVGDDWAEDHHDVEIQDETGRRLAKARLPEGISGIARLHGLVGRFLPEDGDAAQVKIGIETDRGPWVAALVASGYQVYAINPLQSARAREGHGVSGAKSDAGDAHVLADLVRTHSHQLRTVAGDSEQASAVKVLARMHQTLIWDRTRQVLRLRSSLREFFPAALEAYEDLAYPDVLELLTKAPEPDSAARLTRAQIIAALTRVRRRDREAKTTAIMGALRTEHLTQPPLIAAAYGATVRALAALITTANEQITALEGQVEAYFGQHPDAEIYLSQPGLGPILGARVLAEFGDDPSRYAGARARKNYSGTSPITRASGKKKVVLARYVRNNRLTDALHQQAFSALSGSPGARAYYDALRDRDISYNAALRQLANRLVGILHGCLKTHTPYDEATAWNQHAQQAAA

SEQ ID NO: 141318 - protein, 331 aa, unidentified
MFPVGIDVSKNTLDLCMLYDGIKGRIKTRNIQNNRHSVENILRWLRLQHCGPEDVHVVMEATGVYHERLATELHDAGFRISLANPHRSREFARGMGIMTKTDKVDAYMLACYAFLKKPHRWEPPAPEIRYLGALLRRRDVLLGDALREENRLEKYLSTDTPADIISSCRRMAQLLREEVSNIERQIKAHIKASPALRRDYTLLTSIKSVGPQLGMHMLVVLRSHNFVSAEQAAAFLGVVPIEKRSGTSVRSRPRMSKIGPPQLRAKLYMSALCGKIYNKRMRNIYDEMCLRGKPEMVAIGALMRKLVHWCYGVLKTGTVFNDEGLKPVLSS

SEQ ID NO: 141319 - protein, 342 aa, unidentified
MFYTALDVSLRSVAVCIIDQDGKVRLERSIPSEVPDLVRCLREFGEPIHQVGLEAGTLTQHLTYGLTEAGFEVVCIEARQVNAALSAMRNKTDKHDARGIAQILRSGWYSRVHVKSVESHHTRALLTSRKVMQRKCIDLENEIRGLLKVFGVKLPMRLSRGAFDLAVRDMIESDPALSHALLPMLQARQMLLETFLELDRRVKRVARDHAICRRFMTVPGVGEITALSFKAAVDDPARFKSSRTVGAHFGLTLRRFQSGETDNPDRISHAGDADMRATLYAAANAMLMRSITWSSLKAWGVRLMKAKGRRRAVVAVARKIAVVLHRMWVDGTDFRLGSEAVA

SEQ ID NO: 141320 - protein, 513 aa, unidentified
MIESRCAKNPWEYAWHMMSFPMYGASASAQSCFLCMEANLIIHPDPTTVDYEINTLPTLAEDERLFIGIDTGKLSHHAGLISKNLLVKHKRFDKCPVTNFLNSREGFERLLEAIKAYAPLERCIVLKERTGHYGHALQEYLQKQGITVYTMHVYKRGLKNKTDKRDALNLANTAYNQLELGLQPGDSIKQIHHEVPASEAARKLHVLVQRRAELTKDTTVRKNRLTAIADELFPELTETFKDPQGASALNVRQKFPTPADVAKASIEELLACRTRTVPGRAALIKLQELAKQSIGITDEARLYGLVLEQGQLIGELREMQKNLDVLENEITAIVEASREGRILMSTGFIGTMMAGSIIATVGNIAKFESPGKLRAFAGWSPSQTQTGTSKDAMTLAKGGNKILKQAIFMSAFNALKGDTEMKAKYDRLVKRKCNLDLRTGKYTGKMKCVGRIAGDIITLVYVLLKKDYDLLQSLPSGAKAPDPTLYDRELHAKHLAQRSSRKGDQQPAEAAKN

SEQ ID NO: 141321 - protein, 428 aa, unidentified
MNEMDGSRLEEFRQFRKEIRGSEEYLVVGIDVAKDKHHAFFGTANGKTLFKRLVFENNLEGFQRLLVQAEAMKVEAGLKKVVFGMEPTGNYHKPLGEHLIRCGRQVVLVSGVAAHENRKTLDGRWDTNDARDAANVADLVSQGKCLFYEFPEGAIQDLRNLLSLKRRWKREEQGYRVRIRNHLVAKYFPELDRYYDQSASTGLAVVRWCLDPSVIAGWGYKKFVQTVSPGPRRVVSESRLRAIWQMAVDSVGCEAGPAVEFEAQVMVEGLKQIRKVIQDIEEKILEVCSQFPEYELLLSIPGFGPDVSSKVLGAIGDPNRFQNGRQVLKMAGLDLSAERSGKSSESAIPVISKKGKADLRYALYQAAFIASTKNREFIVYYTDKLRGREREPGIKTKMRVKLAAKLLIIAWTLMKKKEAFHPDYLAVE

SEQ ID NO: 141322 - protein, 413 aa, unidentified
MEVVVACCAGLDVHQASVVACINSTGQGGRSRKEVRSFGAMRDDLIALRDWLMESGVTLVAMESTGVYWKPVYEMLEDHFDVMVANARHIKNVPGRKTDVKDCEWISDLARHGLISPGFVPPRAIRDLRELNRYRRKVAQVQTGERNRLIKVLETAGIKLAGVVSDVLGVSGRAIIRALIEGEDTPAAMAGLALGKLRKKRPDLARALDAPLKLHQRFMLRTQLARIQQAEADLEQIDIELNKMAVPYQRYIELLMSIPGVNRINAVTIIAEVGIDMSVFLSAAHLASWAGLCPGNNESAGKKRSGKLRKGNVVLKTTLVNAAIAGSGSRGRKGTFLAEKFRRLAARRGKMKAAVAVAHKILVSVWHMLSDGTYYQDLGAGFLDKIDRTRNARHLVRRLAHMGFDVQLTEKAA

SEQ ID NO: 141323 - protein, 357 aa, unidentified
MFMLSSDIGEVLLEPTEYIHNKSYFEKIDSYINKLNIKDNLTVVMEATSIYHKSPERFFKENNYHVIVFNPLIGKEITNTIRKTKTDKQDCIILTNLFWKGSIPDRNYTEDEIYTKLNELSRQYYHLDEGLNRHKNRYKELIHLCFPEFELCFKDGKTYDLTALNFIKEFPHAYIIKDKRVDALAYNMANTNNRHLNYYKRKANIIKEYSLTSYPGVNKNSKDVDNLKQLANIIINLTEQKDEVKNQMIELAKETKNFECINSLFGIGELSASLIIAELKDITRFNNIKQINASCGLDPTIVQSGKSINYHGPISKRGNRYVRKILFNCSRNIITLSAKCDKENSIYVYYQKKKTGR

SEQ ID NO: 141324 - protein, 440 aa, unidentified
MAVRKREDEVFPNAAGIDVGGSSHWVAVPARSSDEPVREFGAMTDDLNAMATWLLACGVDTVALESTGVYWIPVFEVLEQRGLKVWLVDARQMKYVPGRKSDVQDCQWLQKLMSLGFLRAAFRPDAQVCELRAVARQRDILVAEQASWVQRMQKSLVQMNIQLTEVLSDVMGLTGELIIRDIVAGERDPKALARHRHSRGKASLEDIIKALTGNWREEHLFVLKQSLGMYDDIARHLAECDTRLNAGLKDLGQKSVDLGKTPRAGSKQRKEYDMRQVLADWAGVDLTRINGLGLAAVTKILTEIGPDLSRFPTVKHFCSWLGLCPGTKISGGKVLSAKTKRSVNRVRQALKMAAMSLSHSGSALGAFYRRLCTRMDKPSANTAVAHKLARMVYFMLTRGEAFVDQGQQRYDEQQLERSVAALKRRATALGFAITPVAAQA

SEQ ID NO: 141325 - protein, 321 aa, unidentified
MQGKVRADAMAAVYAGIDVCKERLDVYIHPLGERLTVANDAGGWRRLRRRLGELAPALVVMEATSKYHRGVHRRLDSAAIPVAVVNPLRARLFAEARGRLGKTDAIDARMLALMAEQLAPRPTAPLSPEAEAVQELARARVAAVAERVAIGQRRDVAACAFLRRELAARRASLERHIARLEAEIDRIIAADADMARRRDVLLSIPGIGPVTAVTLIAGLGELGSLSDKQVASIAGLAPHPRDSGDRQGQRRTGGGRSWLRSSLYMAALAAIRTNRDLKAFHQRLRDNGKPPKVAITAVMRKLLILANSLIAQNRTWSPTAP

SEQ ID NO: 141326 - protein, 355 aa, unidentified
MNSEKYIGLDVHQATISVAVMDSKGKLIMESILETKAATILEFVAGLRGTLSVTFEEGTWAAWLYDLLKPHVDELVVCNPRKNALLKDGNKSDRIDARKLADRLRLNDLKPVYHGETGVRMLRELARSYLNLVKDQTRVMNRLKAMYRSWAIPCAGRDVYYARHRAEWLGKIREAGVRRRAEHLYQQLDMLQHLRQQARRELLAESRQHPITAKLRQIPSLGPIRSALAVALIRTPHRFRTRRQLWAYSGLALETRTSGEYRCVEGQIRRSKKQISIRGLNKDHNHDLKGLFKGAATRASVQPGPFQDFYQRSLAKGIKPTMVRLTLARKIAAITLTLWKKGENFDAEKLKSQAA

SEQ ID NO: 141327 - protein, 414 aa, unidentified
MDIIYARCAGADVHKKTVVVCVIIPGDQGDWRRETQTFGTMTVDLLALSDWLQSCGVTHLAMESTGEYWKPVFNLLEGNFEVLLVNAQHVKAVPGRKTDVNDAEWLADLLRHGLLRPSFIPPVAQRELRDLTRFRSTFVRERATLVNRVQKVLEDANIKLASVASDVMGVSSRAMLAALLVGQAAPEVIADLAKGRLREKRPQLVQALEGRVKPHHRFVLSELLCQIDNLDETIARFDEQIRTACVPFEEAVVHLDTIPGVARATAETIVAEIGTDMSRFPSAADLAAWAGVAPGNHESAGKRLSGKMRKGNKTLRVALNQAAHAAARTKDTYLSAQYRRLAKRRGKKKAIMAVAHTILTIAYHLILRHEAYHELGGDYFDKRNPEATARHFMKRLEQLGYSVALQPPSVNAMA

SEQ ID NO: 141328 - protein, 338 aa, unidentified
MKKYIGIDLHSNNSVVVVTDEEDRILYQKRLANNLNEILTALAPHRDETVGVVVESTYNWYWLIDGLMDAGYQAHLAHPSAMKKYEGLKYSGDFADAAYLAQMLRLGLLPEGYIFPRELRATRDLARKRMQLVRCCTMQILSIENTLARETGGRMDKRQIKRMTTEGIEALGLKSDVALAMESNRVVCQALQQQIAALEKRLEAQVKLQPGYQLVKTIPGIGQILATTIMLETGTISRFADVGNFSSYCRCVDSLHESNGKKKGSGNTRNGNKYLAWAFLEAANFALRFCPEAKRFYERKKNRTNRVVALKSVAHKLARACYYILRDQKPFEVTRCFV

SEQ ID NO: 141329 - protein, 341 aa, unidentified
MQITTIGFDIAKNVFQIHGIDAAEKVVIRKQLRRGQVLKFFAALPPCLVGMEACATAHYWARELTKLGHEVRLMPAKDVKAYVKRNKNDAADAAATCEAVRRPTMRFVAVKSAEQQAQLMQHRARDLLIRQRTQVINALRAHLAELGITAAQGRDGIRDLLAIIADEADARLPIDARASLMVLAAQLQALQTLIGSIEKRIVARHRSSEASKRLQTIPGVGILGASAIATIVTEPKAFRSGRDFAAWVGLVPRQDSTGGKCKLGPISKQGDRYLRRILVVGAHAVLKRARLHPQKYPWLTQLLARRPFKVVAIALANKMARIAWALLAKGETYRMPRLAAV

SEQ ID NO: 141330 - protein, 327 aa, unidentified
MVARRRSASTDLSAVAGPLCIGVDVSKDWLDIADTAGRAVRIANTVAAITEALAGPWSQGCRAMVCEATGGYERPLMLVAAQLGLPLRRVHPNRARAFAQAAARLAKTDAIDARMLARFAAFIADEPARPSPAPQTQTLAALVSRLDQLSDLRQSESCRAHQAHEASVKASIGAVIEVLDSQIDAIQHAIDALIASDPILTEKASLLRSCKGVGPKNAQMILARLPEIGALDRRKIAALVGVAPITCKSGSSINRASIAGGRKPLRDTLFMAALCASSHNPTFIAFRDRLKANGKPHKLIIVAVIRKLIVTLNAMIKAKTPFKPALT

SEQ ID NO: 141331 - protein, 377 aa, unidentified
MKRIKFVGLDVHAETIAVAVAEQDGDVRSLGVIPNREESIRKLVKKLGPVEQLRFCYEAGPTGYVVYWQLTALGAKCEVVAPTLVPVKSGERVKTDRRDALKLARTYRAGELTPVWVPDAAHEALRDLVRAREAAKKDQLRAKHRLGKFLLRHGRRPPTGVKPWTLNYLSWVKHEVHFEQMAQEATLLDYLNEVEHAELRIARLNLAIEEAVKLTPPKMRAVIQALQALRGIAQVAAVSIVAEVGEVSRFPRARQLMGYGGITASEHSSGEGSWRGGITKTGNAHLRRVVVEAAWAYRHRPSLGVALRKRQEVVSEEIREIAWKAQHRLHTRYRKLTARGKDKGKVVTAIGRELLGFIWAIGVKVEATQKLTDRQAA

SEQ ID NO: 141332 - protein, 402 aa, unidentified
MNCVGIDVSKGKSMIAVMRPFGEVVVSPFEVLHTDSELSELARLLKSLDGETRVVMESTGNYHAPVAWLLHDAGLYVSVVNAMLVHDYGNNSLRRAKTDKKDAVKLANYGLDHWLTLPRYVPEEDTRLMLKTCYRQYQQYSKVQTMLKNNLISLLDTTFPDANRLFTSPPRTDGSEKWVDFVAAFWHCECVCGLSEKAFAAKYQKWCRKHGYHFSEDKALDIYASACGHFGVMPKTDTAKLLVEQAIFQLRATSAALAALKQEMQSLAASLPEYPVVMEMFGVGPTLGPQLMAEIGDVRRFHSKKALVAFAGIDAPPYQSGQMDVRSRSISKRGSAALRRTLFLVMGVYLQSAPMGEPVYQFMDKKRSEGKPYRVYMMASANKFLRIYYASVTAYLNTQTQA

SEQ ID NO: 141333 - protein, 352 aa, unidentified
MDVVYPHCCGLDVHQREVVACVGIPGTDGPVQKTLRRFSTMTEGLEALAAWLREAGCVQVAMESTGVYGQPVWNVREEVGGVELLLVNARHARNVPGRKTDINDAEWLADLLRHGLVRGSYVPHREQRELRERTRYRTELIEERTAHVNRLQKTRETANIKLAAVATDILGKSGREILTHLVAGSTDASALAELARGKLRSKLPDLQRALTGRLRPHHRFLLAELLAMIDLLDERIDAVSAEITERERPFADDLARLDTIPGIGQRVAEIIVAERGPDLAKCRTPAQVASWAGLCPGHHESGGKRLKGKTRSGNAAIRRALVEAARADAALDRPGREGVELVDPHVRRLVGM

SEQ ID NO: 141334 - protein, 399 aa, unidentified
MTASARVVIGADTHLDSHRLAVITDAGKPLADTEFPTSQTGYDDAVRWAQSFGTIVIAGVEGTSSYGAGLTWVLQAAGIEVAEVSRPDRAARRRQGKSDPLDAYTAARAALAGHRLAVPKDARTSALRALLSARRSAVKAHTAATNQIHALLVTAPAELRDRYRRHNITALVKALARCRPATHNDATTVAVLTAAKALAQRAEFLAHQKQDLTAHLDILVRQINPALRTAYGVGADTAAQLLVTAGTNPHRLRNEASLAALCGAAPVPASSGKIPRHRLSRGGDRAANNALYRIALVRMSAHPPTRDYVQRQVANGRSKKEILRLLKRAIAREMFRLLTRPAPVDDYRDLRPARQAKHLTLATVATHFGVPVITVSRLERGHQRNEALANHYRRWLIAA

SEQ ID NO: 141335 - protein, 351 aa, unidentified
MSQKTDAVVARTIGIDTGKNTLHLIGLDAEGVIVLREKISRGRIKARFANVPPCLIGIEAGMATHYVARELIALGHDVRQVPWIYAKAFRQAHKNDFRDAYAVAEAVQRPTTRCVPIKTDDQLDLQALHRVRSRLVGQRTAVINQIRSFLLERGITVRQGLRFLRQQLPEILARRIDVLSPRMIRIIEDLSGDWRRLDERIEHVTEEIEVLARGSESCRQLMTVPGIGPLIASAMVAAIANGAAFAKGRDFAAWLGLVPKQMSTGDRTILGRISKRANRYLRTLFMQGARVILLRPANWAKHSFGPWLTAAAKRLHHNVLATALANKLARIAWTVLAQRRNYETRLITAVA

SEQ ID NO: 141336 - protein, 410 aa, unidentified
MLFIGDDWAEAHHDIEIEDEAGRVLARRRLPEGLAGITMLHELVAEHLDPAAEPDQVLVGIETERGPWVQALLAAGYVVFAINPLQVARYRERHSPSGAKSDAADAHLLAEIVRLDRAHHRRIAGDSEIAEYVKIAARAHQSMIWSRVRQVNTLRSLLREYYPAALAAFGTDLAGRDALAVLTVAPSPDLGRRLSQSRIETLLRRAGRQRNISTTAAKIRAALTSEQLAARPGVIGAYTASASALLAVLSAMVVQTEVLAGQVEQGFGQHPDAEIYRSQPGLGLILGARVLAEFGDDPARYADAKARKNYSGMSPITKASGTKRVVLARFARNRRLGDALLLQGFAALNNSPGARAFYDHQRTRGATHYQALRTLANRLVGILHGCLRTHTLYDEHLAWHTEPDKLSPAA

SEQ ID NO: 141337 - protein, 342 aa, unidentified
MEKDITKQNIGIDIAKDDFKVCYLSMCSNFHIKILGSRSFTNNLKGFNEFLIWITGKRKTSDNLYFTMESTGVYYESLAYFLWQISDFRVRVILPNKVKHYAKSLDFKSKTDKIDAQILARLGLERELQIWQPISPNLLELKQLTRERSSLVRNRTAASNQLHAAEHQGKVNKKIIVRAKTHIDLLDKQVKEIEKEIKVIVNQDAKLKKKFAYLQSIPGVNTLTVATIAAETNGFETFTSIKQLTSYAGLDVRIAESGKWKGQSHISKRGNSHIRKALYMPSISRISCDKSAKQFYENIKERKGQDKSLVALVAVQRKMLGLMFSLWKNEQMYNLTPLTVIG

SEQ ID NO: 141338 - protein, 401 aa, unidentified
MIAVGIDVAKSKSMVAILSDDGEIIKNPFEIANTESGLEYLCKIIREIAGDVYCVVESTSIYHIPVVSYLQENDIFVSVVNPLIIKKYASMDIRKVKTDRVDSLKLASYVIDNHRHLVNYSADSEIYSELRILSRQYLHYVKILANAKVNLTDMLDRTMPGLKPLLKTSIRATGKNKLCDFVQKFWHCDVITSMSENKFVSEYIKWAKKKGYRSNETKAKSLYANALECIPTLPSNSPSTKMLVLEAAKAVSNIETTLVVILSQMTELAKSLPEFSVVREMSGVGNVLAPRIIAEIGDVKRFHSASALIAYAGIDAPPYQSGSFNGSNRKISKRGSASLRKTGYEIMQALKVVQPQNDNAVYQYLIKKETEGKPLKVAKIAALNKFLRIYYSRVKAVYSNS

SEQ ID NO: 141339 - protein, 349 aa, unidentified
MKKIIKQVVATDVAQAELVVSLGRKHDDLSAEVYAHRTFPNSIKGFVALISWVKKLTDETAAVRYVMEATGVYHERLAYFLDENGYEVSIVLPNKISNYFRTLDVKTITDKTASEAIAGFGLERELVRWKRPGQVFKKLKQLTRERDQIVSERTMVKNQLHAERAEAEPNKSTITRAEKRITILNKQEKEIRTEISQLVKGDQGLNQNITLICTIPGVGILTAATVLAETNRFDLIRNKRQLVSYAGLDVKEKLSGTSVKGKPKISKKGNKYLRKAMHMPALAAIRHEERYKAIFRRLVSKHGIKMKAAVAVHRKLLEMIYTIYKTKTAYDKNYLQKEKVNHRQQEIPV

SEQ ID NO: 141340 - protein, 406 aa, unidentified
MGRSIGVDLHRDCFTTATLAENGRYYLREWKLKDLDKFVETLAYDDKVAVEMTTNVRLFRDAVWPHVERVDVVNTRQFKVITESVKKTDRNDAVLLARFLDKDMLPTVHLKEKHVAEVASLTRSRDTLVKQRTTLKNQVNNAFAAVGVKLRRERLSSNKALSEVELEAAEAMDALTAVEVKVLLGQIRALNVGIGDLEKMIEAEGSKLKGFAEITSIKGIGTISGTILLSVIEDVKRFENEGKLAAYMGIVPRVSDSNETEHRGRITKRGSKLARTALVQCALIAKKYSPYLASFHERVKRRKGGGKANILSGSRTEQFPCGRGMGRRSTPLRGGIYRIVPRPGRKRGRPDGRPYEVAVRLNGERSSRSWNRPALGSRPRVALSSERSIVLSSYCTTEYKKSNFLE

SEQ ID NO: 141341 - protein, 357 aa, unidentified
MAKGITTTAQGITIGLDVSDRFTEAYAIDAQGEWVESWRMPTKQEALRSGLSRYPGARVVLEVGCHSPWISRQLKEDGFEVLVANPRRVRLIAESDKKSDRFDAEQLARLGRLDPGLLSPIVHRGEQTQRDRVLLLARDGLVRARTQLINQVRGFAKSLGTRLPSSSSESFPKRVRGAVSDDLFPGLGTMLAMIEQLTAEIRSMDREIERLCRERYKETGGLRQPSGVGALTALAYVLTLEDPQRFAKSRDVGAYLGLRPRQRDSGGQRPQLRITKAGDALLRRLLVTSAQYILGPFGPDTDLRRFGLRLAERGGKSAKKRAAVAVARKLAVLLHRLWITGEEYQAVGYRAAGKRAA

SEQ ID NO: 141342 - protein, 493 aa, unidentified
MTARKTKAPTDRSQPQPPPPAAADLRKAARIAERDRRQAEECAKLVALPVRHDHAAGIDVGDLSHWACVEATPDGSDTVREFPAHTPGLRQLVAWLQHCGVTTVALEASGVYGHVLFLTLVEAGFTVVMTSPSFTRQIQGRPKTDRRDCQWIQRLHKHGLLPAVFQPDDATHTLRDYVRQRANLVRLAGQFVQRLHKALELMNLKLTQVLGDVTGVTGLKILRAILAGQRDPHELAKLRDRRCQHTAAEIAQALDGRYRPEYLLELRCCLRLWQDHQAVIAEVDQAIAAQLRVMRRRSELPPLPPKPRVRGRKPHDPRFDVRQALYLMAGVDLTAIEGIDEIHALTLFSELGTDFSKWPTVRQFTSWLGLCPNWKQTGGRVKSSRTRQGKGRAARALRLAAWSLLRSKSALGSYLRRQRGRLGAPKAITATADKLARIVYGMMRYGAAYVQETEEAYAEQVRARTEKQLRRRARELGYELVKVEAAGPPPAAE

SEQ ID NO: 141343 - protein, 344 aa, unidentified
MPIITVGIDLAKTVFAVHGVDEAGKATLVKPKVARDHLVPLIAQLPPCLIGMEACSGAHHWARVFAEHGHTVKLMAPKLVSPYRMPGKRGKNDAADAAAICEAVTRPSMRFVPVKDEHQQATLCLHRTRQGFIEERTSTYNRLRGLLSEFGVVLPQSPERLRKDIGPCLDSLPGWARRCMSELLEHTSHIEDRLVELNRAINQIAREDDRSRRLLQLRGVGSTTASALVASIGDGHDFRNGRQVAAWLGLTPSQYSSGGKQRLGSITKAGDAYLRSLLVLGARSVMANLGNKQDPLSRWIRNLMERRGYWRAAVAIAAKNARMAWAVLHYGDTFKPEQAEPTGA

SEQ ID NO: 141344 - protein, 432 aa, unidentified
MYPPEATVPNPAIAAYVGIDWADQKHDVILCPQAEPAVLEHQVITHSPESLLDWVGNIQQRFGAKGKILVCLEQSRGALIYHLMGYECFELYPINPNQLASYRASFKPSGAKDDRPDAELLCELVRYHRERLVAWKPDTELTRKLATLNEGRRQAVDRRSALANEIKSTLKIYFPLALQVLENDTTTALAADLLLHWPTLEALQRQSPSKLRKFFYGHNCRGEQKMLERLKLIREALALTHDAAVIEPAALRVQMLAEQLKSLLPYIARYEKQIAQLFDSHPDSFLFRDLPGAGSALAPRLFTAFGSDRSRFQCAQELASLSGIAPVRRASGQKSGKKGEKKASIHFRHACPKFLRQSFHEFAACSIRYCSWAERFYEAQRARGKTHHMAVRALAFKWIRILFVCWKERIPYDESRYLHALQNRASAHAQPG

SEQ ID NO: 141345 - protein, 350 aa, unidentified
MEIIAFDSHKRYTQSLVEDARGRVIAEDRITHEQGAIWQYLKRFKPGCSVAVETIGNWYWIVEEIEQAGMKALLVHARKAKVMVGNVNKTDRLDVRGLNRLQRTGTLPTVWIPPGELRDKRDIARTRMFLVSQRTQLKNRIHATLDKYALEVKEVADIFGVRGRQLLEERCKSLPPHTRFTVEQQLTQVDGLEGAIDALEKRMSEVFAETEEVRLLRTIPGIGFLLAVVISLEVGDVSRFGRAEQLASYAGTTPRVHASGGKLRYGRLRTDVNHYLKWAYVEAANAICLNRSRWPKRHVCCLYERLRSKKGHAVAIGAVARHLAEATYWVLTKKEQYQDPQSSRRSSTEA

SEQ ID NO: 141346 - protein, 362 aa, unidentified
MNDGNIFVGIDFHKRYSVISAQDAQGGRLLEARVEGNTPDGFKRVFSQVPGPCKVAMEACWNWGKLHDILEDIPEIEEIVLSHPYKTRIIAESQIKTDKIDARKLAELLRGNFISRAYAAPKEVRKLKETLRQRLYWVRIRTCVRNRVHILLDRQVTLEIPHRSDLFTGKGMSILRKLQLPKADQRLLDQNLECLELLDKHVKAIEKQMTYLCRENEDLRLLCSVPGLGITLAPVIGLEIDDITRFSRSDKLVAYSGLAPSTHSSGGNTYHGKMLWQSNRWLKWAFIEAAWVSIGCDAYLGSLYRDYRARGIGPNKAITRLARRMCKIVWQILTEKRPYENRSYTTTTTFPERSQSRLTVSA

SEQ ID NO: 141347 - protein, 328 aa, unidentified
MQKNKEYVGVDVSKESLDMVVYSTGETRSFGNDDAGIAKATTWLKQVNSAIIVMEATGGMEVSLYIALQEANLPVAVINPRQIRDFAKSMGILAKTDKVDAKVLARYAATIQPEARPLPDEEARQVNTLVTRRCQLVEMITAESNRATIIRDKTMKQRIHAHIDWLKQELAGIDKDISQMIKENPVWHAKDELLQSVPGVGPVLSATLIAELSELGILNRKKIAALVGVAPFNRDSGKHRGERSIWGGRCRVRQHLYMATLSAVRFNPTIRIFYERLLANGKEKKVALTACMHKLLIILNVMLKHNSYWSCNYAIFNNTCIPDAKTVA

SEQ ID NO: 141348 - protein, 323 aa, unidentified
MQGKVSPERSATTPVYVGIDVCKERLDVHIHPLGLTLAFANSAEGIKRLKRSLKAHEVALVAMEATGKFHRAAHRSLHADGFAVAVVNPLRSRLFAEAMGALAKTDRVDCRMLAILGESLKPGAATPQSELMETLQELTRCRDAAVAARTALLNQLGATTARPAAVEIKRQLRAAETAIENLEAEIEALIGAEPRLARRLAILTSIPGVGTVTAIALIVGLAEIGSLSAKQAAMIVGLAPIAWDSGQSRGTRHIKGGRAHVRRALYMAAVSAARCNRALKAFYDRLLVNGKKPKVALIAVMRKLVILANTLVCENRTWEPHHA

SEQ ID NO: 141349 - protein, 408 aa, unidentified
MEVIHTRCAGLDVYKQTMVACLRTQEGQEVRREVRRFATTTRALLQLADWLRETGCSHVAMEATGVYWKPVWHMLEGEFELVLANPAHIRNVPGRKSDFNDAQWIADLLAHGLIRSSFVPPGPIQELRDLTRTRKQLIREATQHKQRIQKVLEDANVKLASVVSDIGGESGRRILRAMVAGEADPNRLAALGSKRLAASPATLAEALQGRVTAHHRFLLGQHLKTLEQLETTVAEFEAQIEAALEPFRAAVERLSAIPGVSTIAAQVIIAEIGCDMSRFPSAAHLRSWAGLCPQLNESAGKILSRKLRKGAPWLKTTLVQCAWAATRNRGSYLHAQFLRLRARRGPNKAILAVAASILTSAYYLLHDEVPYRELGAQYFASFDQQRTLLRLTRRIQELGYHVEISKAA

SEQ ID NO: 141350 - protein, 328 aa, unidentified
MNIIGIDVSKSKLDCALIDNSTHRKLKFKVVSNSEEGFVTLIDWLAKRTKSSISAYHFIMEATGVYHEKCAYWLFDSGARVSVVNPARVKYYGQSLGVRSKNDKKDSVVLAHYGLTQTPMVWQPEALEIRILKALASRLDAIEKDILREKNRHEKSSINPSSQTILNSIETILFTLNKEKLHLEKLIHNHINQYEYLKNNNALLQTIPGVGPVLSRYMLIVLGGRTFQSASQCAAYLGLVPIQNESGSSLRGRSRISKAGSPVIRAKLYMATISALQHNPDIKIQNQRLLKNGKSKMSALCAAMRKLVQICFGVIKHQQPYHVQAKFL

SEQ ID NO: 141351 - protein, 388 aa, unidentified
MEPASIHPTAVRTDLGAIFVSLELSRSTWLITSLSPGSGEKMAKHVVAGGNVAELLDRFEQLQHKARLRTGTLFPIVTIQEAGLDGFWIHRVLEANGIESHVVDAASIATSRRRRRAKTDKIDGEALTRTLLAFKRGEPRVCAMVKAPDPKDEDRRRICRERKVLIAERVRHVNRVKGLLFAQGVSGYQPLRKDRRRRLEELQTGDGRELPKHLKAQINRELDRLDLLLEQIAAVESERNSLLSTYEQPAVEATSPAAMLLSLKGIGAEFAAVLWTEALSRRFDNRRQIAAYAGLTPTPWMSGTIDHEQGVSKAGNPRLRTTMIQLSWLWLRNQPASALSRWFVDRVQSNGGRLKKAAIVALARKLLIALWKFVTAGVVIEGAVMKTA

SEQ ID NO: 141352 - protein, 351 aa, unidentified
MRTVAEEYDRVVGVDTHAATHTMTLLTATGGVVEHRTFPTTAAGLGRALSWIRNRTQDRTCLVVVEGSGSYGAQLTERFTEGGVVVAEAPTLPAARPGGKDDVLDSARIARAVLGLRLDQLCWPRAGGTRTAIRVLVSARDQMGTERTKTINTLTALIRSVDLGVDARKALTSAQITTIAGWRARDENLAVAACRREAIRLASPILTLGRDLAANMAELRQFTAAEVPELLVLSGVGPVVAGTILLARSHPGRVRSEAVFAALAGTSPVPASSGNTIRYRLNRGGDRQLNRVLTTIVLVRMRFDQATRAYVARRRTEGRTTKQIMRILKRYITRQVFRILTTAHPTPAPAA

SEQ ID NO: 141353 - protein, 429 aa, unidentified
MTRISAGVDVSKNRSTVCIIDQDGKVIMRPFLVWHSTEELDFLADTLKRLNGEVRVIMESTSIYQYPIALQLKERGLFISIVNAYEMKQFANTDFRGGKTDKKDSRTIASYGISYWYKLVEWQIPKDTYFNLDLLNRTYMNAKKHRQIILQELQHYIDCAMPGMDKELHSLNLNTKKDFMLDFVEKFWHRDEIVNMTEAEFTEVFTAWAKKKGYRPVEGKAAKIYAIAKSCIPYYPANPTVKTILQCIVDKLSGVNRTLVTIVTQMIEEAKKLPEYQIVREMPGVGDPLAARFFGSAGDIRRFKNSKALVAYAGIDSPPDESGDFSSTHRHITKKGSKVFRDTGYEIMMALRAQKRTWEKVRKNPDVYDYMLRKEAEGKPPKVAKIAALNKFLRIIYARIKELYDNMALAERAKTKTRSKTRAKTKVTA

SEQ ID NO: 141354 - protein, 346 aa, unidentified
MTIVDPARAVTGGVDTHLELNVAAAIDHIGGLLGVAEFPTTSSGHKELLAWLKTFGPLVKVGIEGTSSYGAGLARSLRRAGIEVAEVDRPNRQSRRRSGKSDPADAVEAARAALSGRAQGAGKAKDGNVEAIRALVVAKRSARDTKIKTMNQIRHLGFTAPDELRERLAGVSRKDLAATAAALRPRDGGDQVAFATKTALCLLGRRVLALDAEKEHLEDLLSKLVEKTAPELLSLYGVGVDTAAALLVTAGDNPERLRSEAAWAHLCGAAPIEASSGKVTRWRLDRGGDRQANAALYVIVITRMSADKRTRAYVERRLAEGKTKPDIIRILKRYVAREVYHHLPRA

SEQ ID NO: 141355 - protein, 320 aa, unidentified
MSDSLDIGVDVDSKEFVPAVADRKAGDRIANTRAGIAQWLNTLPQRCRIGMEATGRYYELLARMAGQAGHVVYVINPRLIKHYGRATGSRGKTDAMDAEAIARYVKKENGRLREYVPRTDEQQQMHDLLRKRQTLVKTRARLEQSFGVSKSAPGELSDLFCALAGTLSELESELQRLGRDGEHGTLYKRLLTIPGIGPAVAAHLIYYMTRWPLANANAWIACTGLDPRPNESGGRTGRRRLSKQGAPVLRQMLYMAAMGLKRCRRGQPLYDELSKRGHPSTAVFNILARKLARIAWGVFKSGRDFDPAMLKVGQACFQQA

SEQ ID NO: 141356 - protein, 408 aa, unidentified
MEVLHQRCAGLDVHKDSVVACVRIASGGAVRHEVRTFGTTATPLEQLAAWLHAEGCTHAAMEATGVYWKPVWHALEEELELVLANAAHIKNVPGRKTDVNDATWIADLLAHGLIRGSFVPEASIQDLRSLTRTRKQFVREKVGHVQRLQKTLEDANLKIASVATDIMGVSGRAIVEALIRGETNPDKLADLTRGRLKASRATIVESLRGRVTANHRFLLKLHFDQVKAIEQAIALVDKEVDALIEPFRAAAERLTTIPGVSDVVAEVIVSEIGVDMSRFPTPAHLISWAGLCPRNDESAGKRRSTRVRKGAPWLKTALVQAAWSATRVKKSYLSAQYHRIKSRRGSRKANLAVAASMLTAIYFMLRDGAEFRDLGHDYFDRVNKAKAAERMVRRLNDLGFQVQLTPAA

SEQ ID NO: 141357 - protein, 431 aa, unidentified
MKYKMKQKKNQRILRMTEKTLIVGADIAKQTHVARAIDFRGIELGKDCVFENTHQGLTKLVKWMKDLKQVHNKTDVLFGVEPTGHYWFPLAAFLKEEGIKVVVVNPHHVNRSKELEDNSPTKNDYKDAKVIADLIRNGHYAEPKFPTQVYADLRIIMNLREKVMVNFNQAKLRIQNWLDRFFPEYHQVFKDWEGKASLMTLREFPMPNEIVALGAEAILKHWKSEVKRAVGIKRAEKLVKVATTSIGLTEGMYAAKIECSMLLDQYTLLADQLEEIMRQVEQLLEKIPGTEAMMTIPGVGIVTLAGFLAEVGDLNDYDHGQQIIRLAGLNLKENSSGKKKGKASISKRGRARLRALLFRCVLPMVAKNAEFKAMHRYYTTRRHNPLKKKQSLIALCCKLIKVLHTLGTRQIAYDAKDVLGPVRQQQLQMAA

SEQ ID NO: 141358 - protein, 365 aa, unidentified
MTIGLDLGDQYAHVCAVDATGEKTEEARIRMTATGLKNRFGSMARCRIALEAGTHSAWVSRLLKACGHEVIVANPRKLRLIYENDRKNDEADAEYLARVARMDPKLLAPIQHREAKTQADLAVLRSREVLVESRTKLINHVRGMAKAMGGRLASMSAEAFGKKAQVSIPDELRAALAPVMEIIRGLTQQIREYDQWVQKAADERYPQTAHLRQVAGVGALTAMAYVLTIQDPGRFSKSRTVGAYLGLRPKQAQSGQGDPQLRISKAGDGYLRRLLVGSAHYILGPFGPENDLRTWGLKLAARGGKNAKKRAVVAVARKLAVLLHRLWASGKRYEPIRPVKRALSPVPTAAAGSRSSPSVTAAIGT

SEQ ID NO: 141359 - protein, 317 aa, unidentified
MNKKEYGVFIGIDVAKRTLDVAMCPNDLSRRFPNTEEGWILLHDFIQPLKPILVVLEATGGYEMGIVRVLADASFSVVVVNPRQVRDFAKAAGKLAKTDWIDAQIIARFAEALQPEVRPLMTKEAEKFHALMARRKQLIEMITAERNRLSSAPEWAKEDIQSHIAWLKESLKKVDKGLEDLIKKSPLWKEKYTVVTSMPGVGPVMASTLLSGLPELGTLNRKQIASLVGVAPFNRDSGLFKKQRTIWGGRTSVRSILYMSTLVAIRFNPVIKTFYTHLRKTEKLPKVAITACMRKLLVILNAMVKNNSLWRVATQSC

SEQ ID NO: 141360 - protein, 415 aa, unidentified
MWMETGQKGRIDTRKENIIYVGIDLHKETHTAVMLDCWNQKLGEITFENKPSEFHKLTRKVSRFLTEEKTAAYGLENAYGYGRALAVWLIEKGCMVKDVNTALSYAQRKSVPMYQKNDSYDAEAVALVLINMLDKLPDAIPADAYWTLGQLVNRRDNICSHQQRLKNQLHEQLCVTYPSYKGFFGNISRATALYFWLKYPSPEHLRGKTAEELAVELRPISHNNCSIKRAEKILELVRTDGQTTREHQASRDAITHSIAGDLEHYGEQLKIVETAIEAMLSSFNCTLMTMPGVDVTTAANMLSEIGDINRFPNANKLAKFAGICPINFSSAGKGKDMCPKQGNRRLQAIFYFLAIQMIQISTNGTPRNKVFREYYLKRVAEGKNKQQALICIARRLVNIVYGMLKNHTAYREPDQ

SEQ ID NO: 141361 - protein, 371 aa, unidentified
MKQQTKSSHITVGLDLGDRRHRFCALDERGEVVEQDSICNDRVSLRKLAGRYHGALGVMEAGAHSPWISRFLEALGWRVVVSNPRKVRAIYQHERKSDQRDALMLARIGRMDLALLYPVRHGTAEAQQDLLRIKLRDSLVRARVAVINSVRFTLKSLGYRVRNPSSARFHKVVMEEVPESVREMITPSVQALAELTARIKMLELEINTLAQMKYPQSAQLQQIPGVGPITALYFVLKIEDPNRFAHVRDVGAYAGLCPRRDQSGESDPQLRISKRGDAYLRRLLVSAAHYILGPFGPQSALRAYGLMLAADGTARAKKRATVAVARKLAVLLLSLWKSQQPYQPFPGARLNGQQEDRRSGTIALHRMEATD

SEQ ID NO: 141362 - protein, 408 aa, unidentified
MNTLYVGIDVSSKSNVVYLMLPNGDKHSNFSIANSHEGSTQLVKRILSALTSHSLDTVLIGLEATSVYGDNLVYFLREDATLASFNRKIHVLNPKQVKKFHDAYNDLPKNDYVDSFVIADCLRFGRINKEVYLGDYRYKALQNLTRARFFAVQNLVKEKQRFMNVLFKKYSTMTQEKVFSDTFSTTALAVYDEFESAEALANMDLQELTDFIIEKGKNRFPDPDAVAKAIQKAARSSYRLPKTVNDSVNQVLSISITSMKALESQIKEFDKAIKAQMELLPNVLISIPGIGPVYSAGIMAEIGDINRFNSQAALAKYAGLTWKQHQSGGFEAEVTRLIPSGNRFLKYYLCEAAFSLVRCDKEYSDFYHLKYKEVNRCQHKRALALTARKFVRLVFRLLKDNRLYCPAK

SEQ ID NO: 141363 - protein, 343 aa, unidentified
MDYFAGLDVSVKETSVCIVDDAGKIVREARVASEPEALLQVLANNTYGFKRVGLEAGPLSQWLYSVLAEAGLPVICVETRHMRAVLKAQINKTDRNDARGIAQMMRVGLYRPVHVKTLRSQKLRVLLTHRKLLQSKAIALENDLRATLRNFGLKVGMVGTIKFEVRIKELVENVPDLAVLVEPLLIVRQVIREQLGILHRRLLAIVRDDDVCRRLMTIPGVGPVVALTYRVTVDVPARFRNSKAVGAVFGLTPAKYQSGENDRTGAISRCGDEMMRMMLYEAAQSMLARSTKWSWLKAWAMKVARHRGMKKAIVALARRLAVIMHRVWVDGTEFRWTREVAAA

SEQ ID NO: 141364 - protein, 351 aa, unidentified
MVILAIDLAKARSLFCWHDVVKGTHRMKTIASTPQAFHDALTSEKVERVIIEVCDMAGWIKDLCDTLQIPLQIANGNTEGWRWRNVKKKTDKDDVLKLISLSLTDQLPTVTLPDRPVRQWKSLILYRQKLIERRTRIKNKIHALLVSEGKAMSGGKKAWSQESLAGLCRLARPMSDCPIEELWRGQLHMELEGLDDLDRLIATLDKKLDALGEKNAQVIRLQTIPGVGARLSELVVAVIDDPKRFKNVREVGSYAGLVPRRYQSGTMDRSGRISKAGCGKLRKLLLEIAWGMLRYNAHGQRVFARISKGQKTRRKQAAVALARRILGWCWAMLRDGTDWHEPQAAQSPATT

SEQ ID NO: 141365 - protein, 410 aa, unidentified
MEVLYPRCCGLDVHKETVVACLRLVIDGKVVKEVRTFSTTTASLMGLSDWLSENQCTHIAMEATGVYWKPVWHILSHDDFELVLANAAHVKNVPGRKTDVKDADWVSDLLAHGLIRASFVPDSPTQEMRTLLRTRKQLSREKSSHILRIQKTLEDANIKLDSVITDVMGLSGRKMIEALIAGQKDPAKLARLADHRVRASQETLREALRGHVTKHHRFLLRLHLNQIDALDAAISKIDREVEAGIAPFRTAVEQVTSIPGVKDLSARAIISEIGIDMSRFATDAHLISWACLCPRSDESAGKRRSNRIRKGSPWLKTTLVQCAWAAARTKGSYLQAQFHRIRSRRGVKKAIVAVAASILIAIYHMLKNGTMYQDLGPNHFDRRTKERQKNRLVQRLAELGYAVQLAPLPN

SEQ ID NO: 141366 - protein, 324 aa, unidentified
MAEPALGSDVSKDTLDVNIIVRGKPRGRRFANASEGWRALIVWLGQHQLERVHACLEATGRYSLGVALALHEAGHIVSLVNPAQIKDLSRTKLGRNKTDKVDAALIRDFAALFVPPAWSPPSPALRRLCELRTMRAGFLASRIEWQNRAGSGVADRTASELARTTVAHFEVQIAAVDKAIAETIDGDDDLRTKRDLLLSIDGVGETLAAVILTELPAPEVLSRSTQAVAYAGLNPRQHQSGSSINHPTRISKICNATLRTALFMPALSAMRCNTVIAAVVARLRTQGRLKGKQIVVAAMRKLLVLCFGVLKTGKPFDPAIAMPR

SEQ ID NO: 141367 - protein, 349 aa, unidentified
MKEFSKYIGLDVHKETIAVSVAEANGGELRYLGEIANTPEALDKQVKQLRKGGADLSFCYEAGPCGYGIHRQLTDLGWDCQVVAPSLIPKKAGDRVKTDRRDSLMLARLHRAREDMKHLQRQAKQRLLAFLLRHGKRYGGKSNWTQAHYRWMEEVKFEHPVQQIVFHEYVDTVKAMTKRVAALDKQIERAAAESVFWPVVEGLMALRGVNLLTATTIVAEIGDLRRFASVPQLMAYLGVVPSEHSSGGTKSRGGITKTGNGHVRRVLVEAALTYRHPARKTAVLQRRAEQTSEAVQEIAWKAQTRLCGRYRLFEARGKLKVQACTAIARELAGFIWAIGQVLPQPAASA

SEQ ID NO: 141368 - protein, 342 aa, unidentified
MMRRFIGVDLHKNSFTVCYMQRKGEHDLKTFKVSPNDVEAFKKTITKQDEVAVESTGNTGYFAREIEKSVSKVRIINPIQFKIISESVKKTDEHDAVTIARYLSKGLIPEVRMRSKEEAKLASLIGTRDKFVKLRTTLKNKIHNILNASGIVTTKEMFSGDRSLDKLLSMGLDQADLFEIRIIVDQIKSLNKSIDEINRELTDRGKNLPGHKNLTSITGIGDLSATILLNTIGNVDDFSDDKKLAAYFGIVPRVAVSNDTSHYGKITKRGNKIARTALVQSTLIAIRYNHYLRRFYFKLKAKKGSGKAIIATARKLLAIVYRTLKNDWVFEDFNKFKLAVTV

SEQ ID NO: 141369 - protein, 274 aa, unidentified
MEHELHYIGIDTAKEKLDVDVLRPDGRHRTKKFANTTKGHDELVSWLKGHKIDHAHICIEATGTYMEPVAECLYDAGYIVSVINPALGKAFAQSEGLRNKTDTVDARMLAEFCRQKRPAAWEAPHPLERALRALVVRHQALTDMHTQELNRTETAREVQRPSIDAHLLWLEAELKRLEKQIKDLTDDDPDMKHRRKLLESIPGIGEKTSAVLLAYIGLKDRFAHARQFAAFAGLTPRRYESGSSVRGASRMSKAGHVSLRRALYMPAMVATSKT

SEQ ID NO: 141370 - protein, 411 aa, unidentified
MIEKQFAAHIGLDWADEKHDYCLRVASSQTLEYGIFEHTPALIEQWALALKDRFKDRPIAVCLELKSGPIVSCLSKYDFIHLFFVAPQALANYRKVFTQSGAKDDPSDAFLQFDYLTKHFSDCQEVTFDRQDTRILEQLTEHRKSFVNEKVKLTNKITTALKAYYPLALAIFTDLDTSIFCDFIERWPNLSKLKKARRSTLETFFKSHRSGRVDLINRRIALINTAIALTDDDAVIKPYQRYLLGLISSLNPLLETIKAYDTEITIIFEQHEDRDIFASFPGTGDILAPRLLAAFGSDRNVFSSADEVNRCAGIAPVIERSGKKIWIHWRFKCHKFLRQTFIEWTNQTIKYSFWARAFYDEKRAQGKSHQATIRALAFKWIRIMFRCWKNHTAYDEATYLFALEKRNNKMA

SEQ ID NO: 141371 - protein, 402 aa, unidentified
MKASKQYLRFCGIDMAKQKHVACIIDQDGRYLLQPKSIRNDADGYQQILNCLKQSGRTKSILTGMEATGHYWYSLHDFLTRQGYTVAVLNPIQTAQQAKQAIRKCKTDKYDAFHIANLLRTGQYKAAVVPGELAMTCRQITRLRYRMVKQAAMIKQLANSRLHPAWPEYEGLFSNKFGTTSMKLLRTASTPKELMELYPDDLSELIRKASRGRFGPAHTQKILHSAKNSVGMQRGHYGISTGIKFLLEQIVALEPVRKKLDVEIEKLAAKLPEYLFTLPGATELTIVSLYGEVDPIETFKRPSQLTAFAGLDPKVFQSGQYDAPRRHVSKRGSPYLRRTLWQMAYRSVCIEGDLRDFWRKKHRQNKHHLVAVTGAANKLCHIVWRIMTDRREYIPKGYNPKS

SEQ ID NO: 141372 - protein, 338 aa, unidentified
MKVYAGIDLHSSNNYIGIINEKDERLYQKRLPNQLEDVLSALEPFKKDLEGVVVESTYNWYWLVDGLQEKGYKIHLANPSAMQQYDGLKHTDDKWDSFWLAHMKRLGILPEGYIYPKEERHVRDALRRRLLFVRHRTSHILSLQSAITRNLGYKMSAREIKRLNESDASRIFNDPFLILTTRNNISTIRFLDNKIKDIENDVLSHTRLKPEFKKLLTMPGIGKILGLTIMLEVGDINRFPKVGKYSSYCRAVKSERLTNKKKKGEGNRKNGNKYLAWAYVEAANFANRHYPEVQSFYKRKKAKRNGVVAIKALSNKLARASYYVMRDKVSYDAKKLFR

SEQ ID NO: 141373 - protein, 422 aa, unidentified
MMSRHEYAFYVGIDWAMEAHQVAVVDPAGVRQAEVGVEHSGAAITRFIDGLLKLVDGDAGKLAVAIELPRGALVEMLIDRGIAVFSLNPKQLDRFRDRHTVAGAKDDRLDAYVLGDSLRTDLHLFRRIQLTDPLILQLREFSRMDEDLKQEKVRLANRLREQVYRFFPQMLRLCSAADEAWFWELLELIPTPAAARSADRLRVTRLLRKHRIRRLSAVDVLTALRVAPVQVAPGTMEAARAHIRMLLPRLQLVETQLKETSKRMQETLDQLGASQSPEGQNNEHRDAAVLLSMPGIGITVAATMLSEASEAIAQRDYHALRAHAGVAPVTRRSGKTKFVRRRYACNPRLNNALYHAARVQVQFDPLARQLYAQLRQRGHSHGRALRTIGDRLLRILVAMLRVGRFYNRDRLRSSPASTAAAA

SEQ ID NO: 141374 - protein, 397 aa, unidentified
MYIVGIDIAKRKHEAAVIDGEGTVIIKPFSFTNNCSGYNRLLAMLTKAKLPLDEVSFAMEATGHYWLALFTRLQKEGFRVQVINPVQTNSIRSFYIRQAKTDPRDALLIAEVIRFGHFSESTLHPENIYELRELCRGRHAIVSMQADVKRKVVALLDQVFPEYETAFTNMFSDTSMAILQTCPTPKELSEMPLEEFCHLIEVSSHKRFRMAKARELQELARNSFGFAMAGDVFSTMIRLYAKHLDFLKQQVQEMDRKIAEIMDTLDTPITTITGIGPTLGAYILSEIGDINRFSSSAKLAAYAGIDPTMRQSGEYNGVRNRMSKRGSPYLRHAIWLAASSAVLHDPALKLYFQKKRDEGKPYMASVGHACRKMVSIIYAVMRDNKAYTPCIPNEISA

SEQ ID NO: 141375 - protein, 418 aa, unidentified
MDVVVERCAGLDVHRDNVVATVRVPSDDRRRWLHKTRTFKATLAGLADLKEWLSGFGVTLVGMEATGVYWKTVFYALEDRFECWLLNAQHLRNVPGRKTDVKDSEWICQLVAHGLVRPSFVPPPEIRRLRDLTRLRKAQSNERTRAIQRLEKVLQDAGIKLTSVASQTYSKSARGMLEALLSGVSEPEELAELAKARMRSKIPQLREALANRFDVSHHGIMVAQLLAHIDTLEAAVGLLDEKIEAMLAPHAKVVELLCTIPGVAVRTAQVLIAECGLDMSRFPTVGHFASWAGICPGHHESAGRKKSGRTRPGPRWLTEALTESAKAAARSKGTYFAAHHAQLRGRRGEPRAIGALRHDILVAYFHIVRDEVPFRELGPDWQRKRYSPEHRARRLQRQIEALGFKVTLEEGEAAEQAA

SEQ ID NO: 141376 - protein, 338 aa, unidentified
MYSFIVGIDISKLTLDAVMIINGNKETATHHHLSNTPEQIQKLFKGFSQLPNFSLDKCLICIEASGVYTYPILSFVTQNDANIWVELGTRIKKSGGIQRGKNDKVDALRIALYAAKNQDDVRLWHPSNPTIVKIKNLTGLRDRLMKSKFKLSVPVEEFRQVGDVQTANLLSKAMKSSFEALENDIIAIEKQIKKLLDEDSKLKELFALVTSVVGIGTQTAIALIVYTDGFTLFDDARKLACYAGVAPFAYSSGTSIRGKTRVSQMANMTLKTALHMASLTAIKLDIQLQKYYQKKVAEGKKKMSVLNAVKAKLLHRVISVVQRKEKYENSDKFPLFLS

SEQ ID NO: 141377 - protein, 407 aa, unidentified
MRLFVGDDWAEDHHDVELMNEQGRVLARKRLPEGVAGMARLHELIGEQLGEGADDAEVVIGTETDRGPWVAALVAAGYTVYGVNPLQASRYRERHGVSGAKSDTGDAHMLTDMVRTDSHQLRAVAGDSPGAGAVKVVARTHKTLIWERTRQVQRLRHQLREYFPAALEAFDDLDAPDALELLARAPDPARAARLTRAQISAALKRARRRDIPGKATAILTALRGAQLGQPPAITAAYAATVRSLIAVIITLNEQVKILQGQVGTDFRQHPDAEIYLSQPGLGPVVGARVLGEFGDDPHRYASGKARKNYAGTSPITRASGKKKMVMARFIRNDRLIDALMAQALSALGSSPGARAFYDAQRAAGVEHNAALRKLASRLVGILHGCLKTRTPYDESTAWSHRENKLAA

SEQ ID NO: 141378 - protein, 401 aa, unidentified
MTSVGIDVSKGKSTVCILRPYGEVVASPYEIQHTEPELRALVSHIQSIEGEVRIVMEATGAYHLPLLSSFKDAGMFVSVINPLAMKKYASTAIRKGKTDKLDSVRIANYGIDHWFKLADYTLPDELYAQLRLLGRQYAHYITIRIECKLALTDLLDRTMPGIKTLLSGKRSEEPTKDKLSDFVAEYWHFDNITKKSEVQFIHSYCAWAKKKGYHASEPKAKAIYALACNGIPTLPSSAASTKMLTLEAVRVLKEVNKTLETILTQMQALAITLPEYDIVRAMNGVGDVLVPRLIAEIGDVRCFHSGSALIAFAGIDSPPFQSGSFTGTRRKISKRGSSLLRKTGYEVMKCLKTVKPAQDNAVYLYMLKKEAEGKPKKVAKIAALNKFLRIYYARVSEVYAS

SEQ ID NO: 141379 - protein, 358 aa, unidentified
MVQSKGINFNGQNIYIGIDVHLKSWSVTIITESGYKRTHSQKPSAKELFEHLKKHYPNGKYQAVYESGFSGYSTYYALKEYGIKCMIIHAADVPTSQYENVMKTDAIDSEKLAKSLKGGLLRGIYVRDKEELDDRSLIRLRKTLQKQLGGYKSRVKHLLYNNGISYPDCFENSRSHWSNRFIYWLENEVRLLSSTRLSLDLLIDQVKLFRKNLLKATRMVRDLSKKPQYSRQYENLISIPGIGLVTAMCLLTEIGDVSRFHNQREFASFLGLIPSCHSSGENIYNMEKTFRGNKHLGPLVIESAWVSIRHDRAMSMAYGEYCKRMKGQEAIIRVARKMSNRILSVLKSGKKYQYDKIR

SEQ ID NO: 141380 - protein, 411 aa, unidentified
MYYVGIDIAKKTNVSSIINDKDVFIKKSFKFNNDEKGFKEFTNLLSSIDKNIDNFIIAMEATGLLFENLYLYLKGKGYNVILLNPYQTSKFREMDTMKKVKNDNIDAIMIASLIKSGRYSKAYVSEEVYASLRALHRHRASLEEELKKHKRQVSSLLAVVFPEFEQVVKNPFSVSGLALLEKYPTAKHYKHASPQRILNLFRKIKGNNFNIQKAEKLLELAKSSIYSGNAYDERAFVIQSHIRMIKTLQKEIESIDNEMLKLFNASPSFTKEEEQEVIDIIDNLRTIPGVSDKTLFTIMGECGNLDRFKNINAFIGYLGLYPTLEQSGNKISYGKLAKRGSKLAKKALYQAAVAAIRHNDEMKKLYCDKVSQGKAKKEALVIVARKLAAIILAIYKNNTPYNPARVFNQNT

SEQ ID NO: 141381 - protein, 323 aa, unidentified
MTTIYLGLDISKDKIDAVTAQTPHITVPNDEAGYRALLDYLHGHQINPSQIHACCESTNIYYLGIAQYLYRHHIKISVVNPIAIKAYAKMQLRRVKTDKQDAKLIADYCRIEQPHAWQPESDGKRQLKNIHRRIEQLMAICVQEQNRLQVADECVKPSIEQLIGTLQAQIDQCRRQMQQVIDNTQDLRQKQQRLETIPGVGRSTAQILLSVLIDLDKFQTAKHLVSYLGLSPVIRDSGKYSGLQRVSKMGNRSVRTSLYMPARAACTRSKLWRGWFDYQVGRGKHPKQVYVMMMCKILRYAYVCLKTDKPFDAKLHQKALKNG

SEQ ID NO: 141382 - protein, 409 aa, unidentified
MPRWEGGMDMDETQRFRWFLGIDVSKETFDGCCINMKGERLFSLSTSMNRKGFQELIKQLSGPSVSQESTLVGMESTACYHVNLYSFLISLGYTVIVMNPLLISNFVKLQLRKTKTDKKDATVIAQFLLLNRDSLSQTILSSDISDLRDLSRQRESLVDQMSSTKSEIKRLLTMTFPELEHISGLFSKSMLRLLCHYPSAASIKQAKRSKIAKILIPGSYGKQTDVSVDRILKAAKVSVGTSSATKEIIIRQKASLLIQWEQHLQELTDILIELCEGKIQREKEILTSMKGIGEKSAVNFLIEIGGDMKQFESHKKVIAMAGLDPALYQSGKIDRKGKISKRGNRHLRRVIWIMTTKVIQFNERFKQYYLKRIKDGLPYKMAVLATAHKLIRVMFAMLKNKTLFDPRMN

SEQ ID NO: 141383 - protein, 400 aa, unidentified
MHLTANISIPQKNFIAIDLHSDNAVICVRRNALNKAGELVGKNIWCGRVSIRDGLDNFIKVLVPHCQDFDHVAVVESTYNWYCLADAFEERGWLLRVADPSTVSQANLKSSDDRTEVQYLAEQLRVGSLKHYLPLNYSSRALRDLCRYRMAMVQDCASLKIKLINLYRNQLSKNVRVADLLERCQPHMQPNYRFNSDILEEFKDPNIRLRVAFEISRIAMLEEMIEECNAEIQKQCKDQELVKLCKTIPGCGPVLSAVICTEIGTMQRFKSAGDFVSYCRLCSTSKLSNGKSKGLGNAKNGNAYLSWAFTKVAQYASRNPVIREILQRLLRKYGGLRVKAIRTLAAKIARVTFYVLKNKQPFNAAKCFGMELTKSIVKKLPHKPLREDAAVVLPTVAGQA

SEQ ID NO: 141384 - protein, 324 aa, unidentified
MFFLGIDVSKAKLDCALLGSDANKRKTKVVPNSIAGVQTLLQWCAKQGAEPAQLHAVLEPTGQYHEQAATALHDASVSVSLVNPAQVRDFAGALAVRSKTDGIDSYVLARYGQALKPGLWRPAPLHARQLRALLARRDALAKDLQRELNRQEKTQFSDPPVLVEGSIAKTIAFLREEIKRLDHAINDHIDRHPDLKEDRELLTSIPGIGDRAGNSILSIMHNRHIESAEGLASYLGVVPVQRQSGTSLNSRPRLSKTGPSTVRATLYMAAIVSKRFNPHVGALYARLLAAGKSKMAALGAAMRKLVHLCFGVLKTRTPYRPDYA

SEQ ID NO: 141385 - protein, 457 aa, unidentified
MSKRRKSAQSKSFNLQSLPKQLQHINLNAAGIDIGSERHMVAVPEGRDEVSVREFGTFTADLIALADWLQQCGVTTVAMESTGVYWIPLFELLERGGFEVKLVDARQVKNVTGRKSDILDCQWIQQLHTYGLLAGAFRPADELCVLRSYLRQREMLTQTASMHIQHMQKALQQMNLLLHNVVSDITGVTGMKIIKAMLKGERNPQVLASHRDNKCHHDSATIAKSLVGNYRAEHLFALSQAVDLYEIYQTKISDCDQAIVAQVSAQPEVTDEPPPPEQKRTAARDRQRGGVNIRYLLFQKSGVDLFAIPGLAADTLLVLASEVGFDLRPWKTEKHFSSWLSLCPGTKISGGKVLSRRVKRNPNRAAQAFRMAAATLSRSKSALGAFYRRIKARSGGKQAITATAHKIARIYYALLTQGTTYVELGQQAYEQKYAERRLKHLMVQAKSLGFHLVPSQI

SEQ ID NO: 141386 - protein, 352 aa, unidentified
MNTTVIPSTANSPDRHCWLGVDVSKQQFDAAVWTAPVLGEVRSWRAVPARLFPRTAAGAAACLAWARECEPRLFGAVMEATGKYSIELAHWFEAADPAVQPAIINPRLAKAFAESLGISNRNDKADARALARYGVDRQPAPFAPPKPDLAQLRDLVRYRQALVEERTSEENRAEEGAAAGPVRRMQTRRIAQLNRDVLRLEKEVRTLLKAAPQIQRDVNHVDGIFGVGWVTAVTVLAEFGDLRRFTRARQLTAFAGLAPKSHDSGTSVHKKPHLSKSGSAHVRRALYLSALAAIRGANDFSEMYRRLTDAGKKPLVAIVAVMRKLLVVMRAILISGQSYDPSHRHHPRTTCG

SEQ ID NO: 141387 - protein, 309 aa, unidentified
MKEEVVYLGVDVAKAYLDAAMGSEKRRLANDGTGHRQLINWIKQMETNVQVICEPSGGYERMLIQALVGAQVKVSLVQANRVRQFARAAGILAKTDSIDAEVLCAFGQAMRPQTLSASKLQQEHLRELESQRRHLSRLLVMEQNRGARLGDSSVRTLNRSLTKQIQKQIERIDLLITEHIAGSQELSAKAHKLTAISGVGPRTAALLLAQMPELGQLNRREVAALVGVAPFNRDSGKWRGKRTIFGGRRHVRHGLYMAALVAARHNPILRAFYQRLRAAGKPAKLALTATMRKLLIVLNSALKPDPIYA

SEQ ID NO: 141388 - protein, 399 aa, unidentified
MKTSFSGFLGIDVSKDKFDVCCIDMNGEKQFYLSCSMDRTGFEKLVSCLESLSIPKESFLIGMESTACYHMNLFSFLLASGYVAIIINPLLISNFVKMQLRKTKTDKKDALVIAQFILMHMDTLARTSISPHISDLRDLSRQRESLLSQMTALKCDLKRILTITFPELEKLTGVFTKSILKLLCRFSSAHAIVQADPVEITQLLLDHSMGRNSSKAAEAIIKAAHFSIGTTSPAREVILKQKAEVLIHLDGHLKELTAVMIELCRSGLGDDVDIMTSLRGIGEKTATNFLVEMGGDIRRFKDHKKLIATAGIDPAIYQSGKHNGQGRITKRGNRHLRRVIGLMTIRVIQFNDCFRNYYKKRIQDGLPFKKAVLATAHKLLRVIFAMLTQRTFFSYEANS

SEQ ID NO: 141389 - protein, 316 aa, unidentified
MSKSSQYVGLDVSLKETSICVIDDADKIVWRGQVESTPETIASAVKQHAPHAVRIGLESGQLSNWLFHGLKEAGLPVICVDARHAKAALSLKVNKTDANDALGLAQIMRVGWYREVTVKGLDCQAVRALLVARGQIVSQITTLKNCVRGILKTFGRVLPKGLRSQFPARVRAAIDGHPVLGAIIEPTLRVLEAARAQLLVYDRAVIQRARSDDTARQLMSAPGVGTVVALAYMTGVEDPARFKRSSSVAAYFGMTPRRYQSGEVDHAGRISKCGDGMVRSLLFEAAKVLLSRSARPSALKTWGEALGKRIGSKCPS

SEQ ID NO: 141390 - protein, 308 aa, unidentified
MFIGIDVSKDRLDICVRPSGETFAVTRDHEGLEHLVERLRALAPVLVALEATGGYETVVASALAAAHLPLAVINPRQIRDFARSTGKLAKTDHLDAAAIAHFAEAIRPPARRVADGEAQALGELVARRRQVIEMIVAEKNRRRLAGQPRVLKAIDRHVDVLQAELSELDRDIDGAIRKSPAWQADADLLASVPGVGKATLRTLIAELPELGRLDRRKIASLVRVAPINRDSGALRGRKTIAGGRAPVRTALYMAALVASRSNPVIAAHYQKLRASGKAAKQALTACIRKLLVILNAILRDRKPWSIQA

SEQ ID NO: 141391 - protein, 342 aa, unidentified
MDQVTIIGLDLAKRAFQVHGARGDGGVVYRQKFSRDKILTFLARQPRCVIAMEACGSAHHWGRAIRDLGHEVRLIPPIYVKPFVKRQKNDAADAEAIAEAAVRPTMRFVAVKSEDQQARAMLFRTRDLLVRQRTQTINALRGHLAEHGIVAPQGPANVKVLGQAIEDGETSLPLLVVELARIYLDQIEGLSKKIAKLQMVTVQEAKREPLTRRLQTMPGVGPITAMAIETFAPPMELFKRGRDFAAWVGLVPRQHSTGGKQFLGRTSKMGQRDIRRLLITGAMAVVRLAGRKGVPEGTWLSRMLVRKPRMLTAIALANKMARTMWAMLTKGEDYRVPAAVTT

SEQ ID NO: 141392 - protein, 416 aa, unidentified
MKLFVGIDVSSEKLDTCYLTDEMVVLLNHTYGNDTQGAWELKEQILSFHETYSFDQIVIGMESTSMYSYHPAVNFHQDEQLQAIHAITTIENPHRIKQYMKMFDADKTDPIDAFMIADYLRIQRYTNSPIKGEKYMALQRLTRTRYQIVRQLVEVKQHFIENLSYKCNTLKKELREAEGSTTVFSAAIMDLFTQDLSLDDLANLPLKDLAEWLQSKGRGRFKDPEGLAKTIQRAVRSSYRLDQVMSESIDRILGILVREIRSLEKAVKDCDQGIEDLVQTVPEYQCLTSIPGVGPVYAAGLLAEIGQIERFPDQTSLAKYAGLTWPKHQSGRHEAENTPLTKKGNRYFRYYLIEAANSVSRHLPEYQAFYRKKYQETPKHQHKRALVLTARKFVRLVDTLLRNHQLYTPPRSVIEK

SEQ ID NO: 141393 - protein, 291 aa, unidentified
MSISHYIGFDVHKKHINFCIKTADGAVVEEGKLLAQRAALRNWAANQASAWHGAMEATLFSGWIYDTLKPYAACLEMAHPLMLKAIAASKKKNDTIDARKIADLVRCHLLPACYVATPQIRELRRLLRYRNLVVRESVRMQNKIAGLLMESGAPFHKQKLHGKKYFVQLLDTLEEVPDSVKDLLRLSRSAMEMFQATQKRLLGELLAHPQLRQRVERLASIRGVGPVTALTWALEVGDPFRFSCSAQAMSYCGLTSALQSSADKQQRGPISKQRNPWLQTALIEAAKLAPR

SEQ ID NO: 141394 - protein, 406 aa, unidentified
MHYLGIDVSKSDSRFVILDEEGERFSKAFTLQNDKLSFQRLLERLKELNLDKDNLLIGIEATGIWWENLYSFLSEVSFKVVVLNPHQTNKFREALRKKAKTDDIDAYIIAGLLRSKEYASSYVPEDLIQTLREFTKLRYELIKDRRNYERQAASLLSLVFPEYEKTAIKNPFAVASTAILKIYPTAKNLAEAKPKHIEKIVRAIKGNNFNIDEIQELIDTARDSIYSGRAKDARGLNLKILLSHVEHIDESIKELDVNIENLLSPTKADDINSFPGANLLTIPGIGPKTLAVILQAVGSNGQVFASGTKLIGHIGFFPQIYESGETRTDNKISSRGPKMLRWAFYIAAVACLRHNPEMRSLYHKKLSQGKTVKQALICVAKKLAHLCLSMLKSGQPYRPERVFVCT

SEQ ID NO: 141395 - protein, 341 aa, unidentified
MSKDQIFKQNIGIDISKEEFEAHLVVLTDQLETSSMGRRTFKNTLSGVENFIKWADKKADPSIELEFTVEATGVYYENLAFTLYERGRTIHVVLPNLAKKFAESLGLKSKTDKLDARSLGIMGVERKLTRWRPASKNLKQLKVLTRERTKRQKEKTKAKNQLHALENSYNPPSSSIERYKELINFLEDQIKAIEKEIIHLIKEDEVLNSKIQKITSTPGLGIQTVACVVAETNGFASITSIKQLQSFAGYDVQLRESGKWKGKTRISKKGNSYIRHALYFPAYTIIKHSSHYKAFYDRLYNNKGKSLIAATAVQRKLLGLIYTLWKNDTYFNPDYVHKKAA

SEQ ID NO: 141396 - protein, 377 aa, unidentified
MKRIKFVGLDVHADTIAVALAAQDGEARSLGIIPNREESIRKLVGKLGPIEQLRFCYEAGPTGYALYWQLTQMGAQCKVVAPTLVPVKAGDRVKTDRRDALKLARHHRADELTAVWVPDAAHEALRDLVRAREAAKKDQLRARHRLSKFLLRHGRRPPVGINSWTVKYLEWVQREVHFTERAQEVTLLDYLHEVQHAAARIERLDQAIDEAAQSVPPPMRAVIEALQALRGIAKISAVTVVAELGNVTRFTGARQLMAYGGIVASEDSSGERIRRGKITKTGNAHLRRVVVEAAWAYRHRPAIGATLRKRQEPVSEKVKEISWKAQQRLHARYMKLILKGKNKGVVITAVARELLGFLWAIGIQAEAEHQESLSRVA

SEQ ID NO: 141397 - protein, 408 aa, unidentified
MLFVGDDWAEDHHDVEVQDDHGRAIRAARLPEGLDGMTRFHELVARFLPDDAKPSDVLVCIETGRGPWVRALIAAGYQVYGVNPKQAARHREGMSLSGAKSDKADAHTLADMVRTRRHQLRQVAADSDIAEAVKVVARAHQTLIWERTRHMLRLRTALRDYFPAALAAYQPLTLTGTDTLDLLAKAPTPAAAAKLTITQISAALKKARRRDIPAKATAIQQTLRTEHLGQADVVAGAYAATVRATVAVLHTLNAEIRTLEGEVEAHFGQHPDAEVYLSQPGIGAVLGARVLAEFGDAAGRYADAKSRKNYAGTAPITRQSGKSKTVHARFIHNDRLVDALHMQAGAAILHDPGVRAYYDELRGREVGHNAALRQVGNRLVGILHGCLKTTSPYNETTAWSHRTQSAAA

SEQ ID NO: 141398 - protein, 464 aa, unidentified
MKTYYMGIDVSKGYSDFVVLDKDKKAVLPSFKLDDTYENHVKLVNKIKSITHNNEIQLTCGLESTGGYENNWYNTILKETQFGNVKVTRINPFRVYFSKKVDLTKTSTDRISAEHIARFMINHNEKLYFNQTDLYSTEKKLYQYHQTISKQGSALKNQLQQILYNSFPELVKFMIKGLSNWFLQFLIKYPLPSSLKNVNKNNVINGIPYIKKEYVDYIFKMSQKSVASSDDTIIADITRKLADKILKINKEKCEIIKILSRRVDKNLFDLLRTIPGIGKQTATVILLLIGDISRFNDAKKMCSLFGLVPVYSQSGDSVKGSKISKKGNKLMRSTLFMAAKSAIRHPYFKELFNFYKTKNDNYYFAITCIMHKMLRIVYGMLKSNKSFDVKIDRSYRNYSNANKRKHIHQQSVIGISEDAPVSYRESIKRKQEPSQNFKFDTGSGSHSLLDGLNINHQSKISQKK

SEQ ID NO: 141399 - protein, 426 aa, unidentified
MQNCLFIGVDVALKGNQFCVMHFDQHIYFNLKFPNNPEGNDMVINKIKDIENKFFFEKIIVVMESTGMYSFHPACYLSSNEYLNKFHTEVYQINACDFDKYKKSFHDLEKEDGIDAYILADYARVGRTKALYPFRGSQYIALQRLTRQRYHICKELIREKAYVLTNLYLSFSGLMSLDKNELPFSDLFGATSSAFLEEFESPDQIAKSSVEELINFITEKSKNHSSNLDEKVTALNKAMRASYRLDQAAYEPVNIAIACSLNTIKFYQQQLKNIDKAILNAALGLDSNTYHILLSIRGIGKVYAAGIMAEIGNIDRFSHNSKLAKYSGLYWKRNQSGEYDSQDKKSSKKSNKYLRYYLVEATASCVRQNFPFIKDYYSLKYKEVTKHQHKRALVLSARKLERLIFGLLRKNQYYKPIDAVQNSKIG

SEQ ID NO: 141400 - protein, 363 aa, unidentified
MRESTTVTVGLDVHARSVRVAAVRGDELLDERTLPYDEEALERCLRRWPDVHCCYEAGPTGFGLYRYLVERGIACVVVAPGLVPQRPGERVKTDRRDARKLARLHAGGLLEPIHVPSRELEAARDLVRAREDARLDRMRDRHRLSKFCLRHGRRLPGMSWSVVRRKWLGEQRFEFAAQQETFNAYVHTVDLVDHRIEALERSIRETAEQGPWRELVARLRCLRGIDTLTALALATEIGDFGRFRSAEEFMSFVGLVPSERSSGEQRRQGSITKVGNAHVRRLLVEAAWHSRRRPKVGYELARRQRGQDAVVIERAWRCQQRLHQRWQRMAGRGKPQQKIVVACARELAGFVWAIATDQPLRSN

SEQ ID NO: 141401 - protein, 428 aa, unidentified
MNCNTQNAKIASITEKTLIVGIDVGSETHFARAFDWRNYEYTKKPLEFSNTEAGFMMFKAWVEDIAEKQGKTAVISGMEPTGHYWFALGKFLQDSGMKPVHVNPHHVKKSKELDDNNPNKNDRKDPKTIAALVNEGRFSYPYIPTGIYAEIRSLSNLRFQMQEELTRIKNRIARWFAIYFPEYKDVYGDLMAVSGRMILKEAPLPEDIRILGVNGVNQIWRNAKLRGTGMKRAKILVSAAEHSVGSKEAPEAARIELKNLLNDMDVYVSRMEELLQTIEEKLKTIPYVDKLMEIKGIGLITVSGFIAEVGDIGRFDNPKQLQKLAGYAIVANDSGKHNGESRISYRGRKRLRYVLYEAAISLVGKNAEFKEIHEYYRTRKENPLKKMQSVVAVACKIIRVFYTILTKGVDYDPMKLMSDIRRPQLQAA

SEQ ID NO: 141402 - protein, 421 aa, unidentified
MKNKAAKKLKQIPSGYLTIGIDPHKKKHAAVAITEDLSIRTKFKFDNSRDGFDKALANASDQIAKTGYRGVIFAIETGGHYWRNFAYFLEERGIPFRLVSQITLKRMRDGRDINRSKSDFRDAEMAADILRTGDFTETKLPQGIYAELRSTHSAYFRLVKERSRVMNLMKGLLDGLFPEFTQVFKDPCGRTALVVLLTCPSPAAIASMNEEVFIANIRDRRQGRLMLKRLSALHQAAKTSIGVKPGSDSVATEVSLLAGRYGLIQEQIDKLVKLLIGLVKRTEEGKYLLSIPGLNYVSVGALLAETGALSQYQNAKQVIKMAGTNPIESESGGKRLGETPMSKKGRPRLRYCVWNAVIPLFRHNPDFRSWAKRLRERPAHANPLNGKEVVGAALNRLLRVAYALVKKKEFYHLPQIALVTN

SEQ ID NO: 141403 - protein, 423 aa, unidentified
MQNTAARKRKQVPEGYLVVGVDPHKKRHAAVAITQDFTIQAKFKFDNTREGLEAMLGRAKVEMVKSGCRGVMFAIETGGHYWRNVAYFLDEHGIPFRFINQFTLKRRREGKDLNRRKNDYRDSEVAAQLLCTGELTESKLPQGVYAELRTAHNAYRRLVKERTRITNLVKGLLDALFPEFTQVFKAPCGLTALSILSTCSIPSVIARMTEDEFVATIEAQHQGRLMRRKLRALHYSARTSIGIDAGACSLSSEIAFLVEKLELIRGHICSIERTLVRLVDETEEGKYLLSIRGLNYIAVAGLLAELGCFKAYQSARQMIKMAGTNPTESESAGKKRARTPMSKQGRPVLRYCAWTSVIPMLRFNSDFRAWAKQRRERPVHANPLGGREVVGAALNRLLRLAFAMVKNKTYYQVSKAELTLVAV

SEQ ID NO: 141404 - protein, 386 aa, unidentified
MRGQTFVPRDYDVFAGLDVDKRSISVTFSNHQGFISSLHMPYSTEHLIKHVRKHFGDQKVAFAYAAGPTGYGLYDGIVAQGYRCLIAAPAMIPRARGQRVKTNRLDGVSLSENLRGGQLKSIHVPTPIYRELRHLVQLRDTVMSEVVATKQRIKSLLLFEGLDFPTAPAGSQWSLKVKRQLQKLACSKGVRFKLDELLDSLEFLEKKVVRSTREIHRFCKDDPELLQCIKYMMSVSGIGWIVASQLLARIGNWREIQNVRQLAGFLGLVPTEHSTGDRIRRGSITHSGDGRLRSKLIQASWSAIRQDDELRDFYRSVCRTHARHLGPRVAIVAVARKLSARIAVVLMQQRPYVVRKKVDSAPLTQEETVPQGTTRRPGEPGETDNS

SEQ ID NO: 141405 - protein, 482 aa, unidentified
MKPKPKEKTQKATDHPTQGHWHEMNRKQRREMMRKMQSEDISLEVVHPDAAGIDIGNESHYVAVPPSRDSQPVRRFGCTTAELKAMAAWLKRCEIRTVAMQSTGVYWVAVFDILEQAGFEVYLVNARDTKNLPGRKSDVQESQWLMKLHTYGLLRNSFRPSQEIRTMRTYWRQRNDLVQSAGRHILRMQKALTQMNIQLANVLSDVSGMTGQTIIKAILGGERDPHKLATFRDCRVKASEEEIARSLEGNWQEDLLFVLKQEQDGYEFCQQQMAECDRQLAQYLQQQEDRSHGASLPEEKRKGRLKKKRANKPRFDLREALFRITGTDLTRIDSIDVTTAMTVISEAGWDMSKWETEDHFVSWLRLCPDNRISGNKIIGKGRLPTNNPITIALKLAASTLRLSNTYLGAQFRRFRTRLGAPIAIKAMAAKLARLVYRILRYGMKYVDQGTAFYQAQHRNLQIKHLKSKAASLGYQLIQVPAA

SEQ ID NO: 141406 - protein, 358 aa, unidentified
MNICGIDIHKSFLQIAVIDSNGKIVYQERCRYSLIDIILLIAKLAKMRCMEVAMESTGCFWIPLYYEFAGRGFKTVLANPSSTKSFGSKTDMLDAVRIARRHRAGALIKSHVPRDRVKITFRGISRLRRRLKEDRNRVLNRIHRLLTISGVWLDRFVRPNTSRWFRMLEMLASGKSLGEIFGLNIGYEYSCMRDRLDCYEANILGQLLSLARRIDEICSFLSKMAESLAEKLYGEEYSLIQTVPGIGRTLAYMILAEIDDIRRFPSARHFKSYCGLSPSLRESGGKARLGRCRHGNPYLRYAFYQAAVVAIRVDVGLKRFYDRLRARGKHHKVALMAVAGKLAVRTWHILCNNEKYIA

SEQ ID NO: 141407 - protein, 345 aa, unidentified
MSQIIRIGMDTSKHIFQLHGVDASEQVVLRKRLGRKAMLAFFAKLPPTVVAIEACGAAHHLARELGKLGHTVKLIAPQLVKPYVPRNKNDGRDAEGLCEAASRPRMRFVPVKTIEQQAALMLLGVRDQLVARRTQLSNTLRGYAAEFGLIEAKGLDKIAALQAAIARDDSVPALARELFATLARDYAQVQVELKAIEAKLVAWHRANALSRRLAQIPGVGPVTAAALVMKAPDPHAFRSGRLFAAWLGLTPKDHSTAGKTRLGKITRAGDESLRRLLVAGATSVVKQAKGRSRGPRWLLELLERKAPKLAAVALANKMARIAWKLMTTGESYDSARTDSQVASAA

SEQ ID NO: 141408 - protein, 409 aa, unidentified
MRYYLGVDWADQTHAVWVVDEGGTKVAMRTVPHTAEGLTEWGRELDEWRAQRIELWAAIERPEGRVVDFLLDHGVRVYAVNPKALDRARDRFRQSAAKSDPFDARVLADFLRTDHAHLRAVQPSSEAAQELKLLTDDYQRQIRQQTRLVNQLTTTLKAYYPRSLEVAELTTTLAREFLQAYPTPATLTALTERQWQRWARTHRLSEARMRELWAVLQRPQLPVPAHVVRAKARLMQSLVAQLTVVLEVVGAYREAIEDFFAQLPAAQWIRTLPIGDHGITAPTLWARLGDAPGRWASFRHLQAQAGTVPVTIRSGKQQVVRFRFACDKSLRYIIDHVAFLSLRWSEWARAYYAEQRARGHSYRQALRALSAKWLKIIFVMWERQVPYDEQYHLATMTRQQLRRRQEQIA

SEQ ID NO: 141409 - protein, 425 aa, unidentified
MNYKQNEKINQVKESTLVVGIDIGSTKQYARAFDWRGIELGKVFTFSNSREGFEAFKAWMQHLQDKYRKSDVIAGIEPTGHYWIDLGAYLEDEGILLVMVNPYAVKQTKELDDNSQSKNDRKDPKVIAKLVTEGRYSAPYTPDGVYADLRIMVANRKRLIREMTQIKNRFARWFAIYFPEYTDVFGDYEAQSSMLLLKKVCTPEAIVELGAEKINQIWRDAKLRAVGMKKATTLCETAKRSIGLKKGSSAARYEMKLLLEDYEYKKAQLDAVMEEIEKLCRKIPESEQMLAIKGIGVITVAGFLAEVGDVRRFESPRQIQKLAGLSLRENSSGKHKGQTTISKRGRSNLRAVLFNAAIPLIATNPEFKSLHEYYTTRANNPLKKKQSVIAISCKLIRVFYAILANGVTYDAQKMLSDIHRQPQAA

SEQ ID NO: 141410 - protein, 406 aa, unidentified
MMNAVGIDVSKRKSTVTIRRPGDEVILDPFDIPHTRSSIDNLVSLINSLDGETRVCMECTGHYYEPVASRLSDAGIFVSTVNPLLISMFGNDSLHAVKTDKADSVKIADFALARWSKLPQYGHMDEIRNQLKTMNRQFGFYTDRKTAMKNNLIALLDQSYPGANSFFDSHARDDGHQKWVDFVYTYWHVDRVRGMSLNAFTKDYQKWCKRAGYNFSPGKAEEVYDASADLIAVFPKNDMTKMLIRQAVNALNAVSVAVETLRMKMNETAAALPEYPIVMGMRGVGPTLGPQLIAEIGDVTRFTKRGSLIAFAGVDPGKNDSGDHSQKSVPASKKGSPHLRKTLFQVMDSLIKTAPVGDPVYDFMDKKRSQGKPYYVYMTAGMNKFLRIYYGRVNEYLAQLEETEES

SEQ ID NO: 141411 - protein, 343 aa, unidentified
MKLIRVGVDLAKNVFQLHGVGRDERIVWRRRLARDRWLETLLEKLEPGCEIGMEACTGAHHWARQLQREGFTVRLIAPQFVKPYVKSNKNDATDAEAVCEAMARPSMRFVAVKTLEQQDIQAVHRIRSGLIEQRTAKANQIRGLVAEYGLVAPRELGQLRIALPRWLENAENGLSSRFRRLLSGLWDDLKVLDDRVCELDREIAAIARNDPTAKRLQRLRGVGPIIASALVAAVGDARQFANGRQMAASLGLTPKQHSSGGKERLLGISKRGDRYLRSVLIHGARAVIRTAKGKSDRLSMWITSLAARRHPNVVAVALANKTARIAWAMLRNGTDYQPELMRG

SEQ ID NO: 141412 - protein, 400 aa, unidentified
MNTTPPCIAIDVSKGGTHVFVYSEYRTPYSKVFKIKHDRYGFNILKELYESVLKETDYKPVFIYEATGIYHRPLRNFIEFNNYDFIEVSPLLSAKHRKNSAIRSAKTDARDTHALARLFYDVDFDLNTVTDEKYYELQQINRYYSSLEPIFVKFKVHFNEKLDILFPNFRNEVDNNIYTNYYLEILKACPHPKLLAKRRIDWIENMLIENGIQISRAKSKAKQIKDYCNNCWPGSSEYSIDTEIFKTYIQEIQKYTYLRNLALKKMINLCEDIPLYHQLLSFPGISNNLSCRIVSELGNLDNYQNHKQLLAYADLDPVINQSGRLDGKGLSISKKGNKHLRKLLYLAISISVHTRYDHSIKRHFQKKRQRSTTKSAYVASCDKLLRIIFKINQTGELYNF

SEQ ID NO: 141413 - protein, 354 aa, unidentified
MLIIGCDYHPAFQQIAFVDTDTGDCGERRLQHREEAEKFYRDLAAQGMKVRVGMEASGHARWFERLLAELQFELWIGDAAEIRTKRVRKQKTDRQDAQLILKLMLKDDFPQIWVPSWENRDLRQLLWHRHRMVQARTRIMNQLQAVALNEGLRCKKRLWREAGREQLEAFRLAPWASRRRRDLLELLDRLNPTITDLTQTIEQEAEKCPEAQRLMTHPGVGSLTALAFVLIIGTAERFQCGKQIASYLGLVPLEESSGNRRRLGHITKQGNALLRFLLVEAAQVSVRSIPEWRNKYFHLMMRRGRKIAKVAMARRLAVQMFWMWRQGWDYEQVRKFGSHVGQPGNRDGVHSNTE

SEQ ID NO: 141414 - protein, 318 aa, unidentified
MTIFVGLDLHRAQITYDALDADTGEVRAGRIRPANRGTVAAFLARTRGADQEVVVAVEAMTGWRFFAEECARAGVEVHLAEPAETRERQDRKRRAKTDKLDARLLRELLMQKRLPESWIAPPHILDLRAKVRRRKTLVDQRTQWLQRIHAVLFHHGVAVHAGQLGRLCAEQAREQLAGLDLPGSAVQQNTVALGIIEHLNGEVAGLDRELERFARRQPGCRALMAHYGIGPCVSTAILAELGDTRRMSSSRQAVRCAGLDVTVHQSDARSRGGHLSRQGSPVLRWAAFEARRAPPARARPTTSTTWSSKTASERTVRR

SEQ ID NO: 141415 - protein, 391 aa, unidentified
MIYIGIDVAKDKHDCFITNSDGEILFNPFTISNNREGFETLFQRIKSVAEDFSKIKVGLEATGHYSYNLLGFLLDKGLPTYVINPLHTNLYRKSLSLRKTKTDKVDSRTIATMMMSDVNLKSYSDTSYHNEELKSLTRYRFDKVKERAQLKQSVSRLVTILFPELEKLVPTLHMASVYALLSEFPSACAIASAHLTRLTNLLSEASKGRYNKDVAIILREAARSSIGSHMPAKSLELKHTIKLIHELNNEIDEIEAEIKTIMDEINSPILSIPGINYRMGAMIIAEIGDFSRFDSPDKILAYAGMSPSTYQSGQLDNCYSRMEKRGSRYLRYALYNATKYVCHWDENFGAYLAKKKAEGKHYNVALSHATKKLVRLIYQLEKSGQSYIKSS

SEQ ID NO: 141416 - protein, 417 aa, unidentified
MSKIIERCAGIDIGKRFLMCCVVTGSADEESHGQTLRFDTTVPALERMREWLSRERVTHVVMESTGSYWVPVFNILEEHFTVVLANPEEVKNRKGHKTDHNDAKHLADLLRHDHIRPSYIPPKATRELRDLTRRRVQLMEDSTRERNRVQKLLEHANVKIAGVLSDVFGVSGQRMLVALLEGESTPDQIAELARGQAKRKIPQLTEALVGHRMTEHGRFLIRSCLRHLACLEEELEELDAEIVRRVGMPPFQNAFALMQTLPGVGELSAAAILAETGTDMASFPTAEQMASWAGLCPGNRESAGIRKGSQTTHGNKYLRTALVQCAWSASRRQGSMFETQFRLLIKRLGPKRAIVAVAHHMLIIIYCMLRAGVPFRGAEALPHQRRRQRRAHHHLRCLRRLGVTVQVLSDDLSGQIP

SEQ ID NO: 141417 - protein, 390 aa, unidentified
MAPGDKIIRRPFDVKHTKEELQPLVDEIRVQAKYDEIKVVMESTGVYHLSIAYFLQQNGIFVSVVNALKVANFNKAENFRHTKTDSIDSTNIARYGIAYWAKLPQFDLNGDKYFLLKRLCDAYLNFSEERSRILLQLQSQLEQTMPGIFDLFGGFDINSGKDKLLDFLEKYCHIEDIIAKSEAEFVASYREWAKEKGYRSNESKAATIYAQAKNGIPSIPNNPIVRETIMWYVKLLRRADEALMASLTRMEDIAKDLPEYELVGEMGGVGRVTRVALIAQIGDVRRFKNKHSLICFAGLTPSIHESGKFRASQNHIVKKGPARLRKVLYQVMMSLVMHKIPKDDAVYRFIKKKEAEGKYKKVAKVAGMAKFLRIYYGRVMHLYRDLGLAA

SEQ ID NO: 141418 - protein, 326 aa, unidentified
MQGKESPVKGAETEVYAGIDVCKAWLDVHIHPAGQDFRVANTGKGIKRLGKQLAAAKVHAVVMEATGKYHRDAHKALCAKDFAVAVVNPLRARLFAEAGGMLAKTDRLDARCLALMGAKLKPEATPPMPERLELLQELMRTRQSVVDSTTACRNRLGEAKAAFVRKLIERQIEQLEAACAKLEAEIKDRIADDPVLARRYQIALSIPGVGPVAAWWLIARLPELGSCNAKQAAMMAGLAPLACDSGQKKGVRKIRSGRADLRRGIYMAALAATRCNPPLRAFYQRLTSAAKGHRLALTGVMRKLVVLANTLLCQNRLWLPSAPENA

SEQ ID NO: 141419 - protein, 307 aa, unidentified
MFVGIDVSKDRLDVHLRPSAERFAVARDGGGLEQLVARLVAAGPALVVLEATGGFEITVAAALAAAGLPLAVVNPAQIRAFARAIGRLAKTDRLDAELIARFAEQVRPEPRPVLDQQAQVLAELVARRRQIVEMIGMESNRRRQARSAKVVRGIERTLAALQAALAELDQEIDGQVRGSPAWRAAEDLLTSVPGIGKITARTLIAELPELGRLDRRRIAALVGVAPVNRDSGAWRGHRAIAGGRSAVRKVLYMAALTATSWNPAIRTLYRRLRARGRPAKAALVAAMRKLLTILNAIMRDRRPWQSP

SEQ ID NO: 141420 - protein, 427 aa, unidentified
MKKRIKIDHLSTLCVGLDIGSRNNFITALDFDSNLLINMQLVPNAVSGVEAMESMILEVLEANSQFKYLLIAMESTSFYGVHVANYLSTSDRLKPYSAKVFCLNPKEVANYKKSFTGLGKNDGLDSFIVADYIRVGRIDISPWRGAQYLALQRLTRQRRHVTEAISREKNYVLNNIFLKFSEFALLTGEESPLSNKFSATAEAILTEYKTTEDIANAPLEELVEFVASSGRGRFSDPDQVAQLLQKAARDSYRLDKALYEPITTSIACSFNCIRAFEKEKKALDKAIAETVEGLNPTEYQILKSIPGIGPVYAAGILAEMGSIRCFSNNNALAKYSGIVWRDNQSGEFDSEETPMMKAGNTYLRYYLIQAAGSVASYCPEYMAYYEKKYAEVPKHQHKRALALTARKLIRLIFGLLDNNQLYSAARG

SEQ ID NO: 141421 - protein, 387 aa, unidentified
MQAPHTSTPIADDIGTIFVAIELSQKTWLVTLHSPDRDRMSRHRLEGGDHAGLLALIDRVRARAARALGGAPAVVSCYEAGYDGFWLHRLLTAAGIRNYVFDPASIAVERRGRRAKTDRIDGEQLLRTLMAYCRGEPRVVRIARAPAAEEEDARRDSRERERLITEQTAHTNRIKALLRLLGMAVGNPRRHDWLEWLSAQRDWEGQKVPPRLMTELAREHARLMLVVRQLAVLERAAAEQPPIVGAAAVMTERRDLLLRLKSLGPTFATTLVNEVFYKDFRNRREVAGYLGLAPSPWQSGGTDHEQGISKAGNRRGRHKAIELAWLWLRHQPDSALANWFQRRTAQASKRHKRIAIVALARKLMVALWRYLTTGLVPAGAKLKAAAA

SEQ ID NO: 141422 - protein, 382 aa, unidentified
MSQTASRWDSTSWGSGLFMALELGWSKWRLAFGSAMDQKAWQMTIAARDVMALTRAIGKARQRLGLPSDCPVFSCYEAGRDGFWIHRLLLKMQIHNIVVDSSSIEVARRARRAKTDRLDAAKLLSMLQRHHAGEKKLWSIVHVPTPEQEDGRHLQRQIRTLKKEQTRQLNRIRGLLANQGVAVRANRGGLLEPLDSIRIWDGSPLPVGLRRRLEVEIARHAFIHRQLLDLELERDARIRQSQDRAAQIARHLMRLRGIAQVGAETYSREFSWRGFTNRRQVGSLIGLTPTPHQSGDSSREQGISHAGNRHMRGIAIDLAWLWLRQQPHSELTLWFNRRFAHASPRLRKIGIVALARKLTIALWRYADFAEIPKGALLKSKAI

SEQ ID NO: 141423 - protein, 377 aa, unidentified
MKKELYLGLDVHKDCIATAVAEEGRKGEVRDTGVISNDLHAVEKWIARLRKAHGKDTHLRACYEAGPCGFGLARRLRQLGVECEVVAPSMTPRRSGDRVKTDKRDARKLARLLRAGELTPVYIPEATDEAIRDLCRARTDGVDDRRRSRHRLKGFLLRHGYRYQGKSTWSAAHERYLRELVLPHPAMKVILEEYLQGIAAAGERIERCEAGMSALLEKWRLAPAVRALMAMKGFQTVAAMILVSELGEVHRFDHPRQVMAYLGLVPTENTSSDNRRQGRITKCGNAHARWLLVECAQHYAAPPKVSHQLSRRQQGQPDEVRAISWRAQHRLHSRYTRLLGRRLQHNKAIVAIVRELCSFVWELLRTQSCYHVPATSA

SEQ ID NO: 141424 - protein, 331 aa, unidentified
MDPAVVIGIDVSKAELVIAAHPVAETWTSETTPAAIDTLVARLRDTRPQLIVMEATAGYELPLAAACAAAQLPVAIVNPRQVRAFAQAIGRTAKTDAIDAAVLALFGARVQPAPRAVADAATRALAGLITRRRQLLEMLGAERRRLEQAPPTGPITRDLRTHIRWLERRLGDVDDEIGTAIHQSPVWRVQEDLLRSVPGIGPTTARTLLAELPELGRLDRRAIAALVGVAPFNCDSGQFRGQRRIWGGRASVRASLYMAALVAARHNPVLAPFYRRLRQAGKRAKVALVAVMRRLLTILNAMLKHQSRWNPKVASTPASPSGPARAATVVV

SEQ ID NO: 141425 - protein, 407 aa, unidentified
MNTAVGIDVSKGKSVVAAMRPFGEVALPPREFLHTSEGLLALSEALRLIDGNTRVILEATGRYHEPVVMALREAGIFVSVVNPKLIKDFGNNSLRKVKTDKADAVKIARYGLEYWEEMREFTEVDTTRQQLKLFSRQYNLHMKTVVSLQNNLISLLDSVFPGINELFTSPVRDDGHQKWVDFVCTFYHRDCVSAGSAAAFSERYHKWCKRKGYNFSTAKAAELYAASCEMVVTMPKNPLTKTLITTAAEQLIAATTMLATLKAEFIRLAASLPEYEVVRSMYGVGDVTGAQLMAEIGDVRRFQSRGALIAFAGVDPGVDESGKHSTQSVRTTKRGSPHLRKTLFQIVSAHLKQAPPDEPVYQFLDRKRAEGKPYLVYMTAAANKFLRIYHARVREYLNALEQVDSNT

SEQ ID NO: 141426 - protein, 338 aa, unidentified
MKVYAGIDLHSSNNYIGIIDEQDHRLYQKRLPNNLENILMALEPFKESLEGVVVESTYNWYWMVDGLQEDGYKVHLANPSAIKQYEGLKHTDDKWDSFWLAHMKRLNILPEGYIYPKEERSVRDALRRRLLYVRHRTSHILSLQSAITRNLGYKMSGRDIKRLNESDADKLFNEPFLILSATNSISTVHFLGKKIKEIEKAVKSHVHLKPEFKCLLTMPGIGDILGLTIMLEAGDMSRFPNVGKYSSYCRCVKSERFSNKKKKGEGNRKNGNKYLSWAYVEAANFAVRHYPEAQSFYNRKKAKRNGVVAIKALSNKLARASYYVMRDKVPYDASKLFR

SEQ ID NO: 141427 - protein, 362 aa, unidentified
MSKLYIGLDVHSKTTQYAVQSEDGSMVAQGQIPTTPEGFRQLRERCGVEPGTRVGMETGTMASYVARELQQQGLTPVVVSAYEVRAKAYRPLQKSDRRDAFEICDGLRRDQYRAIVHVPPMPIQRLRETLARRRHFVRIQSAEVAAAKHLLRASGRRHLSWQMRFESGWQKLLERVDDARLVSEIEFHHRVWRAAGEQVEALDASLVEQSKAFQADFELLQTVPGVGPVVALTVIASLSDARRFPSAKHVASYAGLVPSTDQSSDRDWHGHITKQGSMELRAMLCEAAHHACRKEHPLNPYLSSLCARRGYKMAVVSVAHRLCRILYAMLRDQTPFEITKLGIEVGPFEKKIVRPYRLKSRM

SEQ ID NO: 141428 - protein, 344 aa, unidentified
MQITTIGIDLAKNVFQIHGADQHGKAVLRKQFRRDQVAPFFANLQPCLIGIEACSSAHHWARKLQALGHTVRLMAPQFVKPYVKSNKNDVADAEAICEAVGRPTMRFVPIKNAEQQSVLSLHRVRQAFVKARTAQANQIRGLLAEYGMVVPKGIGFIASRVPDLIEDANNELPGRFRQLVDRLLEHLKLLDKQVNEIEAQIKAWHRDDETSQKLQKVPGIGPITASALAATVGDAKNFDNGRQLAAWLGLVPRQNSSGGKQTLLGMSKRGDAYLRTLLIHGARSVLYRASQKNDPESWLVKLTTRRNANIAAVALANKTARIVWALLAHDREFRPDYAAAAAAA

SEQ ID NO: 141429 - protein, 316 aa, unidentified
MTTTPVFVGIDVSKDRLDVALRPTSDRWALAHDAPGLATLVARLQGLAPTLIVLEATGGLAVPLTGALAAAGLPVVVVNPRQVRDFAKATGQLAKTDALDAAVLAQFAEAVRPALRPLPDAATQALSALLARRRQLIEMLTAEKNRLGSALPPVRKGIRAHIRWLDRRLAALDADLAQAIRESPVWREKDDLLQSAPGVGPVLATTLLASLPELGTLTRQQIAALVGVAPLNRDSGAWRGKRRVWGGRAHVRAALYMSALVATRFNPVLRAFYQRLCAAGKAKKVALTACMRKLLTILNAMLKSRTRWHDHAALSA

SEQ ID NO: 141430 - protein, 369 aa, unidentified
MQRKEISFKGQKVFIGIDVHKDSWRVAIAPEVGVVKGHSQKPSAQELLDFLKKYYPDGEYHAVYESGFSGFSTYYALQDVGIDCIIIHAADVPTTQYEETMKTDKVDAAKLVRSLKSGLLTGIYIHKRDDIDARSVVRLRKTVQKQLGSYKSRIKHLLHSNGVTFPERFSTPGSHWSKVFIRWLKEEVALLSATRISLDLLIVQVEAIRKTLLMATRNVRELSRSERYRHGCELLTSIPGVGVNVAMTLLTEIGDINRFHNEKEFASYLGLVPTSHSSGGKVAHGEKTFRGNKYLGPQIVEASWVSIYRDRDLGCAYLNYKKRMKPQEAIVRVARKLSNIIFSVLKTGQKYKPYEWDEQQKHTDLQATS

SEQ ID NO: 141431 - protein, 414 aa, unidentified
MNVLHANCAGLDVHKDTVVACWRCMAPGAAVVEEIATFGTSTSELLRLGDWLTERGATTAAMESTGVYWKPVWHLLEDRLALMLVNAQHIKQVPGRKTDVRDCQWMAHLLSVGLLSPSFVPPAPIRELRDLTRLRAQCTSDRARLANRLQKVLEDANLKLASVASDPLGKSGQAILDALIAGQTDPEQLADLALGHLKRKRGALAEALRGRVTDHHRFMLAFELRRWREAGEDVARLDERIEAAMAPFARQAAKLEKVTGLAKRSVQVVIAEVGVDMRQFFDDAHLASWAGACPGNHESAGKRRSGRTGHGNRWLMAVLNQAAWAAGRSQGTYLGERFRHWLRRRGGKKAAVAMSHLLLRIIWHLLADAELEFEERGAQAFLAADAERLRRSLVARLERLGLEVSVAPREAVAA

SEQ ID NO: 141432 - protein, 349 aa, unidentified
MDRTTYGLDIAKNVMQLHWVEAHTGEIGRKKLARAKLGEYFAQRLPVRVVMEACGSAHHWARVLGKLGHQVELLPAAQVRPFVRSNKDDAADARAIWLAAQHGDIRRVPLKSVEQQAVLALHRTRSHWVSVRTATVNALRGLLYEFGVVLRGGRQAGLKALAEQRAQIDEQLPQIMRTLVDGQLHTLQQVQQRIDQLEHELAAQQKQLKKADELRRVPGIGVLGATALAATLGDGKAWRSAREFSASLGLVPAHSGTGGKVRMGHISKRGDPYLRTLLIHGARSVIEHAKAKPQWLQQMLARRPPNVVVVALANKMARTAWALVAHGRAYQRDWQSAKPRSGAAQAVAA

SEQ ID NO: 141433 - protein, 422 aa, unidentified
MQNESTPGARGPVFCGVDTHADSHWLCVLDWRGRKVLSRRFPAGAAGYEALAGAIAAAGEPACVAMEGTSSYGAGLTRHLASLGMPVREALSPARMQRRRPGQGKCDEADAERAARAAMSGSKLGTPKSQDGWVDGVRCMLAARSGAVKARTSAINTARSLLTTAPEGLRSRFRGMAGPRLMEELPSVRAEGALADLWAAARDAALDMERAIEASLEENCPALLAMYGCGPVSAAKLAVAAGDNPGRLRSEASFAAICGACPIPASSGKTVRHRLNRGGDRQANSALHEIARQRVMRDPETAEYAERARARGKSDREVMRCLKRYVAREAYRALMRPHEIRRPEDASELVAARRAARVSQVRAASILGTSEKYISMLERGQRELKPIRRAYEAWVEAGLPLDWDRRAFEAERKMDSKKHLAK

SEQ ID NO: 141434 - protein, 372 aa, unidentified
MRFAGIDIGSERHVVAIVDQSGAVVLKATSIMEDATGYKRLLELLGNASDCLVAMEATGHYWRNLFAALVTAGFKIALINPLRSSRFAEEELQRTKTDAIDALGIARFAAQKRPEITQLPALQELRELVRLKEQLVQQFGDRVRQLHRAVDLGFPEFTRHIRTLDSELATAVLGRYPTAAALRTVSVRRLARLCYDGSHYVGEELARALLEAARQSVGAHHGEPYQLQVRYACEDLDVLRRRLRSLDSDIERRLAQHEVGKLLTTIEGIGPQTAARIIAEVGDPARFHSARALASYVGVIPRVHQSGKRKFSSSAKVPLGERPTAARVVDAGDYRHSSQPLVACLLPTSPSRWQAPQGRAGRHHPQTDDRSL

SEQ ID NO: 141435 - protein, 338 aa, unidentified
MKLYAGIDLHSNNNYLAIIDEHSQKVFGKKLKNSLPLLLAILEPYKKDLLGIVVESTYNWYWLVDGLQEHGYKVHLANPSAIKQYEGLKYTDDKWDSLWLAHLLRLGILAEGYIYPKEMRPMRDMLRRRMLFVKHRTADILSFQSMVTRTTSNQISGNDIKKLKESDAEQIFTDPDLIFTAKRYINIIELLSVQIKMIEKQVKDRLKLSENFKCLLTIPGIGNILGMVIMLEAGDIARFKKVGNYSSYCRCVRSERLSNGKKKGSGNSKNGNRYLSWAYVEAATYATRFSDPAQKFYQRKLAKSNKVIAKKALSAKLARASYYMIRDQVPFDSDLLFA

SEQ ID NO: 141436 - protein, 370 aa, unidentified
MNNATTFVGLDVHARSIKACAFVPATGEVERKSFGYEPGEVASWMQSLAQPAKCVYESGVTGFHLCRELRAMGADCVIGAVSKMHRPAADRGRKTDRRDAHFLAVQLALGVVAEAHVPDPECEGARDLTRALADARDDAVRAKQRLSKFLLRHGYVYDERNAAGQRKGRWTRDFWAWVGRIDLGDASAMATLDHYCECVHRADAEKAALEAKVKSLAQAPRWKPACDALRCLKGVDAVTAASIACEADGFSRFAKASGFAAWVGLVPSEHSSGESQCRGGITKAGNKHLRRLLVEAAWHYKSASRAPKELAKGQSVPPDARRHANAGARRLVDRRRAMDAAGKQSSVANVAIARELACWCWAVGRMAEEA

SEQ ID NO: 141437 - protein, 325 aa, unidentified
MAVIGIDVSKQKLDCAWLRDVATGKVKTRVFANRRQDFPHLLEWLEHQTGEPRDRLHILMEATGIYHETLAYWLHAAGIQVYVLNPAQVRDFSRSLGVRGKTDKKDSVVLARYGATQQPGRWQPEPEEVRKLKALAARLDALDKDICRERNRREKAEFAMATDILRSIDDILLALTRERDRLQQQIDDHLDQHPGLKQDRDLLQTIPGVGPAVSLRLLAMLRSRAFESARQAAAFAGLVPVSWESGSSVRGRPRLSKAGNPKLRQSLYMAAVVGLNRNPDISALYQRLTGNGKSKMAALGAAMRKLIHIAYGVLKTQTAYRPQTT

SEQ ID NO: 141438 - protein, 343 aa, unidentified
MQVVTTVGLDIAKSVFQVHGVDAAGQVVIRRQLKRRYVLAFFEKLPACLVGIEACASSHHWSRELKTLGHTVRLMPPAYVKPYVKRQKNDTADAEAICEAVTRANMRFVATKTPVQQSCLTLHRTRHLFIRQQTAVINVIRAHLAEFGIVAPVGRKGIETLLDVVANPTDKRVPVIARACLAALGAQLRRLKEQILEFDRMIMAWHRSNEASKRLDAIPGVGPVLATALVASIADPKAFRSGRNFSAWIGLVPKQHSSGGKDRLGNISKQDDRYLRSLFMAGALAVIRYAKIHGTTHRPWLTALLARRPTKVAAIALANKMARMVWAMMTRGERYKDPIALAA

SEQ ID NO: 141439 - protein, 310 aa, unidentified
MTIAHRLIGIDVCKAHLDTHDDVTGKSERIANTAAAIAAALARWPQAGLRVIFEATGSYDRCLRAALEAANVAYVRVNPARARDFARATSALAKTDTIDARLLAAMGRALALTPSQAADPVRERLTGLQRRRDQLVATRADDKKRLAIAEDEEVRASITAHIAWIDAEICRLQAVIDRLVAGSAELAGLRKQLQTAPGVGPVTALTLIALLPELGQRSGKTIAALAGLAPFNNDSGAFRGQRHIKGGRGRVRRALYMAALAAIRKVPRLAAHYRNVAARSGHAKVAIIAVARKLLVALNAMVKRGEPFRL

SEQ ID NO: 141440 - protein, 338 aa, unidentified
MNKKFYVGIDVSKKTLDVAFISQLGEEKIAPRWKVFDNTDVGLHQLKNWLSKEAVGFDANTLIVIENTGLYHRRLVSFCNKNNLQLCIENGAQVKWSLGIARGKSDKVDSRRLSTYALRFSDRLKPAAALHEGIQAVKDLITLRNRHITQLSALRSNLKELKLTTDLKAVKELEKIHKPLITATKNTILKIEAALLKRIQGNALMARQYELLLSIPCIGPVTAAYLIACTNAFTLCESGKQLACYCGVVPFEYQSGISIKGKHRVHKMANKNLKALLHLCAVSSLRYVKELRAYYDRKVEEGKHKMSVINAIRNKLVLRAFAVVKNGKPFVNNCIQAA

SEQ ID NO: 141441 - protein, 343 aa, unidentified
MIYVGVDLHLRFCYMTVLDANGKVLRQGRVQNTDSQLQQFFADVKNSLSENEGIAVAVEACGFWCAFVDCVEPLVERVMLVHPAKVKAIAHAKLKNDRVDSATLAQLLRANLLPEAWKADRTTRDLREVLRMRVALGQDRTRYKNQIHAVLHLHGQQTAVSDLFGRQGRAWLKALVVRPAARQAIDTSLRMIDQLDGELRVLDRQLQKSAQQDADARCLLSIPGIGAFSAMVLKAEIGDIRRFRDKKSLYNYAGLVPVIRQSADHLRRGGITRSGSPLLRWVMSEAAVTATRHSPAARAWFTRLAQRKHPHVARTALARKLLGAVWALWTQGVCFDERIFAAM

SEQ ID NO: 141442 - protein, 387 aa, unidentified
MTKNKGRVVGLDVHPDSFAGAVVQGRDPASAMVLRTSTRVELERLEEWARRHTCTEDTLVLEASGNAFAVAARLRAIDRKVEILDSHHAGKVGKVYCANDRVDAVKIARIYLSALSPIVWQPDQKTLERREIFSAYQAVVKESTRAKQQLRSMLNEHCVRLEKGFRLCHPQAIARLLKLREWTPARRMLLQQLHGSLVAARARRTLLRRHMAQEIVAEEALLRLTRLCGINLITLYGVVAAVGDVRRFTQSKKLVAYLGLNPSVSQSGNFQGSGALKRHGRGALRALLIQSGKKLLEVNNPLQKWGLAVAARRGRNKAAVAVARKLCVALWHVMMGHAIGTLERLDTLQTKLSKFATEIGPAALIAFGYHNKADFVEKKLYVLRSYP

SEQ ID NO: 141443 - protein, 340 aa, unidentified
MKDTVIGVDLAKNIFQVHGASRAGEVMFRKKLRRQQFMQFMATQPPALVVLEACGSAHYWARELAGAGHEVRLIAPQYVKPFVKRQKNDAADAEAIVIAARQPEMRFVEPRTEAQQARGVLFRARQRLVHQRTELVNALRAVLYEFGLVVPQGIAHIRHIEAMLDEAVLPEAVKQECLDLLRQISEQSVRIDVRTKKIRMLAQESENTCRLQSMPGVGPLTALAIEAFAPDLQSFRRGRDFAAWLGLVPRQFSSGGKERLGKISKAGQADIRRLLIMGAMTQVNWASRKAPAPGSWLARMLARKPRMLVAIALANRMARAIWAMATKQEDYRDPALSVAA

SEQ ID NO: 141444 - protein, 409 aa, unidentified
MSNDACTEVFVGLDWAVHTHAVCVIDAAGSVLDRFEVSHDRDGLAELMHRVGQHGQRLRIAIERPSGLIVDALVEAGHEVFPIHPNAVKASRPRYRSHGAKSDASDAYLLADLLRTDGHRWRALAPQSDNIRALRALVRSRDDLVAARVAAANQLTSTLQAFWAGAAVIFADVASPIALAFLRRYPSPSSAKRLTESQLQRFCKAQHYSGRRSAADLLGRLRAAANGCVGAQTEKALAEVVRVQVRVLVPMVRQIAELTHCIEQLMRSLPDGLLMMSFPRAGEVCAAQILAELGDVRERFLSADQLAAEAGTVPVTYQSGKTRSVAFRWACNHRLRQAITCLADNSRHANDWAAALYRAARGRGCDHPHAIRILARAWLRVIWRAWTDRKPYDPALHASAVALASVQGG

SEQ ID NO: 141445 - protein, 415 aa, unidentified
MTDQKHWYAGVDWASESHLVFLTDAEGHKIGEKEFKHSGDGLAEMAAWLMATSGAPEAGQILVAIEVPHGPVVETLMERGFKVHAINPKQMDRFRDRFTMAGAKDDSRDSEVMASALRTDAHCLRELAPADPTVIELREWSRIAEDLGTERTRLTNRVREQLWRYFPAVLELDNDLAAEWLLDLLQLVPTPDKAARIRETAITKLLKRHRIRRFDAVHVLKVLRASPLRLAAGTTAAASAHLATLIARIRPVNQQLKQALRQIDVLIARLAPSEEAEPGQRKQHDVEILASLAGVGRIVLATLLAEGFDPLQRRDYPALRCLTGVAPVTRRSGKSRLVVRRYACNQRLANAVYHWARVAVQHDPTSRAKYAALRSRGHNHARALRSVADRLLNVACAMLRAGTTFNPSLVGQKAA

SEQ ID NO: 141446 - protein, 316 aa, unidentified
MVPSPLFVGIDVAKATLDIAVRPTAETWSVSNDATGIDALVLRLGAWAPTLIVLEATGGYQGPLVAALVAAALPVVVVNPRHIRAFAQAVGILAKTDRIDARVIAHFAEAVKPAPRPLPDAETQELRALLVRRRQLVEMVSAERARLDTVPPRIQDAIQAHIAWLTTQVAGLDDALTRAGQTHPVWQAKDDVLQSIPGVGPVLARTMLGQVPELGTLGPKPLAALIGVAPFNRDSGTLRGRRTVYGGRAEVRAVLYMGALVATRHNPVIKTFYERLLAAGKAKKVALTACMHKLLTIMNAMVRDLKPWQPQEVPSA

SEQ ID NO: 141447 - protein, 346 aa, unidentified
MTEISTVGMDIAKLIFQVEGRDASGAVVLRRRLRRNGVLKFFIKLPRCVVALEACATAHYWAREISAAGHDVRLIPPTSVKRFVKRGKKNDQVDAAACCQAVASKDIDVVPIKTLEQQAVVMMHGVRQQLVEGATALSNAIRGHLAEIGIIARKGAAGFNALVELVARPESGPPELALIRPILAPLVAQWRTTGEQIKAIERQIDRWHKANRDSRLLDTIPQYGPIVASAFVAKVSDPTRFARGRQCAAWLGAVPSQHSTGGKTCLGPITKAGDRYLRTLLVIAGAGLVRRVKADPSLSPWIAGLLRRMPAKKVAVAVANKLARIGWAVLVSGKPYDAAMSNLTAA

SEQ ID NO: 141448 - protein, 337 aa, unidentified
MTQVHILAIDLAKRSFQVCGTDRGGAVLFNRVLSRARLLQLLNEQSPCIVAMEACATSHFWGRFAQGCGHDVRLIPPIYVKPFVKRQKNDAADAAAIAEAAQRPNMHYVEVKSAEHQARAVAFRTHQCFVRQRTQLINALRGHLGEFGIIVAQGPANLTAVVGILADEANDLPAGVREIGQLYLDQIRLLTEKIDGLMLKLREATKANKDMRRLCTVPGVGPVTAGAILAFAPDLRAFRSGRNFAAWLGLVPRQHSTGGKTRLGGVSKMGQTDIRKLLIVGAMSLIRWIVRKGVLPDNWLGGVLGRKPRMVAAVALANKMARIIWAMMTREQNYRMA

SEQ ID NO: 141449 - protein, 341 aa, unidentified
MKFVGADLHKKSITFCVVELDGRATKVVARKRILCNQVKQIAQFLRSLGPFQVTVEATIGYDWFAALAEKYAERVVIAHAGKLRVIAESTRKTDKIDARILADFLAYDMIPAAWRATPRVRQHRSLVRRRNKLQSRVTSIKNTMRGILTRYNADRRDLFSQVGWQATKKLDLLEEERWILEDLREDLDAAIARRKRVEDRLVRFASHATIKEREARAVLATMPGIGVVTSETVLAELGDWERFRSADAVVAFAGLDPGVRESDGRRKGLRLSKSGSPLLRHVLIELAHRVKRKSPRWNSSFERLTRRIGNKKATCAIARRLLLVIYAMLRDGKAYQLPAAA

SEQ ID NO: 141450 - protein, 456 aa, unidentified
MRKPQVIPDEDHVVVYERVAAVDVAKASGVACMRTPDPARPGRFRNQVWHDVTATRARITELGQELLRNNVQMVTLESTSDYWRIWYYVLEGIGLAVQLVSASQAKNLKGRPKTDKLDAMWLARLTQQGMLRPSFVPPAAIRALRDFTRARLDLVRERTRCMQRLEKLLEDAMVKITSVASDGLKAKSVVAMVQALIAGERDPVKIADLAKGPLRAKRAQLVEALDGMFDSHHGVIAQSLLDQVAFLDQRITQMEDGAMEALARIPESWGVDATGETGPQAGKTPDSPVLAAAWRLAEVPGISLMLAIAIIAEIGLDMTRFRTADHLVSWTGLCRAASQSGTRQGKGKQKKGNSYARCLAGQAAIGVSGTSTFLGERFRRLARRRGGAIAQVAVARSIMIIVWHLLSDPQARYHDLGADWHERRIDKEKKIRNLIRQLKALGITFPVTGNPEEAAA

SEQ ID NO: 141451 - protein, 332 aa, unidentified
MTYVGIDVSKATFVVAYSSQKSSKTKSFKNTTKGIHQFIKTISKDEHHCVLEATGNYSALLVYLLSKAGFSVSLENPLKVKNFSRAMLSVTKTDEADAYLIALYGERMQPAPYKMRSDLILILKQKRTVIRQLKKQLVATHNLKQSMEALPHFDSKCKRSLEKIIAYLEKQIKSLEEDLANLAHDEFKKQMNLLTSIKGIGTTLAVALIVTTGGFTYFDNAKQLTRYLGLSPTYQQSGTSVNVRGHINHNGDPNLRGQLYLAAMSSIRCNTECKACFERLKANGRPGKVAIIAVANKLIRQAFAVVTKEKTYVDGFISTKNKLVQSECYTVV

SEQ ID NO: 141452 - protein, 353 aa, unidentified
MGIVVALDVHRKQITYKTLDRGSGELRRGRIAPASRADVRAWLAQFAGCQAEFALEGTTGWRFVVEEIERAGHTAHLADPAETSARRGRKRRAKTDNTDCDLQLRLLLAGELPESWIPPAHICELRTRVRMRKTLIDQRTAWQQRIQAQLFQQGVPAGQRLRSQAGREALAAVELSPAGRELVVLGLRMIDALDRELAPLDRQLHAFARRQRACRALIAGLYGVGPVSATAILAELGDARRFSSSDDAVRHSGLDVTVYQSDSKRAAGRLSHEGPELLRWALFEAAVSATRVSSPDHAYYLQVAERLDHTRACLSVARKLCRRAYHILRELGDEALAPVDCDPQAEEGIAAAA

SEQ ID NO: 141453 - protein, 389 aa, unidentified
MKKNSIARLQNVRKGKTKGKSHKAAKQRLTVGLDLGDRSSRYCIMNEAAEKVREDKLPTTQVGLEATFGKMAPCRIALEVGTHSPWVSRQLEAMGHEVIVANAHRVKLITQSLKKNDRIDAEQLARLARVDPKLLSPIHHRGPEVQADLAVVRARMGLVDARTELINTARGLAKPMGQRLKRCDADNVVESLADGLSEAAQGVIRPLLKSVEALSEQIHEYDRKIAAMEKRYGETSLLKQVYGVGTLTAVTFVLTIEDQKRFEHSRDVGPYVGLTRKQRNSGGSEPELGITKAGDRLLRRLLVQAGHCVLRAGSPDCDLKAWGMTKVEAGGKKGGKRRKKKAVVAVARKLAVLLHHLWVTGEVYDPHYNRKAAAAAKAKAEAKAKAKAA

SEQ ID NO: 141454 - protein, 349 aa, unidentified
MEYYAGIDVSLELSSVCIVDAKGKVMKETKVGSDPNSLIAFLRGLVMPIDRIGLEAGPLSQWLHAGLTKAGFETVLLETRHVKAALSAMTVKTDRKDARGIAQLLRMGWFRPVHCKSIGSQEVRALLVARKLLLGKLLDVEFSIRGILRGFGLKMGLVTRKSFEPRVRELCAGQTMLEKVCSAMLAARSALQAEYTRLHKEMLAIVRKDEVCRHLMTTPGVGPLVAITFKTGVDDPTRIGKSKAVGALFGLTPKKYQSGETDVTGGISRVGDTMVRTALYEAANILLSRVTRFSALKRWGMDLAKRRGTKRAKVALARKIGVILHRMWIDGTNFRWTREAPQAQQLARA

SEQ ID NO: 141455 - protein, 474 aa, unidentified
MGKGSGMTRGDRKRNARRERLRGLLPRGGAVIGIDLAEDKQALAVVDHDVRVLARKTVRVKAFRLGEALDWAVGQARVRGFAAVTVACEPTGPRWLQVQRLCAERGLPLVCVQPLVSHIAREQQDYTTHKTDESDCVMIARLAIELHCYIPEELDETWAHLRQLGRRRAQLIAAATASAQRIRDFLSVAWPVVTEACAYPLESTTWLAALQVVTSRCGGQPGRLAEMGPAAFTALVRDAQRGWGGQKAWGPICCRVFAALTDTEGVVVSCRRGLLRRVADELGDLQRTRAQLRAVEADMVIVLAELGLARLAGIPGLTAVGAAAILAETGDPRRYDGSSSLVKHAGLSPSENASGAFSGQAHISRRGRPGLRLAVWRAVWPMLRFNPVLAAKYAAMTGAAAAAADAAAAADTGSRQVSAAAAAVRARRAKARVACAASLLRWIYSMAVHDTSWDAAVASGDACQHAPRRPAEAA

SEQ ID NO: 141456 - protein, 318 aa, unidentified
MNKINVGIDISKKKFDVCMLCPDGKALNRVFKNDLEGFSDFFKFLDQKNAGTFRIAMEATGWYGEDLARFLYDKGHIILVINPAQIKYFGKSKLSRSKTDKKDSRLIADFAVTHPELRAWVPLTASREKLRSLYRHLSRLKEDHAQLLNRLESDRDEDVRKYSLAQLGFVKAQIRELQGKIRTHVESDPGLKAKAGLLLTIPGVGEMVCWGFLSEAPDLKNFHDARQLAAFAGLNPSVYESGTSVRGRGGISKTGSSALRKLLYLPGMAAMRFNPVIKAFSETLRAKGKNGKVIVIACMRKLLHIIYGVLSKEQPFNG

SEQ ID NO: 141457 - protein, 339 aa, unidentified
MTLYSGIDLHSNKLVIAIMDETRKRILKKKLVNDSEFVLATLEPYRKELVGIVVESTYNWCWLVDDLMEHEYRVHLANPSANEQYSGLKYRDDDHDAFWLADLLRLGTLKEGYIYPREDRPLRDLSRKRSHLVRVRTSLILSLKSLVARNFGISMNSSKIKDHSLDSLVSCMPQEENLILAVGTNKESIDFLGFQIDKIESSILKQVKGKSFYDKLLSLPGVGKVLGWTIQLETGPICRFPQVGNYASYCRKVASRWSSNDKSKGKGNAKNGNKYLAWAFSEAAEHARRHDGPSRTFYNRKLSQTNEAVAHNALAHKLARATYYIMRDNVPYDEKKLFG

SEQ ID NO: 141458 - protein, 381 aa, unidentified
MMTMTRTTESIAAPACLLLAFELSERTWKLGFTIGRGQRPRVRQIPAGALDRLADEIARAKVRFALPADAPVVSCYEAGREGFWVHRYLVAQGVRNAVVDSSSIEVNRRARRAKTDGLDLAGLLRLLERSVQGERGVWHVVRVPSVAEEDARHLHRQRETLQQERTRLINRLHGLLTTQGVTVPLHADFLDRLATVHRWDGTSLPPGLCQRLCYVWAQLGFLNAQLADVDAARAALATDPETATGRCVAQLQTLQGIGAIGAWTLTTEIFAWRQIRNGRELGALVGVVPAPYQSGTMSHDQGITRAGNRHVRRMIVQLAWSWLRYQPTSALSRWYRERFSHSRRLRRIGIVALARKLLIAWWRYLETGTVPDGALLKPRVV

SEQ ID NO: 141459 - protein, 420 aa, unidentified
MRNAGIHANSLLEVRRMYNAVGIDVSKGKSTVAVLQPGGTVIRKPFDVSHTSQNLNELADYLSSLDGTTKIVMECTGRYHEPMVKALSEAGLFVSIVNPHLIKNFGNNSLRKVKSDPADARKIARYTLDNWTELRQYSGMDNTRTQLKTLNSQFSFFMKQKVAAKANLIALLDNTYPGVNKLFDSPTREDGSEKWVDYAYSFWHADCVRKIGLKAFTERYKSFCKKHHYIFQQDKPEKLFNASKELVAVFPKEKTYKLLIQQSIQQLNLASEHVEQLRREMNELASTLPEYSTVMGIYGVGKTYGPQLIAEIGDVSRFTHREALTAFAGVDPGVDESGQHKSKSNRASKVGSARLRKTLFQIMTTLLQNAPEADPVYRFLDKKRSQGKPYYVYMTAGANKFLRIYYGKVKECLRNLEQTE

SEQ ID NO: 141460 - protein, 410 aa, unidentified
METIFERVAGLDVHKAQVTACVRVPTPGGGQEEHLAEFPTTVRGLVTLRDWLEAHGVTHVALEATGVYWQPVWHVLEDTCELFLVNARHVKQVPGRKTDVSDAAWLSRLMEAGLLRASFVPPKPQRALRLLTRYRKTQIQERAREANRLHKALEDTGIKLDCVASDILGASGRAMLDALCRGTTDPEVLAELARGRLRSKLPALKEALEGRFEPHHALIVGAILAHLDFLDEQIEGLSDAIEEALSPFAGALGLTGTIPGVARRTGEVLLAEIGTDMSRFPSAGHLASWAGRCPGNHQSAGKRRSGQSRHGPKWLGIALQEAALAATRTKGSYLQALYQRLRPRIGHGRALGAVKHSILVSYWHMFSTGETYRELGGDYYRRRDPERQTRRLVAQLEQLGHHVTLEVAAA

SEQ ID NO: 141461 - protein, 363 aa, unidentified
MSVQYVGMDVDKQKIVLARLGAGRDTRAVEQVIANTPSAIKKYFASMLGAAEVHATYEAGCFGFGLYRQLSAMGVTVVLAAPGLIPRKPADRVKTDRRDAHSLALALRAGQLTGIYVPTQQDESVRDYLRMYEAVRGDLRICKQRILQFLLRRSLSYGGGGPWTVKHRHWLSTLEFEQPRDRQTLDMYLSQMQELEAKCAEAASEVESIAAQDCYSQQTKKLTAFKGIKTLIALSFITDIGDFRRFANARQFMAYLGLVPSEHSSGNKRRQGGITKAGNSHLRRLLVEAAWHYRSYHPSSRDLTERRRGVEATVLSYANRAGRRLNRKYMHMLLRGKRSQVAVTAVSRELAGFLWGAMTGQVA

SEQ ID NO: 141462 - protein, 420 aa, unidentified
MDTFSRTDYVAYVGIDWADKKHDICIQKANSEEREFDVIPHQVDLIDEWAKSLNKRFGSPIAVAVELTRGPIVSALQKYDFFVIYPVNPSTLAKYREAFKPSRAKDDPTDAELALDLILCHPKHFKALKPQSVEIRTLTSLVEYRRTLVEERKRITNRLRNALKQYYPQVLEWFEDIDTFMFCDFLERWPTLTQAKKARKNTLKTFFSQHRMHRSQVLERRAAAIKAALPLTTDEAVIIPHRLQSLVFIEQLRVVLKAIKQFDDEIARLAAGHIDYDLFSSLPGAGPSLAPRLLVAFGEDRERYNNAEEMQKRAAVAPVTERSGNKHWVHWRWKCSTFLRQTFVEWAGQTINKSYWAGAYYRQQRAKGSHHQAAVRSLAYKWIRILYRCWQTRIPYDESIYLKALERRGSPLVKQMVKIA

SEQ ID NO: 141463 - protein, 428 aa, unidentified
MSDKKSVELRVSVDVGYRRHSVAIGLPSGEVLEEFEIAHRPEGFEEFFTRIEKHQKVRNCEVAVAMEGFNGCARPLDAMVRRRGYRLYNINNLKLARFKEIFPGAAKSDRIDARKGLELFQLSDHLPLAKEVLQEVKGTPRENEVLKRLTRRRRRLVDERVRVISNLQTDLQAVCPGLLEITKAAGNQWFLNFLISAATLPQLARLRPSTVLKVPAVGRKYASLIEDWQKRAHFSEEVEWVSEMIQEDAKRCLELDEKIKALKAKIKGVAKGSKIAKTLLSIPGFGTICTAELAGEIGTIERFSKEGSLALYLGMSSLDNSSGKYQGSKQPKHVNTRAKAAMMVALDRHRKYVPQSQRYYEKKRSEGKKHNQAIRALGRHLSRIIYKMLKEEREYEIRPEKGNTKTKVNPRSSFKTKLRRPKISANAK

SEQ ID NO: 141464 - protein, 385 aa, unidentified
MQTLNDLSQSRIVLKQDSTLIAVIEMSLSSWLVAGLVPGVERQPLKKLAVDESVLLKLLHRWGEEAEKTGRRIERIAVAFEAGRDGFWLARWLRARGIEAHVIHASSAAVSREHRRPKTDRLDTELLKRVFLGWLRGERDHCKMVTIPTIKDEDAKRPNRERECLVGEQTRIVNRMKAALSRLGIRGFNPKLKKAAARLEDLRTPEDEPIPPNTLAELRRDMERRRLISDQIRQIEDARLERLERMPNDGSHAMVRLLARVIGVGIETADMLVQEVLSRTMRDRRAVARYAGLTGAPDESGAKRREKGLARSGNARVRRGMIQLAWRFLMYQKDSTLAQWFRARTENARGTRKTMIVALARKLLIALWRLVTTGEVPAGVVLRAA

SEQ ID NO: 141465 - protein, 342 aa, unidentified
MDKITTFAVDLAKRVFSVYWVDIETGEIGAKAMTRAKFEEFMRTREPSRVVLEAGGSAHHWGRWLTCQGHEVRLIAPQHARPFVRTNKTDGADARAIWEAASRPEVKWVAVKSEASQAVLALHRMRRQLIDMRRMQGNQLKALLYEFGVLAPASARITAAQLEDWVAVGRVPQLLLASLREQIARIAQLKAQERELTRRIERHNADDALATQLMAVPGIGVLTASALSAELAASAKSYANGRQFAACKGIAPRLSGTGGKVRSGAISKRGDPYVRTLLIHGARSVIAHGRKAKRLSPWLQGLLERRPLNVAVVALANKMARTAWALAAHGRAYQQHYGAQAA

SEQ ID NO: 141466 - protein, 351 aa, unidentified
MNSIGIDLHKKTISVCVKNQERKVLKRQTLFCGEPNQIVAFFGQWGPFQAVVEATASYEWLWQLLEPLAQRLVLAHPKKLRVIAESKNKSDKLDAEVLADFLALDMIPEAYRPTLRQRQHRSLVRQRCFVKKNLTRVRNKIRRVLSDYNADRRDLFTQAGLQYLREAKKKFSEVDRFVLQQLLTQWEYHRQQFQMVQRQLKTFASKASTKEKEIRAVLGSMPSVGPTTIEIVVSEIGDIERFRSQKRVVAYAGLAPGHRESAGHKKDLGITKEGSGLLRWALIQTAWRTVRCSLRWRWVYENLKKRRGSKRAIVAVARRLLTVMAALWRTGQRYRLDSGGPPGIPALAPAK

SEQ ID NO: 141467 - protein, 412 aa, unidentified
MEVIHSRCAGMDIAKRDAKVCIRLAGSGRRRTVETVTTWGATTRQILALREHLVAERVTCIVMEATSDYWKPFYYLLEDLVGVEVMLVNARHVKNLPGRKTDVADATWLAQLGAHGLVRGSFVPPAPVRQLRDLTRTRTAVTRERGREIQRLEKVLEDAGIKLSSVACDITGVSGRAMLEALIAGNSDPTAMADLARRRLREKIPALTEALTGRFTGHHAFLTRTHLNLIDQHTAAIDELTARIEVVIEPFRRFRDLICTIPGIGGNTADVIVAETGADMSRFPSAEHLASWAGTTPGNNESAGKVKSSRTRPGNPYLQGALGIAAISVSHTKHTYLAAKYRRIASRRGPLKANVAVQRAMLIAIWNMATTDTAYLDPGADYFTRLNPEKARTKAIRQLEAMGYHVTLEQAS

SEQ ID NO: 141468 - protein, 307 aa, unidentified
MHCFANTAAGHKALLRALTRKGRRVRVVLEATGLYGLDLALALSAQEGIAVMVANPRAVRHFAQAMMQRSKNDRLDAGVLREFAARMPFQPWARPGENTLALWAIARRLEVLVKPRTAEKNRQHAARISQAVPLVVRREIARSLRELENGILRLRREARRCIAADARLQRQWELLCSITGVAEVSAVTILAELAMLPEDRDVRQWVAFAGLDPREYSSGTSVRKQTRISKVGNRHLRHALYMPALVACRYEPHVRDFYQRLLKRGKKKRQALLAVARKLLHAIYGMFRTLQPFDGTRLFAFMPAKTA

SEQ ID NO: 141469 - protein, 460 aa, unidentified
MAAVMIGVDPHKASHTAVVIGAAEEPLGELRVRACAAQAERLLACAAAWPERTWAVEGAGGLGHLLAQQLLAAGEQVLDVQPKLGARVRLLDAGDTNKNDPNDARSVAVAALRSAGVREVRPDDHAAVLKTWSKRYRDLGRTRTQVVCRLHAVLCDLVPGGVGRPIYASHAARILEQITPPDAVAAARCALAAAFLDDLRRIDAQLRETRKKLAAAVQAAGTCLTGLFGVGPVIAAAVIGDVRDVSRFPGRDHFAAYNGTAPIEVSSGPHKIYRLSRRGNRRHGHAIHMAAITQIHHRHSQGRAYYDKKLAEGKTGKEALRSLKRQISNAIFTCLQAGARRAAARAKGPGGQQGNDSDASAAGSHPRHRLFGQATPGPGHHPTTVAGNPATGPAGARGRVRHSSIAATLPAATLGREEGQGLKIPDQGTAPGEHLTSREKGRRRSLTQRLHATDVAPADG

SEQ ID NO: 141470 - protein, 387 aa, unidentified
MPQPNDLSRSLAALDQDSTLVAVIEISQSSWLVGGIVPGVNRQPLKKLAADETALLQLLSRWRDEATKAGRPISRIAVAYEAGRDGFWLARWLRGRGIEAHVIHPTSVAVSREHRRAKTDRLDTELLKRAFLGWLRGEQRHCSMAMIPTLEEEDAKRPNRERENLVSERTRLVNRMKSALARLGIRGFKPHLRKAPERLDTLRTAEGMALPPNTLAELRRDMARLRFVMDQIREIEAARLARLEQHPEQANHAMVRLLARVVGVGIETADMLVHEILSRHLRDRKAVARYAGLTGSPDESGARRREKGLSRAGNARVRRGMIQLAWRFLMFQKDSALAQWYRRQTTDGRGATRKTMIVALARKLLVALWQLVTTGEVPEGVVLRRAA

SEQ ID NO: 141471 - protein, 351 aa, unidentified
MPRATSSTNVIATIGIDIGKNTFHVIGLDDKGAIILRHKLSRGQVYARLANIPPCLIGMEACVGAHHLGRQLSALGHDTRLMPARYVRPYSKGQKNDFRDAEAIAEAVQRPTMKFVAIKTVEQLDLQGLHRIRERLVCQRTSVINQIRAFLLERGIAIRQGLRTLRTEMPIVLAKTDKLSQRMIHMIEDLCTDWRHLDRRIETVSKEIETLSEQDDGAKRLMTVPGIGPIISTATVAAIGTGEVFSKGRDFGAWLGLVPKQMSTGGRTILGPISKRGNRYLRMLFVQAARAVLLRPQSWEKHGLKLWIEAAARRLNRFKLAIALANKIARIAWGVLHGGRNFEVRPTNQAA

SEQ ID NO: 141472 - protein, 315 aa, unidentified
MTSPLVPPTAFIGCDVGKSDIVVFDSRTGQTCAWLNQVEALDRCVATLDATCLVVCEATGGYEAALLDAVSRAGHAAHRADARKVKAFIRPFGTLGKTDAIDARALAQYGQERDARLPRWQPTDAQRGQLHAFVLARRDMITDRTAWNNRRKAPGAEAIETVIQPICDALDAQIQATDNAIEAVIKTSKPLKHDLAVLRTIKGIGRVTAVAIIALLPELGTITNKQAAALAGLAPHPNQSGTRDAYRPVRGGRPNVRSSLFMGALAASRSNKQLAELYQRLIARGKKPIVATTATMRKLIVICDARLRDAACELS

SEQ ID NO: 141473 - protein, 454 aa, unidentified
MPKKSSKKAKSQRSRERNLLAKVHLNAAGIDVGANEHWVAVPEDRDPYPVRRFGVFTSELIVLCNWLKQCQIETVAMESTGVYWIALFQVLERNGFEVRLVNASHVKNVPGRKTDVVDCQWLQQLHTFGLLRGSFRPEAAMCVARSYLRLRDTLTKDSNSLVQRMQKALTEMNVQIHRVISDITGLTGMSILRAIIAGERDCVKLAQLKHPQIKSSTEVLAKALEGDYCQEHLFALQTALELYDSLQLKILGCDKRIEEAFKAFEAKVSLPAPDLSRLRSAEKRREARQRHHLEQMTGADLTTLPGLELLAVQRILSEIGRDMTRWPTEKHFCRWLGVAPDKRVSGGKPLPSKPRKNANRAAAALRLAAQSAMQSKTAIGAFIRRIKSRLGAPTAINAGAHKLARLLYRMLKFGKAYVEVGQQAYEKLFKERMLRNLQRKARDLGFQITPMPSQ

SEQ ID NO: 141474 - protein, 465 aa, unidentified
MGAGKMNRKQRKELGRKLQSANPGLEVVHPRAAGIDVGNGAHYVAVRPEQDAEPVRRFECFTADLHRMADWLEACEVKTVAMQSTGVYWIPLYEILEQRGFEVYLVNARHTKNLPGRKSDVQESQWLLKLHTHGLLNNSFQPTAEIRVVRTYWRQRGEHVRGASTCIQRIQKVLTQMNVQLANVISDLSGLTGQAIVRAILAGERDPRKLAELSHPRILAGREQIAKSLEGNWRSELLFVLKQEMEMYDTYQHKIAECDRELEATLKQFAAPERASTEQPKIPNAKKTKRIQRNAPGFNLTSELHRITGVDLSRIDGVNAIVAQTIISEVGLDMTRWKTEAHFASWLGLCPDNRISGDKVLARGTRHVINRAATALRMAATTLIKSQSYLGAQYRRLRTKLGAPKAITAMAHRLARLVFRMLKYGQEYVDKGTQYYEQKHHEQQLHLLKKKAATLGFQVVEIGVA

SEQ ID NO: 141475 - protein, 342 aa, unidentified
MQISTIGFDLAKHVFQAHGVDIHEKVVVKKQLRRAQVIPFFEKLPPCLIGMEACASAHYWARELTKLGHKVKLMPAKDVKAYVKRSKNDAADAAAICEAVARPTVRTVPMKTPDQQARLMQHRTRDLLVRQRTQLSNAMRAHLAELGLIAAQGREGLKSLLAIVANENDDRLPADARASLGVLAAQILACNAQIATLEKRIHTQHRTCEASQRLETIPGIGVIGATAIAATVPDPSVFKTGGDFAAWIGLVPRQDSTGGKQKLGPVSKQGDRYLRRILVVGAHAVLKHARTHPEKHPWLMQLLARRPAKLVAVALANKMARIAWAVLARGETYRAPRIAATV

SEQ ID NO: 141476 - protein, 367 aa, unidentified
MMGWMAPLRHLSAKLLSDRISSEWEPSMGEVTTIGLDLAKHVFQVHGVDAEGATVLRKQLRRAQVLAFFSRLPLCLVGLEACATAHYWARELRALGHEVRLMPAQYVKAYVKRNKHDAADAEAICEAVQRPTMRFVPVKTADQQAAVLLHRGRERLVRQRTGLVNALRGHLAEFGVIAPQGLRNVGKLIAIVRDEGDARLPELARQVLQVLAAQIEQLEAAVAAIEKQLMAWHKSNPVSQRLASVPGIGPIIATAIAATVVEPSGFRSGREFAAWLGLVPRQNSTGGKHRLGGISKRGNQYLRRLLINGASANLLRSKATNADPWVIGLRQRRPSLVVAVALANKTARIAWAVMHRHENYQRVAAAA

SEQ ID NO: 141477 - protein, 321 aa, unidentified
MEIIGLDLHKRESQLCVLTEAGEIIERRIVTSRERFTAVLGGRAPARILLEASTESEWVARHLECLGHEVIVADPNFAPMYATRSRRVKTDRRDARTLAEACRLGAYRRAHRASDAQRHVRAELAVRDALIRTRTRYVAVIKALVRRDGLRLPSGKAEHTERKLAALELPSDLTLELAPLRAVWGPLHEQITGVNERLATLAAADPVVAQLMTAPAIGPVTAVAFVATLDRIARFTSAHQVEAYLGLTPREYSSGEQLRRGRISKTGNARMRFLLVEAAWRVLRTKDPAVAPPKAWGERIAQRRRRSIAARALARPVAALL

SEQ ID NO: 141478 - protein, 392 aa, unidentified
MVVSVGIDVSKDKHDCFILNSEGEILSDVFTIPNSLDGFTILLQRIRDCSSSQDNIKVGLEATGHYSYNILGFLLDNGLPTYVLNPLRTNLYRKSLSLRKTKTDRVDARTIAAMLLSDAGLKPYTDTVYHNEELKSLTRYRFDKVKERAKLKSSVSRLVCILFPELEKLTPTLHMPSVYALLDEFPGAKQIAEANLTHLKAILHNASKGRYNRDKAIDIRESARASIGAVMPAKSLELRHTIRLIRELDAEIEDIEAAIQSIMNEMHSPITTIPGIGTRMGAMILAEVGDFSRFDSPDKLLAYAGMSPSTYQSGQLKNCYPHMEKRGSRYLRYALYNATKYVCLWAPTFAAYLAKKRAEGKHYNIALSHAAKKLVRLIFAMEKSRQPYCSAM

SEQ ID NO: 141479 - protein, 342 aa, unidentified
MEQIKVVGLDIAKSVFQVHGVDEGGEVVVRRRLKRSRVLPFFASIEPCRIGIEACATAHFWARELGALGHDVRLMPPAYVKPYVKRQKNDAADAEAICEAVSRPTMRFVPVKTVEQQSVMVLHRSRELLMGQRVRLSNAIRSHMAEYGLIAPVGRNGLQQLIEVLDDEGDTRVPSEARLCLKMLAAQLQLVNVQVLENDRQIRVSARSTEIGRRLMEIPGIGPVIASALVATVPDPHAFRCGRNLSAWIGLVPKQNSTGGKERLGSITKQGNRYLRKMLVVGALAVIRYAQRNGTRRPWLVQLMERRTTKVAAVALANKTARIVWAIMVSGERYREPVVQAA

SEQ ID NO: 141480 - protein, 365 aa, unidentified
MNATAALPVVGVDLAKSVFQVAVADEAWRVVEQQRLTRSQFERWFANRAVGLVVMEACGSAHHWGRWLNSLGIEVKLLPAAYVRAYVKRNKTDAADACALLEAARCADIAPVRVKSVEQQALQGLHRTRSLWMATRTSRINALRGFCREFGILIAEGARLGVEQIGRVLADPNSAVPALIRPTMKLLVEEIRLLETRISQLERELTLLARESAACKTLLSIPGVGLLTATAMVAATSGNIGHFRDARHFASWFGLTPKEHSSGSTRHLGRISKRGDRYLRMLLTHGARSVLRAATVSAKAGRTLDALRGWALALQARSNHNKATCALANKLARICYATLRDGEPYGQPAPRPDKKIARAAFAIAA

SEQ ID NO: 141481 - protein, 359 aa, unidentified
MPHCVKDQEVFGGVDTHAEVHHAAVVDSLGRRLGHRGFPTTPAGYRGLRCWLASHGSVRAVGVEGTGSYGAQLARVLAAAGLAVMEVDRPDRSARRRNGKSDPEDAYAAAVAVASGRAAGWPKSRDGMVESIRVLRVERRSAIKARTQAINQIRGLLVGGPAGLREQTRGLNRTELIGVCAGLRPGSDLTDPTAAVKQSLRRLARRWIALDEEVNQIDADLAPLVAAAAPTLLAVSGVGFDVAGQLLVSAGDNPERLRSEAAFAKLTGTAPLPVSSGRIDRHRLNRGGDRQANKALHTVAINRWQHHRPTQAYVARRTSQGLTNKEILRCLKRSIAREVYHYLIRPQQSGLPISTAIAG

SEQ ID NO: 141482 - protein, 347 aa, unidentified
MNYIGVDCHISSLDFAVVNERGKTTKRQRVNTGVKELIGFIKSIPKPRKVIIEEGTLANWLLETCTGYGEKLIVTDPKKNRWIGRSGQKNDAVDAEKLAQLARGGYIKEIHHPIGGRRRFRELVLSYHDTVKSQTRIKNKLKAKFRENGIRCTGETVYSAKYRKEWKQRLPKNKVVHVIIEGLWRQLDQLEEVREEILGQICKQSRGYSEIKRFKKIPGIGTVHAATVSAIVEDPHRFANKKKLWMYAGFGLAKRESGGKVYSRKLTPNYNRHLKNAIKQATEAAIIAKDNQFRRQYLRLTMEKGILSHRAKLSVARSMLATLYGIWKSGEAYDPEIDTGRPETEKT

SEQ ID NO: 141483 - protein, 364 aa, unidentified
MSIIHWIGIDDHADKWSIACLRGEETKPSREFEVVPNDAGYRRLVGWLKELSTPRVVYEAGPCGYELFRRLNAAGIPCHVAAPSLTPLKPGDRVKTNRRDAIKLARYLRSGDLTLITVPDPQREALRDLIRGRDAVRKDLLSAQHQLTKLLLRHGHRYRDGRAWTTRFWDWVRKIQLPNADSQIVLDEAILTLGQRQNQLDRFDTHIEDAARRPEYAPYVAALSVLRGIRTLSAMTLLAELGDLRRFASAPQLMAAVGVVPSEYSTGDKTHRFSITKAGNAHVRRVVIEAAWHYQRRIINGRKITDRRKGKPQALVDIAQRCDLRLHRKFNRMTSRGKRSTVAAVACARELIGFIWAIGQTVHP

SEQ ID NO: 141484 - protein, 342 aa, unidentified
MQITTIGLDIAKNVFQVHGIDASEKVFVRKQLRRSQVLAFFKALPPCLVGMEACGTAHYWARELKKLGHQVRLMPAKDVKAYVKRNKNDAADAEAICEAVRRPTMRFVQVKSAEQQGRLMQHRTRDLLMRQRTQVINALRAHMAELGIVATQGREGIEELLTIIASEEDARLPVDAHASLVVLAAGLQAVQTMIGSIEKRIIVQHRSNEASKRLESIPGIGVIGATAIAATVPDPKAFRSGRDLAAWIGLVPRQDSTGGKQKLGPISKQGDQYLRRILVVGAHAVLRRARQQPEKYPWLTQLLARKPFKVVAVALANKMARIAWALLAKGGTYRAPALAAGA

SEQ ID NO: 141485 - protein, 408 aa, unidentified
MDNIFEFFAGIDWGSERHRVCLINSTGQTVAERWIEHSGDGLTELIAWLRQHTSDCPSSLAAAIEIPRGAIVETLMEHGFAVFSINPKQLDRFRDRYSPAGAKDDRRDALVLADSLRTDRHCFGPVRLDDPALIRLRELSRLDDEMAQEQTRAVHRLREQLHRFFPQLLELSDCAAEPWLWDLFEMAPSPLAAARLTQARIARLLQQHRIRRITAAEVRAVLKTKPLTLAPGAAEAAAEHALLLLPRLRLLDQQRTDLARRIKVLVDQLAAPAEDQHEHRDAAILLSLPGLGRKIAATMLSEAWQAIADRDYHALRCYSGAAPITQQSGKKKVVLMRRGVNQRLRNALYHWARVSIVQDPQSKMRYAALRACGHSHGRALRGMADRWLKVLTAMLTTRTLYDPQRRAA

SEQ ID NO: 141486 - protein, 437 aa, unidentified
MLSALKTITQIMNTSTNFAATIGLDWADQKHDLWIRPADGSKAEHVRLEQTPETLHEWVAKARERFGNRKIAIAVETSRGPVISALMAYDFIMLFPVNPKGLKSYRGAFSISGAKDDRTDAQLLEECVRLHPEKLRALEPDTELTRKLGGLVENRRYLVDERTRIVNQIHATLKTYYPMAEALLHGQMNTPMAADFLVRWPDLDALQTAKPEVVRCFFYKHNSRSAKKTEERLAAIQKAKPLTTDPAIIVPARHLVLALAGMLRPLHQAVARLDKEIQQAMDQHPDAPIFQSFPGAGPALAPRLLVAFGTNRERFDKSADVAEFYGVAPVVVQSGNSKIVHVRYRCPKFGRQTFHENAGCALKKEPWAKCYYDQQKERNNGRHHQACRALAYKLVRIYFACWKQRKPYESNRYLNALEKHASPLHRKLENLTATHCE

SEQ ID NO: 141487 - protein, 364 aa, unidentified
MKRKVYVGMDVHKETIQIAILPSNTKALVKEQQIKHEEGQIKKFIQKLKSEGTEIHCCYEAGVTGYPLYRYLKTLGVNCIIAAPGKIPRQSSDKIKTDKRDAIKLARLLRSGELESIHVPSEEDEAVRDYLRSRDSLRLDLGRNRQRLMKFLLRKGIKYSTTKYWTVSHYKWLNNLHFENEILQATFNDYYSRVRVQEENLKAMDQKIQEIAKSEPYREKVGILRCFRGVDYLTAMFLLSEVNDFKRFKTAGSFMSFLGLVPGEYSSGSKRKQTSITKTGSPRLRRILVEAAWQHRFPGTGSKVVVARRVGQSALVVSLAEKASLRLHKKFKSMQLRGKTPQVMITAVSRELSGFLWAAMNLVA

SEQ ID NO: 141488 - protein, 587 aa, unidentified
MSKDTRFVGMDVHADTVAVAVAEGRDRVRSLGIVPNRPEAIRRLLGKIGKLSSLRVCYEAGPTSYALYWQLTKLGVHCDVIAPSLVPTKSGDRVKTDRRDAEKLARSYRSGDLTPVWVPDSKHEAIRDLVRAREAAKEDQLRAKHRLGKYLLRYGQRPPDGCRAWTAAWWQWARGLELTHAEQNTTLLELVLEVDHQAQRIERLDGAIDRAVNEAPEQLRALVDALQALRGVAKITAVTLATEFGSFSRFERAVQVMSYTGMVPSEHSSGARSRRGAITKTGNSHLRRVLVEAAWHYRHRPKLNQRQKELQPSLAPKVAAVAWRAQERLHRRYWALAKKSKPTGKIVTAVARELAGFVWAIGVETEKQLATVKGGLSEQPSNEVNESAAERGHGGGSSSTLCGLTHEPSARQLPTNHDHEGGPGRSSNISVINRRIQPTSAADSFTSKTNERIRSDLTPKFSACRVVPYQRTGAQLRTPDRAQRGMAIVSCSGWLGRAPGEDDRDNPRPTVRQAAPCYRRRAHRVARGWRPRREARTRRRSCPRRRPPGRQERCLRRPRITPASLPSRTPRAGRRRGRACIADVRWR

SEQ ID NO: 141489 - protein, 349 aa, unidentified
MIVIGVDTHKRSHTLVAVDAATGGVLGERTVLASDDGALAALRVAAGLGDERVWAIEDCRHVSGRFERSLVAAGERVIRIPPALTANARRSARERGKSDRIDALAVAHTALREGLERFPAAFLDEQAMEIRLLCDYRDQLVSERTRAINTLRWHLLAIDPELEASLRPSGLAGPRIRAKVTRRLARLGDGAQVRIAKALLRRINEITRQELTLRGEMNTLITTHSPQLLAEHGCGTITAAILIGHTAGAERFATEAAFARHTGTAPIPASSGNTIRHRLHRGGDRQLNRALHTIALCRARTDPLTRAYLDRRAAEGKTKLEALRCLKRHLARHFWKLLYKPANSKPALT

SEQ ID NO: 141490 - protein, 344 aa, unidentified
MHYVGVDLHKEQSWFYVSDHEGKRLISKSITNSNEELKRIFDSIPKPFKLGVEATRNWYFFIDLAEQYAEEVKLANSFELKAFAKRNKKTDKIDAKLICDVLRMGYLPAVHIPPKPIREIRELIRYRISLVYERTFNINRLKNTLGKLGMECNGDLTTYKQLDKIETEGLPAIYGTVIQGHKDRIRFLTEKIRHMKMYLEETFQEDQEIINLISIPGLSYLSAAIVKSEIVDINNFASFNRLCSYAGLAPRVSQSAKKDIHGPLSKNRRKLLQWILLEVTPHFVKASPEKKSKFDELSKRKNYNIAKVALARELLRMIYVVLKEKRKYYSEKIRSTAGVALHGV

SEQ ID NO: 141491 - protein, 309 aa, unidentified
MTTSSYVGIDVSKDRLDVAVLGERQEKQVNNTQVGIAELVEWMQEWQPELIVVEATGGYQRCVVDALFHAGLSVAVVNPARVRQFARACGLLAKTDKLDAQVLAEFGSRVQPRCYEGKSEAEKQLSALLVRRKQLEEMLKAEQNRLRTISPSLRGSVERIIAILKEEKKRLDEQICELMKEQKAWQAQTEILSSAPGVGMVTTATLLAELPELGKMDRKKIAALVGVAPMNYDSGRKRGYRKTKGGRGDVRSVLYMSTLVATRYNPLIQTHYQQMLKRGKLKKVALTACMRKFLTILNAMLRDQQPFRV

SEQ ID NO: 141492 - protein, 468 aa, unidentified
MQVVYQRCCGLDIHKKLIVACLLLMSSQGVQKEIRTFNTTLADLYRLRDWLVAIECQMVAMESTGVYWRPIWNVLEEELVLMLVNAQHMKAVPGRKTDMKDAEWIAELLQHGLLRASFVPPRPQRELREVTRYRSKLVQERARLVNRIQKVLEDSNVKLASVATDITGVSGRAILRALLDGEDDPEVLAELARGRMRSKRDALAQAVQGTLRDHHRFLLKSQLRQLDFYDTQIAELDQEIASRLGVQTGPDDPEPLGSGPLHGNRASSADQAPDGVADLASHSPEPSSDPARSQAEVMAVLDAVTGINQRIAQIVVAELGIRLDQFPSEGHLVSWAGLCPEAKISAGKRLSTKTGMGNRWLKQALIEAAHGAARSKNTYLGAYYQRLKKRMGSKKAIVALAHRILVIIYHLLKEQQSYRELGPGHADEQAAESSKRWAIRRLEQLGFAVTLTPNEGERLSGAAEEEIA

SEQ ID NO: 141493 - protein, 356 aa, unidentified
MKDYTQKTVYIGIDVHKKTYSVTAICNGTIAKRDTIAAYPEQLVNYIKKYFKGAKVNTVYEAGFSGFCLHRYLLSQGINNIVVHPASIKISARDKVKTDKRDSLKMAKGLSNGELKGINVPSEKRELFRMITRTRDQLVDNKKRIGNQLKSLLFTQGLIDPNDDMKVCKTWIKKIQKLKMPEELEYSVNLFVQLWLDLDTRLNEILKKLHEQAKADPADVIYRSVPGIGSLSARILANELEDMKHFANEKGLFSYTGLTPSEYSSGEHKRLGNISRQGKSLLRMILVQIAWKSIKKDKRLLEVFERISKKAGKKRAIVAIARKIVGCIRSCFVTGTIWCANAPASNRSLTVKAEAC

SEQ ID NO: 141494 - protein, 390 aa, unidentified
MQALSPQPAEHTAIRTDLKAIFVSLELSRSTWVITSLAPGNGEKMSKHSVRSGDIAALLARLSQLKEKVCVRTGHVFPIIVIQEAGLDGFWIHRVLQREGIESHVVDPASIATSRRRRRAKTDRIDGEALVRALLAHKRGEPRVCAMVKAPTPHEEDRRRISRERETLTAERVQHVNRIKGLLFAQGIGDYEPLHRNRRERLEALITGDGRPLPECLKAQIRRELDRLELLIEQIKAVEAERDAVLAQAQANPGVPAPAALLLALRGIGPEAAATLWSEGLFRTFNNRKQVAAYAGLAPTPWQSGSVYRDQGVSKAGNPRLRTIMVQIAWLWLRHQPQSALTLWFRERIKRMGGRLGKMMIVALARKLLVALWKYATAGIPIEGAVLKPA

SEQ ID NO: 141495 - protein, 455 aa, unidentified
MSKSNRTDTPLRAARAQISNPEITVHAMYRSAIGIDVHLNLLVCCHQKQVAGHREQSESRDFNTDRASIDAFAAWCRECNPDIILMESTGSLWQSPYEALERAGFTSEQLALINARDAKAAAGRKTDRKDASRLASLARTGNFKKSFVPEKAFRLQRVISRDLQKNRNDISRTSNRFGKSLNLTGCRPTTVFSDIRGGKAASLILMAKLRDDPHLFDVIKQNSRRLRASPEQIMQALDFEIEPMMKEQILALRKKIDQLEEYDRSTFERLRQLQAPYEKDIQLLITITGIQERSARMIYAELCPDLKEHFPTSEQFASWLGICPGDNTSAGKQKSGKCPKGNKHLRRTLIEAARGLAVGGTAALKEKFQVLKMRRGYRRAMVAFAHLLARIIYSVLTHQKGFEPYLSTAFRDALIERAKNGVKQLLKLKGTKYVIADGLVVETKTGAILGAVVSS

SEQ ID NO: 141496 - protein, 391 aa, unidentified
MVCVGIDVAKDKHDCCILDSDGTVRADCFTIPNNSDGFKRLLQTIQDCTQKSDKIKVGLEATGHYSYNILGFLLDNGLPTYVINPLHTNLYRKSLSLRKTKTDRVDARTIATMLLSDVDLKSYTDTAYHNEELKSLTRYRFDKVRERAKLKQSVSRLVTILFPELEKLVTSLHIASVYALLSEYPGAKQISEIHLTKLTNLLATASKGRYEKEKAIQIREAARTSIGSVMSAKSLELKHTIKLIKELTSEIDEIEDSIQQIMDELHPPLLSIPGMGIHSAAMILGEIGDFSNFESPDKILAYAGCSPSTYQSGKLTNCYAHMEKRGSRYLRYALYNATKYVCHWNPVFAEYLAKKRAEGKHYNVALSHATKKLVRLIYALQKSGKTYLTAA

SEQ ID NO: 141497 - protein, 359 aa, unidentified
MSTHNSTRKAFEGKDFFLGIDVSKKNWVIGIRENDMLLKYQSMEPHPEKLYKYMERNYPGGRYYTVYEAGFCGFWVHRELTRAGFTSIVVHAADVPTTDSERDQKTDAIDARKLAEELEKGKLKSIYIPSEEAERIRALARLVRKTCVKEKTRWKNRMTAHLDFYGIQSPKHSSRWPKWYIEWLKALELDNGPYREAMEFMLEEYEQIKNRTAALKKRLKKRCADYFGKDLMEYLYSFPGIGWDTVLTLLTELIEIERFAEFNHICRYTGLIPSRYQTGATDRDKGITKRRNRYLRYILIEASWIAIRKDPELYASYRRYVSRMKPQKAIIRIAKKLLKRIYCIWKERRPYEYRYPSDN

SEQ ID NO: 141498 - protein, 345 aa, unidentified
MDHFAGLDVSVKETSVCIVDDTGRIVREVKVASEPEALLAVLKNPAYRFKRIGLEAGPLSQWLYSALAEADFPVICVETRHMRAALKAQINKTDRNDARGMAQMMRVGLYRPVHVKTLRSQKLRMLLTHRKLLQSKAIAIENDLRGTLRNFGLKVGMVGKVRFEARIKELVENQPDLAVMVEPLLLVRRVLREQIVILHRRLLVIVRDDEVCRRLMTTPGVGPVVALTYRATVDVPARFRKSKSVGAVFGLTCAKYQSGEIDWSGRISRCGDEMMRAMLYEAAQSMLVHSKKWSWLKAWAMQIARRRGMKKAIVALARRLAVIMHRIWIDGTEFRWTREQATAAA

SEQ ID NO: 141499 - protein, 321 aa, unidentified
MRKRTNFLVMEKKKVEFEQVIERGCGIDVHKSLLVATVRGTGIKEETREYGAFTEDIESMSSWLQEIQITHIAMESTGVYWKPVFNILEANFEIILVNARHIKNVPGHKTDKKDSRWIAKLLLSGLLKGSFIPKLSIRELRDMTRYRRKVVEQISSEKNRIQKILEDGNIKLSSVVSNMSGAVASRIVEDLIAGEEDITKLVSHRHGKMQVSETDLAKSLVGNLTAHHRQMLQLIKGSIKDKEMLKANIDRLIDEHLKANELELDRELLSTIPGVGKEGAAYIIAEIGNDMSVFEDEQHLCSWAGMSPGNNESAGKKKAHE

SEQ ID NO: 141500 - protein, 356 aa, unidentified
MNEITTVGVDLAKEVIVVCAGDTQGRTRYFKQLSFQAFGAWAMKLPPCTFGMEACSTAHHWARFLSRHGHTAKLMAPEFVAPFRKSQGARNDRNDAQAILAAVRQPDMRFVSVKSVDQQAMLAWHRTRSGFTVERTALLNRTRGLLAEFGIWIGRSTAVLIHQLPELVRDQRLPEVFRPILTGTLEHVRRLEQCIAECDAQIHMHIMHSEEAKRIQALTGVGELTASALLATVASPRDFKNGRQMAAWTGLVPRQNSSGGKQRLGVITKRGDSYLRGLLTQGARSTLQVALKREPLRRSRLQQWIVALHGRVGYHKTLVAIANKHVRILWAILVHGESYDPNAWRRHAPQRSPAAA

SEQ ID NO: 141501 - protein, 346 aa, unidentified
MTTVDAARPVTGGVDTHLDVNVAAALDPIGGLLGVAEFPTTPAGHRELVTYLASFGDLTRVGVEGTGSYGVGLSRFLRGLGVEVVEVDRPNRQARRRNGKSDPVDAVEAARAALSGRAQGAGKTRDGNVEAIRALVVATRSSRSTKIKTLNQIRHLSFTAPEELRARLKSCSRQHLGAKAAALRPRAGTDPVIFATKTALSLLGRRVLVLDEERERLNVLLTDLVTKTAPELLKVHGVGVDTAATLLVTAGDNPGRIHSESAWAHLCGVAPIQASSGKVTRVRLDRGGDRQANSALWGVVITRMGSDPRTKAYVERRLKEGRSKPEIIRVLKRYVAREVYHYLPRA

SEQ ID NO: 141502 - protein, 367 aa, unidentified
MKKVSTVAVKQRKNFSQPTLTIGLDLGDRNSWYCVLDEIGQIQMEQRVRTTAKALREVFGTMPHSRVALETGTHSPWISRLLSELGHEVIVANARKVRLIGESRKKDDRLDAQTLARLARIDPGLLCPVKHRSAKAQADLTVIRARAGLVRARTSLVNTVRGLAKSYGERLRGCNVRNMNPEKAETLSPELQRALEPLLSAIEELSERIVEYNDRIEALAEASYPQVELLKQIKGVGTLIALTFLLTLEDPHRFRKSRDVGCYLGLQPGRRNSGESEPQLHISKEGDPYLRTLLVQGAQHILGPFGIDCDLRRWGLKLAERGGRNAKKRAIVATARKLAVLLHHLWVSGEVYEPLRNSNRMTVTAAA

SEQ ID NO: 141503 - protein, 407 aa, unidentified
MGDQPTATDVDVFVGVDMAKEDHYAHAIGPDGNELYARTVRNDQADIEAAIDTASAAGRTVLVIDMTASSAHLLLATAAARQVPVAYVTGLQMRRAADLYAGSAKTDPRDAFILADYARRHVDRLAWLDIDDELLVRLRVLNGRDVDLAGDATRTINRCRDALVSISPALERVVGPKLGHGGVQDLMGRWATPTALRAAGKTRVRTLVSKRSPRLADKLTDQIWEALDAQTLTLPAEDTWGEVIADLGGDLTKIAARRDALKGDIEEAFLAHPLGKVLVTLCGFGPRTGARTLAEIGDPHRFATGGHLASYAALAPVNRQSGRTLDTATRQRRGNHRLKNALFLAAFVATQHDPDARAYYQRKRAEGKKHNAAVICVARRRCDLILAMLKNREPYRQPQPENLPQAA

SEQ ID NO: 141504 - protein, 441 aa, unidentified
MIRTVGLDVHKHFIEVCILDSRGKVLSRGQVNCQREELQHFAKTQLKKTDRVVLEATTNTWPVVEILRPCVAAVVVSNPLKTKAIAEAKIKTDKVDALVLAQLLRCDYLPEVWQPDTATQAQRSLITHRSGLMCQRARHKNRIQCLLGRLLLAPPCKLLWTKTGLTWLQALTLSSTDRLMLDSELRQLGQVERELVVVDQQLVEISRHEPRVQLLMTLPGVNYVVALGLLAALGDITRFADGDHAASYLGLAPVTRQSGAKCYHGHITKAGNSQARWLLTQSAQHVTRHPGPLGAFFRRLAKRKNRQVAIIAVTRKLVTVAYLMLKNNEPYRYARPDLMATKFTALQSKHRGATSRSEKPSLRGPARAGLAKVYQAAGLPSVTVPEQLSHGEQRMLTQHKLTDFVGQLYQPSPTATVKPDNPKRATSPTTKTRGRPAGRPR

SEQ ID NO: 141505 - protein, 344 aa, unidentified
MEISTIGLDLAKTVFQVHGIDASGAVAVRKTLRRSQVLPFFAKLPSCLIGMEACGTSHHWGRELIKLGHEVRLMPPAYVKPYVKRGKTDANDAEAICEAVTRPTMRFVPVKSPAQQATLALHRTRNLLVKERTQLVNMIRGLLAEYGIDIPRGLERAVAMARRITDGEILDLPDEASTSIVVLCEQALACHERLRTIDRAMLASQRANDVAVRLATIPGIGPVGASALAASVADPHQFKSGREFAAWLGLTPLQQSSGGKERHGRISKMGDKYLRKLLIVGMTSLVRRAKYKPDSVDPYVARLLARKPARVATVAMANKAARIAWAIMARGGTYRAPAQRLLAA

SEQ ID NO: 141506 - protein, 375 aa, unidentified
MEHTRFIGLDIHKERISVAVAESGRSGAVEYLGEIANEPGAISKLCDRLRRPGKPLAFCYEAGPCGYGIHRQLTRLGHRCDVVAPSLIPTKAGDRVKTNRRDATMLARLHRAGELTPVWVPDADHEAMRDLIRLRSVVRQIVTRARQHLQGFLLRHGRKHGRGTAWRMAYRRWLSTLAFEHPAQQIALQDYVDAVMDAERRLKRVEEQVFGLLPDWNLRLVVDGLQAMRGIALINAVVLVTEVGDFTRFSNPRQLMAYFGLVPGERSSGETVRRGAITKTGNAHVRRALVEGAWAYRMKARIGRHKVDRIEALPKVVRDIGWKAQVRLCTRYRRLRARGKTANVVNVAIAREMVGFIWSIACTMQIRAKGGVTMT

SEQ ID NO: 141507 - protein, 441 aa, unidentified
MCPKPRFPDVVGATLSPASPVDTRPLYLGLDVSLQTGIACLLNALGQEVVPRWSFRNNQPGAEELAKKVAEILTSHRASVLLVGMESTGVYGWHLACFLSETPRLRAWNARVYVFNPYRTLNFKKAMGDLGKTDRVDALVVAQWLRLGRLPAPFAVDTVYGPLQRLTRFRYHLSETLTREKVYTLGLLFLAFSEFGTAAPFKDPFGATSQAVLDEFTLDELATKPLEELSAYVARSGRGRFADPEEVARTLQQAARDSFRLDRVHDSALRLVLGVSLTNIKLLTHQLKQVDTAIVKDLKAIPIAACLLSVPGLGPVYTAGLLAEIQDIHRFQDHAALAKFAGLTWRPHQSGDFTAEETPLTRTGNTYLRYYLVQAANSVRVREPEYRAFYQVKYSEATKHHHKRALALTARKLVRLVDALLRYAQLYLPPGQRHGEGAVVT

SEQ ID NO: 141508 - protein, 396 aa, unidentified
MTAIWAGIDAGKTHHHCVVIDDTGKRLLSRRVDNDENDLLKLLGDVLALDDEAVWGIDLADGGAALVIAILLNHGQQLLYIPGRVVNRASEGYRGDGKTDAKDAAVIADQARIRHDLTPLRAGDELVSELKVLTRHRRDLSDDRTRTINRLRGHLTEIFPGLERELDLGNIGPLVLLSGYQTPAAIRRTGRRRLATWLRNRKVRSPDELAGKAVQAAEGQHTAVPGEDITAHVVHSLAGEVMALNEKIAETDKLIEGRFRRHRNAEVIASMPGIGVLLGAEFLAATGGDMSAFASPDRLAAFAGVSPVPRDSGKVSGNLHRPTRYSRRLQRVFYTSALISIRCCDESRRFYDRKRAEGKRHSQAVMALARRRVNVLWALLRDGRCYNPIPPVTLAA

SEQ ID NO: 141509 - protein, 316 aa, unidentified
MATYVGIDIAKHGFDLAIEPKQKVQHFDNNTDGIRQCCTMLKKLQPTLVVMEPTGGYETALVMQLYTCDIPVARVNARKIREFARAVGQLAKTDKLDARIIARYAASIKPPAQEALDKHARLMKALVARRHQLVKMRTAESNRMEHADDNSIKRCIQNILRALDKAIARVERQIRQQIEHTPELKERVQRLESVPGIGEATAALLVTELPELGRLNRRKIAALVGVAPINRDSGTYRGKRITGGGRRDLRARLFMPMLSAIQWNRPLKTFYQRLLNKGKTKMTAVVACMRKLLTILNTMLANGQPWNADRASLDNR

SEQ ID NO: 141510 - protein, 352 aa, unidentified
MDTQSTASIPKLYVGIDIHKRSWKIHCSTDLFAGKSFTMPPVPEQLFQYVNKHFQGYEVSTAYEAGCCGYYAHRSFENYRWKSLVVNPADIHRKGKERYTKTDKIDAQLISRELKDGRLESIVVPDKKREELRSLFRRRNDLVKDMRRIKSRIKMQLLYFGIKVPEEFDNDHWSHKFRHWLDNLTFEFDTARETLNSRMRSFRFTDQELRQVTNELRSYCRKHYKKDYYLLKSIPGIGGVVAVGILSELGDLRRFGSLKHLAGYVGLAPGIHQSGASNKAMGMNPRSNRLIRSYFVEAAWQAIRTDPVMQAYYRTHIGKDVKKIIVKIAHKLLSRTLAVIKTETPYEIGVVA

SEQ ID NO: 141511 - protein, 416 aa, unidentified
MEKMEAISERVCGLDGHKKSVVACRRRLTSSGRVVQEVCTFGTTTVQLLALVEWRKEWEVTHVAMESTGVYWKPVWNILAGHAELLLVNARHVKMVPGRKTDVKDCAWIAQLLQYGLLRSSFVPTEQVRQWRDVTRQRTQLTGQRTAAVNRIHKVLEDAKVKLSSVLSDLLGVSGRRMLQAMVAGETDAAVLSQLGDPKLRASQAVLQESLQGKLTEHHRFLLEGLFEQVAFLDQQIERLATRIEEQMRPFAAQITRLDSIDGVDRVGAQNLLAEVGPAMAQFPTADHLASWAGMSPGNDESAGKRRSGKTTKGNKWLRRTLTQAAWAATKRKGGYLAAQYRRLAARRGKNRAIVAVGHTILVAAYYILKDEVEYRELGADHFDRLRRDRTVSQLVSRLQRLGYNVALEAIKDDAA

SEQ ID NO: 141512 - protein, 358 aa, unidentified
MATYYIGADVHSNSTELAIEKRGKIVARYSVPTSIPAITNVLDSLQGKKYLAVEEGPMSGWLYRNLNKKLDQFISSDPRRNKLIASEGDKDDKIDSAKLASLLRGGFLREVYHSDDDDRAELKHWDSLYHDRVRDAVRGINKIRARCRMHGVTISRATLRDPASRLKWLLKTKHNALANQLKMLWIGYDATVQQVKSAKRQLSTLSKKHNIIKQWSQLPGIGLIRATTIFAFLDTPWRFKKKNKLWKYCGVGLQRTTSGTDKKGRPKPARLQLPWAVNRTLKNAVLGAALSAINQKGNVFKDYYERMVKNGIIPSNARHAVARKMLTVMWAMWKTNSSFDEKMVCNELNMPTVSVIKR

SEQ ID NO: 141513 - protein, 354 aa, unidentified
MQRSTATKHYAGLDVSVKETSVCIVDESGKLCRERKVPSHPEDLVAILSDPAFSLERAGVEAGPLSQWLFEGLAKAGLPVFCIETRHTKAFLDALQQNKSDRNDARGIAHMMRVGLFKDVHVKTLTSQKRRALLAARSLLQEKAIDMENEMRGLLRNFGLRVGHASGGTFERRILELVENDAELAEIMEPLLAGRRKLREGLAKLEKRVLAEAKQDKICRRLMTVPGVGPIVSLAYVSTIDVPGRFRHSRSVGAVLGLTPVLKQSGEMSRVGHVSLRGDAMMRRLLYEAAQSMMTRVVKWCWLKAWAMNIAKRHGSKKAKVALARRLAVVMHRMWVDGTEFRWTREDTVSTVAA

SEQ ID NO: 141514 - protein, 383 aa, unidentified
MPTSTISQASIDYINEFFLKTGKRYLAVDLASRVVQICYYSIAHKKIINKEIRASELESVLSSYESGTLIVGFEACGACHYWARRAQELGHEYRCFMAENIRKHKKKEKTDKIDALAIFKALLDRDSADLSIKCKSLDHQMLSSLMTTRSCITSQKVKSLNALRAFMYELGVVLPRDLSPQRMIKKALAYKEQMLLEQGADSEAFIFFDISLQTYIAQIEHCVKIIDGLDKQIEELSRKNTTCQLLRTIPGVGYIIAMMLYIAGFDISNFKNAKHFAGFCGIAPHVEGSGGTATNLGVRHFGNRALAGMLYIGAMAHYSNTLKKTLENSENEQIKVQMQKRRKVLICAIANHIARTAFAVIRDKTPYTTQRASGLLTAYKECI

SEQ ID NO: 141515 - protein, 361 aa, unidentified
MKKPAQHLIAEVPRRQTKVELTIGVDLGDVWSHYCTLNEDGEVVDRGRFRTTLSGVGKWFTDVPRARVAMETGTHSIWVSEQLRELGHEVIVANVRELRAISHSNRKSDTVDAEKIARFARVDPEILRPICHRTVAQQEALTLIRARNLIVRLRTAAVNSVRGLAKPCGYRLPASSTLCFAKRCMSVLPPGLAQALGPVLEQIAAMTVKIQQYDRTIKRLTETEYPETQALLQVYGVGQLTALTYVLTLGSKERFKRSRDVGCYLGLRPRRSQSGDRDPQLGITKAGNIYLRSLLVECANHVLGPHGRDSTLRQWGLHLASRGGKQSHNRAIVAVARKLAVLLHRIWITQEPYIPFYAVAG

SEQ ID NO: 141516 - protein, 352 aa, unidentified
MPESAPAGTPSERTIGIDVGDTWSQICVVDANGTVIEEARVRTTTRAMQRRFAAPPARRVVLEVGTHSPWLSRLLVALGHEVIVANPGRVRLIAASMTKHDRGDAEHLARLGRIDPALLAPVRHRGAPAQRDLAVIRARDSLVRARTGLINHARQAVKSQGGRLPPCAATAFARKALPAIPDALVPVLTPHLTVIADLTAQIAQADRDIVRLGRKSYPETQLLQQVAGVGPLIALTFILTIDDPDRFPTSRAVGAYLGLVPRQRASGQRQPQLRITKAGDHLLRRLLIGAAHYVLGPFGPDTDLRRWGLRYAPPGSRNAKKRAITAVARRLAVLLHRLWVTGEVYEPLRQAA

SEQ ID NO: 141517 - protein, 359 aa, unidentified
MRIIGCDLHARQQTVAMLDTTTGEVVKTTLTHEDNHVREFYATLPRPVRVGIEATGSMMWFVNLMEELGIECQIGHPAKIRAAEPRKQKHDRRDADLILTLLVENRFPAIWLPTKELLDLRALLRHRHQWVRMRTRIQNALQAIALANGLRRGPSLWSHDGQSTIASLPLAPHTAHRRTELQALYGKFESDIEQLNQRVEEQAGMRPGSRLLMTHPGVGPVTALATDVFLGDPARFADGKVLASYVGIIPREYSSGGRQRLGGLSKQGNPLLRFLWGEAGAHAVRRDPELQRFYRRKLVQKGLGKARMAVARKLGIRLWIMLRDQIDYNEFCRRGQKSGEACAGMPETRYGATGHRPVD

SEQ ID NO: 141518 - protein, 327 aa, unidentified
MANVSSFVGIDVSKLSFTASYRKENRVVTRDWEYTLDGLESFLKSLPQNTKCVMEATGVYHTKLAFFLFENNVFVSVINPLSIKNYARMQMKRTKTDKSDSKLLLDYAELMNTNLAQWSPKADYCVEIKQLYSMLESKNAQLTRVKNKLEALTHSKQQSSFCIKMCIEDIKHLEVEISSIEEEIERIVKEHAKKDFDILTSIPGIGKKTACLFIAMTDSVKRFDNYKQVISYFGMSPRTYDSGTSVHSKAKICKVGLSTIRKNMYLCGLSARKYNKSCKDLYDRLVEKGKAKKLAIIAVANKIIKQAFALIKKQVFYDENFSSSLAF

SEQ ID NO: 141519 - protein, 437 aa, unidentified
MTIVANTFAFVIGADTHARTHTLAVVDARTGARVDTATFPTTAAGLGRAVGWIARRTSGLADVLIAIEGVGSYGARLARSCQDAGYRVVESFPTPARERRGRGKSDEIDAELIARSVIGIDSDKLRNPREDSGVRAAIRVLIAARDLMNAERTRSINALTSLLRIVDLGIDARASLTKPQIATVASWRSRQEDLATTTARREAVRLAKRIVECNDELADNRHELTALVTASEGATLLEEPGIGAINAAVVVAAWSHQGRIRSEAAFAVLTGTSPVPASSGNTTRHRLNRGGDRRLNQALSSIALTRMSHHPATREYVQRRRTDARTNKEIRRFTLSGRAHTNRSPGLQRPVDVKVGQSLGSNGIVEGATGRAHGLDCEDISRPRASWRREVLPEQGVRHAHAIPFDVDSVARSAYLHRGDPFERDVIMTLIGAFRYL

SEQ ID NO: 141520 - protein, 309 aa, unidentified
MKKEKVYVGIDVAKAHLDVAFEQARWRLSNDARGHRELVERLAKMRPSIQVICEASGGYERALLLALERGGIDFSLVQASRVRQYARACGLLAKTDAIDARLLARFGQAIAPPPRKTLPPAQEQLRELEAHRRHLVRLLVAQQNRRAQLSNKTLLGLNRHLTTQLRKQIAQIEALLAASIEQDQALSRKARKLTSIVGVGPRTATLLLAQMPELGQLNRREAAALAGLAPFNRDSGSLHGKRAIFGGRRAVRCGLYMAALVAARRNPILAPFYQRLRQAGKPPKLALTATMRKLLIVLNSTLKIDPLPA

SEQ ID NO: 141521 - protein, 351 aa, unidentified
MDRYIGLDAHSSSCTVAVRGPSGRKLQCQVLETNASALINFLKTIPKNRRLIFEEGNHSSWLYEVLAPHVQEIVVVAVQRSRGQKDDEHDAFGLAEDLRIGDVKVRVYKKQGEFAILSHLVKAHGTLVADTVRCQNRIKGLLRSRGIGACGKRVYSAKSRDQWLSHLPVQTHGQVNLLYSQYDALLELREQAEKQMLTEARKHVLYRVIKTCPGLGKIRTAQLMPVVVTPYRFANKRRFWAYCGLGIVMRSSSDWVRAQNGEWIKSPTQKTRGLNRNFNRSLKNVFKGAATTVIRCARKDDPLYRHYQQLLDGGTKPNLAKLTISRQIASIVLSVWRSQEEYDPKKLSQKT

SEQ ID NO: 141522 - protein, 412 aa, unidentified
MKYYTSTTEYNCGIDLHARQMYVCVMDRQGKKLVHTNVKDNDFAFLLKLVEPYKHDLTVCCECMFGWYWLADACQEVGLTFVLAHALYVRAIHGGKNKNDRVDSEKLTHLLRSNLIPPAYVYPAEKRPLRALLRQRIFYVWRRSELLARIHSHQLAHNRIPAKQTRRTRDTWEQALLNAEDHPLRQIALKNDLAMIQHFDCQLVQLEEELQRQTKKVASRDYELLQSVPGIGETLALIILHEIGDINRFPTVKDFLSYCRLVKGTVASAGKIKGLRGAKLGNPYLRWAFGEAAVIAKRDHYLIGPLSQRLEAQMGGNKFKANTVVAIKLARAVYFMLKNKTVFDPERLVAVMQKCFSPGRKQPGRLTGCAKKAMPLPAAEHASCAPSTPLCVGQASNPSQSIGTCGQGQNAS

SEQ ID NO: 141523 - protein, 336 aa, unidentified
MRSDGEVFVGLDTSKLKISVALAEEGRNGEVRFLGDIENSPDVVRRIVAKLSGKYRRLSFCYEAGPTGRGLNRQIRGLGHGCSVIAPSLIPKRPGEHVKTNRRDALTLARLHRAGELTTIWVPDPDHEAIRDVVRAREAAIEDLRAKRQHLQSFLLRHGRRYTGLGSWTQVHARWLSNLIFAHPAQYLVLREYRQAIEDAETRLERLEQQIAELVTSWSMAPVIEAYQAMRGVAFLTAVTFVAEIGDVRRFDTPRQLMAYLGLVPSERSTGELVRRGNITKAGNPRARRVLIEGAWTYRYRHASAGPGRSDRRACPKPCARLPGRRRCDGVLAIAD

SEQ ID NO: 141524 - protein, 454 aa, unidentified
MQKQDSYDYYVGIDCAQNKHDFAMKNNQDKFLIKKGHFSNTLQGYEKFLNTVLSKCLDKDKILFGMEVTGIYGTNLYERLKSDGYHVVMIFPDSVKNYRDYKRLNKTDKIDSACIAELLLNGDAQIVHAEKNGYTDLKAYIRRRNALKVTCTQETNRFLAKVCLYFPDLLKVFPSGRATLKAIFSIYPTPYSIIEADFNELVSVLQKASKNKFGVDKANELIHAARNSIVVRKSISDGELYNIHSLIDSIDSLESEIRHLEKIIDSKAEEFPAYHVLLTLTGCGKITAATIVAEIGDISRFHKASQIVSLAGLYGDNSKSGSSVNKRGKISKKGSRYLRHAIYMVAEFARRNNPIFKAYFTKKKNGDRTKHILAVNAVANKLCKVIYSLMKNQSTYIIQYRDLAKLSESTQNEFFQNAETDFSAKTRRKKYLYEDEYGELHEFVFKSIKTALIE

SEQ ID NO: 141525 - protein, 341 aa, unidentified
MPPFQYFVGLDLGAEKFSAAIGTAPWKLLVRATEFPNTPDGFEQLLAWWQKQNHPREQTLWCMEATGVYGEALAYFLGAHGHAVAVEPPLKVKRAFAPHGHKTDAVDSQQIAEYACRFQDEVKLWQPRSEILEQIKVLLTTREQITVQRTGHQNALHALKRKAVRTPIAEHIHEQVLTELRAHLQAIDAELRRLIEHEPPFQKLFALLLTIPGVGLQLAAHLLVLLYTTAQPLDAKRLAAFLGICPYERQSGSSVYATPTSRHYGPSAPRKLLHLAARSVSTHKPAFRDYYQRKLAEGKPKKVALNNVANKLLKIICAVVTTQTPYDADYRSVKALPASAT

SEQ ID NO: 141526 - protein, 378 aa, unidentified
MPRTATVHAVTAIGIDMGKNTLHMIGLDSRGAIVLREKVSRGRITSRLANLPCCLIGIEAGLATHYVARELAALGHNVKQVPPTYAKPFRQGHKNDFRDAHSVAEAVQRPTTRFVPAKTDEQLDLQALHRVRSRLVSERTAIINQIRGFLLERGIIIRQGLRFLRQALPDILAKRTDVLSPRMVRIVADLASDWRQLDERIEPVTDEIETLAKSDDGCRRVMTVPGIGPIISSAMVAAIGNGAAFARGRDFSAWIGLVPKQMSTGDRTILGRITKRGNGYLRTLFVQAARVILLRPASWPKHSFGVWLARAAQRLHRNVLAAALANKLARIAWTVLALERSYEARITKGLPRLALRVYAGRGSRLGYFIYGIGAERHR

SEQ ID NO: 141527 - protein, 419 aa, unidentified
MGKQRSKVCGIDVHKKFLVATITDRTGNKETKKFFNEIEPLLRLREWILEEHCEAIAFESTGEYWYSLHDVLNGYVEIIVANAYHIKWIPGKKTDTIDSEWIAELALNDLITSSRILPKEQREIRALSRLREKLVKERTDHKNRVHKILDSACIRLSVILSDIFGKSGLTILKGILSGVPLDDIIKKLPKRYQSRSDEIKGEIQSELSERQMIQLQTSLVMIEYLNEKIKEIEQVTLNEMRKQRRELQILMSVPGIGYIGATTLLAEIGDVRDFPSPDKLTKWAGITPRVYQSADKLHTGSITKQGSKHLRWILVEIAHACVRVKNTRFRTFFDRIFARSGYKKAIVAVARKILKLVWHLLSNDELYEEENAPVHKSSRLPNLKKSPSFTLSEAIELIVKAGFHIVEHDNSVNKRSLGN

SEQ ID NO: 141528 - protein, 437 aa, unidentified
MNTKTLFVGIDVSSSQLDVCFMDQEGRKIVPIHTYPNLPSGFKRLRQDALAFSRIIGKNIPIVIGFESTATYHKNLQKFLENRKSKRFTIRLINPYRIKEFRKSHFKLSKTDKIDAYMIAKFLKAFPENPSTSSSPLQDSLRSLTRFRRTLVEERTRYINRLRKNLNLIYPGYRKIIGKKFTTSFLSFISTYPTSENIKNSSIPSSWKKYLALFPLAQDKPSHILTNEIIWSAERIIQLQKQIATIENEISTIMDTYFPDHILFSIPGIGKITVATIIGEIGNSVDRFPDAKHFVGYIGLYPVVYQSGKNKVFFKMTWKGNKHLKMALLLASASARKNNPLMRNFYNRIRSRGKSKKAAGGALARKLACLVYAILASGKKWDENIAFKSIKRANEMTTQNFPVVENDIIKTGRPTIDFSTRNMGLPPKGISGSTRLT

SEQ ID NO: 141529 - protein, 403 aa, unidentified
MWAKARVLNILKGCDLMIYVGIDIAKITHFAVVMADNGELLVPIFSFNNDIKGYRLLLSKLKPFKKSNLVIGLESTAHYANNLISFLFERKYNIAVINPIQTAALKKTNIRKTSTDKTSTLLIVKSLIVNGYRIFTQQDMVYLRLKSLCRFREKIKKSKARLKIQLVTYIDVAFPEFQYFFDSGLHIKTCYTLLKKHSDPDEIAALHLTYLGNLLRKSSHGRFGKEEAIALKSLAKSSVGTGSTAVSLQITHSISQIELLEEQIKKLDEIIKSIIIEMDPVILTIPGIGFLNAAMILGEIGDISRFSDPSKLLAFAGLDPVVKQSGKFYAKEVRMSKRGSKLLRYALMNAAWNVSLNNKTFHDYFQLKRSQCNHHYAAVGHVAHKLVRVIYKMLKDNVAFNLD

SEQ ID NO: 141530 - protein, 335 aa, unidentified
MQIYGIDLAKEKFDVSFFDLTSKKVSNQPSHKVVKNNLKSIGRFLETLPSDAVLVAEHTGVYGDTLLKCCMDSNVKIAFVGGYVIHRYRATPDRAKTDVLDCALLRDFGERYPDKLKYKTFPEEALYELRQLARHREMLVEQRKQLMTADKSEDCRPIRSLAVKRSMDRIKEMLDTEIAETEKEMLKVIDGHDSIHHNYEIVKSVKGVGLVTAVELLVKTDNFTKITTARQYAAYAGTAPYEKSSGKMDKGAHISKIGNRRSKTLLYICAESARLHNKEIKLYYERRTLIDKKPRHYVLNAIANKLLRIIFTLVEKGEFYDVNYIRQDPRLVKHN

SEQ ID NO: 141531 - protein, 354 aa, unidentified
MDHYIVSCDAHKRYSLFGTLNLSTEARTHSRVEHEPGAILAFLGKLPGGTPVALEAVGNWYWIVEEIEAAGCLPLMANAGKAKVMMGHVDQTDKLDADGLLTLLQTGTLPTVWLPPGAVRDARELHRTRMALCKDRTGLKNRVQATLAKYALSIDEETDIFTGKGRERLELTVQSLPPETGRCVQQELQVLDYLQKQIHAMEKRIRECVKLTPTMQLLKTLPGVGDILAIVIALEMGCADRFARAEQFCSYCGTVPKVRSSGGITRYGHTRQECNHYLKWAFFEAANVAASHRKARAWCDRHIVRLYERVRKRKGQGVAIGAVARHLSEAAYAVTLRNEPYREPNPGKGLPKQR

SEQ ID NO: 141532 - protein, 463 aa, unidentified
MADKPMREMRSKPSTRVPRGMPTVHPRAAGLDVGSTFHVAAVPPELSEDPVRTFQTFTGDLHRLGDWLRSVGITTIAMESTGIYWIPVFEILEAHGFEVLLVNARDVKNVPGRKTDVNDAQWLQQLHQFGLLRGSFRPHERVIQLRAILRHRERLIESGATQIQLMQKALMQMNVQLQHAVTDITGLTGMRIIRAIVQGVHDPAVLAQYRDGRCKASSETIQAALNGHYRPEHVLALRHALEIYDFLHHKMAECDTEIASVLQTLNEDRPMPAKALPRARHQGSKNEPRFDVRSALYTMLGADLSQIHGLGPYTVLRLIGECGDDMTKWPTVKHFTSWLSLAPGNKISGGKVLSSKTRRSSNRAAALLRMVAVNIGKTQTALGAFYRRLAARVGKAKAITATARKLAVLFYNALRFGMAYVDPGVDAYEARYRQRALHSLKRRAKQMGLILVEASADCAPGVS

SEQ ID NO: 141533 - protein, 357 aa, unidentified
MTAIALGWDVHRKFSQVSVQRREDNGEIRVIERVRLEHADREAMRRWLARLDAGAAVALEGAFGWQWIADLLAELGLEPHLGHPPAIKVLAKNEAKGDRCDADRLGRFYLKGIFPESYLATVEVRQLRERIRYRAAIVGLRTGVKNRIQALLHRLGLLHDYSDLFGKGGRAWLDELKLPAASRAVLDGQLKLMDLLTDLIQSIEAWMKRHLEADEIVRLLETIPGIGLILAHVIRAEIGELARFPRVKQLVSYSGLAPLSDDSADRHGRRRISPYCNHSLRWALIEAAGIALRSRHLPERLRRLYNRLSHGGRSNKAQARVAVARELCEVVYVVWKKGEAYREHPRVRPGTRPIAHA

SEQ ID NO: 141534 - protein, 383 aa, unidentified
MDHKRGNQSREQSAQVPVLYVAFELANSSWKLACSDGSKLRHVNVTSGDLAQVQGAIIGARRHFGMGDEVRTVSCYEAGRDGFWLHRYLQSCGIDNVVVDSASLEVNRRLRRAKTDRVDAGKLLSMLMRYHGGEKQLWKVVRVPSREDEDARHLHRELEALKRERTRYRNRIHGILIQQGLRINNPSKKKFVHELELLRTWDGRELPPEMQVRLIRVYERLRMVEDQISTLVKEKTQRLKDENARMAQVAQLLRLPGIGPVSSWTFVMEFFGWRRFRNRREVAALAGLTPTPHDSGERLREQGISKAGNRRVRTLAIEIAWAWLRFQPRSKLSRWFLERFAGGGSRMRRIGIVALARRLLIDLWRFLEHGVVPEGAQVNTLAV

SEQ ID NO: 141535 - protein, 351 aa, unidentified
MPRTSNVRAVTTIGIDMGKNTLHMDGLDSLGAIVLRERVSRGRITSRLANLPPCLIGIEAGMATHYVARELAALGHDVKQVPPAYAKPFRQGHKNDFRDAHAVAEAVQRPTTRFVPAKTNEQLDLQALHRVRSRLVSERTAVINQIRGFLLERGIIVRQGQRFLRHLLPDILAKLTDVLSPRMVRIVSDLAGDWRQLDERIETVTDEIETLAKSDESCRRVMTVPGIGPLISSAMVAAIGNGTAFAKGRDYSAWLGLVPRQMSTGDRTILGRLSKRGNGYLRMLFMQAARVILLRPANWPKHSFGAWLIRAAQRLHPNVLAAALANKLARIAWTVLALERSYEARVTKAAA

SEQ ID NO: 141536 - protein, 318 aa, unidentified
MTPTPARFVGIDVSKSTLDVHVRPDATARQFANTDAGCRALIEWLTPLAPSLVVLEATGGYEGTVVAHLSLAGLLLSVVNPKRVRDFAKALGRLAKTDAIDAAVLAEFAEVVRPPVRPLPDANAKRSQAILARRGQLIGMRTAETNRLGGETDAFTRASIAAVLRTVGRLIGRVDRELDTAIRSCPAWAAKDDLLQSIPGIGPVVSRTLLAEMPELGTLTRGEVAALAGVAPMNRDSGQQRGKRRIAGGRAAVRSVLYLASQAARQGNKQWRAFSDRLKAAGKAPKVIRIALARKLLIVANAVLRSGQAFREIEPKIA

SEQ ID NO: 141537 - protein, 325 aa, unidentified
METKILCCGIDVSHITLDVCYQNNLGELFHLQVGNNVKGFAKIMEHTGVDYHFVMEATGVYYIRLAFYLHQHGCKLSVVNALSIKRFIQMHLERNKSDKKDAKWICRYAIDQHPPYWEMPDSAYFECKQLYNTIREYTEQKKRFNNQLHSIKLLPVPSKDTIRSLEKVNKQLAEQIDHLEVKLEALLKQWQPEQLKNVSSIKGIGKRATAMLIVFTQGFKNTHSHRQLISFAGLSPTEYSSGSSIHGKSRIYKKCGKNLRDVLYMCSMNAMKTNPACKALYERLRANGKTGKQALIAVCNKLLKQVFAVVKNNTLYQPNYCSAKP

SEQ ID NO: 141538 - protein, 340 aa, unidentified
MTMFAGLDVGFKRTAICVVDERGEIVWRGNVDTHPQALSAALRRWREGLTKVGLETGSLSPWLARELAAAGFAVVCMDARRAADAVKSRRVKTDKADAFALAEMLRTGWYSAVHVKSETSHKLKALLGARDQLVRVKRALGNQVRGLLRPFGIKLPSRQGTKKFTEAAYGAVRHDALLFASVTALMEALAAIESQIARLDEELKELARRSPVCWRLMSVPGVGPIVALAFMAAIEDVGRFRRMRDIGGYLGLTPKRYQSGETDVVLGISHQGDAMARHYLYEAANVLLTTVRKPSALKSWGLKLLKRRGPKRARVAVARKLAALLGRIWKDGTHFGMASA

SEQ ID NO: 141539 - protein, 364 aa, unidentified
MPSMPQPAQPDHNTTDEVILGVDTHKDIHVAAVITALGAVAASRSFPTTMVGYHQLLAWARTFGTLRRAGVECTGSYGAALTRHLQAAGITVIEVNQSDKATHRRRGKTDIIDAQAAARAVLSGRATATAKTGDGPVEMLRMFKLAKSSAIKSRTQAINQLKAVLVAADPTLREALSGLSTPILIRQCAQLPAGAPSDATSAATWTLRLLTRRIVELTGEIDDLNQQLARAVNRHTAKLLARPGVGPDCAAALLITAGDNPERLGSEASYAALCGASPVEMSSGKTARLRLNRGGDRQANAALYRIALSRLRWDPQTRAYLARRIAQGKTRREALRCLKRYIAREIYQIITKPRPHSTAASTAA

SEQ ID NO: 141540 - protein, 359 aa, unidentified
MQTQSKTLDFDGQNIYVGFDVHLKSWKVTIMTDDLILKTFSQPPEPVVLHQYLLKNFPGGVYHSAYEAGFSGYWIHNSLVALGIHSIVVNPADIPTTNKEKVQKEDKRDSRKIAKALRSGDLVPIYVPSSKTLEDRYLIRARGLLVKDLTRNKNRIKSFLYFHGIKYPPCFDNSKTHWSKRFIDWLEGIDMKEDSSKLTLSILVSEGKKLRTTILNVTRSIKELSITVAYQEQERLLRSVPGIGLLTAMIILTEIETITRFANTDHFHSFVGIVPSTSSSGEDEKVGEITPRGHTTLRSAIIESSWIAARIDPALTKAYHEYCKRMEPNKAIVRIAKKLLNRISFVLKTKQSYRLSVLK

SEQ ID NO: 141541 - protein, 337 aa, unidentified
MKYSGIDLHSNNSVITVTDETDRVIAEKRLPNDLTRIVGFLLPWRDELKAVVVESTYNWYWLVDGLQEAGFVVKLANTGAIKKYAGLKHSGDEADARQLAQLLRLGILPTGTILPPEHRAVRDLARKRMQLVRSRTSHIIAIGNIAARQRGMKISSNQIKKLTPDEVDQMLFPADVALAIKSNLAVVTTLGEQIDLLEKRLQERAGKRKEFVLLSSVPGIGDVLATIIMLETGSIERFASAGNFASYARCVDSQHMSNGKKKSEGNTKNGNKYLAWAFVEAANFALRFNAEAKRFYERKKAKTNTAVATKALAHKLARACYHMLKENKPFDAARCFA

SEQ ID NO: 141542 - protein, 351 aa, unidentified
MMIIGVDYHPSFQAIAFLMEETGECGEQELNHSDGQAEKFYRDLQQRGISVRIGMEATGYSRWFERLLAELGFELWIGDPAEIKAKRVKKLKYDRYDARLLRRLMLENNFPRIWVPDPENRDLRQLLWHRHRLVQMRTRIMNQLQALAMNEGYRWKKKLFSEQGRAQLEKLALAPWASRRRQELLELLDRMNPTIEELTAAVEREARKRPEVLRLMTHPGVGPLTALAFVLIIGTWERFSRGKQIGTYVGMIPSEDSSAHQQRLGHISKQGNSLLRFLLVEAAQAAVRCNPEWRRRYMHLAMRRHKSIAKVAMGRRLAVRLYWMWKNGCEYSQSLEFGSYAGQLVTGHGVK

SEQ ID NO: 141543 - protein, 410 aa, unidentified
MTEQDPSTNRYDVYCGVDVGKSEHHACALNPAGKRLHDKALPNDEDALKGVLGKLQTRGRVLVIIDQPASIGALVIAVARKMDIDVAYLPGLAMRRIADLYPGEGKTDARDAFIIADAARTMPHTLRRVGTDDETVADLTVLAGYDDDLATQSTRLTNRLRDALLHVHPALERLLGKHFDRPGVLELLVAAPTPDALARLAPEAMTEIMKPRSPRLAKTLPAKILTALDEQSVTIPGTQAFGRVISGVAAQLRDIHLERACLGAELEARLEAHPLHEVLTSMPGLGVRTSLKILTIVGDGSAFPSAAHLAAYAGLSPVTRRSGSSIKGETRSQRGNHALKNALFQSAFASLTDPTSRAYYDRKRAEKKKHNAAVICLARRRTDVIYAMLRDKRPYQQPTTKNPENLATTA

SEQ ID NO: 141544 - protein, 341 aa, unidentified
MSIATLGIDLGKTTMHVVGLDASGKPVHRKKLTRTALIRFLSNLAPCRVAMESCAGSHDIARKADAMGHDAVLLPAQFVRPYTKGQKNDNSDAEAIAEAATRPTMPTVSIKDATQQEIQFLHRTRQGWIKQRTETANRVRAMLLEFGITVPQRILNLRRALPGILEDAENDLTDGVRQLVADHWQQLQELDDRIADITQRIERIPVRDSRAARLMSIPGIGPMIATAMVAAVGDGTQFTQGRGLSAWLGLVPQQFTTGGKPRLLGISKRGNRYLRTLLIHGARAVLQQAHRGDDALRRWTQQVNGRVHRNKAAVALANKLARVAWAVLTRGETFRASAAAA

SEQ ID NO: 141545 - protein, 348 aa, unidentified
MNFKMQDKQNQLIERISDTHLIVGVDIAQQLHVARAVNFRGIVVGDPLTFENNKEGFVKLLSWIQNLQKLKNLDSTIVGMEPTGHYWINLSKWLDKQNIEVVTVNPHLVKRNKENRDNTQSKSDKKDALVIADMVKNGYYSFVRPTSESFEKLRVLISNRDVIVKRLVMSINQVNRWVDVVFPELRQVFKDVTCKGAIATLRLFPTPDEISSLETLDVMRGWKSLMKRQPGPKKAQLLINLAKSSIGTGQALDAYKFHLEQLLEEYDLAVKQLERVEQQVKEVLYKIPFAKKLLMIKGISEISLAGILGESGDLRGFSHGNSLLRHAGLHLAEASSGKWKGQIVISKR

SEQ ID NO: 141546 - protein, 460 aa, unidentified
MSDGSGVSRGDRNRNARLSRLREAVPVTNAIVGIDLADRKQMVVVTDHDSKVIARQTFRCKAWDLGGALDWAVDRARRKGFPGVTVACEPTGHRWMVLAQLAAERGMSFVCVQPAASSWARKSEDLTMDKTDDKDAVLIARLTGQLRCYLPEPVDESNAAWTRLRHLGARREDLLSEHVAAVQTVRDLLECVWPAALEVAAQPFKSATWVAALAVVVGQGRGRDGGDLDRTRRLGSARFERAVRAEVTRRGGVRPCLRIVRRLFAALTDHSGVIAHRPAVFERIEWTLTDWDEARCKLLDVEVRMVGVLDKFGLTALVTSIDGLSPVGAAAILAQTGDLARFTSARAVVKHAGLAPRERKSGTFTGRARVTGAGRPQLRVAAWRAVWGCLQTNRVYAARYRHLTSREHNRLTPTQAQTAVAAAILRQLYAVVTQQRAWNPIIAAHGTPTWKETTPSTAAA

SEQ ID NO: 141547 - protein, 311 aa, unidentified
MTIAHRFIGIDVCKTHLDIYDEATGTSQRIANSATAIAAMLAGWPSAGVRVIFEATGSYDRILRSALEAAAVAYVRVNPARARDFARATSALAKTDAIDARLLASMGRALALAPSQAPDPQRQRLTRLQRRRDQLVAARADDKKRLHVAEDEEVRASIAAHIAWIDAEIERLQALADRLVAGSARLLALRKQLETVPGVGPVTALTLIALMPELGQRSAKTIAALAGLAPFNNDSGAFRGQRHIRGGRRRVRQALYMAALAAIRKVPHLAAHYRNVAQRSGHAKVGIIAVARKLLVTLNAMARTGTCFVPA

SEQ ID NO: 141548 - protein, 434 aa, unidentified
MIAAAIERCAGIDVGKRFLAVCMMVGPLEGEPRIETQSFGTTVAELKRLRDWLKQEGITHVVMESTGSYWKPVFNILEDAVKVYLANPQDVKNRKGHKTDNKDGWWLAHLMRHAMIQPNFIPPRVIRELRDLTRRRRRLIGNGSSEKNRVQKILEDANVKLGNVLADVFGVSGQLMLEALLQGKARPEEIAQLAQRRARKRIPEIVAALEEHQMSAHHRQMIRYSVQHMQFIEQQIIQLDKDIAQKIHESGLEAQWELLQSVPGVQAVSAATILAETGTEMQQFGDEKHFSSWAGVCPGNNRSAGKNKSSHTTGGDPWLRSALTECAWAAANIKTCFLKEKFWRIVTKSGGKKPPAVVAVAHTLAHLIYEVLATGQPYHDKRGPVLDQRQRERIIRHHIRRLGKLGVSVYSPLPAPSHPHRRVASTPMPESNNP

SEQ ID NO: 141549 - protein, 417 aa, unidentified
MSQEYRRCCGLDIHKETVVACVLPSDANRDEPPRRKVFATFTRDLIRLRCWLKQCKVTDVAMESTGVYWKPVWNVLEGHFDVLLLANPGLVKALQGRKTDHRDARRVGEFLQDRRLDPSFVPPRHVREWRDLTRYRAHLKQDRNRIHNRIHRALEESNIKLDCVASDILGTSGRHMIEGLIDGKFGPEFLADRARKRLREKIPQLKQALRGTLTDHHRLLLRQLLADLDALDAKVARLEAEIAARLQPHSDLIERLCTVPGIDVIVAWTILAEVGSDVNAFPDADHLVSWAALCPGNRQSGGKRISGHTRKGNRYLRSALCQAAWAASRTKDTYLSALFFRLAARHGVKKATVAVAHQLLRIAFHIIRDGGRYRELGGNYFDRLHPERTRKRLIRRLEALGYRVTLAPHDNPGPNTA

SEQ ID NO: 141550 - protein, 383 aa, unidentified
MEAKRKEVDPLEPGRHRCARVEMSSNHSRDRGSTMNVTTYGLDVAKRVFQVHWVEPQTGEVKRKRLARSEVSAFFARRESGVVAMEACGSAHHWGRLLKGLGHEVKLIAAQFVRPFVKTNKTDAADAEAIWEACQRPRMRFVAVKSAEQQAVLSLHRIRQQLVKIRTMQAHQVRGLLYEFGVVVPQGWRVLLTQAGPILAEATRCPAPELVRCELLRQLDGLRTLTTRIAELERQIGSWQRRESECQRIAAIPGVGRLTASAVVATVADARTFRSGREFAAFLGLVPRQAGTGGRVKLLGISKRGDPYLRTLLIHGARAVLRSQSRADRTLDPWLKGLLARRPKNVASVALANKMARTIWALLAHDRAFDRSWSRALPVPALH

SEQ ID NO: 141551 - protein, 344 aa, unidentified
MKHYAGLDVSVKETSVCIIDEAGKTTREVKVASEPEAILAILMNEAFTIERVGLEAGPLSQWLYSGLAETGLPVICVETRHMKAALSAQLNKSDRNDARGIAHMMRVGLYRPVHVKTLASQKRRMLLTRRQLLQAKALDIENDLRGTLRNFGLKVGVVGAAKFEARICELVADHPDLAVITEPLLIARRVLREQLGVLHRRMLAVVRQDEVCRRLMTVPGVGPIVALTFRATVDVPIRFKNSKAVGAVFGLTPRRHQSGEIDRMGSISKCGDAMVRTALFEAAQVMLTRTIRWSWLKAWGMKIARHRGMKRAIVAVARRMAVIMHRMWLDGSEFRWTNPNAAAA

SEQ ID NO: 141552 - protein, 353 aa, unidentified
MAEANDIQDVIGGVDTHKDVHAAAALSVTGQLLGTALFPTTRAGDSQLLAWFTGHGSLIRVGVEGTGSYGSGLTRHLQSAGITVIEVNRPNRQLRRQRGKSDTVDAEAAARAALSRTAAGTPKSQDGVVEAIRLLRLTRRSAMKARTQAGNQIHAVIQSAPTVLRESLRGQSLAKLVTLARRFRRRAATTPLAAARFTLKSLADRWAALEAELRDLDHQLELLVSAAAPSLVALTGVGTETGGALLVAIGDNPDRLHSEAAFAALCGASPVEASSGRQKRHRLNRGGNRDANRALWVVVMCRMATDATTRVYVERRTQQGLSKREIVRCLKRYVARQIYRTLLPALQHATATA

SEQ ID NO: 141553 - protein, 405 aa, unidentified
MAAVMIGVDPHKGSHTAMAIGADEGSLGQVRVRACAAQAQQLLAWAAAWPERTWAVEGAGGLGHLLAQQLVSAGERVLDVQPKLAARVRLLAAGAVNKNDPNDARSVAIVALRSAACLPVRPDDHAAVLKIWAKRHRDLSRARTQVACRLHAVLCELVPGGVSKEIYAAHAAKIVEETEPGGAVQQARLELAAEFVADLRRIDAQLLETRKKLAVAVRASGTTLTEVFGIGPVIAAMVIGDVRGVSRFAGRDRFAAYNGTAPIEVSSGNRIIYRLSLRGNRRLNHAIHMAAITQIRYKHSEGRVYYDKKLAEGKTPKEALRALKRQISDAIYKHLKADAARAAAVGAQGPGGQPGNDSVASAAGSHPEHQLFGQATPGPATTLRHPADQQKRASSRARKKTARTT

SEQ ID NO: 141554 - protein, 391 aa, unidentified
MTEDASRPAQAAIRTALGAIFVSLELSRRTWLITSLSPGGGEKMSKHAVPAGEVSGLLRRFAELRRKAAARTGRDLPIIVIQEAGLDGFWIHRVLQSEGIESHVVDAASILTSRRRRRAKTDRIDGETLVRTLMAYKRGEPRVCSMARAPTPQEEDRRRVCRERRTLMGERVSHVNRIKGLLSAQGVFGYEPLRKGRRERLEDLRTGDGRPLPVRLKAQIIRELDRLEVLLEQLKTVEAERDALLKPASDEAASPAAMLARLKGIGPETAAVLWSEGLFRQFDNRRQVAAYAGLAPTPWQSGSIDHEQGVSKAGNPRLRTAMVELAWLWLRNQPTSALSLWFHERVQRLGRQVRKTIIVALARKLLIALWRYTTAGVVIEGAVMKAAAVTN

SEQ ID NO: 141555 - protein, 393 aa, unidentified
MKVTRIGLDIAKQIFELHGVDRHGRVAIRKTLRRERVLEYFSQLPACEVALEACGGAHYWHREISKLGHTVRLLPAHKVKPYLDGNKNNAHDAAAICEASSRPSMRWVEPKTIAQQDLQSLHRVRQVTVRQCTLLANHIRGLLLEYGIAVARGTAALQRALAQLLEPDEQRLSPLLKQLIAGQWRMLKLHEQQVKVHDRRIANIARHDASCQALLKVEGIGPLTATALVATAGNGRQFKNGRHLSAYLGLVPGHSNTGNKTVMLPITKRGSRYLRTLLVHGARSTLYHARRKTDPRSLWLQRLQAKRGHNVAAVALANKNARIAWALLRFGQAYRPNLAHAPVAEHGATPAASAPGRRAGLTLKLHRVSAASAESPIVPSRPQRVKGGTEKCS

SEQ ID NO: 141556 - protein, 354 aa, unidentified
MKILALDLSKYKTVACDYEAETARHSFVTVLTTPKGLHDLIVECEPDRVVIEICSIAGWVCDLVRTLGIEIQVANTADERWRWRKIKRKSDRRDALKAAQLSAVNQLGPVHVPQLEVRQWRALIAYRQQLVQRRTRIRNHIRDLLQREGMILPRGRTAWTQVGMGNLQALVRPLTEVAVTELWRGELGVELAQLRELQQQIQTVEAKLDELGAADCRVQLLQTIPGVGPRLAEAVVTMFDDPARFRRSGEVSAYIGMVPKQFDSGETERSGHITRQGNRLVRSLLVEVAWASLRHNPWARQTYQRLHGGQKSRKKIAIVAVGRKLLVRCWAMLRDQTPWHPELHTAVAPQLRGG

SEQ ID NO: 141557 - protein, 415 aa, unidentified
MALKIVYKICCGIDVHKTFVVACVASTSDKGITSYESHRFSTYTSGLKTLLQWLIDRNCKDVCMESTSKYWIPVYNILEKGCSIVLAHPKYVKAIRGKKTDKKDAKWIADLFKHDLVAGSFMPPSDIRQLRDLMRYRFKLTCFKSSEKNRLQNCLTVSNIQLGNVVSDTFGKSAQAILDKILENPADTSFDLEPLVFKSLKKKLPELRDAIDGYITPEQAGKLKVIKTHYENLESRKAELEELILALAAPYQQELAILQTAPGISSDFTAIGIISEIGTNMEAFPSAKHLCSWAGLTPTNNESAGKKKSVRFSKAGCCIKPLLVQCANAVVKSNKHPEIRNRYLRLKKRRGHKKAIIAIVRMLLTALYHMLKNEENYNAELYRKSDLPPVDREITIEQALMIARNQGYRIKSATA

SEQ ID NO: 141558 - protein, 340 aa, unidentified
MSEITTIGLDLAKHVFQVHGIDAEGTTVLRKRLRRNQVLGFFSRLPRCVVGLEACATAQYWARELGALGHEVRLMPAQYVKAYVKRNKNDAADAEAICEAVQRPTMRFVAVKTAEQQAAQLLHRGREQLVRQRTMLVNALRAHLAEFGMVAAQGLRNVARLIAIVRDASDLRLPDVARQVLQVLSAQLEHIEAAIAALEKQLMAWHKANAVSQRLASIPGIGPIIATAIATTVADPGVFRSGREFAAWLGLVPRQNSTGGKTRLGGITKRGNRYLRRLLINGASANLLRSKATKADPWVIGIRRRRPPLVVAVALANKTARIAWAVMLREKEYQPRAVAA

SEQ ID NO: 141559 - protein, 359 aa, unidentified
MSSISPPGPLSKIIIGVDTHKYVHVAVVLDDDGQRLGDLRVPVDSLGYQELDRWAQSFGRIIAYGIEGTGSYGANLTSYLRRQGRKVVEVNRGDRRARRANGKSDTLDAELAARSIIAGTSTAVPKSADGTVEMIRKIKVARDIACKNRTSAIISLKTVIVNTPQELKEQLDSLGDKALIQKCSGFRPGTVDDPISAAKHTLRALARRWEFLNAEVKDHDAVIAKLTTSLSPTLCDGFGIGPDTAAEILIVFGDNPDRVHSEAAFAKLCGVAPIPASSGMTTRHRLAWNGHRQANAALYRTAIVRMQHHQPTKDYVAKRTAEGLSKRDIIRCLKRFIAREVYGRVMADFRARTALSAAA

SEQ ID NO: 141560 - protein, 426 aa, unidentified
MNEIESIRLEQFRQLTKDIRGSKDYLIVGIDVAKDKHNAFFGTATGKTLFKRLVFENTREGFKRLLIHSEAIKVQHALTKTVFGLEPTANYHKPLGEFLIKSDHMVVLVSGVAVKRNRELLDGRWDKHDTKDSANVADLISQGKCLFYEYPSMALRELRSLLSLKRRLKKQEHGLKVRIRNNLLATYFPELDRYFGQSESDSLEIVKWCLNPSGIAGLEYEQFLQMVAPQKKTICHQNRLKAIWKKAADSIGCDAGESLEFEAKVMVKGLQQMRNTIRDTDNKIGDICCEFPEYRYLLTIPGFGPDVSSKTLGAIGDPFRFRTGKQVLKMAGLDLSAERSGKGSDSARPVLSKKGKAHLRYALYQAAMIASTRNKHFIAYYTNKLRGREKEKGIKTKMRVKLAVKLLIIAWTLMKKKEVFYTPQAY

SEQ ID NO: 141561 - protein, 406 aa, unidentified
MQHLWVGIDAGKTHHHAVVINSDATRLLSRRVLNDEWALRSLIDDVLAIAGGGDLDVVWAVDLNSGGAALLTAMLAARRQTLLYIPGRIVHHAAAGYRGDGKTDAKDAAIIADQARMRRDLQPMRADDEIAVELGILTSRRTDLMRDRTRSLNRLRALLSTYFPALERALDLSNVKGALILLTGYQTPGAIRTVGAAKLEVWLRKRKAYNADGLAALATEAALMQTVKVPGEAMAAQVVGSMATEILDLGRRLAELDRTIEAVFKRHASAAILESMPGIGALLGAEMLAATGGDVSVFGTADRFAAVAGLAPAPRDSGRISGNLKRPRRYDRRLLRVAYLSAQLSVRSCPESKVYYERKRAEGKRHTQAVLALARRRSNVLWAMLRDAKPYNPPSAPRREIPLAAA

SEQ ID NO: 141562 - protein, 335 aa, unidentified
MKTYVGVDYHKRFSFATVMDEAGQVLKQGRLANSPPAVAAFLDGYGGEACAAVLEATRCWETMHDWLAECCGRVVLAHPLKLRAIAEASVKTDKIDATTLVHLLRADLIPAAHVGTPAARLLRRVLRHRLFLVRVRTMVKNRIHDLVDRHAARLPARPVAELFSKAGLAWLRALALDETERTILDAELELLEHLGGQIAHGERVLAGIGRRDERLARLLTIPGIGRTVALVVLAEVDEIKRVKTPAKLHAYAGLVPRVHASGGHVRHGPLVATCNKWLRWALIEAVWPATRADAGLRAYCRRVAHRKGANTAKVATARRLLTIVYRVLKEHREYR

SEQ ID NO: 141563 - protein, 334 aa, unidentified
MKSDMVHMGVDVSKEKLDVFVPAQKEGMRPTAKELDNSVAGFRELRDLARKAGATVCVEPTGGYELELIAFMHKFSVPVAYADALRVRQFARAEGCLSKNDSIDAALISRFADKIGVRLLEEKDVEAVELKRRAKFRQTMSDSRTAMVNRLETEVDPDMKALLKEQIKRINKLIAKAERLCLETVRKNDSTNKLCERFTQVGGVGAITAISILAGLPEIGTLSDKKLNRLVGISPEEDQSGSKDRLRRIWGGRQDVRNALYMAATASLMWNSILGAYYRKKRAEGHPHKWAMVPTMRKLLSLLNRIARDPDFTPRPEPESTKRNAIATRKRKAA

SEQ ID NO: 141564 - protein, 367 aa, unidentified
MMGWMAPLRHLSAKLLVDRISSNGEPSMGEVTTIGLDLAKHVFQVHGVDAEGATVLRKRLRRAQVVAFFSRLPRCVVGMEACGTAHYWARELRALGHEVRLMPAQYVKAYVKRNKNDAADAAAICEAVVRPTMRFVAVKTAEQQAAVLLHRGRERLVRQRTGLVNALRAHLAEFGIIAPQGLRNVGRLIAIVRDEDDARLPDLARQVLAVLAAQIEQLEGAVAAIEKQLMAWHKSNPVSQRLATIPGIGPIIATAIAATVTEPSGFRSGREFAAWLGLVPRQNSTGGKVRLGGISKRGNRYLRRLLINGACANLLRSKATNADPWVIGLRRRRPSLVVAVALANKTARIAWAVMQRKENYQRMAAAA

SEQ ID NO: 141565 - protein, 353 aa, unidentified
MGHKYVGLDVHQSSTVAAVHDEQGKSVMESILATEAEAIRDFLKGLRGTIHVTFEEGTQAAWLYEIVKPVVAEVIVCNPRRNKLLAVGNKADRVDANKLAELLRCGQLKPVYHGMPGVRLLKELVHSYDSLVSDTTRVMNRVKAIYRGRAIGCAGRDVYYQRNREQWLQKLTEPGVRQRAVFLYQQLDTVRGLRREAKKAMLKESGRHPAYATLKPIPVLGPVRIAQILAKVASPHRFRTKRQFWAYCGLAVVTRSSADYQFRGGKAEKRKRAPMTRGLNPNFNRRLKYVFKGAAVDGIHQAPFEGYYARLLVKGIRPEMARLTLARKIAAVTLTLWKRGERFDELKLSEQAA

SEQ ID NO: 141566 - protein, 343 aa, unidentified
MQNDTRIAVDLAKAVFEIAVSDRPGRVGRRERLPRAQFLNFFAQRPAATVVMEACGSAHYWGRRIEGLGHRVVLLPPYHVRPYVRRNKTDRTDAKGILEASRNEDIHPVPVKTVSQQVLTSLHRLRSGWMSERTARINCLRGLLRELGVFIPTGARQVVPAVWALVEEADADVPDTLRPFLAELCQEIREIEARVDRVERQLQAMSQQLPVVAQLLTIPGVGLLTATALLAFIGDIRRFPSARHLASYLGLTPREYSSGLRRRLGGISKRGDGYLRTLLIHGARSVLLRARTHQPDRLREWAHQIAKTHVHNKAAVAVANKMARVVWAVWTHAKPYQSQQLTA

SEQ ID NO: 141567 - protein, 283 aa, unidentified
MKFSGIDLHSNNSVVVVSDEEDRIVYQKRLPNNLEQIRAALAPYRDELVGVVVESTYNGYFLVDGLMDAGYRVHLANTTAIKKYEGLKYSGDFADAAYLAQLLRLGLLPEGYIYPRAERAGRDLGRKRMQLVRCQTMQILAIESILARQTGGRMSSNQVKRLTAQQVEGLGLVPDVALAMEANRAVSETLQQQIEVLEKRLQQRVKLRPEYRLLKTVPGIGETLATTIMLEMGTIARFASVGNFSSYCRCVDSRRESNGKKKGEGNAKNGNKYLAWAFVEAAN

SEQ ID NO: 141568 - protein, 317 aa, unidentified
MKTVPFEQVILRGCGIDVHKDMVVATISGEGLKTETRSYKTFSSSLTELKEWLLSSGITHVAMESTGVYWKPVYKILECPDMKVWIVNARHIKYVPGHKTDKKDSAWICKLLLAGLLKPSYIPEREQRELRDLTRYRNKLIQHVSSEKNRIVRILEDCNIKLSSVVCSLDGVVANKLIDMLIDKGHVTMDEITCIYHKKLEASPELLYQACEGFIEPHHIYMLQTIRKDMEQTKAIIADLTCRIKEVLSPYENVMELLQKIPGLSRKTVEDLIAEIGVDMEAFPTEKHLASWAGVCPGNNESAGKKKGVEPPMATNS

SEQ ID NO: 141569 - protein, 343 aa, unidentified
MKHYAGLDIAVKETSVCILDETGKICREVKVATHPEDLLRILQDPAWHLERIGLEACQLSQWLFDGLAEAGLPVVCIETRHAKAFLKAQINKSDRNDARGIAQMMRVNLFRPVHVKTLTSQKRRVLLTARKLLQEKAIAIENEIRGLLANFGLKVGGVGAVKFEQRIHELVSGLPDLAEIVERLLDARRKLREHFAALHRKLLDLARGDEVCRRLMTIPGVGPVVSLAFVATIDIPARFRNSKAVGPVLGLTPVRSQSGESDRVGRISLCGDGMMRTLLFEAAQTMLRPSTRWSWLKAWAMKVAQRRGGGKAVVALARRLAVIMHRMWCDGTDFRWTREVQVA

SEQ ID NO: 141570 - protein, 426 aa, unidentified
MKLEEKELEKPIRAWIGIDWADEKHDVSRYDVATGKPEALTIRQSPEALQEWLGQLRSRYEDGYVAVVLEQGRGGLLNALMGCEFLVLYIINPKSLSSFREAFYGSGATSDPVDAQLMRDMVRQNPGRFRAWRPDDVMTRSLRLLTEGRRHLVNQSTALTNQLTALLKGYYPQALAWIGTLDTAWACDFLEQWPTLQSLQASRRRQILRFYEKHPRASLDLDEQLKQIHNARALTRDEAVLQSSALMVQALVSQLRPLLASIAEFDRKIAMIFRKHPDRPIFESFPGAGAALAPRLTAAFGTDRDRFQAATEMQELAGIAPVTEKSGKKSFVHWRYACPKFMRQTFQEFADHSRRWCKWAKALYELLRRRGKSHNAAVRALAYKWIRILFRCWKDRQLYHDEVYTKSLLKHGSRLSSLLAEPVENP

SEQ ID NO: 141571 - protein, 404 aa, unidentified
MIFVGIDWSETHHDVCVMDVDGRVLAEGRVPDGVDGVGKLHAMVSAHAEDPSEVGVGIELDRGLLVGALLAAGYAVHAVNPLSVDRYRDRHRTSGAKSDPGDAKVLADLVRTDRHLHRPVAGDSELAEAVKVLARAHQSLIWSRQRQLNQLRNALREFYPAALVAFGTDLASNDAVAVLEMAPTPAQGRSLSTTRIAAALKRGGRRRRTTARAEEIKQALRSSQLEAPEVLARAYGDVVRSTVRIVAEMTAQIDELARELEASFERHPDAEILRSLPGLGSVLGARVLAEFGDDPVRYADPRCRKNYAGTSPITKASGRSRVALARFARNRRLADALQMWAFCSLSSSPGARRYYDAHRARGHGHQHALRALANRWVGILHGCLRRRQFYAETIAWPDVDKVAA

SEQ ID NO: 141572 - protein, 412 aa, unidentified
MEGETVIAGVDTHKDVHVLCLLDGLGRKIWSGSFGADPEGYDRLAEAIGDPGSCMVVGVEGTASYGAGLTRRLVELGYNVVEVLRPKRDKVRPGEGKSDPLDAERAARKAASGRGCSVPKSQDGWVEAVRQLYVARRLAVATSTSCVACAKSMLTTAPGALRERFRGRERPKDLMPLLARRRKAGDALEESVLASLRSVAAVWKEARSQVESCDERIRALLEANAPALLGVEGCGTTTAAALVVAAGDNPGRLKGEAAFSMMCGASPIPASSGKTDRHRLNRGGNRQANWALYEIAIKRMAYDERTKRYVARRTSEGKSRREAIRCLKRYIAREVYRVLMDPNPDGAAPEGPELAKMRKAMRVTQKQAAEGLGLSAATLGHLEHGRRRSTKLERRYYELLCELKGALPQTAS

SEQ ID NO: 141573 - protein, 500 aa, unidentified
MTSSVPAAIPDSECLVLAFPLVVIRPVKRMEDHVREGSVNAVKVRLGIDIACRATHQASCADDAGRLLWSGHRFHTDAAELEALWARLPEAAVEVMVVMEPTRNAWVPLASWFRRRGAIVVMVPSEQAADLRAYYSKHAKTDRLDSRVLARLPILHPDGLHLQHALGPGDPLKRAVKLRSSLVHRRSTCMQRLDALLELLGPAWVAAIGSDMTKTAFRFLAVYADPHQVKRLGRARLARWFARCSRGTWGDERAGEVVAAAEATLALWGDEGLDFVALADDIAAEARIALGLSEEIHELEERITVLYRAADPDQIVRSAPGVGKVLAAQIRGRLGDPDRFTSLAAARSFSGLVPRHHASGTTDHHGGPTKQGDACLREALFMAADHARKVDPTLAARYQRLMTDTARHHTAALCTIAAVLLTRIVACLRSGQPYQLRDVDGRPITPAEGRSIVTQRYRIPPEIRAARRCMTSTHRPPRRDERAKQGVAKRSKATPAPTSA

SEQ ID NO: 141574 - protein, 342 aa, unidentified
MQITTIGLDIAKNVFAVHGIDAAEKVVVRKQLRRGPLLAFFKALPPCLVGMEACATAHYWAREFTKLGHEVRLMPAKDVKAYVKRNKNDAADAEAICEAVRRPTMRFVRIKSAEQQGQLMQHRTRDLLMRQRTQVINALRAHLAELGIVAAQGDKGVKELLALVTDKEDTRLPIDARASVIVLAAQLEATQTMIGAIEKRIKMQHRSNEASQRVETIPGIGVIGATAIAATVADPTVFRSGRDFAAWIGLVPRQDSTGGKQKLGPISKQGDRYLRRILVIGAHSVLRRAMQNPEKYPWLTRLLARRPFKVVAVALANKMARMAWALLAHGGTYRAPALVAAA

SEQ ID NO: 141575 - protein, 444 aa, unidentified
MAMRKREDEVFPNAAGIDIGASSHWVSVPRHLAEGAGCDPVREVGAMTEDLNALAAWLVSLGVDTVAVESTGVYWIPVFEVLEQHGLKVWLVDARQLKYVPGRKSDVQDCQWLQKLMSLGLLRAAWRPSAEVCVMRAVARQRETLLTSQASWVQRMQKALLQMNIQLTEVVTDVMGVTGQAIVRDIVAGVRDPRQLARHRQRRVKASEAEIAKALEGNWREEHLFVLKQSLAMYDDIGRHLADCDARLDALLDARSRTQVALGKLPRAGSKTRVEHDIRQRLANWAGVDLTRINGLGVTVVMKLLTEIGPDVSRFASVKHFCSWLGLCPGTKISGGKVLSSGTKRSANRARQALKMAAQSLWRSESALGAFYRRLSARMDKPKANTAAAHKLARMVYFMLTRGEAFVDQGQQRYEEQQRQRSIAALKRRAAALGFQINPVATAA

SEQ ID NO: 141576 - protein, 316 aa, unidentified
MDILGIDVSKAQLSLALLQGESVARKTVSNNSSGFRQILTWLKNRKVGQLHACMEATGTYGELIAEHLHDAGFTVSVVNPIQIKAFGRSAMVRTKTDGVDALLIAQFCRAQGPPAWEPLPEKARDFRALMRRREALVDMITAESNRLEAASAKEVRRSIRAVLKALKDELFVLEKQIKDHVDSDPDLRALVDRLDELPGVATLTAMKMLAETNSFTVCTTARDVAYAGLNPSHYQSGTIVRRQRISKIGNGALRKALFYAALAAKNHSRYFKPFVDRLQAAGKRPMVIVIAIMRKILVLAHTLVTKGTRFDPAMAA

SEQ ID NO: 141577 - protein, 340 aa, unidentified
MRQYKLIVGLDISLDSFLAFLISSDENFTAGPKKFKRSEDGIAQLLLWIYKLGFNPNEVKVVMEATNNFWEIIAVKLDKAGIGAISIVNPKIIKDFSKSLRKKAKTDNIDAEVVALYGVRMKPENTDLKKSKKFGELRYLIRTREFWIKEKVRLENYVRNLKRSVFASKKETEWIEKEIKRIIEHIKEIEKEIEKLVEEVEELKKAVKLVDSIPGIGKVNGVVILVETGMFEGFKKGKEVVSYAGIVPRVYESGIRKGDRGITREGNKRLRNAAYFAAVASLRSSCEVFRKFYERLVSRGKAKKVALVALAGKILRIAFALVKKEEIFNDQKLRLTNLGA

SEQ ID NO: 141578 - protein, 314 aa, unidentified
MAGYVGIDVAKASLAVATAPDGESWAAGYDAAGLAALVTRLDGLQPTLVVLEATGGYERPLVAALTAAGLPVAVVNPRQVRDFAKALGRLAKTDTLGAQVLARFAAAVQPDARPQAPAETQALAALLARRRQVVAMITMEQNRLPTTAVALRPRITAHIAFLRAELATLDTALAEAIQAEPAWRERHDLLRSAPGVGPVLATTLLAELPELGTLTRREIALLAGVAPLNADSGTLHRKRRVWGGRGNVRAALYMGTLVATRCNAPLRAFYVRLCAAGKPKKVALTACMRKLLTILNAMLHHHTPWQPQPADQGA

SEQ ID NO: 141579 - protein, 340 aa, unidentified
MPGPRARIRKAGRSGVLNPSRKEPVNSTKEIFVGIDVSKARLDIHVLPSGDAWATENQTDAITTLVSRLKPLHPTLIVLEATGGLERRVLAALLTANLPAVAMNPRQVRDFAKGMGYLAKTDAIDARVLALFAEKARPEVRSLPDTQTQELEALLVRRRQVVEMLTAEKNRLTSAPPSKRVIRAIRKTIACLESQLEDFDKNIDDAIRESPAWREKDEVLKSAPGVGRVLSRTLLGHVPELGTISTKEIGTLIGVAPLNCDSGKFRGQRHCWGGRTEVRNVLYMATLSAIRRNPVIKAFYDRIRSGKLRKVAIVACMHKLLTILNAMVRSNSRWSPAVSA

SEQ ID NO: 141580 - protein, 315 aa, unidentified
MTDMSLSAGIDVGSAWLDLGFHPFAKPIRARNNEAGVGTIVAALRQRGVGRVALEAIGGYARKLVAALIEAEVTVFLVNPRRIKAFRDAEGLRAKTDRLDASLIARFAHAMAHELRPLADTEQAVLKALSTRRRQLTESIATEKTRLKQAFDPLVVASCREMIAILEEKRQIIEHDLDRRIEAEVRMARRRAILTSIPGIGPRISSLLVVEMPELGVIDRKAAASLAGLAPHPSQSGLSSGRNAISGGRPCVRAAFYMAALVATRSNPNFRRAYRQLRDAGKPAKVALIAIARRMATLANALIRDDITFENSASA

SEQ ID NO: 141581 - protein, 342 aa, unidentified
MSHYVGLDVSQKTTTICIVDEQGQQLWRGACATDPAVISARVLKHAGRNAKVGIETGAMTPWLVHGMRGQGLDVQCLDARRVKAALQMRINKTDENDAEGLAQIMRTGWYRPVHVKSLDAHRARALLGARAQLVGMTTRLSNMIRGVLKTFGLLPGAGRGRRFDRQVEALLEAAPEVGSIVRPLLATWRQLREQIAVFDKAVRGQVGADPICRLLMTVPGIGALSSLVYVSTVEDPGRFSRSRSVGAHLGLTPRRYQSGETDRSGRISRCGDSLARTLMYEAALVVLHRVKRSLHLKDWAAAIERRSGSGKARVALARKLSVILHSVWRTGEPFRWAPQAAA

SEQ ID NO: 141582 - protein, 409 aa, unidentified
MLKIVYPNCCGIDVHKTFVVAVIAITNNQGITEYHRKRFSTFTNGLTQLRDWLEYYSCFDVCMESTGKYWIPVFNILEEQTNVCLAHPKYVKAIRGEKTDKKDAQWIADLFKHDLVASSFIPPLKIRQLRDLFRYRMKLTQLQVGEKNRYQNCLTWSNLQIASVVSDVFGKSAQAIIKSILDNPQDKPNIEQLVHKRMKNKVQDLEIAMEGALTPEQAEKIRVIKAHYDALAICKEDLEQMIRELGQDYQHQVKLIQTVPGFKEDLSALRIISEIGCDMTVFDSAAKLCSWAGLVPANNESAGKKFSTRISKGGKYLKPFLVQVANAVVKSDKHPELRNKYLKLKKRRGHRKAIIAICRRLLVSVYQVLRKQEDYNPVLQGLTEIRNPDKTMSVQDAVRFTQQHGFNVA

SEQ ID NO: 141583 - protein, 313 aa, unidentified
MSTHPLVVGIDVSKTHLDVALGSTGPLFQVPYTQEGLQTLANRLQGATLVVMEATGGLEARLIQFSTLAGFPTARINPRRVREFANATGTLAKTDRIDAHILAWYGEALHPPVTPVPDENRQRLEALITRRRQLIEMRVAEENRLASAPDVIRPSIQQHLEWLQEQISALDEEICQLLQSDPDWAEKVEILQSVPGVGIVTAATLLAELPVLGQASHKEIAALAGVAPMNRDSGRRKGKRHITGGRPSVRQVLYMATIAAIRCNPVIRAFYRRLLAAGKEKKVALVACMRKLLTILNALLRKRQRWNPASAAY

SEQ ID NO: 141584 - protein, 419 aa, unidentified
MIEAVLERCAGIDVGKKYVVCCLSLGAANSTATEETRQYDTTVAELEKMRDWLLENQCSHVAMESTGPYWKPVFNLLEDHFTVILANAQQVKSLPGKKTDRKDGRRLAHFLRHNLIEGSFIPPVAIRQLRDLTRRRRKLLGAGGSERNRVQKVLEDANVKLGNVLSDVFGASGQAMLEALLSNQGTPQQLAEFARGKLRRKMPEIVTAVEEHRMREHHRFLIRQSLRHMAFLEEQVAALDEEILRQMKPFEKEFESLQTIPGIKATAAASILAEVGVDMKQFPTAHHLASWAGICPGNNESAGKHKGTQTRKGDPWLRGTLTESAWAASRKKGSSFAARFRRLAPHRGQKRARVALGHNLLIVVYQVLSTGQPYQELGSTYHEERTKEARVRHHLRCLRALGALAPGADLTEVPHAPTV

SEQ ID NO: 141585 - protein, 386 aa, unidentified
MQSVADRPEAPTAIRTDLGAIFVSLELSRSTWLITSLSPGGGEKMSKHVVRGGDVAGLLERFAQLRKKARARTGKGFPFVVIQEAGLDGFWIDRVLQNEGIESHVVDPASIATSRRRRRAKTDRIDGEALVRALLAYKRGEPRVCAMVKAPTPEEEDRRRLCRERKVLIAERVRHVNRVKGLLFSQGISGYEPQRRDRRERLDTLQTGDGHLLPEHLKAQVRRELDRLELLLEQIKAVEAERDVLLAAQQVAAPATMLLDIKGIGPEFAAILWSEGLFRHFDNRRQVASYAGLAPTPWQSGSIDREQGVSRAGNPRLRTTLIQLAWLWLRHQPQSALALWFEERVRRNGGRHKKTTIVALARKLLVALWKYVTAGVVIEGAVMKVA

SEQ ID NO: 141586 - protein, 405 aa, unidentified
MNAVGIDVSKGKSMVAIMQPLGVMAVKPFEVKHTASALENLGYSLKELPGETRVIMEHTGRYYEPVAQALHERGLFVSAVNPMLINQYGNNELRRAKTDKKDALKIAKYGLDNWASLREYTPMEAVRQQLKNASRQLDLYTKVKVALTNNLIALLDQTYPGANTFFDSPVRPDGHQKWVDFVAAFWHADCVSLLSEDAFTEKYRKWCKRRGYNFSAVKASDVYIDSLGHIIMLPKNASTKSLLQQAIAALNAVSATLESFRAEAQRLARLLPEYPVVMAMYGVGDSLGPKLIAEIGDVRRFASKRALVAYAGIDPEPSQSGKRNTKSNAISRKGVPEIRKAVFLVMDCLLKKAPADEPIYQFLDKKRSEGKPYFVYMTAASNKFLRIYFARVKEYLDSLESTDPA

SEQ ID NO: 141587 - protein, 348 aa, unidentified
MEHVAIDIGGRESQICVRSAEGTILEETRCATRSVGTFLAKRPRSRVVVETCAEAFAIADSGRAAGHDVAVVPAMLVRSLGVGQRGLKTDVRDARNLSVASCRMPELPSVHVPSMEARVRKSLCGMREGLVGARTALINTVRGWLRGQALGQPRGGQTATFARRLREHLNGRQVCTPAFVERQLVAIEHLTVQIVEADKELGKLAEADEVCRRLMTVPGVGPLVSVRFAAALDEVKRFDSAHELESYLGLTPGEHSSSESQQRTSITKAGSKQVRWTLVQAAWVFRRTARSHPAGLWAQEVEARRGKRIAAIALARKLAGILFAIWRDGTTYNPIQMSRRPSKSSAQP

SEQ ID NO: 141588 - protein, 338 aa, unidentified
MFIIGIDPHKGSHTAAVIDGDEQLVGEVAVRADRRQRDRLLCWAGSFVPRVWAIEGATGVGALLAQQLVSVGETVLDVPPALSARARVLDSGRKDKTDAHDARSAAIVALRHPNLRPVALDDHRQVLRMLARRHHQLVAGRTRAICRLHAVLCEMIEGGLARNLSAKRAAEEIRKLRPIDAVGIERKQIASEFLAEVRRHDRALVELHARIVAAVNAADTNVTGVFGVGPIVAAYLIGYSGDIHRFPTAGHYARYNATAPIEASSGPKVRHRLNPNGNRRLNHAIHVAALGQISHDTPGRAYYLAKQAAGKSRKEAMRCLKRQISDAIYRQLRADLTT

SEQ ID NO: 141589 - protein, 329 aa, unidentified
MYFLGIDVSKAKLDCYLLLDQAQGKFKSRTFANNADGMAKLKSWLLKLAKLENIHAIVEPTSVYHELVSRFLYQEGTKVSLVNAQNVRNFARASNYLSKTDLMDSKVLAYFGSKMELELWHPPAKHVEELNELLSRKVDVEKTLRQEKNRYSTLTATEHGNFVRSTLENSIAFCEAQLKEIKAEIDKHIKDNPDLKADSELLKSIPSVGDTVSQIMICSLNKHKFSSAKKLVSYLGLAPVERQSGTSVRGRARLPGGGNATIRSKLYMPTLTAMRCNPTIKAFAERLKEKGKPMLVIITACMKKLACLCFGVWNNKEKYRPEYVASSAA

SEQ ID NO: 141590 - protein, 356 aa, unidentified
MSRDVKYIGMDVHKEAIVIAVRNGSGKLIMESIIETKASSLLQFLQGLRGELHVTVEEGTWAAWLYDVLKPHVHQLLVCNPRRNALFKEGSKNDKVDARKLAELLRAGMLRPVYHGENGLRTLRELARSYQTISKDLTRVMNRIKALYRGWSIPCASTQVYAPRYREQWLHKIPHAGVRRRAELLYQQLDGLQALRRNVRPEFLAESRKQKAAKLLCQIPCIGPIRAGLLIALMQTPHRFRSKRQLWTYSGLAVETHDSAQYRYVDGQLQRSQKPQQLRGLNQNHNHEMKHIFKSAATTASCGVGPFRDFYAALLAKGMRPEMARLTLARKIAAITLTLWKKGGRFDPEQLKPQAA

SEQ ID NO: 141591 - protein, 424 aa, unidentified
MKVTYQTCCGVDVHKSFLVATIVKTTGGIEPSYQKKRFSTFNNSILEFKQWLLDNHCHDVCMESTGKYWVPVFNLLEDKINVVIANPKWVKAVKGNKDDTKDSKWIGDLFRLGLVKGSYIPCKKVRILREYTRYRYKLVSCRSSEKNRYQNALTVCNVALDSIVSDIFGKSSTSIIDYLLEQSGTSINHEEIASKLLRSLKSKEDAVIESVEGYQMTDAQKYRVRLVRAHMDYITAEINDVDKMIENMISSNPDFENAVQFLCTIPGVKRDSAITIISETGTDMSQFSSSKRLCCWAGLTPGSNESAGKKKSVRITRAGVYLKPALVQCAHAAVKSDKSPYYKKKYESLVKRRGKKRAIIAIARMILTAIYQMLSTGEQWNPGDLYKIDMPVALVEKQKAKAIKQAKKLLQREGLLPPDEPLAS

SEQ ID NO: 141592 - protein, 406 aa, unidentified
MELTTLFKRVVGLDVHQAKITACAITEDEGGNVGVELAEFGGFKRDRKALAQWVAGHRPEAVVMESTGIYWKSPYAALEEVGIAATVVNARHVKTVPGRKTDWADAQWLAMLARTGMLNASFVPPAQLRALRLVARQRQKLVGILSGEKNRMHKVLCDGGIRLSVVVSDIHGVAARAMVKALLNEKSPAEVLMLSGTRLKADRSELLDALDGELTAEHRFVLQELMAHIEDLEHRIARFDRHLLEQLAPYRTTLALMQTIPGIDAIGAAMLLVEIGNDMEAFGSVDRLASWVGICPGNNESAGKRKSGRIRKGNPWVRRLLCQFAHAASRTQCGFKSKFEALRLRRGHKRAIVAIAHKILKTVFLLIRRQTHYRDSAANFEALSVARNAPRWLKMLKKHGFIPAAA

SEQ ID NO: 141593 - protein, 346 aa, unidentified
MPSMQIGVDLAKTIFEVAVSRVPGQVAERHRLSRARFPRFFAAQPPADVLLEACGSAHYWGRTLQALGHRVTLLPAAAVARYRGGNKTDRADATALLEAARNADIARVPIKSVEQQALGALHRLRQGYLQTRTARINAVRGHLREFGVVIPMGASHVLPRARAALAEEVVPVWLRLPLEEALAEIGALEAKARALQAELAALARHLPAAAWLQSVPGIGILTATALLAFVGDIRRFRSGRDFAAYLGLTPREHSSGAVRRLGRITKRGDSYLRMLLIHGARSALRAGQLTAQPDDLRTWAVGLARRKGYNVAAVALANKLARVCWRVWTDQRPFERRRCAGEVIPS

SEQ ID NO: 141594 - protein, 343 aa, unidentified
MNVFIGLDVSLASTAICVLGPQGKIVEELDAASEPEALVRAMASLPYAVDAIGLEAGPLSQWLSKGIEEAGFDVVLMETRLVKAALKAMPIKTDRRDAQGIARLLQMGWYRPVHRKSVSSQEIRALLTARKSVLQAIINIELSMRGVLRNFGLKLGHVTRIRYEARVKELVAQNDILSASALSLLRAREQLRAELASLDTTIAGLAKLDDVCRLMMTMPGVGPIVALTVRSAIDDPTRFARSKDIGPWVGLTPRRTQSGEMDIVGQITRAGDRGLRSAFYQAAMILMHRGAPNWLQAWALRVAHRRGKKRALVALARRIGVILHRMWVDGSPFRFTQSSGPAA

SEQ ID NO: 141595 - protein, 460 aa, unidentified
MPRLPKAPLASQASASLPAQLQHVNLHAAGIDIGSTAHFVAVPPDSDPQPVRQFATFTAELHRLADWLTACGVETVVMESTSVYWIPLFELLEERGFQVLLVNARHVKNVSGRKSDVLDCQWLQQLHTFGLLSGAFRPADEIVVLRSYLRQRTMLVQGAAMQIQHMQKALQQMNVLLHQVVSDITGVTGMAIIRAILAGERDPHVLAQSRDARCKNSAEVIAQSLVGNYRAEHLFALQQAVTLYEVYQAQIAACDAQIEQYLASCTAVTSEAPPTPGKPRQRTGNPFHFDAHAQLYRLTGVDLTRIDGIDSVSALTILGEIGTDMSRWKTVKHFTSWLGLCPGTKVSGGKVLGSKSKPSANRAASALRRAAASLSRSRSALGAYLRRMSGRLGKPQAVTATAHKLARLVYSMLKHGTEYVDVGQDYYERQHRERVVSNLTRRAKELGFVLLPAPPQEAVT

SEQ ID NO: 141596 - protein, 353 aa, unidentified
MKKIAIGIDFSKKTFDATIVRRDADTYIELAYSKFNNDVKGFKALEKFVKATLKGSPEAKDKSSWIFCGEHTGTCSIPLCDFLAKKQYFMWLESALIIHRKCGIVREKNDKVDSKRIAEYALRNFSTDIKPYELDSKDFKKLKSLYAAHDMLTKDKVAKINQLKSGTLDSSTAAKHEIDRQLTSIRKSLNEIDDEIKRLLAESEEFSHNFKILNTFKGVGFLTITCLIIKTRNFKDMKDARAVGDYIGVVPHRQQSWTSIDKPSRTSKYRDKNANALLSTCVQSALRNGNPIIRPYYDRLVKRGVNHYKALNNCKFKIINVLLAMLRNDTRFSMDIHGKSRAQWGADRISVAS

SEQ ID NO: 141597 - protein, 316 aa, unidentified
MNVIGFDISKDTIDVTLLRNSGQVDYIKIANACEGFEKLNDWIRSKRIRKISISMEATGIYYEEAADYFSTIYQVFVINPLKIKEYSKSQFSHTKTDKADSRLIAEYTKRHLDKLTPFKPSENPTLYKLISLLQQLKQQQNESQNRLHAAKDAFIRATHEAIILLLAKQIDQTAKRIDLMIQQQDSLNMHYKNLQTIPGIGKDTAAILLHHLTDKQFKTANQFVSFAGLSPRIEQSGTSVNKKGRLSRYGHRRLKRALFMPALVAYRIKAFPKLVQNLSQKPKMIVIVALMRKLAKIAYYIHKTQKPFEKMRYQIA

SEQ ID NO: 141598 - protein, 405 aa, unidentified
MGAEQVAHGWAGIDVGKGHHWVCLVNEAGSTLWSSKVVNDEAAILDAIAEVLARAQQVSWAVDITGTSSALLLALLSAHGQAATYVPGRTVNQMSTAYAGEAKTDARDAYVIAETVRLRGDLTPVDVPATLVAELRLLVTHRTDLVADRVRMINRLRDVLSGYFPSLEREFDYATSRGAVVLLTGYQTPAAIRARGRARLTTWLRARKVRSAEQIATAAVKAANAQHTTVPGQDVAASIVAEFATALLELDQRIRVLDARIGDTFHAHPQAQIIESMPGIGTILGAELIAAAGDLSRYVDAGHLASAAGLVPVPRDSGRRTGNLHRPLRYSRKLRRVFYLSAQTSMMREGPNRDFYLKKRGQGHGHVQALIALARRRVDVLWALLRDNRVFELTPPTREKLPHTA

SEQ ID NO: 141599 - protein, 403 aa, unidentified
MNSVGIDISKGRSTVAVMRPFGEVVISPFEVRHTDSELSELARQLKSLNGETRVVMEATGNYHAPVAKLLHDAGLYVSVINAKLVHGYGNNDLRRIKTGKKDAVKPANYGLDRWLTLPRYVPEEDTRLLLKNCYRQYRQYSKVQTVLKNNLISLLDTVFPNANRLFSSPIRGDGSEKWVDFVAEFWHCRCVSEKSERAFTSKYLRWCRKHGYNFREAKAHTIYAEASGHIGVMPKSETTKLLVEQAVAQLRATSTALAALKQEMQTLASMLPEYPVVMDLFGVGPTLGPQLIAEIGDVRRFYSKKALVAYAGLDAPPNDSGDVTGRHKSMSKIGASSLRRTLFLVMSVYLQNAPLDEPVYQFMDRKRAEGKPYRVYMMASANKFLRIYYATVKAYLESLEHTA

SEQ ID NO: 141600 - protein, 361 aa, unidentified
MRIIGCDLHARQQVLAMLDTTTGEIVAMTLKHEGNNVREFYSKLPRPVLVGIEATGSMQWFVNLMEELGIECQVGHPANIRAAEPRKQKHDRRDADLILKLLVENRYPKIWLPSKEQQDLRALLRHRHQWVRIRTRIQNALQAIALANGLRRGPALWSQDGQRTIASLPLAPHAAYRRSELQAMYAKFAKEIEKLNQRVEEQACERPGARLLMTHPGVGPITALATEVFLGDAARFADSKALASYVGIIPSEYSSGERQRFGGLSKQGNPLLRFLWGEAAMHAVRRDPELQRFYRRKLVQKGLGKSRVAVARKLGIRLWIMLRDEIDYNEFCRRGQKQQKSSEACAGMPDTGHGAKQSPAD

SEQ ID NO: 141601 - protein, 337 aa, unidentified
MNNIEGCGVEVSARELVVARKGKAGVQLTRFANTAAGHRQLLRALTRGGQRVRVVLEATGLYALDLALLLSAQEQVQLMVANPRAVRHFAQAMMQRSKNDQLDAVVLLEFAERMPFTPWVRPAENTLALWAIARRLQALTKLCTAEKNRAHAMGLSEAIPAMVRRDIARSLQFHQRAMKKLRQQALRCIAADAQLQQRYQLLRSVPGLGEISAVQTLAELLLLPADRDVRQWVAYAGLDPREYSSGTSVRKYTRISKVGNAHLRRALYMPALVASRVEPHLRGFYEHLLARGKSKRQALVAVARKLLHAIYGMFRSQRPYDGTRVYLAAAAQAEKFS

SEQ ID NO: 141602 - protein, 331 aa, unidentified
MLYVGLDVHKEFCQASVLDENGEERSNIKIPTRKEELESFLSGFDEAKFVLESTGVWEFVYEIVESKGFEVVLAHPMKVKAISSAKIKTDKVDARTLAQLLRMDMIPASHVPEKHVRDLRGLVRHRKALVEKSTSFKNRVKAELLRRGIRRPEALKTSWSGRSIEWMRTLGISVVNSNLDVIEALQVQIKSVNDQLIPEYWKNENAMIISSMPGIGYYGAMLIALEIDDVHRFASAQQLCSYAGLVPSVHQSSTVTYHGPITKQGSRHLRWILTEAVLIHVANEPDSKLTDFFRRLTKKKGKQVATVATARKMLTVLYWMLIKKEEFKVTG

SEQ ID NO: 141603 - protein, 346 aa, unidentified
MLYAGLDLSRKRLDFHLLDEEGATVEVGASPPDADGLRGLTERLDRHGAPIRAAIESMNGARFVHDRLELQGWQVEIADAQKVKGLAPLACKTDRIDAWVLAELARRDLVPAIWLPDPLVRAERERARWRLHLVRHRSSLKQRVHAVLLTHGKPCPVSDLFGVRGRQLLAQLALPEPWQGTIEASLRLIDEREREIDDCERELRRLGANHRYVPLLLTVPGISWVLAYTIAAELGDINRFPTPRKLAGYSGLCPRVYQSGERDLRGPLSKQGPRYLRWALVEAATHACTHHAYRDRYQKTKARIGKQRGAKVAQIDLARRLSEAIWHTLSRNQPFAPKGATDPLAA

SEQ ID NO: 141604 - protein, 439 aa, unidentified
MILIREVADAPVIMGISKPADLKSPCGEVKIVNPLFVGIDVSSKNNVAYLMNPDGSKHSSFSVQNNLGGAKLLSERIVSALSSMQLSNVVIGLEATSIYGDSLVYALREDGSLGRFQRKIHVLNPKQVRKFKDAYPDLPKNDFVDAFVIADHLRFGRIAKEVYMDDYRYQALRTLTRARFDVIQNLTREKQRFANYLFLKCSGMAQDKDIQNTSATTIALMEYFETVDDLANADLEELTAFITEVGRGRFADPTATAKAVQAAARGSYRLPKTVNDTVNQAMSVSIASMRALKEQVKVLDKAIEQQFEIIPNTLISIPGIGKVYSAGIIAEIGDIHRFNSQSSIAKFAGLVWTQHQSGDFEAEHSRMIKSGNRYLRYYLLEAANSVRRCDSEFRRYYDLKFREVNKFQHKRALALTARKLVRLVFRLLKDNRLYILPEG

SEQ ID NO: 141605 - protein, 368 aa, unidentified
MEDDITVFVGLDVHKDSIAVAVADAGREAPRFLGTCGPKTSELLKTLSHVGEAAHTLVAYEAGPTGFALARELARHEWHCQVIAVSKMPRRPGERIKTDRRDALTLASYLRSGELTPVTVPDARDEAIRDLSRAREDAVRARLKARQQLKAMLLRHGKPYTGKTSWGPSHELFLARIAFEHPAQQIAWAEYRSAVLEAGQRVERITQALREQASDWRFSGAVQALMCFKGIDFVAAVTLACELGDLHRFEHPKQLMAYLGLVPSEFSSGQSRSQGSITKTGNAHVRRVLVEAAWCYRYSARMSRPVTERQVGQPRNVCDTAWRAQLRLCARYRRLAARGMHANKICVAVARELAAFLWEAARQVQHPA

SEQ ID NO: 141606 - protein, 345 aa, unidentified
MEITTVGLDIAKRVFQLHGVDAAGKAVLRRKLQRSEVLAFFKALPSCLVGIEACGTAHYWAREIRELGHEVRLMPPSYVAPYVKRGKTDAADAAAICEAVTRPTMRFVPIKTAEQQAVLMLHRTRDLLVRQRTMLVNALRGHMAELGIIAPQGIARVADLMAVLLGEDTTNVPALAREALRGLAAELEALDRRVKEIEVAIVRWHKDNEASRRLATIPGVGPITASAIVATITDPFQFHSARHLAAWIGLVPRQHSSGGKQRQGGISKQGDRYLRRLLVLGATAVIRHSRSKSTAEAGWLKSLLERRPARLVSVAQANKTARIVWALLVRGGAYRMPAAVPGGAA

SEQ ID NO: 141607 - protein, 403 aa, unidentified
MISVGVDVSKGKSTVCILKPYGEVLMSPNDYEHTQRDLKKLVDHMDSFEDEIHVTMEATGNYHFPIATYLKKRDYDVRIVNPLEMKRYRCQGIRNPKTDSIDAIMIAQYGIDFWFRSFQEYVASDERMELKTLGMQYFKTMKTRQDRYLVLESVIDRTLPGIGGVLNGYDKSTGKDKKSDFVYDFYHAEKITVYSENRFCDRYESWSKKKGYRYSEKEARQLYSIAKDSIPTLTSSKNTKLVIQDAVKILREVDSALYSILNQMNVIAKKLPEYTTVMEMKGVGISIGPRLIAEIGDPRRFHSAKALIAYAGIDAPPYQSGKFTGTERHMSKRGSRIMRKLGFELMDTINKHQKLYAGDPVCEYFLAKRNEGKKYRVAMFAAYNKFLRIYHSRVSSVLNESVK

SEQ ID NO: 141608 - protein, 447 aa, unidentified
MNKDTIQTNSVNAIPEAARPEPIVCWVGLDWADKKHCLVVRSAVGGPPQRHLVEQKPEALDAWFLELRQRHPAGRIAVAIEQSRGPVLYALMKYDFLAIYPVNPRSLADYRRAFKLSGAKDDPLDAQLLCELVSLHPDRLRPLVVEDVPTRKLRLLVEARRGFVEDSTGLSNRLRAVLKCYYPLALELLEEDLTTPLALDLLRRWPNLAKLQAAKPSALRGFFYAHNSRSEERIKQRLEAVRSAQPLIQDPALLEPFQLQMEQLVQQLRALQRTITLYDQRIKVVFAQHSEAWLFQPLPGAGPVLAPRLAAAFGTIRANFASTDNLLCFSGVAPIRRQSGTQEIVQFRYARPVFLHQSIVEFAKCSIPKCAWAKLLFEEALRQGKSRWAALRKLAFKWLRILWRCWQQRQAYDEVTYLRSLQRDGVQLYRSLWECLPPLNATPVHNS

SEQ ID NO: 141609 - protein, 402 aa, unidentified
MISVGVDVSKGKSTVCILKPYGEIVCSPFEVKHVEKELEDLAGLLNKLDGEIRVVMEATGVYHLSILTFLQEKGYFVSVINPYSMKKYAKDNSLRRAKTDRLDSIMIANYGIDRWFKLQKYEGDENTYAELKLLGRRYRYYMELHVKSLQELTHILDYVMPGIKAMFNSWDEASNKDKLSDFVERYWHYDLITSMSREEFTEDYLAWAKEKKYHQSSAKAEAVYEMASDGIPTLSSDTPSTKMLVQEAIAVLRAVDSSLFRIISRMQELAKTLPEYSTVRSMGGVGDVLAPKLIAEIGDVRRLHNAKALIAWAGIDPPPYESGQFVGSQRRITKRGSSTLRKVGYEVMRVLKSHREPEDNVVYNYILKKEAEGKSKKAAKIAGLNKFLRIYYARVMAVYQQQ

SEQ ID NO: 141610 - protein, 354 aa, unidentified
MKRTTKYVALDVHQATTVASVREEGGRVIARSVLPTDRGALTEFLRGMRGARHVTFEEGTQAQWLYDVLAPLVDRVVVCDRRGAARQGNKGDQVDADQLSELLRRGALRAVYHGSADRATLKELTRTYRNLVEDATRVMLRLKALFRARAIPTPGTTVYQARARGQWLAQLGDRGARFRAEALYAELDVLRTLRPKAKAAMVTEARRDPAWRVLGTIPFFGPVRVALLLATMQTPWRFRTKRNLWAYAGLAVVTRSSADYTFVAGQAVRRRRPPLTRGLNRNHNRVLKEVFKGAATAATARPGPLQDFYHSVIARGTREELARLTLTRKLAALTLRLWKKGERYDPTKLMMSAR

SEQ ID NO: 141611 - protein, 388 aa, unidentified
MESLVAIGIDVHKEKFALVAILLVLGAQDQILGEIEVGSDYKEILAFIESIKQKALPGQTYSFVCGYEAGCLGYVLYHQLTAAGVRCVIMAPTTMLSEQGKRIKTDRRDARLIAKCLCCNGYHPVYIPTAEDEDVRDYLRMRDDHQGALKKLKQQINAFVLRHGCSYIGTKWTARHIGWLMDLQNKLDEMQAETLKEYMLSYAEQKDKIERFDEKIEEIARMDRYSKLVSKLVCFLGVKTHTALSLIVETGDFMRFAKGNIFAAFLGLAPGEHSSGSGVHRLGITKAGNTHLRTLLIEAASGICKGAVGHKSKALKARQAGQESEVIAYADKANTRLRSKYYRMMRHGKKRNVAVAAVARELACFIWGMATGNTGLTRQAQASAKAGI

SEQ ID NO: 141612 - protein, 340 aa, unidentified
MDTIGLDLHKRESQLCVLTEAGEIVERRIVTSRERFTAVLGSQAPARILVEASTESEWVARHLESLGHEVIVADPNFAPMYATRRRGVKTDRRDARTLAEACRLGAYRPVHRASAPQRHVRAQLAVRDALIRTRTRYVSVVKALVRRDGLRLPPGNPVHTDAKLAALPLPAPLAGELAPLRALFEPLNREITAADDRLAAVAATDPVVERLRTAPGIGPVTAVAFVATLDEVTRFASAHHVAAYLGLTPREYSSGEQQHRGRISKTGNARMRYLLVEAAWRVLRTTDPAAAALRVWAEGIAQRRGRSIAAVALARRLAGILYAMWRDGKDYCAPPAAAVA

SEQ ID NO: 141613 - protein, 382 aa, unidentified
MSRHRIEADPLEPERHRCARVEMLRNHSRDRGSTMNITTYGLDLAKRVFQVHWVEPDTGELKRKVLKRAEVTAFFARRAPGVVAMESCGSAHYWGRVLSGLGHQVRVIAAQFVRPFVKTNKTDAADAEAIWEAAQRPGMRFVALKSEEQQAVLSLHRMRAQLVKIRAMQSYQVRSLLYEFGVVAPKGFRALADKAGPVLSEAGSAIPELLRGELLRQLEGLRTLSARIEEFERRIGGWQRRQSECERLATIPGVGKLTATAVVATVADARSFRSGREFAAFLGLVPRQSGSGGRVKLLGISKRGDPYLRTLIIHGARSVLLTQSRADRVMDPWLRDVLARRPKNVAIVALANKMARTIWALMAHGRSFDRNWMRPAIAAATE

SEQ ID NO: 141614 - protein, 339 aa, unidentified
MFYTGIDLHKATSYLTTVDDSGNILKRQNIRNHPINFQHYFSSIPGQHKATVETTGSWYWVADLFQKMDIDLVLAHAKFIKAIAYAKVKTDKVDSHILAQLLRMDFIPTAHQIDPDKRELRDLMRTRLRLAHKRTSAINSMCRILEKFNLDSPEHLSDAYKFAYDIFQVQEQLLQNQINELKQSLYPYLIPDDNIQRLVWIPGIGLINAFTLYLEVGNIERFPTENHFFSYCRLVPGASNSAKKQLHKSGNKDGNKYLKIVFTDAAVHAVQYFPVIAKFYQTKLRKKHKLVARNIVAKEIARIVYHVWSQQKPFNHKFKGIQLSKMKSVQWPRLASTYA

SEQ ID NO: 141615 - protein, 323 aa, unidentified
MFYLGVDVSKKKLDCMLLNSTNGKLKSKSLSNTKAGIEELIGWLAENKAPEAHVIMEPTGVYHEPAALALTDAGLKLSLVNPAQLRQFAQGLGFKNKTDKADSTVLARYGHTLKPEIWQAPSKSARQLKALLARRDAVADDLQREQNRHEAVDFGISPEQVKQSILQSIAFLQAELKRLEQMIEDHIDTDPDLRNKRELLETIPGVGTRVSTNLTALFAAKTFNTAEQLAAYLGLVPVLWESGSSVRARPRLSKAGPSNLRKLLYMPAVVARKWNPHIKSFSDRLIAKGKTKMAVIGACMRKLAHLCFGVVHTGRPYDPNYAM

SEQ ID NO: 141616 - protein, 312 aa, unidentified
MAQMVKTAGIDVSKAWLDVTIWPTREATRVSRDAAGIAALIAWLTGHEVIHVGLESSGGYDREVTDGLQAASFEVAQLNPLRVRRFAEAKGRLAKNDTADARTIAQFTAVMVEDVPPQRRRDLDALAEVLTYRRQLKEWSTDCTNQLEHLREPAWRKKIEQKKAALERELKQVDQKLADMVAKHDDWDTLARRLRTVPGVGPVVSATLIALLPELGALSRRAIASLVGLAPFDDDSGGHQGERHIWGGRQCVRDALYMAALSARTHNPAIAAFAERLKGKEPKVILTACMRKLLVILNAMLRDGTDRRAADA

SEQ ID NO: 141617 - protein, 416 aa, unidentified
MSFKILKNNCCGLDVHKTWIYACIGITDSFKRTEYKQARFSSFTKGLQELCLWLAKYNCIDVCMESTGKYWIPVFNVLEKNNIFVTLSHPKYTKPQKGNKTDRKDAKWICDLYMCGMVKPSFIPPADIRQLRDLVRYRFKLTCMITGEKNRAHNCLTVSNLKLDDVFSDIFGKSSRSITEQILQHPGEVFDVAPFVDSRCKTPIEEIQAAVDGAISHEQAVKLRQCLKHIDELNVHIKNLDEDIDNHMNDEEKKATSAITEIGGIAGASAKAIISVIGTDMSRFPTDAHISSWAGLCPGNNESAKKRYSGKTNKGNRLLRTTLIVCAHAAAKMKNTYFSAQFHRISAHRGKKRAYVAVAHSMLIAIYHILKDGVKYQDLGADYYNQFNKERKINAYLKKLKELGWTEQNAMIVQPA

SEQ ID NO: 141618 - protein, 346 aa, unidentified
MKKVLKQVVGVDVAQKELVTSLGRMYDDFSIELYSHRVFKNTEKGMLTLLDWVKKQTTEEAKIHYVMESTGVYHQKFAYYLDESFLDLSVVLPNKIANYIRTLEVKTITDKTCSEAIAQFGLERKLNLWHAPNKVYMELQQLTRERDQIVAERSAIKNQLHAETIQAKPNTNSVRRLKERIAFLNRQEKEIKGEIDVIIDNNEDVKKEIKNIISIPGIGKLTAVIVLAETNGFELIRNKKQLTSYAGLDVKEKQSGTSVRGKPRISKKGNRSLRKAMYLPSLSAVKYDENFKGQYVRIVSKHGIKKKGLIAVQRKMLELIYTLFKNKTVYDKNYESKKSSAKILVA

SEQ ID NO: 141619 - protein, 343 aa, unidentified
MKITTVGIDLAKNVFQVHGVDERGKAVLKKPLKREQVAPFFANLPPCLIGMEACGSAHHWARKLEAFGHTVKLMAPQFVKPYVKTNKNDAADAEAICEAVGRPNMRFVPIKNGEQQAVLAMHRARQGFVKARTAQANQIRGLLAEYGIIIPQGIGHIAKRLPDILEDGENGLPGAFRPLLQRLGDHLKELDRQVGELEVQIQVWHRENEASKKLAQIPGIGPITASALVASVGDAKSFENGRQLAAWLGLVPKQHSSGGKQWLLGISKHGDTYLRTLLIHGARAVIRVAERKAGYAQSWLAQLIGRRNKNVAAVALANKNARIVWALLAHERDYQAGYEPSAA

SEQ ID NO: 141620 - protein, 416 aa, unidentified
MNNESPVVAGMDVHKKMLAVVVARVDGNRIEYLSERFGTTRQDLDQLAHWLHQQQVTEVAMESTAQYWMPVWLALEEQFTLYLAQPRSTAAPKGRKSDWADAQRIVRRLLAQDLTLSYVPGREQREWRTMTRTRVEMSAQQVRLRNQMEGLLEQAQIKLSSVLSDLLGVSGRRILREMVKGETNPACLASLADKAVKASEKTLQEALGGKLTATHRLLLKMYLEQWDLLASQIDQLNTRMAQALSQHQAAVHRLVEIPGVSLTAAQQIIAEVGPEARAFAAPQKLASWVGVCPGQHQSAGTEYSHRSPKGNRMMRRVLVQCAWASVKVKGSIFHQKFRVLVPRLGPRQAIWAIAHRLLRIIWKLLHDQVNYVERGLDTNPAAVQLRIKRHLKELQRLGYAVNLSALAAIRPQEASV

SEQ ID NO: 141621 - protein, 349 aa, unidentified
MTIVEDACVITGGVDTHADLHVAAALDPLGGLLGVQEFPATATGYTQLLGWLGEFGTVALVGVEGTGSYGAGLARHLAAAGIRVVEVDRADRQDRHRAGKSDPLDAVSAARAAQSGRASGAPKGRDGAVEAIRALMVAKRSARAERTQAINQARALIVTGPDELRARFAGHRPAQLVEAIAALRPRPGEVPGYATRVALRELGRRARFLDAQLGRLDELIGPLVTARAPGLLALHGVGPDTAALLLIAAGDHPERLRSESSWAHLCGAAPIPASSGKVSRHRLNRGGDRQASHALWRIVITRLGSRPGHPATRAYVERRTKEGLPEKEIIRCLKRYVAREVYRQLRAGA

SEQ ID NO: 141622 - protein, 392 aa, unidentified
MIFIGIDVAKSKHDCCILGTGGEILKDSFTFANNRIGFEELFTAIQSAIQGNQDSEVRVGLEATGHYSTNLVAFIRDSGIEPIILNPLSVNLFRKSQTLRKTKTDKVDARYIAAMLMSLDSSPRTPISYHIEELKVLTRNRSRLVGYRAKLKLSFTRLLDVVFPELPGIVWSRNQKSVQALLLELPNTEAITSCRIDRLTNVLNGASHGRYGRERAIAIRKAASDSIGSNSPAMAFEIQQTIRLIKNTQEEIGLLDKQIAILIKSTHTPLLTIPGIGCTLAAIILSEIGDISRFETPSQLLAFAGMEPSSYQSGNFNANNTPMVKRGSTYLRWAILQAARLVAMRDKTFKDFLKKKRSEGKHFNVALSHVGKKLIRVIFHMLLTDREFIPQT

SEQ ID NO: 141623 - protein, 368 aa, unidentified
MDKRITFVGLDVHKSSISIALADEGSTENPRFYGKIGGDIESLMKTVRKLQSTGATLRFAYEAGPCGYDIFRNLKKEGFDCIVVAPSLIPKKSGDRIKNDRRDALGLARLHRAGELTAVYVPTEEDEAMRDLTRAREDEVKALRVARQVLLAFLLRLGYRYSGQSHWSHAHFDWIAGIKMPHTAQQIALQEYVHAVKENAARVDRLTKQIQELYLTWEHGPMVKALQALRGVSLIVAVTTISEVGDLTRFDSPKQFMAYLGLVPSQHSSGTTIKFGSITKTGNGHVRKVLIEAAQAYSHPARETRALLTRLEGLPQDVKEIAWKAQLRLCARFKRLQARGKNRNSVVTATARELAGFMWAIACAMVPA

SEQ ID NO: 141624 - protein, 347 aa, unidentified
MQVITVGIDLAKHVFQVHGVGANDKVVFNKPLRRAQMLPFFAKLAPCLIGMEACASAHYWARELKKLGHDVRLMPAKDVKAYVKRNKNDAVDAAACCEAVRRPVVRTVPVKTPEQQAQLMQHRVRDLLVRQRTQAINALRSHLAELGIVAAQGYDGLKALLSIIADGGDNRLPENARVSLSALAAQIASCQAEIAAIEKRLLAQHRKNEDSKLLETIPGIGVIGASAIAATVPDVSIFKTGRDFAAWIGIVSREDSTGGKQRLGPISKQGDRYLRRILILGALAVVKRARSCPEGYPWLTRLLARKPAKVAAVALANKMARVAWAVLTKKENYRLPELAAAAPAKGC

SEQ ID NO: 141625 - protein, 409 aa, unidentified
MSVEHNPPTRRPTAGVDWASTEHALAIVGPDGVEVQRMLVEHTAAGLRKLLRCLQQTGVAEVGIERPDGPIVDALLEAGITVFVIAPNQIKHLRRRYGAAGNKDDRFDAYVLADTVRTDRHRLRPLTVDSPATLTLRMTVRARKDLIAARVAMANQLRAHLEHVLPAAIGLFRDIDSAITLSFLARFTTQEQVDWLSPRRLQNWLRSVSYPNPARAGLLHAHLAAATRGTTGAEATARAHVTAALVAGLTALREQISALEEQIAIQLLQHPDAVVFTSLPRAGIVRAARLLAEIGDARGRFPTPEALTCLAGAAPSTRQSGKVKVVSFRWAVDKQLRGAVIDFAGDSHHANPWAADLYQRARARGHDHPHATRILARAWLHVIWRCWQDGVAYDPTRHRALQAVLTAAA

SEQ ID NO: 141626 - protein, 399 aa, unidentified
MIAVGIDVSKSKSTVAILNGDGSIRAKPFDVHHVADELQALVDYIKRTSEPPTILMEPTSHYHYPLLKAFTEAELPVCLINPYQMKKYGDTELRKAKTDKRDSLRIAQYALEKSYSLIPYTPQDQKYEDLRFLSRQYSQRISTLTVAKVQLLSLLDETMPGITTILPLKSRDPDNCVLLRFIKRFKSFDVIRKMGKTRFLDSYQVLVKKTKDRFAGSKGLAIYELVLNSVTTRGENPLSAMTQDQCVDLVSTSQKAADEINLQMRIIAETMPEYKVLRSMAGVGDRLGPIILGEIGDIRRFHSGKALNAYAGNDAPPYQSGTFESHNRHISKRGNAALRKYCFEVMQALKLTRPQDDPVYLFLLKKEQEGNPYNVAKMAGVNKFLRIYYARAMETLKQQ

SEQ ID NO: 141627 - protein, 412 aa, unidentified
MANETTNVIAGIDTHADTHHVAVINEYGKPIADREFLAVGSGYLKIVEFITSYGPVTAVGVEGTGSYGAEIARALRGEGLCVLEVNRPNRAARRLKGKSDPLDAYQAAQSVLDGRATAIPKAKDGPVECLRILRAGRTSAVKARTAAINQIKGLLVSAPDNLRAKYRGMGTSAMITALQRSRPSGHIADPEHVCLLTLKALAARCQSRAAEVAAADAALREILDTYAPMLCDLPGVGTEVASQLLVTVGDNPDRLGNEAQFAALVGVAPIPASSGKTTRHRLSRGGDRNANRALHQVVLVRMGSCQRTKEYVLKRTAEGKSKREPKQCLKRYAARELYRQITNPQPAPSNADLRQMRTKLGFTITTAARELGHWPSKISSLERGLVRNDALATSYRQWLTDQAAQNVTANAV

SEQ ID NO: 141628 - protein, 373 aa, unidentified
MPKYSTAFGMDVHLRSTTVCALDADTGEAVTRRFPGNPWGEIAGWMDGFPGPSLAAYESGYLGFAPQRELAGLGVECVVAAVSKIPRSAADSASKNDRNDAARMAKAILAHDISPIWVPSPEVEGIRDLAGAYDGATARLATAKQRLLAFLARRGFVYGGTTPAGNPRKYWTYDFLRWLDKVRPEDDGGVRALAALRNEVEAAAEARADLLSEYRAAVDAGPIAAEVAALQSIKGCAFALAAAFSAEVGDFARFRSGRQVTAYFGLAPSQRSSGDSVRLGGISGAGNALVRKLAVEGSWCYAAARHQPKLMPRDTGVPLEIRMHGRKGSERLLRRREEMLARGMPAAKANAATAAELVRWLWALGMMCREGAE

SEQ ID NO: 141629 - protein, 401 aa, unidentified
MASCLGTGSVIGKPSELGERFLCRFLKGGLAMQTVIMAGGDVHDKTILVKVGIGRGRIEKRSVTNTVRGRKELVARLKTWGRQEGAERIVFAYEASGLGFGLYDELTEAGIECFVLAPTKMARSPKHRSCKTDDRDAEGILELLRGHMLAGNALPSVWVPDKETRDDREVVRARLDAADKRTALKTQVRCLLKRNGVVKPGDLGKGWTVGYRGWLQRLCGCPSDLAWGARTALASLLRQLESVEQEIAGLEDAVEALSQMVRYAEAAAVVRQRSGVGLVTAMVFLSEMGDLSRFSNRKQVGSYLGLAPRSNDSGERDCKGHITHQGPSQIRKVLCQAAWSVVRLDPVEKPVFERLVARNPKRKKVALVACMRRLGIWMWHRGLEAQRAAGAFAVQESAASA

SEQ ID NO: 141630 - protein, 334 aa, unidentified
MNTPVVGIDVSKRKLDVALLMDGKLKAKVVANAQEGFAELEAWLNKQKVDLSLVHVCLESTGVYSEPVALYWFDKGIKVSLVNPGCIKSFGGSENIRNKNDQVDAGLIARYCAAMAPAPWIAPSREQRQLKAWNNRLTALQDMRQQEANRLEAHEVAEQRDIIDHVQSHIHWLDEQIAQIERDIDDHIDRHPGLKRDAELIESIPGLGRTTAAKLLGNLGDIRRFNSAKALAAYIGVTPRQRQSGSSVHGRTMMSRIGSKRLRAALFLPSLVAKRYNPILKLFGNRLEANGLPKMAVAGAIMRKLVHLIYGVVKSGKPFDQNYLAKGLAIQDGI

SEQ ID NO: 141631 - protein, 466 aa, unidentified
MKHNRRRSPGKPRVSPTVLDRINPNVAGIDCGAAEHFVAVPPDRDPTPVQSFKTFTSDLVRLADWLTACRVTSVAMEATGVYWIPIYEILEARGFEVLLVNARHLKNVPGRKSDVSDCEWIRELHSVGLLRGSFRPTDAIVALRAYVRHRHTLVESAGTYIQRMQKALVQMNLQLPLVVSNIVGVTGLRILRDIIAGHRDPHALAEHRDYRCRASKAEIIAALTGNYRPEHLFVLQQNLELFDACQTQLAACDRAIAAHLDTLTTHVGTPVTALPPPRVTKKPRENEPRFEIRNPLHQLTGGVDLTQIDGLAPSNALNLVAEIGTDMSRWPTEKHFTSWLTLAPKNKISGGRLLSSQTQPSANRAAAVLRMAAMSLGRTQTALGAFYRRLAARIGKPQAITATARKLAILVYRALKRELVYRDPGADTYDSQQRTRVLRRLRQRAATFGFELVNRETGEVLAAGVS

SEQ ID NO: 141632 - protein, 338 aa, unidentified
MKRQYVAIDLHSRRSLIVRNNEHGEELEVVRIENDPVALSIALAAAGPEPEVAIEATYGWYWAVDVLQAEGARVHLVDPLGLNWDSRRVKNDYRDCRELLDRLRLGILPEAWIAPPEVRELRELVRYRAKLVALRTGLKAQVKAVLAKEGLHPPIDDLWGVGGTHYLDGLKLPEAYAIRMQSLRQLVGVYSGEVEKLEREVHGLLADHAGYQAIQALDGVGRVLGAIFVAEIGDVSRFPNPQTLSSWAGLTPKHRESDVKVYRGGVTKRGSPLVRWAAIEAISHIRGGPKLKTDYHRIAARRGKNIARVAVARKLLTLVYYGLRDGEIRCLARVDEAA

SEQ ID NO: 141633 - protein, 418 aa, unidentified
MDVMVERCAGLDVHRDDVVATVRVPGAGRRRWDQQTRTFPATLAGLLALGEWLSEFGITLVGMEATGVYWKTVFQALEDRFECWLLNAQHLRNVPGRKTDVKDSEWIGQLVQHGLVRPSFVPPPEIRRLRDLTRLRKAQSNERGRSIQRLEKVLQDAGIKLTSVASHTYSKSARAMLEALLSGVTDPELLAELAKARMRRKIPQLREALASRFQIDHHGVMVAQLLAHIDTLDGAIQNLDERIESVLAPHAELVELLCTIPGVQTHAAQVLIAECGLDMTPFPTVGHFASWAGACPGHHESAGRRRSGQTRPGPRWLTDTLTECAKAAARAKGTYFAAHFAQLRGRRGEPKAIGALRHDILVAYYHIVRDRVPFRELGPDWQRKRYSPEHRARRLQRQLEALGYTVTLQATEQGAPTA

SEQ ID NO: 141634 - protein, 343 aa, unidentified
MQAFTTIGLDIAKSVFQVHGIDAEGKVLIRRQLKRRYVLAFFQKLQPCLVGIEACATSHHWSRQLKALGHTVRLMPPAYVKPYVKRQKNDAADAEAICEAVTRANMRFVETKTPEQQSCLMLHRTRQLFIRQQTSVINAIRAHLAEFGIVAPVGRKGVEQLLAVAADASDHHVPEMARACVVALGAQLRMLKAQILEFDRRILAWHRSNEICQRLDELPGVGPALATALVASVADPKAFRSGRNFSAWIGLVPKQHSSGGKNKLGGISKQGDRYLRSLFTAGALAVIRYAKTHGTKHRPWLTALLARRPTKVAAIALANKIARMAWAMMAKGERYKEPVALAA

SEQ ID NO: 141635 - protein, 343 aa, unidentified
MQTITTIGLDIAKSVFQVHGIDGSGQVVVRRQLKRRHVLAFFQKLPPCLVGIEACASSHYWSRELQALGHTVRLMPPAYVKPYVKRQKNDMADAEAICEAVTTANMRFVPTKTPEQQSCLMLHRTRHLFIRQQTAVINAIRAHLAEFGIVAPVGRKGVTELLHVVADPSDKRVPEVARACLAALGTQLLGLKEQIVEFDRMIMAWHRSNETSKRLHYIPGVGPMLATALVASVADPKTFRSGRNFSAWIGLVPKQHSSGGKDRLGSISKQGDRYLRSLFVAGALAVIRYAKIHGTKHRPWLTALLARRPTKVAAIALANKLARMAWAMMARGERYRNPVALAA

SEQ ID NO: 141636 - protein, 423 aa, unidentified
MLLNNSLIVGVDVHRRNNVVQVMDGQGQVLTTSLVVSNNRHGTAYLADCLAETARRGNFTTIHIAAEATGAYWLPFFCQLQQEPRLAAWSLTLYPFNPRVVHNFRKAFVDLDKVDLNDAHLVAERLRFGRNLPAPFVMEEQFLPLRSLTRYRFHLVHELVRVKSYCTYLIYLKSSEYTADRDMQPFSNLFGATSRAVLRDFPSMDAIIEMPFDELVEWLDVKGKRRFPDPEANAHKLLQVAEDSYRLPAPWLESVNTILGLNLRHLKTLENLIQRVDTAIAEEMEAIPNTLTTIPGIGPVIAAGIIAELGDLARFDYDQKKVASYAGLKWSRRQSGDFLAEETHLKRQGNRFLRYYFCEAAHLVRMNDAEYNAFYTKKYNEALKHKHKRAVVLTARKLVRLVVRLLTTNQPFRVRRVDSDEVA

SEQ ID NO: 141637 - protein, 380 aa, unidentified
MAIGQDDITCKATVYAAIELSKKSWVVGIAHPDRDRPSIHRFAGGNLSDVVARLRKAAGERRRILVCYEAGYDGFWVARSLTKLGIDCRVLDPASIQVNRRARRVKTDRIDALALLRALIAIDRGERHVCSVVRVPTIEEEDARRSHRERQRLIRERTGHINRIKGLLFAQGIRGIEPKLQRTRINFGALTTAEGKLLPERLRHELEREYQRLELVQRQLRAVEEERDHADAQDPAVERKRELLCALQGVGNASAAILAREVFARSFASRRQLGSYLGLTPSAYDSGSTTRCQGISKAGNSWARRVLIEVAWLWRKYQPDSPLSRWYAQRASGQSPRIRRIMLVAMARKLAISLWRYVETGLVPDGTVMTKTALHRPVAA

SEQ ID NO: 141638 - protein, 336 aa, unidentified
MVKHKHVFGVDISKDFFDVVNSDGQHNQFTNTDNGFAQFANEIPKRALIVMEATGCYHHRLAQFLISKKIRTSVVNPLSVKRFRQMKMSHIKTDKADARLICEYAKQHEVPMYKGMSKSHVQCQQLFALGELYQKQHTALKNKLHSEKDMGAPSPSAIRSIKRQLRTLLTEILAIDKEINLLMETHYPDMTKLLKGIPGIGGKTSSYLLMMTDGFKKFDNSRQLCCYAGITPSIRKSGTTIRGKSRITKIGNSKIRRLLFMCSFSARKYNSACRDLFDRIIAKGKSKKLALVAVSNKLLKQAFAIVTSGRPYSKDYISKSSNTFKNGFNYYHEITF

SEQ ID NO: 141639 - protein, 423 aa, unidentified
MNVVYPICCGVDVHKTFFVATLITTEGIEPKYKKRRFSTFNNEILAFKSWLLENNCRDVCMESTGKYWIPVSNLLEDSVNVTIANPKWVKTVSGNKDDAKDSKWIGDLFRIGLVPGSFIPCKEIRILREYTRYRFKLVSHKSSEKNRYQNVFTVCNVALDAVVSDMFGKSASSITDYITSSDTFDPNHCVSLLQRSLKKKDDEVVASIDGFQMTDSQKARARMVKEHYNYLLEHIQKIDSAIDELVKPYESYIDLLCTNPGIKRNSAITVISEIGTDMSQFRSSKRLCRWAGLTPGNNESAGKKKSVRITRAGVYLKPALVEIAHAAVKNKKNPYYQIKYERIAKRRGKKRAIIAIARMILTSIYNMLSTGEVWNPSDLNQIDMPPELREKEVQKSLRRAAKLLVAHGLIDPQLIKFSDTSIA

SEQ ID NO: 141640 - protein, 349 aa, unidentified
MANLTIGVDLGDRYSELYVVDAAGACVETGRIRTTVAGLEQWFGGRPPARVVLEAGTHSPWASRVLPRLGHEVLVANPRKLRGLYENDSKDDRVDAEYLARVGRLDPALLKPITHRGEAAQADLAVLSSRDVLVRARTLLINHTRGVVKALGGRLPRCSAEAFARRVGPHVPPAVRPALAPVLEQLQQLTTTIRGFDRAVEHRCAQSYPETARLRQVTGVGPVTALAYVVVLDDPTRFRRSRAVGAYLGLRPRRSQSGEQDPQLRITKAGNPFLRRLVVQAAHYILGPHGPDCDLRRHGERIAARGGKNAKKRAVIAVARKLAVLLHHLWISGAVYEPLRHRPALAQAS

SEQ ID NO: 141641 - protein, 359 aa, unidentified
MAAKAKTSRTPPQDLKLTSIGVDIGKDIFHIVGFDVNGEVVLRRRIKRLALSATFETLPRCIVGLEACLSAHFVSRTLRKLGFKPRIIPAKYTKPFVKGQKNDYNDAEGIAEAALRPNLKVVTEKTQDQLDLQALHRVRARLVSRRTATINQIRAFLIEQGITVRTGAHALRNSLFGILKERRDEISPRMADIIVGLYEDWLWLDKRIAGLTDEIEKISKVERNCRRLMSVPGIGPMISTAMVAAIGTGEAFDRGRDFAAWLGLVPRQYSTGGKPILGRISKRGCRYLRTLFVQAAHIILMRPQNWEKLSFGAWLAQASERMHKNKLAAALANKLARIAWSILRNGGRFKAISIEASAV

SEQ ID NO: 141642 - protein, 415 aa, unidentified
MNDLIRIGMDTSKSVFVLHGVDVAEQPVLRKTLRRRQVIEFFARLPPTRVGMEACGAAHHWARELRALGHEVKLLPAQRVKPYVARNKNDTADAEAICEAMSRKRMTFVPVKTAEQQAALMLAGMRDQLIARRTQLSNTIRGYAAEFGLVAAKGLDKIEPLLARIAADESLPALARELFATLDAEYAALKPKLRKIEVRLLAWHRQNELSQRLAEIPSVGPIGAPLMVMKVPNPQAFRSGRDFSAWLGLTPKDHSTAGKQRLGVITRAGDEALRRVLVLGATAVIQQVRRGRGHPSPWLVALLRRKPPKLAAVALANKTARIVWKLMVSGERYRGARATGAGHGNACFEGASPQPRKAGAVLAAVKARPGSAAARRARNATAGLDGGCARRATTIAVGTKKRSAVEQRNESQGHV

SEQ ID NO: 141643 - protein, 355 aa, unidentified
MRFYVKEHKYYCGVDLHARTMYVCIIDKEGAIVKQKNIESCPHEFLSLIEPCRQDIVVAAECMFTWYWLSDLCRKEGIPFVLGHALYMKAIHGGKAKNDRIDSYKIANLLRGGNIPMAYVYPSEMRATRDLMRRRNYLMRMRAELLAHIQNTNHQYNLPAFHKAIAYKGNREGISERFSDECVRKSIEVNLSLIDHYDQLLRKLEYYIDKKAKVHDPEALFRLRSVPGIGHTLALIILYEIHDINRFPRVQDFVSYCRLVKPSKVSAGKLYGHSGAKIGNAHLKWAFSEAAVLCLKQSPDIKKYKARLVKKHGKAKALTILAHKIGRAVYYMFKRQEVFSIERFLNKQLIQTGRA

SEQ ID NO: 141644 - protein, 326 aa, unidentified
MQVYKVSSDGVVSNKAVKRADFLNEFRNIPPSLIGMEACGGSQHWARELQSLGHTVRLMPPKLVKPYVTGLKNDKNDARGIYTALVMGVREVPVKSAAIRDLALLQTMRSKRQREKVAKINHIRGILTEYGLVMGKSVNAFLAKAGSLIVELKERADVSPFIVSELTALFHEVKEAMAKIKELETNIESIAKTLKQYELFQSAPGVGPITAATMLVLLCNPAVFKNGREFAAYIGLAPQSTGSGGKNVVTHIPKKYECNNEVRALLVQCAHSICRCRHKSDWVSLILARKPKKVAIIAVANKLARQLWVMAKKGEKFERRLILAAV

SEQ ID NO: 141645 - protein, 341 aa, unidentified
MGEVSTIGLDVAKSVFQVHGVDVAGSVVIRKRVSRAKMLEYFGGLPRCLVGIEACPSAHHWGRELQALGHLVRLIPPNCVKAYLKRSKNDANDAAAICEAVTRPPMRFVPLKTKEQQAVLMLHRTRQLLVRQRTMISNALRGHLAELGIVSAKGRNGTAELLRIIADGRVSPAVCGILEVLARQYGAIGTEIASIDKNIMVLHRACEASRRLAEIPGIGPIGATALVAEISDWKAFGSGRSLAAWIGLVPKQCSTGGKERLGRITKQGNRYLRWLLVVGAMAVIRYARKHGTEKRPWLGRLMERRPTKVAAVALANKIARMAWAIMVRDERYKEPKLLLAA

SEQ ID NO: 141646 - protein, 338 aa, unidentified
MEYGAIDLHTRKMLIRIVDATGVVVLDRTITTSREGLTLVFGGRAPMRVLLETGTESEWVAQAIEAEGHDVVVADPNYALMYGVAVRAVKTDRRDVAALAEACRLGIYRPAHRVSAAQRQVRRQLRVREQLIRMRTQAINLMRAQLRQEGYRLPSGASPSAAARCRRLPLVAAVHEALSPVLQLLDALAPLIHACDQQADTQAAADPVVRQLMTAPGVGPIVGLTYRAVLDDVTRFRDASSSTAFLGLVPKEDSSGTRRRKGGITKRGPTALRVLLIQAAWTIWRQRQGRAALHAWVERLAARRGRRIAVVALARRLARILYAMWRDGSDYRPVPTAA

SEQ ID NO: 141647 - protein, 416 aa, unidentified
MEVIVDRVAGLDVHKETVMAAVRSPSDRGRRSQEVKEFATFHGDLLRLRDWLVAEGVTLAVMEATGVYWKAPWHVLEEVPGLELMLVNPRHVKNLPGRKTDVSDAAWLAQLAECGLLRGSFVPPPVIAQLRDLTRYRKKLIEDRAKEVQRVQKVLEDAGIKLESVVTDVMGKAARRMIEALMAGERDPEALADMALTRMRPRIPQLRLALVGRFNAHHAVMLKAHLAHIDYLDGQIAAMDAQVERVIAPFADQLRRLMTIPGVGQRTAEVVIAEMGVDMGRFPTSAHLASWAGLCPGHHESAGKSKSGRARKGNGALRVALCEAAWAGVRKNDSYLGAQFRRFQRRFGKKGEGKAIFACAHSLIVIIYHVLAEPDGTYQDLGADWFQRRSDTEAHTRRLIHQLERLGHHVTLTPAA

SEQ ID NO: 141648 - protein, 298 aa, unidentified
MAFIELPILGIDISKAKFDVALLVDGKVKKTRVFENNLAGFKALSLWLIKNDITHLQACMEATGCYGDELATFLYDQGFEVNVVNPAQIKSFSGAQLNRAKTDKADAKLIAQFCASMHPTAWVPPPVHVRELQALVQRLAALQQMERQEQNRFGTAVPVIQPSIKSVLTTIKAEIKAVEQMIRDHIDRHPDLKDKSNLLDSIPGIGVATISRLLAFVGDVDRFNDAKALAAFVGLNPTVHQSGSSVRGKSRLSKKGNATIRKALYMPAVVARRYNPTIKEFAQRLKKSGKSNMLISRP

SEQ ID NO: 141649 - protein, 329 aa, unidentified
MHSTDICFVGIDVAATTLAVCRRRAGGTPRRKSFANTSTGHRKLLSWLDRGPVRVCMEATGPYGLDLAATLHAAPDIAVMVANPRAVRDFARALMSRNKTDRVDADTLSQHAERMPFKPWTPPPQALLELRHIARHITVLTNTKAAEKNRLHAARATRTTPACVIAALDDHIAALERRITVLEIEAAHRLAEIDGVEHVLTIPGIAQKSAIQLVAELAVLPTDMTKRQWVAHAGLDPRLVESGSSINRPTRISRNGNRRLRKALYMPALAAAHRHPAFATFYQRLIAAGLTKLQALVAVMRKLLHALYAVLKYKQPFDPDKLFKPRQCA

SEQ ID NO: 141650 - protein, 457 aa, unidentified
MAGSKKSRQSAEQDGLPVVHRHAAGIDVGATFHVVAVAAGRDPKAVRTFRSFTGDLHCLADWLAEAGITTVAMESTGVYWIPVFEILEARGFEVLLVNARDVKNVPGRKTDVNDAQWIQRLHQHGLLRGSFRPRQEIVALRAYLRHRERMVEYAAAHVQHMQKALMQMNVQLHHVVSDITGVTGMRIIRAILNGEHDPDVLAGFRDVRCKESRETIGKALVGTYRPEHLFALQQARELYEVYQERIRICDGKIEQTLCALNQDREVPTDSHADRRSKRQKNEPAFAIRQALHTLLGVDPTQIHGIGPHLALRLVAECGDDMSRWPTAKHFTSWLTLAPGNKISGGRVLSSKTRRSANRAASLLRVAAMSVGKTNTALGAFYRRLGARVGKAKAVTATARKLAVLFYNTLRYGWTYADPGADYYEARYQERLRKNLHRRAAALGLQLIEAAPEGIRVS

SEQ ID NO: 141651 - protein, 352 aa, unidentified
MKKNSRRGKRTEGETIGIDLGDKLSRYAVVSAEGEVVEEGSFRNRAESIAKHFGGRARARVALETGAQSAWIARELAKCGHEVIVANTRELKWITASDRKSDRGDAVKLALLARADRRLLAPVEYRTAQQQAELSVIRARDALVRARTLLVNAARGLAKGFGKRLPATVTSSFGKRAGAELPEILEAPLGGLLEQIDALSRQIRNYEQQILELAAGRKEVARLATVPGVGTLTALTFVLTLGRQERFASSRDVAAYLGLLPRRRQSGERDPQLGISKSGDKYLRKLLVQCAHHVLGHWGTDSALRRWGLAKSQAGGKPAVKRAIVAVARKLAVLLHRLWVTGETFQPFPLKG

SEQ ID NO: 141652 - protein, 388 aa, unidentified
MQFIAKESTAIRTNLGAIFVSLELSRSTWLITSVSPGGGEKMSKHCLSAGDIAALLARFSALKQRAFARTGKLFPIIVVQEAGLDGFWIHRVLQSEGIESRVVDPASIATSRRRRRAKTDRIDGEALVRALLAYERGEPRVCAMVRVPTPEDEDSRRICRERKTLTIERIQHVNRIKGLLFSQGVSDYEPLRRNRRQRLDELKTGDGRPLPPHLKRQINRELDRLELLLGQIKAVEAERDALFAPTAKTDQTPAPQAILIGLRGIGPEFAAILWSEGLYRSFANRKQVAAYAGLAPTPWQSGSVAHEQGVSKAGNPRLRTTMIQLAWLWLRHQPNSSLAQWFNERVSRNGGRLRKTMIVALARKLLVALWKYVTAGVVIEGAIVKAAS

SEQ ID NO: 141653 - protein, 396 aa, unidentified
MRAPKQRKANDLSRSLSTLDTHRTLIAVVEMSQSSWLVAGMVPGIERQPLKKLCVDESALLKLLFRWRDEAAKAGHKIERIAVAFEAGRDGFWLARWLRARDIEAHVIHASSVAVPREHRRAKTDRLDTELLKRAFLGWLRGERDHCKMVAVPTIADEDAKRPNRERQSLVGEESRIVNRMKATLVRLGIRGFNPKLKRAVDRIEGLRTPEGEPVPPNTLAELRRDMERRRFVRDQIQQIERARLERLEHAPSDGPHAMVRLLARVIGVGIETADMLVQEVISRNLRDRRAVARYAGLTGSPDESGNRRREKGLARSGNARVRTGMIQLAWRFLMFQKDSALAQWYRARTQTAPGTRKTMIVALARKLLIALWRLVREGVVPDGVVLRPAPLNGGC

SEQ ID NO: 141654 - protein, 423 aa, unidentified
MMRIIYPICCGLDVHKNVIVATIVTTNKAGISEYIQESFSTINSDIQRFHDWLIENNCYHVCMESTGKYWIPIFNYLEADIDVCLIHPKYVKAIKGKKTDKKDSKWIADLYKFDLVRCSFIPPKDFRQLRELARYRFKLVCMKSSEKNRLQNCMTLSNIGIASVLSDPFGKTATEIMAYLLEHTSDSINERAVRQLIKKGAKAKSDEIIAAIKGYKIETDQAKKYELAHNHLEYLNEMILQTEVELYVRIKPYYEFVEFVSTMPGMTELSSTIVLAETGVDMSVFDDAAHLCSWCGLVPANNESAGTKKSTRIAKAGDYLKPMMVQCALAAIKCKSQPYFAIKYGRFKKRRGLKKAIIAIARMMMVSIYHMVSEKKPFQPSDYEELLNPHNHNERVVLNDSNVFAYLEAQGYDISLLVKCNDN

SEQ ID NO: 141655 - protein, 418 aa, unidentified
MNEDEHTRGARRYVGLDIHKHYCVVAGVERDGRVVLPAVRVEHEDLEGWLKKKLLPTDHVVFESTTNAWHVYDLLEPQVERVVVANPIKVKQIAQARVKTDIRDTLILARLLAANLIPEVWVPPAPVREMRQLLSQRRQWVETHTQIVNRMHSTAHRHHLKHERGKRFNEKNTLWQKDQRLSKVEQFQLALEMENRAHIEKQIMRIGKEVAQMSHQKPWAQDMTYLMQLPGFGVITGMTVLAAIGEIGRFESAKRLASYSGLIGGLEQSGTKFVEKGITKEGRKELRWAMVEVAQRAVKSDPRWRGKFQDLHKRMHRNQAIVAIARQLLELVWYVLTRRQPYRHFSQERIAYKYLTWAWQMDEAARDGLTRQQFARYYLMRLGIGHDLTRIALDPKHPRRLASEAELLALRPELNRIE

SEQ ID NO: 141656 - protein, 410 aa, unidentified
MEVLYPHCAGLDVHKETVVACQRHMANGTVKREVRTFRTTTKDLLALSEWLTGQQCTHIAMEATGVYWKPVWHVLSDGDFTLVLANAGHVKNLPGRKTDVNDATWLADLMAHGLIRGSFVPDAQTQELRRLLRTRKQFVREGSSHVQRLQKTLEDANIKLDSVISDIIGLSGRAMIEALIAGESDPDTLAALAHHRIKAPPAALREALRGRVTAHHRFLLQLHLQHIDALDTAISAIDREVDTHLEPFRTAVLLLTTIPGVSDLSAQVIRAEIGGDMSRFPTVGHLISWAGLCPKNDESAGKRRSNRMRKGAPWLKTTLIQCAWAAARKNGSYLQAQFHRLRSRHGAKKAIGALAASILTAAYHMLKDGTLYHDLGPDHFDRRAKTVQTRRLITRLQKLGYAVQITPLAA

SEQ ID NO: 141657 - protein, 536 aa, unidentified
MYCHSEHVYSRKRDTPADERGLRAGYAEFSCGCGSRPAIALVLSSPILSMVPGSVVTPLVTLASTPAHDPVQESTRIHNLARPQPAEVNMPQSSSSVSVACMEPNAAGIDVGATEIYVAVPPGRAAESVRTFKTFTEDLNQMAAWLLHCGITSAAMESTGVYWIPPYEILQQAGIRVCLVNSRHVKHVPGRKSDVRDCQWLQYLHSVGLLKASFRPDAAICAIRSLSRHRASLVENAAVHIQHMHKALTQMNLQIHHVLSDLTGLSGTAIVEAIVAGERNPERLADLCHSTVRSDRQTVIKSLVGNYRPEHLFTLRQSLSAYKSYQQLMAECDREIERLSSQLNGKSGPHPKPPGPGPAVPKRRKNQFHFDMRSELHRLFGVDLTGIPGISALTAHTLFTEIGPDLSRFASATAFASWLALCPANKKSGGKILSAKTRPSNSRASRALRIAAQTLARSHSHLGNFYRRMRARLGAPQAITATAHKLARIVHHMLTTGQPYDESVFNQTDEQQTRRMQNRLRQQARALGLQLVPLPT

SEQ ID NO: 141658 - protein, 347 aa, unidentified
MRFYTRQHRHYCGVDLHARSMYVCVLDRDGNVLVSKNIASAPEPFLQLIAPYREDLAVAAECMFTWYWLADLCAREGVVFVLGHALYMRAIHGGKAKNDRIDAHKIAGLLRGGMLPQAYVYPQAMRATRDLMRRRNYLMRQRAELLAHITNTNHQYNLPALGVRPARPAERLELLEHFAEPQVRRSIAVDLSFVEHYDRELPALERYLESNAQAQDPLALAIVRSVHGMGKVLGLSILYEIQDIGRFARVQQFLSYGRLVRPTKESGGKVLGHAGRKIGNAHLKWAFSEAAVCFLRANKRAQALRARLMAKHGKGKSLAIIAAKLARAVFFMLKRGEPFDAERFFAH

SEQ ID NO: 141659 - protein, 416 aa, unidentified
MISFPKRERAQRAAACVGVDAGKFSHTLVVRPQHQPDSRPFGFPTTRAGFDSALAFIRQQTAGAAAETILVGIEFAGNYGFTFAHYLAQLGFPIVSVLPAHTKRWKDVAHNQPLTTDAKDAGTITDLVAQGHFVGFPFLSPAYADLRYLVTARERLSLLRRGAITQLRTLIQVVFPEYEALFPLLTKKTPFAVLRTFPTPQDLLDATKTKVLRVLKSASRGHLGAETYDKLVEAARATLGLPGAQARLKQEILLTLERIALFERQIKALEAELVAALQAVPETPYLLSIPKIAPVTAAIFLGSIGDPRAYESGAQILRVAGLSLVERSSGVLRGTKRISKRGRPLLRQAAYMFAVRSITKGSLFRAEYEALCQRNGGVKMKAVVAVMRSGLRLLYSIARDRRSFTTEPPVRRRAAA

SEQ ID NO: 141660 - protein, 522 aa, unidentified
MPRSRTARSSKAHKSLVLHKPNGLLSPRVQAVGPEHFGIVAVDCAKARSRYFLADFYGRVLIEPTTLTHSSGHFQAAIDRLRQAMIEHQLGDLVVAIERTGEYHRPVQRAFRQAGFEIRLVHPLTSKHYRQPADPGNKTDDTDLAAIFRATTHGFGLCDPVWPDLYRTLQLFRRHRRDLVDKNSQLCCQIREVLHAAMPGYAECFCHLWESPAALVLARQTTSAGAVRQAGLPGLQAIADQAQIVCRRDTLHKLLAWALQAPPAHEHTLDLRRILGDLDDDRLHKTQQILELERSLAQLVVATPYALLLAIPGINIVTVADLAGELGPLQLYLNANAITGRAGLMPSRYQSDQVDHPNGPLRRRGHRRLRAVLMQTADNLVQCNHYFQARADLWKRAGKDARWIRVKVAKIFSRLAYALVAGQQLFRHDCCQPRHYILGKLLEFHSSHRTAPEQIRQDLETVIGQLPATARAEEAPPLQKLLEELNQRSRGPQPLAKILPLVLARLGQRMLQSEAEREGTSS

SEQ ID NO: 141661 - protein, 342 aa, unidentified
MENNIYDHYIAMDWSLKIMAIARMTKKSNKITVFEAPADVLEFQIYLQSLKGTKVLAIEETTTSQWLYTELKDEVDQLVICDPHRNHLLNEGVKTDKVDASKLVQLLKAGLLKEVYHSGDKFLYLRRLVSGYEDLVKSGVRLKNQRYALLRACGGTGKEKEATHFQGPQDQYVLKCLARQIDLYEEEKEGYEKQFGILARKYPEIRHQESLPGIGLIHAIKVVSRVVTPHRFADRGQYLSYCGLVKLEKTSGQTSYGWRSSRYSRQLKCVYKMGVLAALNQSNPIKNYYEHLIRDKNYPEYQARHKACRRLAILSLGVFKSGKKYQIGRIPIEKRQELSSDL

SEQ ID NO: 141662 - protein, 364 aa, unidentified
MCGEHRKDYCSMKKYIGCDAHTRYSIFVSLREDGGCDPAVRIEHNELEMERYLKQLPAGTPVALESSGNWYWLVRAMEEAGLDPRLAHALEAKKRMPGRNKTDHLDAKGLALMLRNGSLPEVWIPPANLLDRRDLMRTRLATRQQGSELKCRILAALRRYGVRREEEGADLFAESRRPKLAIAIARLPQECRIATTEEWVLLRELEQHLEAMEQRIRQRIASLGWVRLLKTLPGVGTILGSTIYLEIGEVSRFPSPEHLASYAGLVPTVHASGGKMWQGPTPRSANHFLKWAFIEAANVIVAHQKGWADKHVVRLYQRLKANKCHGKATTAVARHLAESSCWILTKKQGYREPALATMSSSKNG

SEQ ID NO: 141663 - protein, 443 aa, unidentified
MRLIYERVAGLDVHKKTVVTCRMRVTAEKRIEWESKTFGTTTAELLALHDWLSEWECSHVALESTADYWKPVYNLLEGEFEVFLVNAQHVNKVPGRKTDATDAEWLAELMLHGLLKASFIPAKPQRVLRELTRYRSTLVRERSRVVNRVEKLLESTNIKLTSVVSDVMGVSARAMLEELVRGSTDPQALAELAKGRLRQKTKALEAALVGVVEAHHRFILAQQLGHIDFLDEQIEAMSAEIGRQLERMSQSGPTDGSAQPDQSGQPDNSVPTEPPPLSWTEAVALLDTIPGVDERVAEVMLAEMGLDMRQFPTAKDLVSWAGLAPGNHQSGGKRYPSHTRKGNNPLRSMMTQAAWAASRTKETFLKARYHRLAARRGKKRAIVAIAHSMLESAWYMLTRRQPYQELGGDYYDQRKKENKVTYLTKQLTRLGFAVTLDPFPVAA

SEQ ID NO: 141664 - protein, 427 aa, unidentified
MTRFTTDEVAAFLGLDWADTTHEICLQIAGSDTRECQVLEHRPAVIDAWATALLQRLQGRLIAIALELNKGPIVEALRKYDGLVLFHINPMMLARYREAFTPSRAKDDPTDAELQLDLLLRHRDKLKPLAPQSPEMRALSQLVEHRRRLVADRVRITNRLTSALKTYFPQVLQWLPNKETQLFCDFLSQWPTLKAAQLARRSTLERFFRQHHVHGEQRINERLEAIKSATALTSDEGIIRPQALLVKALVSQLRVTLEALGNFDQAIAEQAQHHPDFALFEALPGAGAALAPRLLVAFGEQRERYGSAAEVQTYAGIAPVLERSGKQSWVHWRCQCPKFLRQTFVEWAAESIQFSFWARAYYQQQRDKGASHQAAVRSLAFTWIRIVFRCWQTGTPYNESTSLAALQHQGSPLIPNLAQSSKKGENT

SEQ ID NO: 141665 - protein, 402 aa, unidentified
MNCVGIDISKGKSMIAVMRPFGEVVVSPFEVLHTDSELSKLARLLKSLDGETRVVMESTGNYHAPVAWLLHDAGLYVSVVNAMLVHDYGNNSLRRAKTDKKDAVKLANYGLDHWLTLPRYVPEEDTRLMLKSCYRQYQQYSKVRTMLKNNLISLLDTAFPDANRLFTSPPRADGSEKWVDFVAAFWHCECVCGLSEKAFTAKYQKWCKKHGYNFSEDKALDIYASACGHFGVMPKTDTAKLLVEQAISQLRATSAALAALKQEMQSLAASLPEYPVVMEMFGVGPALGPQLMAEIGDVRRFHSKKSLVAFAGIDAPPYQSGQMDIRSRSISKRGSASLRRTLFLVMGVLLQCAPMDEPIYQFMNKKRSEGKPYRVYMMASANKFLRIYYASVKAYLDSLEHN

SEQ ID NO: 141666 - protein, 410 aa, unidentified
MLCIGIDWADDKHDVCIRDAQDRRILAEFTIAHDAEGIEQLDETVTALGFQPADCLVAVETPHGLLVGYLLQTGYIVYAIPPLAVDRYRDRHRLSGARTDQVDASTLADILCFDREYHRPIPMDSPLAQEIRLVSRQRQKLVQEQTRIKNQLTACLKEYYPVALDLFSGLDCAITWAFLRAYPNAEVAAQASLAELKGFFDQQGYTCKGKIPEIYAKLQAPAIPVAEWQVRISQRYMLLLVDLLATLAPQIKTYEKELGRLLNQHADASIFLSLPNAGQVTAAWLLGEIGDCRDKFESTGDMQALAGTCPVTIQSNKRRQIKFRRGCSKQFRNAVQQFARLSARGKKGSSWAKGYLSDQLARGHSVSRATRALGNRWLAIIFRLWQDRVVYDEKVHLSNRARRGYHHVNA

SEQ ID NO: 141667 - protein, 314 aa, unidentified
MRSLVFVGIDVSQARLDIAIRPGTSFSITHGESAIAALVQQLCALSPTLIVLEATGGMEIPLTSALATAGLPVVVINPRQVRDFAKASGHLAKTDALDAQVLAQFAEVMHPQPRPLPDAETRTLAALLTRRRQLVEMLTAEKNRLLSTAAPIRKRLRTHITWLERELQSTNTALAGAIRQSPVWREKDELLQSVPGVGPVVTSTLLASLPELGTLTNKQIAALVGVAPLNRDSGTPRGRRTVWGGRAQVRAVLYMGTIVAARFNPVIRVFYQRLQQAGKAKKVALTACMRKLLSILNAMLKHRTLWREVEVSHA

SEQ ID NO: 141668 - protein, 360 aa, unidentified
MTVTLGVDPHKASHTVVTTDPVGRQLAQTTSRGTRTSDHQELIGWARQRWPERTWAVEDCRHVAGRLLADLLAAGEQVVLVPPRLMAQVRQASRVPGKSDPIDALAVARAALAEPKLPQARLDGPARELKLLVGHREDLVAERTRIQNRLRWHLHDLDPERAALLPTRHLEQRRVLDELEAWLAELPDSVQVTIVRELVGRCRELTLRANQLQAELRHRVARVCPRLLTLPGCGVLTAAKILAEVAGVGRFRSEAALAMHAGAAPLECSSGARQRHRLSRVGNRQLNAALHRIAVTQLRVHPPAQLYLLRLQAAGKSKREALRVLKRRLVRVIFNLLQADLDQAQPAPSTAPQAARESAA

SEQ ID NO: 141669 - protein, 416 aa, unidentified
MDAIVERCAGLDVHLDTVVACVLYGKLDIKPKKEVKTFSTTTKGLLELLDFINQKECTHVAMESTGIYWKPVWNILESGAFDLIVANAKKIKNVPGRKTDVKDAEWIASLLRCGLIEKSFVPPERIRDLRDLTRLRKELLGEVNRNKNRIHKVLQDANIKISSVLSDVFGETGKSILNQIIDNQCITEEFIYSLYEGRGKSKLKSTLMEMYEALNGKIRGHHVILLGMHNSNIVFLEKQINELEKEIDILLQKERDSLELLETIPGISKISASSIIAEIGTSMDVFKTEKHISSWAGLCPKNNESAGKKKRSGIKSGNNWLRSMLCECAWSATKKKDSRFKNKYWSMVPRMGRKKALIAIANMMLRLIYHLLKTKSTYKELEIQYFIDKDKRREDRIIKELKSKGYLVEKDSLQMA

SEQ ID NO: 141670 - protein, 341 aa, unidentified
MEKITTVGLDIAKHVFQVHGINGAGAIVCRRKLRRDDVVGFFKALPPCLIGIEACATGHHWARVLMALGHEVRLMPASYVKPYVKRQKNDATDAEAICEAVTRPTMRFVPVKSEEQQGVLMLHRVRELLIRQRTMLVNALRGHLAEFGIVTRQGLAGVGMLMALVDDDDHDLIPPLARSALLPLIGQLREVHEKVSELDRQIHAWHRSNELSRRLEAIPGIGPITASAIAATVTDASLFKSGRQLAAWIGLVPRQNSSGGKDRLGRISKQGDPYLRRLLVVGAHAVLRFSRNGKTAPTRWAAELLAKKPYNVVAVALANKIARIVWALMTTGRRFEATAAV

SEQ ID NO: 141671 - protein, 348 aa, unidentified
MLYVGLDLSRKRLDWLALEQEGALAANGAAAPDRDALATLGRRLGDAPVLAVIESMSGARFVHDQLELAGWDVRIADAHKARGLAPLACKTDRIDCWVLAELARRNLVPEIWLPDPRVRAERERARFRLHLVKHRSALKNRVHAILFQHGVPNPHRDLFGAGGRCLLTRVELPEPWASTVGTSLALIDDLDEQVAACEAELRRLGATHPYVPLLTTIPGIAWVLGYTIAAEIGDIARFASPRKLIGYTGLTPRVEQSGERDRRGPLRKNGPNYLRWALIEAAHTAGRNPHYRPIVERMRARHGRTRGSKIAAIEIGRRLTEAIWHMLTNDRPFTPAGAPTPVAAMTAH

SEQ ID NO: 141672 - protein, 411 aa, unidentified
MEPIVERVSGLDVHQKTVVACAVIGEADRKPKMEVKTFGTTLSDLIELREWLVERGVTHVGMESTGVYWKPVYAVLEEAGMDLIVGNAHHIKNVPGRKTDVKDAEWIAELVRHGLIAKSFVPPKPIRELRDLMRYHRKLVNVRSGERNRLLKLLETANIKLSSVATNVFGKSGMAMLEAIAKGQDSGAALAELAQGLLKKKKAALGKALEGRVAEHHRFVLRMQLDRLKALEVDLAKLDAYVEEKMEPYRSQQRALEAIPGVGAYTARTLIAEIGVDMNVFKNEHRLAAWAGVCPGNHESAGKRLSGRTRKGNMHLRTALVEASMSAVRKKGSYLRSKYYRLKARMGVKRAAVAIAHKILIVAFRILADGTLYQDLGDGYLDSLNKTRTSRQLVRRLEALGFRVAIEPVAA

SEQ ID NO: 141673 - protein, 339 aa, unidentified
MEVKRISIDTSKHTFTIHGVDLQERPILQRDIKRTQLEPFFAKLEPTEVALEACAGSHHWGRLLSRLGHRVKLIPPQYVKPFVKRSKNDRTDAEAIGEAASRPTMRTVPLKTVAEQAATIVVKHREMLVAQRTQAINALREHAAEFGTIAAKGCTNVTALLAVLAADEVIPHSARAMFEQMGQHVADLDSKIEALDRQLLDQHKINPVSRRLATIPGVGPITAITLALTVDSGNFESGRHLAAWLGLTPREHSTAGKHRLGQISKAGNERLRQLLVVGAMAVIRVAKPGRPSASGWLLQLLERKPRKLAAVALANKMARIVWAIMAHGEAYRRQPATAA

SEQ ID NO: 141674 - protein, 339 aa, unidentified
MNRIVVGVDIAKRVFQLHWVQPETGEIVALQLKREKFLEHFANRSSCLIGMEACGGSQHWARSLQKLGHEVKLLSGRMVKPFVGGNKNDAADARGIWTAMQQPGIKAVAVKSEEQQAVLALHRMREQLVKFRTAQINGLRGLLTEYGEVMPQGRAGIKRDIPGALGRLSDRLPAIVIETLREQYARLGELDEQISQIERRLRQWQREDSAAQRIAAIPGVGLLSATAAVATMGDAKAFKSGREFAAWLGLVPRQTGTGGRVRLLGISKRGDKYLRTLLIHGARAVLTHSKSPPEWLTELLKRRPKNVAVVAMANKMARTIWALIAHERAYQSGYVSRPA

SEQ ID NO: 141675 - protein, 287 aa, unidentified
MYIGIDVHKENWHIAAQVDGEEVFHGSMASEYHSLRRFLDRFKECRIKVTYEAGPFGFWLHDKLMVDGIETIVVPPSLIPMESGNRVKTDKRDSRKLARLLESNMLKKVYVLSEEDRADRELVRTRRQLLEHRGDVRRQIKSKLLFYGIKSPFSNKRESWPKRYVEWLRELTFEHAVLKVPFESLIDLYEYLSSQVMKISKQVVALSRSDKYSHKIKLLRSVLGIGILIGMELLVELADMERFKTAEEITSYMGLPPSEYSSGQHVRQRRITRCGNKRARTCLVESS

SEQ ID NO: 141676 - protein, 347 aa, unidentified
MDTIGLDLHKRESQLCIIAEDGSIKELRIVTSRERFTAVLGNGIPARILLEASTESEWVAQHLESLGHEVIVADPNYAMMYASRAHRVKTDRRDARALAEALRLGVFRVVHRVSAERRHVRAELAVREALVRTRTRYVSLAKSLVRRDGLRVAGSQSHLVAKRIAALDLSDALASELMPLFQVLAPINEQSDAADRRIGSLVASDPDVALLTTVPAIGPVTAAAIVATADDITRFNSAHQFEAFLGLVPGERSSGEKRRVGHITKRGNSRVRYLMVEAAWRILRSKGEETAALRSWALLIAARRGKRIAVVALARRLAGIVYAMWRDGSPYHGTKVRRPRPLLSKAG

SEQ ID NO: 141677 - protein, 402 aa, unidentified
MNAVGIDVSKGKSMVAIMRPFGEIVSTPFEIKHTSSDINSLVKLIKSIEGESRIVMEHTGRYYEVLAHQLSEANLFVSAINPKLIKDFDNDSLRKVKTDKADSVKIARYALDKWQNLKQYSVMDELRNQLKTMNRQFGFYMKHKTAMKNNLIGILDQTYPGVNTYFDSPARSDGSQKWVDFASTYWHVDCVRKMSINAFIDHYENWCKRKKYNFSKSKAEEIYGKAKELVPVLPKDDITKLIIKQAVDQLNSASITVESLRTLMNETASKLPEYPVVMAMKGVGTSLGPQLMAEIGDVSRFTHKGAITAFAGVDPGVNESGSYEQKSVPTSKRGSSDLRKTIFQVMDVLIKTHPQDDPVYQFLDKKRAQKKPYYVYMTAGANKFLRIYYGRVKEYLASLPES

SEQ ID NO: 141678 - protein, 345 aa, unidentified
MDQIIRIGMDTSKYIFQLHGVDAAERPVLRKKLGRKQMIEFFAKLPPTVIGMEACGASHHLARVLGELGHEAKLIAPQHVKPYVARNKNDSRDAEGLCEATGRPTMRFVPVKTAEQQAALMLAGVREQMITRRTQLSNAIRGYAAEFGITVAKGLDKIEPLLKQLAHDESVPALARESFAIQGREYAQVQVELKAIEARLRVWHRANPDSRRLAKIPGVGPVGATGLVMKTPDPHAYPSGRQFAAWLGLTPKDHSTAGKTRLGKITRAGDERLRSVLVAGATAVIQQAMRGRGNPSPWLIALLKRKPPKLAAVALANKNARIAWKLMVTGEDYDGARMLGASAAA

SEQ ID NO: 141679 - protein, 317 aa, unidentified
MSQASVFIGIDVSKNQLDVAVRPHQVSFSVINNDAGIQELVQRCAELKPVAIVLEATGGYENMAALALGAAGLPISVINPRQARDFAKALGKLAKTDKIDAACLAHFAQLLDPLPLPIPTAEQEKLSSLTTRRRQLVEMITMEKNRREHAPPQILSHIQRHIAWLQAELKQLERQIDDFIKKTPMWQEKLKILKSIPGIGVVTSSILLAELPELGVLDNKKLASLVGVAPFNHDSGKFKGRRRIKGGRKVVRDKLYMATLVATRWNPVINEYYQKLLQAGKLKKVALVACLHKLLNIMNTLLKKKSLWQPNLSSQTS

SEQ ID NO: 141680 - protein, 341 aa, unidentified
MSSLVCGLDVHKDSVYATVMSYGGEVVERRKLLDKDEVVSFLGRYPIDKVAMESSTSIVPVYRALRGKGYNVLVSHPKKTRLIAESRIKTDRVDSWALTELARLDALPLSYVPPDDVAALREKVRRRAFMVRMRSKLKVKIKADLTINGLTPPSEYGLFTRKGLEWLHGLQSDAVESYLPVLSTLTLQIERLSKELRRMAPEDEDVRLLMTIPGVGYYSALLVKSEIGTIDRFPDGEKLCSYAGLVPSVSSSGAHKRYGSITKEGSRWLRWIMVESVRIHLKYDTGITRAYHAIAERKGSGIAKVAAARRLLMCCYAVLRNHEPYHDPAGHYQPSRSGRGE

SEQ ID NO: 141681 - protein, 342 aa, unidentified
MNEITTIGLDLAKQISADVEGAPVISRKLRRADMLSFFRKTPRCLVGLEACGGAHYWAREIAALGHEVRLIPPAYVKPYVKRGKTDAADAEAICEAVTRKTMRFVPVKSADQQAAAMVLKTRELLVRQHTRAINALRAHLAELGIIAATGTTKVASLIDIVRDETDNRLPQAARFALSEIADHIEGLNRKIGKLEHAIVMEAKRDDDMRRLCPIPGVGAIIAASIKATVPDPGGFTSGRHFAAWLGLTPKPHSSGGKERLGGISKMGNPMLRSLLVLGATSVLRHVKGNASAPPWLSALLARRPFKVVAVALANKMARIIWALLTKGGKYRTSGTTSEAAHA

SEQ ID NO: 141682 - protein, 314 aa, unidentified
MPETTVIVGIDVSKAALAIAVHPSGEQWSTETTAPALEGLVDRLQRVRPTLVVMEATAGYELPVAAACAGAQLPVAVVNPRHVRAFAQALGRSAKTDAIDASVLALFGAHVQPVARPLPDADTQALAALVSRRRQLLEMLAAEGQRLSQATSPTVRRDLRTHIRWLERRVTDVDHQIGGAIQRSPIWRVHDDLLRSVPGVGPITARTLLAELPELGQLDRRTIAALAGVAPFNRDSGRSRGRREIWGGRASVRSALYMAALVASRRHLPLRIFYQRLRTAGKPAKLALVAVMRKLLTVLNAIIKHQTPWSAHAA

SEQ ID NO: 141683 - protein, 354 aa, unidentified
MKRTTKYVAFDVHQATTVASVREETGRVIARSVLPTEERAIREFVGGMRGAIHVVFEEGTQAQWVHELVAPLVDRVVVCDRRGQPRHGNKGDQVDADQLSELLRRGGLRAVYHGSAHRVDLKELTSTYRNLVEDATRVMLRVKALFRARAIPTPGTKVYQAGERGRWLAQLADRGARFRAEALYTELDVLRALRPTAKAAMVAEARRDPAWRVLRTIPYLGPVRVAVLLATMGTPWRFRTKRHLWAYAGLAVVTRSSADYTIVAGQPVRRRRAPLTRGLNRNHNRVLKDVFKGAATAATARPGPLQDFYHGMLARGMREELARVTLTRKLAALTLRLWKTGDRYDPTQLTTQAR

SEQ ID NO: 141684 - protein, 432 aa, unidentified
MSNNRLQVGIDFGQATTHFCLLRPDGQPLELHQAFANSLTGYTAAKKLLLKTLAAQPLDGLDISGEATGFYWLPFFLQLATDPELEPYAPQLFLLNPRWVHWFKKCFPQDDKSDQKDPYYIAERLRTRRPAVAWTPQLATLPLRFYTRLRFHLIESLAREKNYLSAFLFLQASAYRQLRPFADVFAVTSRWAIGHLPSLDDLAALPVETLAAQLDELSRHRLPDPVSNAQRLQQVAAESSPLPAALAEPVQRILDLSLEHIAYLDGQIQQVDHGIATEVDARPAIAKLLTIPGVGPVFAAGLGAEIGEIQHFLQGTKWDTHRQAFRPKNLRDAEDAVAKTAGLWWPRTNSGEFEAEDRHLAKTGNRYLRYYFVQAADKMRQHIPDYTAFYARKYREVTKHQHKRAVVLTARKSVGLIVGLLHRNEAYRPPEA

SEQ ID NO: 141685 - protein, 355 aa, unidentified
MTSTQYIGMDVHKESISIAVRNAAGKIVMECVIETKASTILQFFDGLRGDVHVTFEEGTWAAWLYDLLKPHVTRLVVCDPRRNVLLQEGNQNDRVDARKLAELLHNNQLRSVYHGDHGLRTLKELVRSYLTITQDLSRVMTRVKAIYRSWAIPCTGKQVYGPSHRAEWLAKINEPGVHRRAEFYYQQLDALRCLRQQVRRDLLAESKKHPTWKQLCGIPSIGPIRAAELLGILQTPHRFRTKRQLWTYSGVGIETSSSADHHVVKGQLERKKKQVEIRGLNRNYNHDLKNLFKGAAIVAATKPGPFAEFYADLLAKGMRPEMARLTLARKIATIVLIVWKKGVSFDAQHLKPQTA

SEQ ID NO: 141686 - protein, 316 aa, unidentified
MYLGIDVSKKTIDCCLIKEDSKRQKQFKNEQGGFEKLKQWLDDNHATSELKCCCEATGTYYKQLALYLKNYYKISVENPRKIKGYAISELQRAKTDKQDAKLIAMYCQEKSHRLREWQPPEKDQQELEELTKYLDYLTRQRATEKNKLHESPDYITAHIKTTIDNLTAQIKAVKQQIKQFYKQHPEYGQNQKRLMTITGIGETAASVLLSIYKKHEFKTSKQFVAFIGLDPKPHESGTSVKGKSRISKIGKADTRKALFMPALVAYRINAFPTLINRLKSKNKPLKVILVALMRKLAVIVFTLLQNGEDFDKTRYV

SEQ ID NO: 141687 - protein, 342 aa, unidentified
MKDTMIGVDLAKNIIVLHGTSMTGELRFQKKLSRGQFVQFMQRQPAAVVVVEACGSAHYWARELTAYGHEVKLIAPQYVRPFVKRQKNDMADAEAIAIAARQPEMWFAEPKTRDQQARAVLFRGRERLVHQRTELVNALRAMLYEFGQIVPRGIGHIKRIDAIIRDEAIDLPDIVREECRDLLAQIDEKTTRIEDKTVQLTNASRDSAAAQRLQTMPGVGPMIALAIEAFAPAMTTFRSGRDFAAWLGLVPRQFSSGGKERLGRVSKAGQADIRRLLIIGAMSHVRVASRKPAAPGSWLARLLASKPKMLVAVALAKKMARRIWAMLTKQEAYREQALSAAA

SEQ ID NO: 141688 - protein, 436 aa, unidentified
MARYIGMDVHKREVEVCIIDGKGSVLKRFRCACTRGTLEKIARTRFTKRDHVALETTTNAWAVADLIRPHVARVVVSNSIKTRIIAEAKVKTDKVAAEVLAQLLRCNYLPEVWAPDVKTRLLRRLSSRRASLVADRTASKNRIHSLLAGLLIQAPLQDIFGAKGRTWLNAVQLPADQRAVLNLDLRLLDAVSREIELLDEQLKTLAHHDDRMRLLVTLPGIDYVVAVVLMGALGDISRFRDGDHVASYLGLVPSTRQSGDHCYHGPITKRGRSHARWVLIQAAQHLSRTHGPLGAFFRRLARRKNYCVAVVAAARKMVTIAFLMLKNNEPYRYASPLPTRAKLGRLRIAATGERKYAKPALGKNRPATYGAGQHVVRWPGLADVYASEGLPPVVEIDALPPGERRLLDRESLTEIVRKKQSPRRRIRKDGHLLPES

SEQ ID NO: 141689 - protein, 403 aa, unidentified
MTLTTPGPRAVIGGVDTHADTIHVALIDEQGRPLGDREFPTTPAGYRAALAFLIGSGTLRTLGIEGTSSYGIGLTRAAQAAGIDVREVTRPDRAQRRRQGKSDPLDAYEAARAVLSGRAQAPGKTSDIDTVRALYNARRSAVKARQAAQVQIRTQLITAPSSVREKYRHLRIAMLIKTLAACRPAQHLDHDAVGVMLALKLLAQRHQYLTGQITELDSQLQLRVDATAPSLLHIRGVGPATAAQLLITAGGNPDRLRNEASFAALCGTAPVPASSGKTTRHRLSRGGDRRANHALHTIATVRMVHDPRTREWVRRQRDTGRTNPEILRILKRALAREMFKHLSRPPHVLAIDDLRDTRRTKNITIAAVATALEVAPMTISRAERGHNLNVELTTRYREWLRTA

SEQ ID NO: 141690 - protein, 352 aa, unidentified
MAVYIGVDLHVRTQTVCWVDTTDGEEHELLLDHERDDVRAFYAQWAVPAVVGVESSGYSLWFHHLVEQSGHRLLVGDALAIRQFARRRQKNDRRDARLLLDLLIHDDFPAIHIPAPASREVLALLRYRHRLVRIRTMLRNGLQAVALSHRLRLGPKLFTARGQQQLAALPLAGAFAVQRQHSLLLLASLADQILAVEAQLAQRAQPDPRVLRLRTHPGVGLLTALAVVHALDPVTRFDRARRVAAYCGLDPREHSSGDSQRFGHISKQGNRLLRFLLIEAAHVAIRSDDDLRRFYYQLATRKNPAVAIVAVARKLVLRLYRMLRDEIDYDQFRRRGRDARRAREDANQVLPG

SEQ ID NO: 141691 - protein, 368 aa, unidentified
MEKIARIGIDTSKGSFQLHGVDAKEQVVLRKTLRRRQLLEYLAKLEIGEIGLEACGASHHWGRALGQLGHRVVLVPPQYVKSYVVRGKNDKNDADAICEAMSRRRVRERLVPIKTLDQSAGQMLMKVRSSLIDRRTQLTNSIRGHAAEFGLVAAKGLDKIGSLLARIAADESLPALAREMFATLGEDYAELAARIARVDKRLLAFQRDNELARRLMEVPTIGPIGACLWVTKVVDPHAFRSGRSCAAWLGLTPKDRSTGGKPRLGGITRAGDESLRASLVLGATAYLRHVRSGRIAATPWLTGMLTRKPPKLVAVALANKTARIAWKLMTSGGRYDPAHQSTRERLDASQYGGLRAEPLAAAAGEAAA

SEQ ID NO: 141692 - protein, 360 aa, unidentified
MRIIGCDLHARQQTLAMLDTETGEVVNRTLMHEGNQVREFYSELPGPVLVGIEAIGPMQWFLDLLAQLGIECRVGDAAKIRAAEPRKQKHDRRDAELILKLLVEKRFPAIWMPSKELLDVRALLLHRHQWVRLRTQVQNALQAIALANGLRRGPSLWSYDGLAKIAFLPLPPHTSLRRSALQALYRHMDEEVEKLTVQVAEQVEHHSGAQLLMTHPGVGPVTALATDVFLGDPQRFADGKALASYVGLIPEERSSGRRRRLGRISKQGNPLLRFLWNEGGAHAARRDPELRRFYRRKLVQKGLGKARVAVARKLGIRLWIMLRDQIDYQEFCRRGQKQSGAACAGMPEVGNGANRHRPVE

SEQ ID NO: 141693 - protein, 404 aa, unidentified
MIFVGIDWSEHHHDICVLDADARKLARARVSEGIDGVAKLHSILAEHAEEAKEVIVGIETDRGLLVGALVAAGYQVFAINPLSVDRYRDRHATSGAKSDPGDAKVLADIVRTDRHNHRPVSGDSDLAEEIKLLARTHQSFIWERQRHVNRLRSALREFYPAALEAFGTDLASTDAVAVLTLAPTPALARRLSRSKIAAALRRAGRQRNVDPRTEQILRALRSEQLRASEGLERTYGVITSSLVGLIAGLNVQIAGLEQDLHGAFEQHPDAEIILSQPGLGSTLGARVLGEFGDDPTRYADARARRNYAGTSPITKASGTRRVVLARFARNERLYDACHLWAFVSLTASPGARRYYDSQRDRGKTHNQALRALANRLVGILHGCLTHGELYRDDVAWPIPEAQAA

SEQ ID NO: 141694 - protein, 315 aa, unidentified
MHAPRTFMVGIDVSKAHLDVAVEGKRTVVRFDNDAAGRAALAAAVAGAELVVVEATGGYEMATVRALMAADSPVAVVNPRQIRDFARASGRLAKTDQVDARVILHFARAMRPAQIPHIDDGRIALAALVTRRRQLIDMAVAEKNRLEHAPQAVAVLIGEILAALKAQLARVDAAIALAIEAEPDMAARRDLLLTVPGIGEVGAAVLIAELPELGGIDDKKLAALVGVAPMAHDSGAWRGQRHIAGGRATVRCALYMATLSAIRCSPAIKAFYKRLRDAGKPPKVALVAAMRKLIIMINTILKRHTPWNEPQQHGC

SEQ ID NO: 141695 - protein, 360 aa, unidentified
MTDGMTSVALDAACIELQGAIVAGFDVHRRQITFDALDTRTGEVLRGKIDSTPAAVEQWVARFPGREVHVAVEACTGWLFVARALERCGAVTHLAEPIETSALRGRKRRAKTDRADARWLRQLLLEGRLPESWMPPEHVRQWRSRARLRNTLASERTSWVQRIRATLYHHGIAGAPDDLRTLAGREFLAGLELPVDARERIRVALEMIDLLELQIAEIERELRALARRQPGCRALMDKIYGIGELTSLVTLCELGDVSRLHASRQAVRLAGIDIGVHRSDRTARLGKLTRQGSPDLRWALYEAAQSACRKTSPDHADYRALKDRGLSHTRASLTIARKLARRSYHVLRELGPDALQPITD

SEQ ID NO: 141696 - protein, 331 aa, unidentified
MKFKSFIGIDVSKSKLDAYLKINHLHAIFNNNEEGFKELVEWVMENSGLVLARELLFGFESTGIYSSELALFLDKHPLPFYIMSGLELKRSLGIRRGKSDKADSKDIAEYLYEKQEKIEPTFLPSQTIQDLKKLFNYRERLVKERAAFKTRLKEYETIVSRNKLKVYLKSHTTVIACLDKQIETIEKEIQKLTHSEELLMNQYKLLNSIKGIGPQTALALIILTGGFTKFSSSRRFASYAGTAPFPNQSGTFNGRTKTSKLANKRIKTLLTLCAGTAIQYSTEMKNYYQKRVGEDKSKMSTLNIIRNKLLSRAFAVVNRNSNYVDTLKYAT

SEQ ID NO: 141697 - protein, 372 aa, unidentified
MTERRRTRSWRAGGTVVGADPHRRTVSVSVLDERGGELGIKHFNVSGVGHRAMWEWVRGFGPVCRFGIENASGIGRHTAVFLIERGVDVRDVCPTRTAEQSRRRRQGKSDALDAVRIARETLADPRVPVAFKRAGVERGPDPVHEQLLLWHKTRRSLAKSRARLLNEADHLLIELPLEVREQLPRSRSVRQRLHALERLDTSGYSDPVTRLRLRLLADHTGRIDGLVREERLVARELAALVKASGSTLVELRGIATRSAAELLVEVGDPRRFTEGGFARFNGTAPLPCSSGEGGGEPVRHRFNPHGNRRVNCVLHHMALTQLRCEPRARQLYEQARHRGHTKTEAMRILKRRLSDVIYRRMIRDIEATPTAA

SEQ ID NO: 141698 - protein, 374 aa, unidentified
MRIAVGVDLHSKTAVAHAVHAGGGEPGMREAEFLDGFNREFGGVPSTPEEMRRMAAALRGREACVLLENSTKTHETYWVLTNAGCKVTVAFAADLYRITKSVKKTDRNDAMELAAYMRRRMNGENEFSECYMPSLDWMMKREICRTVFWEKRHLADLKRRVRSHLLLHGITLSREYSDIFSRKATEEMRRTKDPCLLIAISEAESIKRRTDDEARLIQHLFSGDRMYGMIYSIPGFGSISAAYLTSLIVDISRFRNSSSFSAYFGIVPKVRNSADSSPRCPTTHRGDEDARRLLCQSAMVHIRTVEDSVVTRMYHRLTGNGKAHKEALVACARKLTTVVWSVVRSGLPFTDDAGLLARADGAIEGVEEEMAEES

SEQ ID NO: 141699 - protein, 372 aa, unidentified
MNYNTVYVGMDVHKESFTLCAYTIDAEKGSHFQRTEADYKNVLKYLEFLRTVYGNDANFICGYEAGCLGYTLYHQLTEHDVNCVILAPTTMLEQRSKRRIKTDRRDAEIIGKCLAQHNYSPVHIPTATDEETKEFLRMRDDHKLALKKVKQQILAFCLRHNYRYDGNSHWTAAHIKWLKSLNPEALYKEILDEYLLTYTTLSDKVERLDKRIEELASKDEYRESVKKLCCFIGIKTHTALSVLVEVGDFQRFSSAQNFASYLGLVPGEDSSGDGQTRLGITKAGNRHVRMLLTEASQCYARGQIGFKSKELKSRQAGNSPQVIAYADKANERLRRRYYKMVLGKSKKHNVAKTAIARELACFMWGMMTEHIA

SEQ ID NO: 141700 - protein, 413 aa, unidentified
MSHMIAGIDVHKKMLAVVAVDAAAEELPFQRRKFGTGAGDLRVLAAWLAELGVQEAVMESTAQYWKPVWQALEGQCHLELAQAQSNRGPRGRKSDFKDAERLVRRYLADELILSFVPDPEQRLWRTQARAKARWTRDRARIQNRLEALLEEMRIKLSSVVSDLLGVSAKRMLRAIGDGEKDAEQLAAMADPALRASPAQLCDALQAVGTLDQRYRTVLKQFLDQIDLNERHIQELDRALAESLKDHSNSVERLAAVPGLGVDSAQQIIAEVGPKAEKFPTAADLCSWVGTCPGEEESAEESSSDRSPKGNRPMRRILNQAANAAVKAKGTVFEAHYRRIMGRDRKKHNLAIWAVANRLCRLVWTLLHKAVTYEERGQRPNTRAVKRRAARLLRELKALGYCVQLAAGPQPTPA

SEQ ID NO: 141701 - protein, 415 aa, unidentified
MALKIVYKICCGIDVHKTFVVACIASTDNKGITSYESHRFSTYTSGLKDLLQWLLTRNCKDVCMESTGKYWIPVYNILESDCSIVLAHPKYVKAIRGKKTDKKDAKWIADLFKHDLVAGSFMPPADIRQLRDLMRYRFKLTCFKSSEKNRLQNCLTISNIQLGNVVSDTFGKSAQAILDKLLENPADTSFDLEPLVFRSLKKKLPELRDAIDGYITPEQAGKLKIIKAHYENLESRKAELEKLILALAAPYQQELTILQTAPGISSEFTAIGIISEIGTNMEAFPSAKHLCSWAGLTPTNNESAGKKKSVRVSKAGCYIKPLLVQCANAVVTSKKHPEMRNRYLRLRKRRGHKKAIIAIARMLLTALYHMLKNGENYNAELYRKSDLPPVDREITVEQAIIIARNQGYKIKSATA

SEQ ID NO: 141702 - protein, 410 aa, unidentified
MDVVYPRCCGIDIHKKTAVACVIVSDTKGPPRKEARTFGTMTDELLALADWLMSEGVTHIAMESTGVYWKAPFNLLEGQFEVLLANAQHIKAVPGRKTDVKDAEWIADLLRHGLLKPSFVPDRPQRELRELTRYRTVLVRERAAEINRVQKTLEGANIKLGDVASDILGRSARQMLEGLVAGTAEPSTLAQFARGRMRQKIPQLERALAGRFAVHQRLLVAQQLAHIDYLDEAIDSLSAEVAERLAPFEATLERLDVIPGVGRRTAEILLSEIGTDMHRFPTAGHLASWAGMCPGHHESAGKQHNGKTRKGCQWLRAALIEAAAAAAKTKDTYLAAQYHRLVRRRGSDKATVAVGHSILVIVWHLLQHDCPYVDLGSTYFDERDRTATERRLVQRLEHLGYSVRLDRSAA

SEQ ID NO: 141703 - protein, 391 aa, unidentified
MDKAWAGVDAGKEFHRAHVLDASGKELLSRKVQNDEDDLLKLIDEALFLAEEVIWAVDQPGGGAALLLALLWERNQRVLYVPGLSVDRARDAYRGESKTDARDARVIADQARMRSDLGELRAGEQEIAELQLFLARRRDLVTDQSRTITRLREALVSLFPALERALDVNGKGPLILLTHYQSPTQLRRAGHKRIATYLRNRGVKGSNNVAHKALGAARSQNVTLPAQEVGAAIVAELAEDVLGLKDRLQSIDEEIGQRFFTRREARVLISLPGMGPILGAEFLVAVGEISAFESADRLAAYAGLVPASRDSGKRVGNNRRMRGGNKVLKRVFYQSAFASLRSAPESRVFYDRKRAEGKRHTQALIALARRRVNVLWAMLRDGTTFETRSAT

SEQ ID NO: 141704 - protein, 343 aa, unidentified
MFFAGIDLHKQSITVCVVNEARKIEKRKRLMCANEAAIVAFFKEVIKELGTFRAVVEATASYEWLIKLIEPLADKVILAHPGKLRVIAESTRKSDRLDAQILAEFLSMDMVPASYRPTPRQRDHRGLVRQRSSIQRRITSVKNRMRRIMSNYNADRPDLFRKAGQEYVSSYPLSAADRICMNQLTSEWLFFLQQLKSANQALVDFAGTAPIREQHQRELLQSIPGVGFVITEVVLSEIADIDRFDSQKQVVAYAGLAPGQRESAGKMKELHIEKAGSRYLRWALVEAAWQLVYRVSRWRTIYERLKKRLKAKKAIVAIARRLLGMMVAIMKSGEPFTATHQPA

SEQ ID NO: 141705 - protein, 363 aa, unidentified
MSTITIGVDLAKSLFSVCEMDAAGHVLGRRDLGREAFALWLAQRPAGTVVAMEACSGAHHWGRRCLEYGLQPRLMAAQFVTPFRKSRTSKNDRNDAEAIATAARQGNMRFVPVKDVDQQARLAWHRVREGYKTESLAIGNRLRGLLAEFGIVVAKSDVALHRVLAALDQHAALPGEFKALLRDLSAHGAQLRAAVDACSARIDAHARQDARCVRIGAIVGVGPITVDAMVASVGNAREFRNGRQLAAWLGVVPTQHSSGGHTRLGTISCRGDAYLRTLLIQGARSSLQRAKAVSVGKSTPEQIWIRQLDGRMPFGKVLVAIANKHARQLWAMLAHDLDYDPDAHVKHPMARRLADQHTLTATA

SEQ ID NO: 141706 - protein, 334 aa, unidentified
MENIALIGIDLGKNSFHVHCQDRHGKVVYRKKFTRPKLIEFLDTCLATTVAMEACGGSHFIARKLVELGHIPKLISPQFVCPFVKTNKNDFVDAEAICEAASRPSMRFVQPKTESQQAMRALHRVRESFVQDKVKTTNQMHAFLLEFGISVPRGPTIISRLSTILEDNNLPLYLSQLLQRLQKHYHYLLEQIKDLEAQLKQKLNEDEVGQRLLAIPCVGTLMASTISTELGDGKHYASSRDFAAATGLVPRQYSTGGRTTLLGISKRGNKKIRTLLVQCARVFIQKLEHQKGKLADWVRELLCRKCNFVVTCALANKLARVAWAFTTRQQTFAS

SEQ ID NO: 141707 - protein, 345 aa, unidentified
MDYFAGIDGSLETANICIVDQDGTVLREEKVESTPEALIDALRRFRKPLKRIGLEAGPLSTWLYRELRQAGLTTILVETRHMKSALSAMRQKTDRNDARGIAQMMRMGWFRAVHAKSTDSQELRVLLTHRKTMIGKLIAIDNEIRGTLKAFGFKVGHTTRLTFERRVLELVQGMPRLDSMTRPMLRVRAVLLTEIATLHRMVLKEVRHDPVCRRLMTIPGVGPLVALTYKTGVDMPERFARSSDVGVHFGLTPRRYASGATDVSGSISKCGDGMVRTALYEAASVMIHHGRRGSALKAWAMKLAKRAGLKRAKVALARKLAVVMHRMWLDGTDFRWTSEQQAVRA

SEQ ID NO: 141708 - protein, 341 aa, unidentified
MTLQLIGIDLAKNVFHLHGVDGNGREVFRKRVYREELLESLTGLTPCKVVMEACGGANHWARSIEGLGHRPQLIAPQYVKPFVQRNKTDWKDAEAICVAARQPHMRFVPRKSVEQQDVQNLHRVRQRLVAARTALVNEVRGLLNEYGITIPRGRRVFAKLLPEILLVHGERLSSLTKETFYDLLDEYRALDERIDQLERKMKTLCVTHPICRRLTAIPGVGYITASAIVAAVGDISVFKNGREFAAWLGLTPREHSTGGKQRLHGISKRGDVYIRTLLIHGARIALRYAHRHNDRQSRWALDLMQRKGTNRTVVAMANKNARVIWALIAKDEEYKSFPLAA

SEQ ID NO: 141709 - protein, 409 aa, unidentified
MQVVHEVCCGLDVHKKSVTACVLWASGRRRQTREFGTFTRELLELADWLRACGVTHVALESTGVYWKPVWNLLEGQFEVLLVNAQHIKAVPGRKTDQKDSEWIANLLQHGLLRASFVPPTPIRELRDLTRYRASLAQEINRIANRIQKVLEDANIKLGSVATDTLGASGRAMLEAIVSGEQDSQRLAEMSRGLLRNKIPQLQQALEGRVTEHHRFLLRELLDHLYFVESKMRRIEQEVEERLGPFQHEVVRLCTIPGVDRVTAWGLLAEIGLNMRQFPDAQHLASWAGLCPGSHESAGKRKSGKIRKGSLWLRRCLCQAAWAVSTKRNNYLSALYRRLAARRGSKRATIAVAHNLLVIAYYLLRDQTCYQDLGPDYFDRLNPEGLRRRLTKRLENLGFKVILEPSAHAV

SEQ ID NO: 141710 - protein, 408 aa, unidentified
MGRAAEVVAPSSSIRIDGGCPVAQVNDLSRSLTAFDLISTLVVVVEMSKASWLVSGAVPGVERQPLKKLEPDATALLRLIERWRNEALRAGRPISRIALAYEAGRDGFWLARWLIARGIEAHVIHSASVAVSRERKRAKTDRLDAAMLMRVFLGWLRGERGHCGMVAIPTMEEEDARRPSRERESLINERSRITNRMKSALARLGVRGFKPHLRKAPERLAGLRTAEGTGLPANIIEEFRRDMARLALVREQINSIEKTRAERLKRAPDTGPHAMVRLLARVIGIGIETADMLVREILSRKLRDRRAVARYAGLTGSPDESGLKRREKGLPKAGNARVRRGLIQLAWRFLTFQKDSALARWYRTRTEGPSGARKTTMIVALARKLLIALWRLVTTGEVPDGVELRPAG

SEQ ID NO: 141711 - protein, 360 aa, unidentified
MAEPSKRSDVVTIGLDLGDRWSHDCVLDAAGQVVETTRMATGAESMTRRYARLPKAVIAIEVGTHSPWVSRLLKKLGHEVLVANARKLRLISENTRKGDKVDAELLARVARLDPKLLTCIEHRNEQTATDMAVVRARDVLVRGRVQLINHVRGAVKSAGARVRSCSPEAFCRRARVQIPPTLISTLAPVLSALEVLTEQIREMDARIEQLADTAYPDTKVLRSIKGIGALTALAYVLTLQEPERFPQSRAVGPYLGLVPSRSQSGRSDPQRRITKQGDPYLRRLLVQGANFILGPFGQDSDLRRFGLAIAARGGKNARKRAVVAVARKLAVLMHHLWKTAQIYEPLHNSARQEAARNSAA

SEQ ID NO: 141712 - protein, 368 aa, unidentified
MQFIGVDLHTNKFTCCYRDEKSVPDGKKATVTFELSPYGIAQFYSTLTEETYVLIEATITTFCFARLIQPMVKQVIVANTYELKQISLARKNTDKIDADILCRILKMQVLSGEQTVSPVVIPPEEIQELRGLFTTYRLYRKQTTQIKNRIHSLLKERLYGFTQEEIFTQRQRKTIRELEKGSVMSFQINQLFNGLESTESQIESLQDKIMEHAEPFMKEIKILTSMKGISVFIAIAIIADIINIERFRNSKAFTSYLRSAPKVANSNTSVNIGRTNKKGRKLSSTLITQSLNHVLAASEKLDNWYSRLTEYKKAGLVRNALRRRVFAEIYQMLKKGEYHYGRDVEKHEAKMHRYKNFLEKRKNLVKTA

SEQ ID NO: 141713 - protein, 336 aa, unidentified
MNIIGCDFHTRFQQIAMLDAETGERAERRLEHETGEARAFYAGLPGPSRVGMEATGYSRWFERMLGEQGHELWVGDAAAIRAAMVRKQKTDSRDALHILNLLLTDRFPRIWIPSPQEQDVRQLLRHRYKLVCFRTSVRNQLHAQAMGEGSCRKRKLWTAKGRRELESLVLGSWASRRRQELLELLDRLDSSIGELDQAVIEEARSRPLAVRLMEHPGVGPVTALAFVLTIGPVGRFRRSKQVVSYVGLNSKESSSGGKQRLGSISKQGNSMLRFLLVEAAQTAARFDPELQRDYQRLKFRRGPGVAKVAIARKLVVRLYWKLRATEQSSAAGSHAG

SEQ ID NO: 141714 - protein, 362 aa, unidentified
MKEFNAKAAPIKTESAMDLGRKKPDAGSYPAYIGLDVHKETIAISVARAGRDEPEFRAEIANKPKKVIKLVDQLNQEFDGEILLFCYEAGPCGYGLYRQLLGLGHDCHVVAPSLIPKKPGEQIKTDRRDANKLAKHLRGGDLTAVWVPDEEQEAMRDLTRARGDMKQQETKARQQLNGYVLRHGHAWPSNKTRWTQTHYNWLESLRFAHDWQQIVLQEYIDAVKAASQRVVDITAQMERVLPTWSLAPIVNSLVALRGIDKLSAMVLLAELGDISRFDSPRQLMAYLGLVPSEHSSGGRRRQGGITKTGNSHARRMLVESAWSYRFQARQTAHLKRKRQVLLMRPRRLPGKPRSDCVGVIAR

SEQ ID NO: 141715 - protein, 343 aa, unidentified
MKDTIYDHYIAIDWSIKNMAIARMTKKSNKITAIDVPSDIEDLQAYLTNLRGTKIVALEETTTSQWLYAELKEYVDRIFICDPNRNKLLNEGPKTDTIDASKLVQLLKAGLMKEVYHSTDKFLYLRRVVSGYEDLVKSGVRLKNQRYALLRACGKRGKEKAGSAIDSQGEQFVLDCLDRQIEAYEKEKQCYENEFERLARKNPEIKHQKSLPGIGTINAVKIVARVVTPYRFSDKGRYLSYTGLIKLEKTSGGRSYGKRSPRYSRQLKSVYKSGVLAAIAGNNPINDYYDYLIQENGYPEHNARQKACRRLAILSLGVFKSGKKYQPFRRNHVKNNKEVTSGL

SEQ ID NO: 141716 - protein, 367 aa, unidentified
MQQKTQVTASGGLFPNNMVIGLDLGDRWSRYCMLDNGGAVLEENRVRSTEQALEERFGTLSATRIVIETGTHSPWVSRLLQGLGHEIIVANPKQVKLITESTRKDDRLDAQTLARLARIDPQLLRPIQHRSDKAQAALMNIRVRAALMSARTSLVNTARGLAKSMGERLPKCDADQMGVRQAVSLPPRLQQVLEPLLKEVESLTEKIQDSDRKIEQIARKDYPETALLQQVGGVGPLIALTFVLTVEDKGRFQKSRDIGCYVGLRPRRSDSGQSQPQLRITKEGDPYLRTMLVQGAHYIISRRGPDTDLKRWGLHLAKHGGKRGKKRAVVAVARKLGILLHRLWVTGEVYEPLRNHNLRQERNKIAA

SEQ ID NO: 141717 - protein, 339 aa, unidentified
MMIIGCDYHPSFQQVAFVDTRSGECGERKLTHQMEAESFYRNLQGQEVRIGMEATGHARWFERLLAELQFELWIGDPGEIRTKRVRKQKTDRQDAELLLQLLVENRFPRIWVPSPENRDLRQLLWHRHRLVQMRTRVKNQLQAIALNQGMRRGKGLWSKAGRAQLEALELAPWSGRRRQDLLELLDRLHPRIEELSAAIQQAAEQKPEAQRLMTHPGVGPITALAFVLILGVPDRFRCGKQVGSYLGLIPCEQSSGGRQRLGHISKQGNTLLRFLLIESAHAVVRYEPDWRRRFLHLALRRGRSIAKVAMARKLAVRLYWMWRKGRDYQQISKFGSHVE

SEQ ID NO: 141718 - protein, 361 aa, unidentified
MQSTTIIAFDQHAATTVAAVLLPSQRTPALQSMASDTATIVRFVERLHRQSAVRCCYEAGPCGFDLQRALTAHEVPCDVIAPALIPRRAGDRVKTDRRDAAQLAILYRAGALTRIHIPTDQEEAARDLLRCREDIRADLLRARHRLSKFLLRHGRRFTGTKKAWSKAHDAWLRAQRWPRPALDQTHAAYLRTVDEAVARLRTVEDDLRGLLTLEPLRPRVERLRCFRGIDDLTALTIAAELGDPRRFASAPRTMAFVGLVPSEHSSGTRHARGAITKTGNAHLRRVLVEAAWHYRHRPFVGAALRRRQRGAPPHVVAQAWSAQLRLHRRYHRLRARGKPNQHVITAVARELTGFVWAALVP

SEQ ID NO: 141719 - protein, 407 aa, unidentified
MEVLYPRCAGVDVHAETVVAVVRIAEGSRVTREAQRYGTTTRELLRLEEWLKGFGVTHVGMEATGVYWKPVWHVLEEHFALVLGNAREIRNVPGRKTDMNDATWLADLVAHGLIRSSFVPPRPIQELRDLTRTRKQMTRERGQHVQRLQKVLEDANVKLTNVLSDLTGASGRAILEAIVRGQSDPEKLASLASPRVKASKAELRDALHGRVSEHHRFMLQLHLRQVDAIDGAIELLEGQIERALAPFRDQAERVKNMPGMSDVMAATVIAEIGVDMQAFPSARHLLSWAGLSPQQNESAGKRKSSRTKRQRWLKTAMVQAAWAASRKSNCYYHAQFLRLRARRGAKKAVVAVAASMLTAVYHMLSEDVAYSELGQDYFHRLDRGKAANRLVRKLRAMGYEVDLRQAA

SEQ ID NO: 141720 - protein, 364 aa, unidentified
MKKSSKKQQGGTVVESKPAQVVGLDLGDRHSHYCMLSSTGEAMEEGRIQTTAASMEKHFGSEPRMRVALEAGTHSPWVSRLLKSYGHQVIVANPRKIPTLTKSESKNDRNDAEQLARMAAFEPKLLHPIEHRSLERQQDLNLIHTRSVLVRARTMLINSARGLVKSAGQRLPACSSEAFPEKVPAAVPPALKAACTPLLEQITQINKTIAAMDKQIDKLDKKYPEITVLRTVPGVGPVVAACYVLTLNSPQAMETNRQAGAYLGLRPRQQKSGDCDPQCSITRTGNTYLRSLLVQSAQYILGRFGPDSELRRWGLKLAASGGKRGKKRALVAVARKLAVVLLSMWRNRKNFVPFPQPAAQLVTA

SEQ ID NO: 141721 - protein, 350 aa, unidentified
MLIIGCDFHTRYQQIAMMNTETGELVERRLEHENGEARAFYASLPKPVLVGMEATGYAQWFERMLAELGHELWIGHASEIRAGVVRKQKTDARDALHLLHLLLEKRFPRIWIPTPAERDARQLLRHRHKLVCFRVSVKNQLHALAMSQGVCRKKKLFTAQGREELEKLSLGPWARRRCQELLGMLDQMNVVIEELDRAVQQQAESHAQAARLMTHPGVGPVTALAFVLTLGPVARFRRSKQVVSYLGLNPQEHSSGGQQHTYSISKQGNTMMRWLLVEAGQTAARLDPELHRLYQRLKFRRGANVAKVAIARKLAVKLYWMLRATSGGAQTAPMQGSSGGTLVPQVGSTF

SEQ ID NO: 141722 - protein, 348 aa, unidentified
MAHFVGLDVSVGETSVCVIDDVGKVLCERKVRTEPEDIAMLLTSVGGDYVRIGIEAGPLSQWLVNGLTEADLPVVCVETRHMKALLKAQQINKSDRNDARGIAQMMRVGLFKPVHVKTLVAQEQRMLLTSRKLVQRKLLDIECDMRGTLRNFGLKVGVVSSIGYEARIRNLLEGFPRLAAIMEPLLTVRRVMRQQLATLHKLLLNAVRVDPVCRRFMTVPGVGPIVALTYRASVDQPHRFIHSRAVGAHVGLTPKRHQSGEIDYDGGVSKCGDSMLRAMLYEAAQSMLTHSKKWSWLKAWGMRVAQRRGMRRATVAVARRLAVILHRMWVDGTDFRWSNGSTAAVQVA

SEQ ID NO: 141723 - protein, 329 aa, unidentified
MKRNWFIGIDISKKTLDVVIYDQEKKRARKHFKVNNELKGFKEIIKTLKAEGVILDNAFICLEYCGIYGLELGFFLEGKISFCFCAPLHIKRSLGLTRGKNDKLDAYKIAWFSYLFRDELSPSTMPTKTMLKLKSLMGERYRVVKAATIEKQVLRELSSQLDNKAIIRVKHRLKILTADVKAIENEIKELIMSSPELKKSYKLLQSITGIALVNATMMILCTNNFEGITNARSFACYCGVAPFEYSSGTSIRGKTRVSNLANKRMKADLTNAARSAIVHDPEMRIYYKRKRAEGKEHGTVINAVKFKIITRAFAVIKRGTPFVKLRQAG

SEQ ID NO: 141724 - protein, 421 aa, unidentified
MTQSYGNTGEKVLVAIDIAKQRNAVLIQFPDESRQKFIVANKLSDYQEFSAYLKSLRFPCVIGLEATGNYHRPLAYYLQQEGFDLKLVSSVAAARTREAIYNSWDKNDPKDAQVILHMLKTELTQTYYDPLIQRINDIQEISKTYYQVSLRKMRVQHSIMTHFLPLYFPEAQKYFHTSRAEWYSSLLLRFPNPSSVVKYSQKTFCKVAKDLVGRKENKSTWLIDFYETAASSIGLPVAEDSEAMHMFRIVLQEHQDLCLLRQSIEERANLYLKDNADFNRLRTIPGIGPVIALTILAEAGDLRRFSHYKKFLKYCGLNLSTQQSGNFRGISKLSKHGNARLRCVFWMAGTVAIRMRENTFRKKYENYIKADPGNPDLKRKAYTAVAAKMARVAYGLIKSGRDYRCYYESSVPSGKIPSAGR

SEQ ID NO: 141725 - protein, 475 aa, unidentified
MNVKGTKKKNQVVTANIFEQQELLKKAEVIKKNLTASTWRELETNGKFDKNEKLSFISDDMLILGCDVGSETHYLRAIDTRGRELSKSAFPFSNDSEGFQSAKEWAVRIAADHDKKQIVLGLEPTGHYWFCLATWMISNGISVVQVNPYAVKQTKEVEDNSQLKDDTKDPKLIANLVKDGNFGMPYLPEKLYAELRRLSMFRDQLNEDRIRAINRMHREMKIYFPEYKDAFGKVDGAFSLELLKSAPFPDDLKALDENGIRQIWHEAKLRGRGYSRSGEILGYARSSVGIRDGADAAKIAVQWFVKKIMELDEELAVIENLINQKCQEIPHAGNILEISGIGENTLSGILAEMGDISRFDDVKEIQKLSGLGLAACSSGKHKGETKISHRGRKRLRYWLFQAAKSAVAHAEEVKELHVYYTTRPDNPLKKMQSLIVIACKLLRIVYTILKKGTVYDPKKMLMDIRRPEKKEAIAA

SEQ ID NO: 141726 - protein, 319 aa, unidentified
MAQSDLIVVGIDVAKDKVDLCIRALALRQTCPNTAQGRRKLVAWLRRHQVGKAVMEASGGYEREWRKVLHDAGIEVRIVDPKRVRHFAQSAGRLAKNDTIDAEMIAWFAETFGETPSQTHDAAQEELAALVKARLALVELKIRLQSQSTHAAPGPVQKAQARVLKSLAAEIEKLELAIAAKVKATPHLAERAEIIASVPGFAKTTSANLVAGMPELGQVSNEIAAALMGLAPYDDDSGKRRGARQIAGGRRKVRNLFYMACVGAATRHNPVLKAFYGRLVAGGKEKKVALVACMRKLIVILNIMIARREKWNPGRYASA

SEQ ID NO: 141727 - protein, 400 aa, unidentified
MSGLRGNVDCFVGIDVSKDKFDACGITGEGTKLFQISAAMDRKGFEKLKRHFADISVSSVLIGMESTASYHVNLFSYLIAEGYKVILINPLLISNYVKMELRKTKTDKKDAFVIARFLLANGDALIQRATPSLISDLRDLSRQREGLVDEMTSLKIEIKQLLNITFPELEHMAGIFTKSILKLLQQYPSAFALRDADIGQLAQTLITDSYGHKREEFAQTLIKAARFSVGTNSPAKGMIIKQKISLLLHLKVALQEITDMLMEMARKLMEEDINIITSIKGIGEKTAANFLVEMGGDINPFERSGKIIAMAGLDPAVYQSGQHEGRGKITKRGNRHLRRIIWLMTTSVIQYTDIFKAYYLKRRKEGLPYKRAVLATAHKLVRVIYAMLTQRTTFCPQLNS

SEQ ID NO: 141728 - protein, 311 aa, unidentified
MGIDVSKATLDVAILPTEEHFVVANDEGGIDGLLDKLAERVAGVLVVLEASGGFERPAVAALAASGVALFVVNPRQARDFAKATGKLAKTDRIDAFVLARFAEAIRPTPRAIPDQEAREFQEILARRRQIVRMTTAEKNRLGASSAGAVRGRIKAHVKWLEKELSRTDRDLDETIEGSPTLKENEALLRSVPGVGPVLCRTLLAELPELGSLSPRELSALVGVAPLNRDSGTLRGRRTVWGGRARVREALYMGALIASRFNPAIKEFYERLVAAGKPKKVALVACMRKLLTILNAMMREGTPWRCPHALNS

SEQ ID NO: 141729 - protein, 370 aa, unidentified
MGNRSMFVGLDVHKETIDVSIADGERHGEVRHYGVIASDLEPLDKVVRALRAPGRTLHFVYEAGPCGFGIYRHLTGRGEQCLVVSPSMIPKRSGDRVKTDRRDSQMLARLHRAGELRAIYVPDDTDEAMRDLVRAREDAVVVGTQAKYRLKAFLLRQGRRYAGRAGWTLPYRRWLADLSFPSAAQHIALQEYRDAIAETEQRIDRLTEQLRQLAPTWRWAPVVAALQALRGVSFLTAVALVAELGDLTRFRHPRELMAYLGLVPSEHSSGPSVRRGAITKAGNPHVRRLLAESAWAYQGMPRIGRQHADRQEALPKAVCDIAWKAQLRLTTRFRRLVARGKAKPKVATAIARELSGFVWAIAQEVPPTPR

SEQ ID NO: 141730 - protein, 433 aa, unidentified
MQDAEDEPLFAERVAGLDIAKAGVDVAIRVPGDSNPGRRQQETRAFGTTRRELLALADWLRCWGVTKVGMEATGDYWKPVFFLLESQGLSCDLYNAAQVKALPGRPKTDRADSIWLARITERGMISSSFVPPEPVRRLRTHTRYRRHLTQARTSEKQRVEKLLEDGHLKLSSVISNIHGVSGRDMLNALAAGQRDPHALAQLARGTMRGKIRQLEEALDCSFFTDEHAAVLAMMLVTIDHYTAQIDQLTAKIEALTEPYLHQIGQLDEIDGIGLICAQDIIAEIGTDMTVFPTASHLVSWAKWSPQVKQSAGKRKGSNATGRGNPYLGAALGEAASSAGRTQSFLGARYRRLTRRMPKKKALVATGNSMLTIIHALLADPEARYQDLGTDYYERRMNARRQARSHIQSLERLGYKVTIQALNPDTGEPLAAAS

SEQ ID NO: 141731 - protein, 356 aa, unidentified
MDKVIREGAVRVGVDLAKRVIQVHAVDRADRVLTRRALARDKFIEWCVRLPAGCIVAMEASSSAHHWARKLTVLGLDARIISAQLVEPYRMEGASGKNDANDAAAICEAASRPKMRYIPVKSVEQQSMLCVHRLREGLKEDRTACINRIRGLLAEFGLVFPKGPRELQAVLSNVLEDAGNELGTLARLTLQRAQAQWRELDEHLAWCDERIDAHGRQNPDVQRAATLTGIGPVTASAAIATVGDFKQFKNGAQFGAWIGLTPRQRSSGGKNNLGGITKRGDTYLRTLLVQGAKSALMTAHKRQDKISSWVVALRERSGWQKAVVALANKNARILWAVMTRGDAFDPNHLSLKPTGT

SEQ ID NO: 141732 - protein, 430 aa, unidentified
MKSNTQNAKIEAITEKTLVLGIDVGSETHYARAFDYRGIEYSKKPFKFSNTEVGFATFKEWILDLKERHEKDKVVPGMEPTGHYWFNLGKFLQDNEMKPVLVNPHHVKKSKELDDNNPTKNDRKDPKVIAGLVREGRYMIPYLPDGVYADLRTASNIRFQLQAELTRIQNRISRWFNIYFPEYKTVYGKPDAKSGMLILKAAPLPEDILTLGIDGVNQIWRDAKLRAVGKARAKTLIEAAEHSVGSKEGAVSARMEIRMLLEDYESRNTRLQEVMVLIEELVRKIPMAEKLLEIKGVGIRTVSGFLAEVGDISRFNNPKELQKLAGLALVENSSGKHKGETTISRRGRKRLRYLLFEVAMSLVAKNPEFRELHNYYTTRRLNPLKKMQSLMAIAAKLIRVFYAMLTKGVDYDPKKMVSDIKRPAVYLQAA

SEQ ID NO: 141733 - protein, 370 aa, unidentified
MRKDTLYVGLDTDKKHIDIGLAEPLPKGEVRYWGKIANETAAFERVRKRLQKDGRELVVCYEAGPCGYGLYRWLNGKPGVTCQVVAPALTPRRPGVRVKTNRRDCLTLAKLLRAEELTAVWVPDPAHEAMRDLVRARGAAKEDLNRCRQRLGGFLLRQDIRYAGKPWTKKHRAWLGRLAFTEPAHRLLVGELLEALDQATARRDRLSDHLAELVPNWSLAWLVEALQGLRGYQLINAVTVVAEIGDPRRFDNPRRLMGYLGMAISEYSTGERVRRGGITKTGNKRARTALIEAAWTYARPAKRPKASAARQPAAVRAIADKARHRLSARYRKLIARGKLPAVAVTAIARESLGFIWAIAHAAAPDAPRQR

SEQ ID NO: 141734 - protein, 406 aa, unidentified
MSIAAHRSEAPSAVRVDLNAIFVSLELSQSKWLITSLSPGSGEKLSKFTVGGGDVTAMFGRFAELQRKTEARTGNHYPLIVIQEAGLDGFWIHRVLEAADVESHIVDPASVAVPRRKRRVKTDRIDGEMLVRTLLAYKRGEQRVCAMVRAPTPEEEDCRRVSRERKSLTNERTRHINRIKGLLFGQGVQGYEPIRRDRRKRLDELATGDGRPLQAHLKAQISRELDRLELVMEQIKACEQERDALLAAARARVTATTEADNPAQGKPPTPIPSIPAMLLELNGIGAQTASVLWLEGLSRPFDNRRQVAAYAGLAPSHWQSGKVDHDQGVSKAGNPRLRTALIQLAWLWLRHQPNSALTIWFNTRVAQNGGRMKKTAIVALARKLLVALWKYVNAGVVIEGAIVRPA

SEQ ID NO: 141735 - protein, 365 aa, unidentified
MKSLFYVGMDVHKDSVRIAVLKGTEKQTVYEATVKNDISKIVKIVGGYKTKGTVVAGYEAGCMGYTLQRSLAAVKVDCRVIPPNKVPRLGSDRIKTDARDAVLIARMLKNNEGESIYIPTADDEAARDLLRCREDIRAELHRTKQQLQKQLLRTGFIFDGEKQLWTKAHRDWMAKLEFRHELQKETFTQYYCHIQELENRLERIDVKIIAVAEAEPYREPVARLRCFKGIDYITALAFVCEIGDFRRFASAASFMAYVGLVPSERSSGAKRRQGGITKTGNTHLRRLLVESSWHYRYRGAASAALQARRAGMDEQVIVYADKALHRLQSKFAHLLFKGKSSKTAVAATARELAGFVWGTMVGAYC

SEQ ID NO: 141736 - protein, 356 aa, unidentified
MAPIYIGVDFHARQQTICYLKTETGELVISELKHQNKEQVRAFYQQFQEPVIVGLEASGYSPWFEALLEQLGCEVWLGHATEIRRRARWRQKNDRRDAELIWDLMVHDEFPRLHQPALSSREVLRMLRYRQKLIKLRTMTKNSLQAIALQAGLAKGPQLFTAAGQEQFKAAEMSPVLQWQRDHWFELLKPFNQQLLETVVWFKAQSKDDVQIQRLLTHPGIGLLTALCILHTLQPVSRFRNARKVAAYGGFDPVERSSAERQHFLGISKAGSRMLRYLLVEAVQTAVRHDEDLKRFYKRLAERRGRPKAKVAAARKLLIRAYIMLRDEIDYAEFRRRAVAARLARHGQGPTKCPRY

SEQ ID NO: 141737 - protein, 401 aa, unidentified
MGIWVGVDWGCGAHAVCVIDAKGMVLDRFEVGHDRAGLAALVTRLQTHGAPSRIPVAIERPSGLLVDLLVEAGFVVTPIHPNVVKACRPRYRAVAAKSDPGDAFILADVLRTDGHRLRPLQPQSDAIKALRGLVRGRDDLVGARVALANQLTALLGSFWPGAAVIFADVASPIALAFLERYPSPEAAARLGPKRLAGFLAQHQYCGRRAPEALLARLRSAPEGCAGDAEGEAKGDLVRALARTLQALVAEIAKLTSRIEHAVAALPDGRIVMSFPRAGKICAAQILAELGDVRARFPSEHQLAAEAGVAPVTYQSGKARGVGWRWACNKRLRAALTCLADNSRHHSPWAADVYRRARARGCDHPHAIRILARAWARVLWRAWTDRQPYDPGQHRGAQALAA

SEQ ID NO: 141738 - protein, 361 aa, unidentified
MSMKGMTLVGLDVHAAQTHAAVLDTLTGEVKVRRLVCPPLEVVSFLEELGGGVHAVYEAGPTGFGLARAAVERGIALDIVAPGLIPKGPTDRVKTDRRDAVRLARLLAAGELRFAFVPSVADEQFRDLVRSIEDVRGDLMRARHRLSKFLLRRGERYNGHAWTLEHLRWLRALQFDDTCSKASFADYLAAVELLLGRRASLLAALEQAVPGSSHAPVIARLRCFRGIDTLSAAGLAAEIGDFGRFPKPTLLTGFLGIVPSERTSDQKRRQGAITKAGPTHARRLLVEAAHHYSRRPSIGAVLARRQHGADPRVIAVAWRAQQRLHSRWQHLREQRRKPAGVVAVACARELATFLWEAATLD

SEQ ID NO: 141739 - protein, 405 aa, unidentified
MQNIYERCCGIDVHKKLIVACFRNGKIAELRKFDTLTSSIKELGNWLLDNECQMVAMESTGAYWKPIYNILELLNLDVMVVNAHHMKNVPGRKTDVKDAEWIAELLQHGLLKASYIPDREQRELREIVRYRKNLVEERSREINRLEKTLEGANIKLSSFVSDLTGVSSRNILQLALTGEVNEENIENLMHPAMKATKEQLFHAMDGVLSPVQKKLVRAILDHIDDMTRRIQDLDEIIDDQIRDHENAIKNIDELPGIGKRSAEIIIAEIGTDMNRFPSAGHLASWSGLCPGNNESAGKRKSGRTTKGNKYLKSTLIQCAKSAIKNKDSFFHAQYQRLVVRRGANRATVAVAHSMLIAIYHVLKDGVPFKDLTSDYYTKFNTEAKARYYLRKLQDLGMSIPVSLAT

SEQ ID NO: 141740 - protein, 338 aa, unidentified
MSILYAGIDLAKNVFAVHGVNAAGAGELRQPKVSRAKLEGLIASLPPCVIGMEACSGAHHWARRFRAHGHTVRLMAPKFVAPYRMSGKQGKNDAADAMAICEAVQRPNMRFVPIKSEEQQSRLLVHRARQGFVEARTATINRIRGLLSEFGIVLPLKAEVVRREARNHLEDLPGYANTVIGDLLSEVAHLDERIGQYDVHIRTMARQCPLAQRLMQLTGVGETTSTALVAMVGNASDFDNGRQLAAWLGLVPAQYSSGGKTRLGRITKAGDAYIRSLLVLGARAVLNAATNKTDSLSRWALQLRERRGYWKAVIAIAAKNARMAWAVLTKGESFKLPT

SEQ ID NO: 141741 - protein, 413 aa, unidentified
MLKIVYPICCGMDIHKSFLVACIATTNSQGVTSYTSKRFSTFTGDLRRCAEWLSAHNCKDVCMESTGKYWIPIYNILEKTCNIVLAHPKYVKAIRGKKTDRKDAQWIADIFKHDLVSGSFIPPADIRQLRDMVRYRYKLTNFIVGEKNRAQNCLTVSNIKLDDVFSDVFGKAASAITSRLLDNPAEKITDVSGFRTRGMKSTDEEILAAVDGELCVEQAEKLRIIRSHMDSLELCKANLESLILSLAENFLPQLELVMTVPGIQSYAAIGIISEIGVDMSVFPSSKHLCSWAGLTPQNNESAGKKKTTRIGKAGAYIKPLLVQCALCAIRKKSNPEIRKRYENLKKRRGHKKAIIAIARMLLTAIYNILKKNEPYNPELYAHINTPPKQRTVSVEEAIFILQRQGYLVTPSVT

SEQ ID NO: 141742 - protein, 264 aa, unidentified
MANLKKSKSVVNVGVDVGKHYLDICIHEKQLYWQESNTQEGIKRLLKRLSHYQVDRLVMEATGRYEFELAQAAYSKGVPVCIAKPLSVRRYAGAVDQLAKTDKIDAGIIARFAAVIQPRVTPQKSKNLIAIRNLITRRRQLVNLRTQEMNRIKIMGKDLEVSCRRIIRYLDTEIKRIEKRLASHVEQQAEWTEKQTILKSAPGVGDALIYTLLADLPELGELNNREISALVGVAPINRDSGRLRGKRRIQVGVQPYEPFSTWRH

SEQ ID NO: 141743 - protein, 305 aa, unidentified
MNITTVGLDLAKNVFHVVCFDQHSNEVKKRMLRRNQIRLFFAQLAPCKVGMEACASSHYWGRELKALGHEVKLIPAQHVKPYLRGNKNDYNDARAIAEALSRPNMPGVAIKTIEQQDIQAIHRMRSQCIRDRTALCNSVRGLLGEYGIVLPKGITTLRKSIHGLEIQSRQDDACQRLQEVPGFGPISASAFYSTVGNGQAYSRGRDVAASIGLVPRQHSSGGKDVLLGISKRGDRYLRALIIHGARAVVIHASKKTDRLSLWINRIVAERGLNKAVVATANKIARIGWAILRYNNHYQAAQQANG

SEQ ID NO: 141744 - protein, 313 aa, unidentified
MVQSIGIDVSKGKLDLGLIHSDDATENLQFGNDHQGIPSLVKTLQSYQEIEDKPIVIEATGGYHYGITFFLIEKGFKQVFVINPIITKKHLSAQIRKIKTDKKDSLLLAKIGLLEDLHTYAESKEEVLFKRNIRLFHFLKKQLQQVSNRLSSAKSLSIENDFEQEMLLETKKNFETQLKKVKQVIIKGITVEIPRIKGLSELHLKAITAELGNISRFKNHKQIVAYAGLDPSIRESGSSVRGKGKLSKRGSKTMRYFLFQSAWGVMMHNDKYKEYYAKKRNEGKHYYTCLSAVARKLLCEIYHNLKEHPYCIN

SEQ ID NO: 141745 - protein, 416 aa, unidentified
MKIVRPICCGMDVHKNIIVATIGITNKKTRITEYIQETFSTLNSDLLNLKQWLINHKCFDACMESTGKYWIPIFNILEDEINIYLTHPKYVKAIKGKKTDKKDSKWICDLFKHDLIKFSFIPPKEIRALREISRYRYKLVGMRSSERNRYQNCMTVSNIGIGSVFSDPFGKSAQAIMKEVLESDIIEDEKILKCIHRSCKNKDKILDSIKHCNIETDQRFKMNESMTHMEELKVHIDNCEIEMMKRAAPMFDQFMHITQLPGISTLSAILIISEIGVDMKQFESDKQLTCWAGLAPANNESANKKKSVRISKAGQYLKPLLVQCALGAIKDKEGYFGIKYSRIKKRRGHKKAIIAIARMMLVSIYHMILTGEKFNPSDYESFKNPKPPIKQQDLTEESAIEFLKKSGFDVSKLTKP

SEQ ID NO: 141746 - protein, 408 aa, unidentified
MNIIGIDVSQGESHATLITEEAEKVAFKFKHNKSGFQILNSYIRSNTIIIFETTGVYSAQLTAYLKSKKVKFYELNPLEAKLRMASLRRNKTDKNDSFKLALLGATQLTEIKNHCNKQSALPYDSLRILSLRYKQLIKCRTRILNFLRSSLELTFPELNQIFKKAYAVLALQAFRMYCHPDFLAGLTLKEMTNRVYQFVSRRIHKDVIQSYCAQVWLAAKDSYPAVPADSLEIEIISEYCDEIESYNKEIAYIQSKLIKTAVGLDDFKVISSIPRAGQLNSALLLGFTGDIARFDNYKQLNAFLGLDLNRYQSGKYGKGDTINRRGSSQGRAVETDMIRSMLRNQGKIQNHLVDYYYKLKKPPFNKHDKVALIACANHLNRTIINLVHTHQLYNYSKAFINKCLARNK

SEQ ID NO: 141747 - protein, 343 aa, unidentified
MDHFAGLDVSVKTTSVCIVDDTGKVIREVKVTSEPEVLLATLTNPAYRFKRIGLEAGPLSQWLFSALAEAGLPVICVETRHMQAVLKAQINKTDRNDARGMAQMMRVGLYRPVHVKTLRSQKLRMLLTHRQLLLSKAIALDNDLRGTLRNFGLKVGMVGKVKFEARIRELVENLPDLAVLVEPMLIVRRVLREQIVILHRRLLAIVRDDEVCQRLMTTPGVGPVVSLTYRATVDIPARFRKSKSVGAVFGLTCAKYQSGEVDWDGRISRCGDEMMRTMLYEAAQAMMRSKKWSWLKAWAMQIARRRGMKKAIVALARRLAVIMHRIWVDGTEFRWTREQAVAT

SEQ ID NO: 141748 - protein, 360 aa, unidentified
MQAQNSELSFKGQSIFVGIDVHLKSWTVTILTESLFHKTFTQPASHLVLHNYLTKHFPQATYYSVYEAGFCGFMPHYRLRELGIKNIVINPADVPTTQKEHLQKDDPTDSRKLARSLRSQELTSIYIPQLSSLGDRTLVRLRASLVSDMVRYKQRIKSLLYFYGISFPEEFKKPHTHWSSRYMKWLRESVELAHETDRQSLQILVQQAEQQRRLLLEVTKKIKALSSSQKYEKNIKLLRTVPGIGLITAITLLTEIEDIGRFPNTDHFAGYIGLVPTRHSSGENTRVGEMTFRGQKRLRKHLIESSWVAARLDPALLKCFNQYTMRMEKNKAIVKIARKVLNRIYFVLKNQMEYVPSVVK

SEQ ID NO: 141749 - protein, 412 aa, unidentified
MLAVGIDWATNSHTVVLMTKPGEVIARFTFENSLDGYLHLLDRIRHYAADRQVEEVVFAIESRNLRLVDFLLANSFTGYLVDPNRMVGYRQRYSSSGAKSDGGDSFILADVLLKDRDQLTLIKPECETVLRLKMLLADRAGFVDNQTALTNCLRACLREYYPAVLEMFADPTRQAALAFMAAYPSLERTKDLAAEQLRCFLKDHHAFTKQRLVAMLGILTKPAIPTPAVIVEVKQKTMLGLVEQLRGVQKIIAEFDAEIQVLTISNTESRRFDGLPSAGPIISGTLYVLFGEDRSRYHDASEVQSYVGVAPRTVQSGNYRAVGFRFGCHQGYRTIITRWAFSCLRRCPWAKRYYERKRKEGKGHYHALRCLANVLLKIAFTIWRDRTDYDENVYLAQVARHRMNNEPITGSA

SEQ ID NO: 141750 - protein, 408 aa, unidentified
MNLTAMYKRVIALDVHQAKISACAIIEHEDGRVEVIQRDFGAFKRDRRALAQWAQEVAPDVVVMESTGVYWKSPYAALECVGIRAWVVNARHVKAVPGRKTDVADAQWLATLARAGLLRASFVPPAQMRQLRLVARQRQKLVGMLSAEKNRLHKVLTDGGLRLGVVVSDVHGRSARAMTKSLIQGKPLHEVLDLKGRLRASREELFEALSTDEFSAVHRFVAEQIMDHIEDIERRIERLDQYLLAGLSPWQPQLNLLQTLPGVDIIGAAMLLVETGADMDAFGSAERLASWVGICPGNNESAGKRKSGRIRKGNAWVRRLLCEFAQAAARTTSALKAKFEALAIRKGRKKSVVAIAHKMLRTIYAMLSQGTHYQDRSVDYEAMNVARNAPRWIKMLRKHGFIAEHAPA

SEQ ID NO: 141751 - protein, 362 aa, unidentified
MEYFTGLDVSVDETAICVVGDDGKVAFETAVETDPAAIAEALRPYADRMRRVGHEAGSLSPWLHTELLAVGVPAVCLETRHVRAALSAQRNKTDANDALGIAHIMRTGWFRQAHVKTDACYRIRLLLVQRRNLKRKFLDLENAIRHSLKVFGIRLGKVGRGAMEKAVRESVAGDAMTAGLMDCMLRARAALWVEYLTLHKLVVQIAMRDELCRRFMAIPGVGPVTALSFSSAIDDPQRFRRSRNVAAYFGLTSKRWQSGTSIDVHGRISKAGDPDVRRALYEAASAMLTRFKGRDMIKTWGLKLAKTKCHAKARVAVARKLAIVMHAMWRDGTFYVGDPDASAQDIDASNAAKLQRLSLANS

SEQ ID NO: 141752 - protein, 466 aa, unidentified
MAKPARSSRARAPRVPRKTNPAPHVMNPDAGGIDIGATHVYAALPSDRCAEPVRVFETFTEDLHALAAWLQEHHVTTVAMESTGVYWIPVFQVLETAGIEVYLVNAHHAKNVPGRKSDVSDCQWLQYLHSVGLLRGSFRPPDEICAARTLLRHRTTLVAQAATHVQHMQKALVQMNVRLQHVLSDLSGTSGLAIIDALLAGERDPERLAKLRDPRVKASAETVAKALVGDWRTEHLFTLRQAREAYRHCQTQIRECDAEIEQRLAQLRSQVDPAQTPPPPPPPRPPRQHKGDIHLEAADLRTELYRVLGVDATEIPGLGSNSVAGLVFHLGTDLAAFPKVACFCNWQGLCPNPQISGGRVLKRGTRDVKNPVATIFRLAAQSLHHSDSFLGAYYRRMRAKLGAPKAITATAHKLARIYYHLVTTKQAYDESVFAKNEEREAKRRVERLKREASALGFTVSPQAIAA

SEQ ID NO: 141753 - protein, 297 aa, unidentified
MEQTIRHSVGLDVDKRSFKSCLKTKELNHRSKVKATKTFNNNPEGFKELHLWIKKNVKSPSQVSIVMEATGVYHEHLAWHLHKLGYLIHIVLPFRAHRYMQSLGIKSKNDKIDAHGLADMGMQQELEPWKPCSEDLLLLRSLTRQYEMFQKTKTVVTNQLEAAMHLAICDKMITKNLKSLIEKISKDIEKLKVRIEELILKDPVLHQKFTLVEPIKGLGIVSFAILVAETGGFELFENQKQLVSYAGYDVVENQSGLRIGKTKISKRGNGHLRRILFMPAFNIVRYKVAPFHQAYER

SEQ ID NO: 141754 - protein, 344 aa, unidentified
MITIGIDPHKASHTAVALDEAGRVLGELRVAATKAMLERLLRWAERWPERIWAVEGATGLGRLLAQQLVAREETVLDVPATLAARARLLAPGHGRKTDGIDAASVARVAQSQPDLRRVGPEDHSTVLRLLSDRRDELSGERRRAVNRLHRLLRDLRPGGAPTELSAARASELLSHIRPGAVVDLERKVMARALVADLRRIDRALVENRARCAVAVAASDTTLTDIVGISDVLAAKILGHVGDITRFGSADRFASYSGTAPIEVSSGEVTRHRLSRSGNRSLNNALHLAARVQTMHPGLGRDHYERKLAEHKSSREALRSLKRQLAKVVYRHLVADRAHRRDLAA

SEQ ID NO: 141755 - protein, 312 aa, unidentified
MTHVVCGVDVSSTGLDARIGRSGAFAHFANGPEGIEALAAFCRKHEVALAVLEATGGYEKQPFALLWSHGVPAAIVNPRAVRNFAQAMGWLEKTDRIDAGVIAWFAEAKGVEPMPPARDLQARLAALVTRLRQLTELKTAQSNQRRLVSEPIALASFDELLALVARQIRALETQIAELIEADPLWRALDKTFRSIKGVANRTVARLMAELPEIGLIQNKAAAKLTGLAPLACDSGNFAGRRAIRGGRAGVRATLFVVAEIVRRYDPDFAEFHRRLTLEGKPKKVVRVALAHKLLVRLNAKARDARAALNAPA

SEQ ID NO: 141756 - protein, 404 aa, unidentified
MATLGIDIGAYEHAVAVCRDGATEAERRVLRISADRGGFSELDRLMASAGPIERVAMESSGHYWFAIASHLAHRGVPVAVVSPVASKYFAKRRLRRAKSDPADARTLAALAMVDRPRTRAPLAGQELREAARFAMTLVQEQARVCQRILRLVDIGFPELRSAYEDPGCASAIALLRLAPTARAAAAKRTTTLARARTAGGRVVGPKKAQQIQAAAKTTVAPPELDVQVGFEMELLISQHDFLEQQIAIADARLAELADGEVARRLRTIPGVGAATAAALVAEIGDIFRFDDFDQLVAFAGVHAAERSSGKKGADPETSWRMAKTGDAYLRAALYRIALVGTVHNPVIREHYRRKRAAGKSKMNALGHCMKKALAIVWGVWRSDHDFVVPEGIPSGRRGMGPSLR

SEQ ID NO: 141757 - protein, 327 aa, unidentified
MTQKMDVVGIDVSKATLDAYALASRQARQFANDPAGHQALAAWLQELGVEVAVFEASGGYERAAAHSLRRAGLAAHVVDPKRVRHYAQAAGQLAKTDRIDARMIAAFGAAFLLAVPGGVAGADDPARRDLAELVGTRQVMVDHRTTLQQQADGVTSTIAKKLLRASLKQFDRRIETLDRHIAAAIARHAPFAALARRLNTVPGLGPVSIAALIAWLPELGQLGRRQVAALVGVAPFADDSGTRTGQRHIQGGRMKLRNLLYMATLAAATRHNPLLKARYRRLLENGKKPKVALIACLRTLLTILNAMVAHQQDWNPIQRPATEPAAA

SEQ ID NO: 141758 - protein, 284 aa, unidentified
MAQVRSWAGFDVHAAKVVAAALDGRSGELRFQRLSGATREVVGFCRSLPGPVKVAYEAGPTGFGLARELAAVGVECVVAAPGKIARAPQDRVKTDRRDAERLVRLLMAGELHAVRVPGTEEEALRDLVRAREDLRGDLMRARHRVGKLLLRHDVRFDGNNWTQAHRAWLAGVRLAEPAAQSVLEDGLGAIDALLVRRESLERQMTALVASSPWAGEVARLRCLRGIDTLTALGLCAEIGDFSRFGRPAQLMSYLGLVPSENTTGDKRRLGSITKSGSQHARRTW

SEQ ID NO: 141759 - protein, 366 aa, unidentified
MKKISTVRVNGNMIFKGHKLTIGVDLGDRWSCYCVLDEAGEILLEQKVATTPEAMKQIFEKIPRGLIAMETGTHSPWVSRLLKELGHAVLVAHAQKVQLITKSNRKDDRHDARTLARLARIDPELLGPVRHRSAKAQIHLTVIRARAELVSARTGLANAARGLAKSYGERLRKCGTQQVSRELAAELSVELREVLEPLLKEIESLNERIKEYDVRMEQIARESYPQVELLKQVKGVGTQIALTYVLTLDDPQRFPKSHEVGCFLGLRPGRRDSGESHPQMHISKEGDPYLRTMLVQGAHYILGPFGEDSDLRRWGLKLAARGGKSAKKRAVVAVARKLAVLLHRLWVSGEVYEPLRNSQKAMRAAA

SEQ ID NO: 141760 - protein, 408 aa, unidentified
MELRFSRCAGLDVHKDTVVACMRIEEGGQVCRTTRTFGTLTTDLFALQHWLMEHKISHVAMEATGVYWKPVWHILESDFELVLANPAHIKNVPGRKTDVKDAEWIAELLAHGLVEASFVPPTPIQELRVLTRDRRQFKREAVQHVQRIQKVLQDANIKVDSVISDVMGKSGRAFLDAIVAGETDPERLVRHADHRLKASRETLVESLRGAVTERHQTALRRHLKMYDTIQGLIDEIDKEVTALLLPFRRQLELLVTIPGVQIATAEVIIAEIGADMSRFPTAGHLVSWAGLCPRNEESAGKRRSTHIGKGGQWLKSTLIQSAWAATRKKDSHLCGLFLRLKGRRGPKKAVIAVAAEILRSIWYMLKRDEEYMPPRLIPDGVHRERQAKRLIRRLNDLGYEVEATPIAA

SEQ ID NO: 141761 - protein, 340 aa, unidentified
MKLYGAIDLHSTNNVTVVIDEQDRVVYQKRLPNDLALILKELSVYQSELEGIVVESTYNWYWLVDGLMEQWYKLHLANTAAIQQYEGLKYTDDHSDARWLAHLLRLGVLPEGYIYPRADRPVRDLLRKRSQLVRQRTTNLLSIQNLLTRNTGSSLSARRVKGLDVQQVDELLPNPDLALAVKANLSVMCSADEQVQLLEQSVTQRVKLRPQFSFLKTVPGIGEILALTIMLETGDIRRFASVGNFASYCRCVGSQKISNGKKKGKGNTKNGNKYLAWAFVEAAHFAIRYNSKIKSFDQKKKAKTKGVVAIKAVAHKLCRACHYIMRDRVPFNITKAFDQN

SEQ ID NO: 141762 - protein, 435 aa, unidentified
MNDNEIIRHQQFCQLKEMIRGSDQHLIIGIDVAKEKHHAFMGTATGKSLLRRLIFENNLEGFCKLLTHAEAVKVQHGLSESVFGVEPTGNYHKPLGSYLVNANHQVVLVSGQAVKNNRILLDGRWDKHDTKCAANVADLISQGKCLFYDSPPEAIVELRSLLSLRRRLKKEEHSLRMRIRNSLLAKHFPEMDRYFGQCLSENLSIVYWCLDPKKIAQMDFGRFFQLVTTRERGLAQQRRLKAIWQVAAASIGVVVDRSSQFEAQVLVEKILQVQKEIKDTQQLIETISQQFSEYHLLLTIPGFGPYVASLVFTAPLTVLAVIGDAWRFGSAKQVLKMAGFDLSAERSGKKSKEAVPVISKKGNAALRYGVYQAAFIASTRNIDFVEYYTNTLRGRERERGIKTKMRVKLAAKMLVMAWTLMKKKEEFNPDYLKNN

SEQ ID NO: 141763 - protein, 433 aa, unidentified
MLKLNYMSTLFVGIDVSSKTNAVYAMDFEENKYISSSFGNNQPGADQLVNMIAECMQKHKNLDTVLIVLESTSVYSVHISNFLSASEVLMPYRPYVFCVNPKAASNYRKSYIGMEKTDPTDAYLIADFGRVGRTKKLEPWRGGQFISLKRLTRHRMHLSECITREKTYMVSNLYLKFSELQLLEGDDKPFGSLYGATSSAVLTEFLSPQEIIDMPEEELLTFLAGKSRNRISDLSKTSELLRKAARDSYRLDKCMYEPLNVSLASSFNCIHAYQKEIKLIEQAIEKCINGMNPNALLILQSIPGIGPIWASGILSEIGDITVFHSSDALAKYAGLYWPKGDSGDFTSEDNKMSKAGNPYLRCYLGEAANSVRKHIPEYADFYARKYAEVTKHQHKRALALTSRKLVRLVFGLLVKNQLYTGEKLDTEYNIESN

SEQ ID NO: 141764 - protein, 320 aa, unidentified
MQTPIQVLNIGADVAKDEIVVACSEGSFPVRKLANQRTALRAFLKSLPPGSRIGMESTGIYHELFARLAYQLGFIVFVLNPKDVRHYAKGVGKRGKTDRVDAELIARMVAHEYADLHAWVPPTPEQREIDRLLKRRAKLSSLRQALGMSLKGMVGFSTDLKTLRQRFDQVIARIDQRIKELIEANPDRKEHVTHLRTITGFGPVVSAAMVNSLERMPLKNADAFVAFTGLDPRPDDSGQHQGKRRLSKRGPSELRRLLYVAALSAIKTKTWRPIYEHYRGKGLSSTAALVIVARRLARTAWSMYTYKTDFDPGRLMKSLT

SEQ ID NO: 141765 - protein, 344 aa, unidentified
MDHFGGLDVSVKETSICIVDDTGRIVKEVKVASEPAALLKVLGNPIYRFKRIGLEAGPLSQWLFSALAESELPVICVETRHMQAVLKAQINKTDRNDARGIAQMIRAGLYRPVHVKTLRSQKLRMMLTHRKLLQSKAIAIENDLRGTLRNFGLKVGMVGKVRFEARIQELVENTPDLAALVEPLLIVRRVLREQIVILHRRLLAIVREDEVCRRLMTTPGVGPVVALTYRATVDVPARFRKSKSVGAVFGLTSSRYQSGEIDWSGKISRCGDEMMRTMLYEAAQSMMHSKKWSWLKAWAMQIARRRGMKKAIVALARRLAVIMHRIWVDGTEFRWSREQAAAAA

SEQ ID NO: 141766 - protein, 317 aa, unidentified
MERMEFSRKTAGVDVGKHHLDVAVHGLEDLARVSNTAAGHEELTDWLKARGVGRVGLEATGGYERAARLALEAAGFEVVVHQPLEVRRFAQLKRRRAKSDRLDAQLIAAATAQVEAVRAAQDPRLAELAERMTAYEQITDQVVELKTFLEHVTLKDIGSALRTQVRALEALKLRLASQILTAIKAHPDLLARYRLLVSLPGVGPIVAANLLIRMPELGGMRRGQAASLIGVAPFDRDSGQWKGLRFISGGRARPRRMLYLAALVAKRFDPGLKAFGETLRARGKPPKIVTVAVMRKLIEAANLVLQRGQPWVKNMPA

SEQ ID NO: 141767 - protein, 345 aa, unidentified
MQKQHPPHALFWAGIDLAKATFQAALWGHDDFRAMRVHSFPRCEEGARALLAWLRETAGPGGHIGLVMEATATFAEELATWLLGLDPGLHVAIVNPIQTSAFLRSLGLRNKTDDLDAKALAQYGAERRPPSWEKPAPEMAILKDLARVRVDLVHARAAMAMRLKDHARASTRAVKAMAKVVQALDAQIKALELEIRRHLRTHERLAKQADRMDSVIGVGLLTAVTVMTELGDLRRFDRSRQLTAFAGMSPRHRESGTSVHGKPRLCKQGSARVRAALYLAASAAVRFNPDMKAIYDRLLAQGKARRVALGAVMRKLLVLMRALVKADHDWVPTAHSNPQECTVVP

SEQ ID NO: 141768 - protein, 371 aa, unidentified
MKKDTIFVGLDVHKNSISVALADAGRDGEIRYYGVIDGDLESVNKLVRKLQSTGATLRFVYEAGPCGYELYRSLTNKGFDCTVAAPSKIPRKSGDRIKNDRRDALSLARLHRSGELTPVYVPTPEDEAMRDLTRGREDAVKALRVARQHLLAFLLRYGYRYNGRTYWSKAFWNWIADIKMSHRAQQIMLQEYVHAVHEQSERVQRLTDQIRALVPQWRLAPMVKALQALRGVSLIVASTTLAELGDLTRFSKPKQLMAYLGQVPSEWSSGDSNHRGSITKTGNSHVRRALTEAAHAYSHPARESRVLLKRLEGLPKPVQQIAWKAQVRLCGRFRSLVARGKNRNKVVSATARELSAFMWAIAQEMQPKSEA

SEQ ID NO: 141769 - protein, 342 aa, unidentified
MKFYCGIDLSARDCHVCVIDEQLKIVIEQKLGNELTKICQLLEPYKANLKIVVESTFNWYWLIDGLQAEGFEVVLAHTLGLYLITGAKVKTDRRDAYSLAKLLLVGAVPTAYIYPVETRPVRDLLRRRLHLVQVRAGEYGSLRRLLLRQGILSRKQQEIKTATETELEQWFAHPLVRLHASQELQRIELYSHQIAELEQTILALTKTEHSYELLLKLPGVGQTIALTILYEVGELTRFANVKDFSSYCRVVPGIAQSGNVTRRGRASKQGNHYLKAAFSQAAVHAVRCYPKVRRYYERQLKRHQGRGRQMICYNIIAHKLAQAAFHVLKEQTEYREELLFGR

SEQ ID NO: 141770 - protein, 355 aa, unidentified
MTSAKYIGLDVHKESISIAVLNSAGKVVMECVIETKASTILQFIHGLGGDVHLTFEEGTWAGWLYDLLKPYVTELVVCNPRKNALLKEGSKSDRIDAHKLAELLYMSKLSSVYHGEHGLRMLKELSRSYLTITKDLGRVMNRLKALYRGWAIPCAGTQVYAPHYRSEWLAKIHEAGVRRRAELYYQQLDALRLVRQQARKELLAEARKHRATKLLRQIPGIGPLRAAHLVALMQTPHRFRTKRQLWTYSGLGLETHDSAQYRVVEGQLQRSKKPVTLRGLNDNHNHDLKDIFKGAAMRASTAAGPLHDFYEALLAKGRKPTMARLTLARKIAAITLIVWKKEVRFDANYLKQQAA

SEQ ID NO: 141771 - protein, 405 aa, unidentified
MSTQVFCGLDWATQTHAVCIIDTAGQVLERFEVSHDHDGLAALAHRLARYGANLRIAIERPSGLIVDALVEAAHQVFAIHPNAVKASRPRYRSHGAKSDASDAYLLADLLRTDGHRWSALSPQSDSIRALRALVRARDDLVATRIDLANQLHSTLDAFWPGGARIFAAVDSPIGLAFLKRYPSPASAAGLNESRLQRFCRAQHYSGRRSPAELLGRLQAAARGMAPALTAQAMADVVLSLVDVLTPLVEQIAALTHRIERFIESLPDGQIIMSFPRAGHICAAQILAELGDVRERFPSDDRLAAEAGVVPVTYQSGKTRCVSFRWACNHRLRKAITCMADNSRHTNLWARGLYAAARQRGCDHPHAIRILARAWLRVLWRAWTDRKTYDASLHLSALKATSSGGG

SEQ ID NO: 141772 - protein, 326 aa, unidentified
MTEPKLGIDISKKTFDVALIRDPETMKVKQRQFSNTPDGFQSLQTWLVKQGVKRVHAVMEATGAYGDALAECLHDAGHLVSIVNPAQIKAFGQSQLQRNKTDRADAALIARFGWSHNPTPWTPPEPEQRELQSLVRHLDDLIEQRTQVGNRLSDGRLTKTVRESWEEILQALNERIAEVKRQINRHFDDHPTLKRQRELLDSIPGIGPETAARLLAEMPQLGEFDSARAAAAHTGLTPKRHQSGISINAPARISKIGNSRVRYALYLPAMAALRSSKEFKDLAARLTERGKKKMQIIAAAMHKLVRIAHGVLKNQRAYDPDYAAAD

SEQ ID NO: 141773 - protein, 401 aa, unidentified
MNAVGIDVSKGKSMVCVMRPFGEVVLEPFEVLHTAQNLHDLAEKLKALDGETRVVLEATGNYHKPVAFVLHDAGLFVSVVNPVLIHDYDNNSLRRVKTDRKDAVKIANYTLDKWTRLRQYLPEDDTRLALKNCYRQYQQAVAIRTMLKNNLISSLDLTFPDANKLFTSPAKSNGCEKWVDFIGDFWHSECISSLSANAFAKKYLKWCQKHGYVFTRSKSDEIYACAVNSASLPKSPTSKLLIQQQVAQLKAVSQSVAAFRQEMLRLSQQLPEFDTVMEMYGVGPSLGPQLMAEIGDVRRFSSKKSLIAFAGIEPQPNDSGKVVGNDKGISKVGSAVLRRTLFLIMTVILQTQPQDEPVFQFMNKKRSEGKPYKVYMMASANKFLRIYYARVKAVMDSENFN

SEQ ID NO: 141774 - protein, 427 aa, unidentified
MICAAVERGAGIDVGKKWLSVCIMIGPLNGEPRVERQRFGVNVADLQRLREWLCKEAITHVVMESTGSYWKPVFNVLEDSVKVYLANPYEVKNRRGHKTDDKDGWWLAHLLRHAMIHPSFIPPRPIRELRDLTRRRERLNGAGTAEKNRVQKILEDANIKLGNVLSDVFGASGQLMVDALLEGKGAPGQIAQFAKGRAKKKIPAIIAALEGHQMSEHHRQMIRYSLAHMKFVEEQIEEIDKDIAAKIHEAGLDRQWQILQTVPGVQERSAAKILAETGADMTQFPAPRNLSSWAGVCPGNNRSAGRNRSNRPTGGNPWLRAALTECAWAAAAKKNCFLKEKFWRLTTKSRGKKNLALVAVAHSILQLVYDVLRTGQPYRDRQAPALSEQQQERLIRHHVRRLGKLGVCVHSLRSGKAVKQTPIVVPN

SEQ ID NO: 141775 - protein, 317 aa, unidentified
MDVAFKSFVGIDIAKRTLDVHVLPERTSLKQQNDSKGRQQLREKLPPPGGCLIVVEATGGYERALVAELIDAGYQVAVVNPRQARDFAKACGIVAKTDRIDAAVLARFGQAVELRTQTKIPEKQLELQDLVARRRQLVELRTTEMNRRENVASQFVKKSLQESVDAINKQIRRFEKRIAALVQSDDEWKQKAEIVQSAPGIGPGTSATLIAEVPELGQLSRRKISALVGLAPFNRDSGEFRGRRAIRGGRSSVRCSLYMATLSARRSNPVIRAFSDRLKALGKKPKVIITACMRKLLVILNTMVKNKTHWNPAISTT

SEQ ID NO: 141776 - protein, 340 aa, unidentified
MGEITTIGLDLAKHVFQVHGVDADGTPVLRKQLRRSQMLAFFSRLPSCLVGLEACATAHYWARELAALGHEVRLMPAQYVKAYVKRNKNDAADAAAICEAVRRPTMRFVPAKTADQQAAVLLHRGRERLVRQRTALVNALRAHLAEFGVVAPQGLRNVGKLIAIVRDEGDARLPDLARQVLQVLAAQIEQLETAVAAIEKQLMAWHKSNPVSQRLATIPGIGPIIATAIAATVVEPTAFRSGREFAAWLGLVPRQNSTGGKTRLGRISKRGNQYLRRLMINGASANLLRSKATNADPWVIGLRRRRPSLVVAVALANKTARIAWAVMHRHENYQRMAVAA

SEQ ID NO: 141777 - protein, 328 aa, unidentified
MDAVSVGIDVSKATFVVAVAPTGERWTSDTAPAAIEALVARLQGVAPTIIVVEATGGYERTLVAACAAVGLPVAVVNPRQVRAFAQALGRTAKTDAIDADVLAAFGARVQPAPRPLADAATQALAALVARRRQLIEMIGMERRRLEQAPPTGRITRDLRNHIRWLERRVHDVDDEIGTAIQASPVWRVQEDLLRSVPGIGPITARTLLAELPELGTLDRRAIAALVGVAPMNCDSGQYRGQRHIWGGRASVRATLYMAAVSAARHNAHLAPFYRRLRTAGKPAKVALVATMRKLLTIMNALLKHQSRWNAEVASTPASLSGRARAATA

SEQ ID NO: 141778 - protein, 348 aa, unidentified
MDKITAVGLDLAKQIIQVHGIDAAGHVVLRKAVRGERLLALLAQFPLCVVGMEACSGAHHWARQFKQLRHEPRLMAAEFVRPFRKSLAAKNDANDAEAICTAVVQPNMRFVSIKSVEQQALLSLHRIRQGLIEERTATINRLRGVLAEFGVVLPQSVPALQRALPTVLADAERLPAVVQRSLQLLLEHLRELELRLAEFDRQIAQHAKSSAPAQRLAALPGIGPLTASAVVATVGNAQDYRNGRQFAAWLGLVPRQYSSGGKCKLGPITRRGDAYLRALLVQGARSTLQAALRRAPARHDRLSAWIVQLAQRVGYHKTLVAIANKHARIIWALLAREQTLDLARTTTH

SEQ ID NO: 141779 - protein, 358 aa, unidentified
MQAKGTTIDFNGQNVYAGIDIHLKSWKVTIMLGDREHKTFSQDPNAETLWNYLRKNFPGAVYHSAYEAGFCGFSAHRDLVGFGILNLVVNPADIPTTDKEKRQKEDKRDSRKIAKSLKNGELVGIYIPGKGMEELRGLVRYRKTLVKEISRHKCRIKSFIYFNGIKIPLEQDGISKHWSGRFTHWLREVKLSTAHGKMVLDDTLDTAELLRKKLLKVNRHLRQDVGNGEYSEKLRLLQSIPGIGLISAITLLTEMEDILRLRNLDQLCSFVGLVPSTNSSGEKENVGRITRRNNRFLQSIIVEAAWMASRKDPSLLYSYGLLCKRMEPTEAIIRIAKKLLNRIRYVMKTETEYVHSVI

SEQ ID NO: 141780 - protein, 343 aa, unidentified
MGEVSTIGLDIAKSVFQVHGVDDAGAVVMRKRVGRSKVLEFFGSLSPCLVGIEACPSAHYWSRELQALGHTVKLMPPTYVKAYLKRSKNDANDAAAICEAVTRPSMRFVPIKTQEQQTGLMLHRTRQLLVRQRTMLSNAIRGHMAELGIISAKGRNGTAELLQIVGDVADDRIPPVARFCLDLLARQYLTLNAEVYAVDKRIHAWHRSCEESRRLEEIPGIGPIVATALVAEIGDWRAFRSGRNLAAWIGLVPKQHSTGGKERLGSITKQGNRYLRWLLVTGAMAVIRYARAHGTKRPWLTRIMDRRPAKVAAVALANKIARMAWAIMVRAERYKEPKLLLAA

SEQ ID NO: 141781 - protein, 370 aa, unidentified
MKSIIYVGMDVHKSSFTLSCFSVTTQETFATVKISPDAKAIKKYLDGVSLSRSEECEFVCGYEAGCLGYTLYHQLTAMNIRCVIMAPTTILRNGKRVKTDRIDAENLARCLAYGGYNSVYIPTAQDEAVRDYLRMRDDHKLMLKKIKQQINAFCLKHNKIYPGNKSKWTQAHVKWLNALEFDGYLQDAFNEYMITYRELADKVERLESQIEQLAELEEYRDKVKKLICIKGIKTHTALSLIVETGDFSRFQSAERYASYIGLVPGEHSSSEDQNRLGITKAGNRHMRMLLIEAAQCYSRGVPAKKSKDLKSRQKGASPEVIAYADKASIRLRRKYIRMELVNKKKANVAKTAVARELACFIWGMMTDNIA

SEQ ID NO: 141782 - protein, 477 aa, unidentified
MEVIHERVAGLDVHKNSVVACLRSHSGKSAARECRSFGTTTDELLALLEWLTTSGCQAVAMEATGVYWMPIYKILGDGDFPVLVANAAHIKAVPGRKTDMNDAMWIADLAAFGLIKASFVPGEYVHELRTLMRTRKQLVREQTSHVQRIQKTLTEANIRLDSVISDIMGLNGRRMIEAMIGGQRDPRKLAALADKRLKATAKELYDALHGRLTDHHRFLLKLHLKQWDALDVSVQTIDREVDARLGKIQAARPTVDTQPAANAEAVEAKPIKVKRTKTKTAKTEEAKTEEAKTEEVKAEEVKAEEVKANDNGVSKLVDLLSTIPGVSRVSALTILSEIGPDMSRFPTAGQLVAWAGMCPSQNESAGKKKGSRLRKGAPWLKTMLVQCAWAAKRAKSSYYRAQFYRLQARRGPQKAICAVAASILTAIYHMINNGSPHKDLGIDYFDRRTPETKAKRLAAQLGKLGYQVTLTQAAQAA

SEQ ID NO: 141783 - protein, 439 aa, unidentified
MNMTSKSAQFAALIGIDWASQRHALCLYDCATAKRESSILEHTPEAIAQWARGLQERFKGKKIALCLEQSKGPLIYALLEYPFFVLYPINPATAARYRMAFKTSRAKDDPSDAQVCLELVLHHREKLNPWLPNDAPTRELSCLLQHRRAAVDLRTLLTNMLRDALKSYYPQALELAGQDLFAPLSCQFLLKWPSLQELQKARKESVRKFYYAHNCRRMDVIEKRLDAIAQMTPLCRDRALLEPAMVQVRMLARQLLQLGGALKEYHSKIEQLFAQHSDALIWESFPGAGPTLAPRLACAFGTQRSRYQSAVAIQQYSGTAPVTEKSGKNQHWVHRRWARPHFTHQSFFEYASQSVLHCSWAKLYLKEQMARGKAYPTAIRALAFKWQRIMFVCWRDRVPYDETIYRQSLQRRGSHLARKLNQHPLKPLEHPINNSYPNP

SEQ ID NO: 141784 - protein, 372 aa, unidentified
MENIIYIGMDVHKESFSLCALHGTTGEIVGEARCASNVSLVKKFVEKLKTKYGEDIKIKAGYEAGCLGYSLHNLLEQNGIDCDILAPTTMYSSSKNKMVKNDRFDAKMIALNLANGTYKEVYVPEEEDVAVKEYIRMLGDFKTSLKKIKQQIKAFLLRHGYVYEGKSSWTIAYMKWVKNLDLQGLFKETLDEYLLQYDVLVDKIERFSLRLEELSHSERYEEPVAKLRCLKGIDTTSAMTVHVEIADFTRFPTAKAFMAYVGLTPSESSSGEKISRNSITKQGNSIVRSTLVECANALVKGTIGLKSKRVKARQKGQRSEVISYADQAVERLQRKYHRMMYQGKPRNVAVTAIARELGCFIWGLETGKIHRK

SEQ ID NO: 141785 - protein, 320 aa, unidentified
MDAVLGIDIAKAKFAAALLRPDGKVRHKSCANTPTGFADLAAWLQRQHVTRVHATLEATGTYGEALALWLHDAGHLVSVVNPSVIHAYARTQLTRSKTDRIDAELIARFTASHQPAPWTPPAPEIRQLQALVRRLDALQGMRTQELNRLASGVTVAEVRASIETVIASLDAQIAHVHQLIRDHLDRHPGLRAQRELLITIPGIGEATAAVLIAELFDKRYTSARQAAAFAGLVPRLVESGTLRGRTRLSKIGPGRLRKALYMPAMTALRWNPTIRAVRARLHAAGKPPMVIIGAAMRKLIHLAYGVLKSGRAYEPTCAHP

SEQ ID NO: 141786 - protein, 406 aa, unidentified
MKQIVSVGIDVSKGKSTVCAMIHPNTIIKESFEVLHTVEEMSMLADYIGSLDGEIRIVMESTGHYHLPVAQFLYQKGFFVCVENAYIIRQFSRIMLHGAKTDPLDAKKLAKYGLAYWSELKPYKFHPSCYTELSLLSKQYQTYIKLLIAAKQNVIHLMDEMLPGFKEALDTASSVQFSKVKYVDFAKEFYHVDMIKSMGKEIFRENYKQWCKEKGYRFQSEKADELFHLAEDGIPTLPTEFPSTRLCMEVATEQVSQLGYALEQILSQMQNLAKTLPEYQTIRQMGGMGEKLCVRFIADIGDVRRFHNGKALVAYAGIDAPPYQSGQYTGTKRRISKRGNSALRKTGYEVMKSLKSHPPKTDTRVYDFIIKKENEGKSKKQAKIAGLNKFLQIYYARVMEIYKNIV

SEQ ID NO: 141787 - protein, 354 aa, unidentified
MLIIGCDYHPGFQQIAFLDTDTGELRERRLEHREQAEQFYRELKQQNQSVRVGMESSGHSRWFERLLHELGFELWIGDPAEIRTKRVRKQKTDRQDAQLMLQLMLENRFPRIWVPDAENRDLRQLLWHRHRLVQMRTRVMNQLHVVPLNEGLRRKKALWRPAGRKELESIALAPWASRRRQDLLDLLDQLTPKIQELTHAVEEEVEKRPVTRRLMTHPGVGPLTALAYELVIGTPERFHCGKQLASYIGLVPTEESSGNRRRLGHISKQGNVLLRFLLVEAAQVTVRSQQEWRSKFFHLAMRRGRKIAKVAMARKLAVHLYWMWRQGLDYGQMQKLGSHAGKPGHPDGVQLSPM

SEQ ID NO: 141788 - protein, 334 aa, unidentified
MKELKSSVGIDISKDSFEVCIKQLKDDRSVIKATRSFQNDFLGFEKLLNWTLSKVSSPVFVMETTGVYHEDLTHFLYSNDQKVSVVLANKMKHFAKSLNMKTKTDKADAQMIAQYGLERQLEWWEPMMPQMKNLRDLCRERLSLKKDLVRCKCQVHALRHAHSTLDVVLQLKEQQIEFLEKNIQIIENEIIRITEEDKEFNQRVKNIEAVKGLRLLTIVTVLCETNGFSQFNNIRQVVSYAGLDIAERQSGLFKGKTRISKKGNARIRECLYMPALSATSYNEQIKALYQRVIERNPTIKRKGVIAGMRKLLVLIFVLWKKNEAYNPDFQWNAH

SEQ ID NO: 141789 - protein, 355 aa, unidentified
MLIIGVDFHPEFQQIAWVDTDTGEFQEQRLQHGEPAERFYRALAAAGQQVRVGMEASGHARWFERLLAELQFELWIGDAARIQSKRGRKQKTDRQDAQHILKLMLKDDFPKIWVPSWENRDLRQLLWHRHRMVQARTRIMNQLQAVALNEGLRCKKRLWRAGGRQQLESFQLAPWASRRRHDLLELLDRLNPTIADLSHALEQEAEKCPQARRLMSHPGVGPLTALAFALIIGNTERFQCGKQIASYLGLVPLEKSSGNRRRLGHITKQGSSMLRFLLVEAAQVTVRSLPEWRSQYFRLVIRRGRKTAKVAMARRLAIRLYWMWRQGLNYELLKSSVRTQENPEIAMVCSRTPSN

SEQ ID NO: 141790 - protein, 394 aa, unidentified
MALELPAARVSCWLSNEALAGRDSVTAWLERGEQTPSSGVPVVTPIRVYEEELMSVMIGVDPHKATHTVVAIDRDEHAIAKLEVVADRSQAQRLLAWAAPLGGERTWAIESASGLGRLLAQQLLGAGEHVVDVPPTLSARVRLLGSAKAGKNDDNDALSTAIAGLRHCQLRTVQVADQAAVLRLLIDRYDDLVGLRTQAACRLHVVLREMIPGGGPRRMSADRASKLLGSIRPDGPVAVERKRLGVDLLGDLRRLDRELVAIKARITDAVDMSGTTLRDIYGVGSIVAALVIGHVSDASRFATPDRFASYNGTAPIEASSGPRVRHRLNPRGNRKLNHAMHLIAVTQIRNDTPGRIYYERKIAEGKSKKEAMRALKRRISDAVWRQLQVDLGRR

SEQ ID NO: 141791 - protein, 404 aa, unidentified
MQVGWDWASETHDVTVLGEDGVIVDHFSLAHDEADLAGAIVRLSRHGQPGELPVAIETTSALVVDRLLDGGHPVVPIHPNAFNAARPRWGASRAKSDAGDSYKLADYLRTDGHRLRRLRPIDAATAELQALVRMRDDHVSAKVAATNQLSALLDRHWPGAKVVFARLDSTIALAFLTDYPTPQSAARLGEARVAGFLKRHGYSGHRSAAEILERLHSVPQASSPLTSETLRQLVHAQVRALRTLMETIADLDRALGALLLEHPKAKLLASLPRIGKVNLAQIVAEVGPILDRAVDVGHAAAEAGASPVTKESGKGRAVNFRWAVNTRSRDALGIFADNSRHASPWAAKLYADARRRGKRHPHAIRILMRAWVRVMWACWTARFPTTRIFMALNVAFARRLPYRG

SEQ ID NO: 141792 - protein, 359 aa, unidentified
MIVIGIDPHMKTHTAVAVDAVTGASVGERTVGSDGTGHDELLAWARSLGPDRYFAIEDCRHVSGRLERHLLPRGERVVRVPPKMMAGARDSARTYGKSDPIDAACVARAALREPGLPEARLSGPEHDVRLLADHRDDLVDERKRIQERLRWNCHDLETGLDLPPRVLDRCVWLDRLEATLRALPETTRRRIALEQLSRCRELTSQIHSLERELRTMIRELAPDLLAIPGCSALCAAHLIGQTAGASRFGGEAAFAKHTGCAPLPVSSGKSERHRLNRCGNRKLNSTIHMIAVTQARMYPPAIAYMERKKAEGMSYREALRCLERLLARAVFKTMIRAENAAGGEVIPAPFQTGRVAIAV

SEQ ID NO: 141793 - protein, 388 aa, unidentified
MEPVSIHPTAVRIDLGAIFVSLELSRSTWLITSLSPGSGEKMSKHVVAGGNIAELLDRFEQLQQKARLRTGKLFPIVTIQEAGLDGFWIHRVLESYGIESYVVDAASIATSRRRRRAKTDKIDGEALTRTLLAFKRGEPRVCAMVRAPDPRDEDRRRICRERKVLIAERVRHVNRVKGLLFAQGVSGYQPLRKDRRQRLEELQTGDGRELPKHLKAQINRELDRLELLLEQIAAVESERNALLSMDEQPAVEATSPAAMLLSLKGVGAEFAAVLWTEALSRHFDNRRQIAAYAGLTPTPWMSGTIDHEQGVSKAGNPRLRTTMIQLSWLWLRNQPASALSRWFVDRVQSNGGRLKKAAIVALARKLLIALWKFVTAGVVIEGAVMKTA

SEQ ID NO: 141794 - protein, 351 aa, unidentified
MDTTTVGVDLAKNVFVACVADCTGRIVARREFNRAGFLSWLGTLPTGTVIGMEACGSAHHWGRTAQRLGLAPRLMAAEFVRPYRKRQSVKNDRADAEAILVALLSPGMRFIPVKTEAQQQRLAWHSLRVGWVEERTALLNRVRGLLAEFGVIVDPGPKHLRALLAEREFDTALSPALRGLIQSVRDQLDALDARIGECDRQITAQQANDPLAKRARDLPGVGLITADAVTASVGDASMFRNGRQFAAWLGLTPSQSGSGGKTKLGRITRRGDDYLRTLLVQGARSVLAATLRKQRRESPEKLTRLQQWIVVLNGRIGYHKTLVAIANKHARQLWAVLAKGEAYNPQAWQRA

SEQ ID NO: 141795 - protein, 384 aa, unidentified
MQKPNDLNQSRIVLKQDSTLIAVIEMSLSSWLVAGIVPGVERQPLKKLAVDESALLKLLNRWREEAEKAGRRIERITVAFEAGRDGFWLARWLRARGIEAHVIHASSVAVSREHRRAKTDRLDTELLKRAFLGWLRGERDHCKMVAIPTTKDEDAKRPNRERQSLVGEQTRIVNRMKAALIRLGIRGFNPKLKKAAGRLEDLRTPEGEPIPPNTLAELHRDMERRRLVSDQIRQIEEARLERMEQAPGDEPHAMVRLIARVIGVGIETADMLVHEVLSRKLRDRRAVARYAGLTGAPDESGSKRREKGLAKAGNARVRGGMIQLAWRFLLFQKDSALAQWYRTRTEGGRNRKTIIVALARKLLIALWRLVTTGEVPAGVVLRAA

SEQ ID NO: 141796 - protein, 351 aa, unidentified
MEAEKRRFVGIDLGKREYTMAIIDKRGKTKIHQGKTSIHGRQMLYHLLAKSDKVALEAGNLAFIMAREIQERVGSEVRVLNSAKLPFIWDTPTKTDKEDAMKLAHLIEERRDEKLPIVPLPSEEELERRKVLANYRREQQSRTRNINLLHAMFVHQGHTTVVRRNLATAERRQEVIELLRGQVREEAEWILRHLELYEERIKELKGTIQAEAKTDKDMQILQTVVGVGPIVAYAFAAHVGDGSRFRTGAQVSNYLGFVPRLDYSGTIMRQGHITKRGNGYLRGLLVQAVWSAIRSRFGGVIRERYLYKTAVKGLSKKKMVVAEARRLTEVMYTILKNKSEYEVRPWAGTGA

SEQ ID NO: 141797 - protein, 429 aa, unidentified
MAYRIAGIDVHKKILAVVVCDIDVEGEYTFEPRKFSSSPEQLRYLATWLLEQEVEEVVMESTAQYWKPVWEALERYWKPISEGREGAKRKSGTLHLAQALSNRGRQGRKRDFPDAERLVKRLVAGELTLSFVPDAEQRLWRTVTRKKNQVRRDRIRLQNQLESFLEEAHIKLSSLVSDLFGFSSQRILGAIAQGETDPAQLAALADERLRATSEQLCDALGACTELNPVYRRLISMALEELRLIDEQISRLDRELAGLLKAHQGAVQRLAEVPGLGVDSAQQIIAEVGPIAAAFPSAKCLSSWVGVCPGSDETAGVNYCHRSPQGNRHMRRLLHQVANAGARTKGSIFEIVYRRLVPRLGHNQTIGAIAHRQCRLIWLILHEGVRYEERGSGLTKRSKQLRTWKMVRELRNLGYRIELPSSELNQAPGH

SEQ ID NO: 141798 - protein, 370 aa, unidentified
MQSRSFVGLDVHKATISISVAEEGRSGPVRYIGVIANTPEAVGKMAKQLAKHGELEFCYEASNCGYGIYRQLTGLGHGCTVAAPSLIPRKPGERIKTDRRDSEKLATLHRSGDLTAVWVPDSTHEALRDLVRARVDASMHLMRARQQLLAFLLRHGRTYSTGTYWTKRHRSWLATQTFLEEAHQAVFQDYLEAVWTAQRRRDALVERVAAMVASWSLRPLVEALRGLRGIDLISAATFIASTGDLSRFESPRKLMAYLGLIPSEHTSGETIRRGGITKTGNREARRMLIEAAWSYQYPARVARDKAEILIRLPKNVRDIAWKAQTRLCTRYRRLIARGKKPTVVVTAIARELAGFLWAIGHEVRITMAAG

SEQ ID NO: 141799 - protein, 400 aa, unidentified
MIYVGVDVGKSKHAAAAVNEAGACVLQPRFFTQDAGGFASLFGAFKECGGPESVVVGMEATGHYWKVLRHALVARQYRVDVINPLITSREASADVRGRKSDKLDALAIANVMRKGGYSPAPAALAAMDTLKALARHRKALVERSSDAKRRLIAGLDVAFPEAAKTLGDLFGAASQAVIKAFPSARLAAAADIRRLTSLFDKASGGQLGREAAEAYREAAKRSLSLNMHTEGEEFVIAQIVDEIRAAAAQIAEVERRMQAEPQPQLASLLGSIKGAGKIQPMVVAAEIGAPSRFAGADMAQKVLAYAGCEPRVRESGKWKGTTKMSKRGSPVLRNALYLMASTIRLHSPYFNAIYKRQIAMGKHHNVALSHVVRKIVDVMCGMYKTNTTFMPPQTEVAPCQ

SEQ ID NO: 141800 - protein, 380 aa, unidentified
MNQGVEEIDPEEEEERLERVGAIDVAKASGKVCTRVPHPSVPNRRVTKVWDVSATTNAIALLADELAEMAIERVVVESTSDYWRPFLYLLEARGLKVWLVNARDVKQVPGRPKTDKIDGEALVRALLAYKRGEPRVCAMVKAPTPEEEDRRRLCRERKVLIAEQVKHVNRIKGLLFSQGISGYEPLRRNRRSRLDELLTGDGRLLPEHLNAQIRRELDRLELLLEQIKVVEVERDALLAAKETPAPAPAAILLNIKGIGPEFAAVLWSEGLFRHFDNRRQVAAYAGLAPTPWQSGAVDREQGVSKSGNPRLRTTLIQLAWLWLRHQPQSALTLWFEARAKRNGGRFKKTTIVALARKLLVALWKYVTAGVMIEGAAMKTA

SEQ ID NO: 141801 - protein, 310 aa, unidentified
MTAYVGIDVAKATLVLCLQPEGRTWKRPNTPAGRAQVVAELQAVQPERIALEATGGYERAIWQQLQAAGLTVVRLQPRRVKALARALGWQAKTDPLDAALLAEAARILVVPVTMAPDAATEALRALVDLRRQLVSQRDDNQRRLKQSSAVVAQRVLNRINASLQREIHQLDRKIKAQLAVTAAPDLATAPGVGPVLQATLAARLPELGRLGRRQIAALVGIAPYNADSGAHQGKRHIRGGRADLRRVLYMATLASIRANSIIATTYRQLLARGKLKKVAIVACMRKLLIMLNAMARDHTTWAPPTLSGVA

SEQ ID NO: 141802 - protein, 356 aa, unidentified
MKNSQLDFTGQTLYIGIDVHKKSWQVTILLNGMKVKVFSMNPNPKELNNYLTNHYPNANYHSVYEAGFSGFWANRQLQALGIKHIVVNPADVPTKSKERRKKTDKIDSSKLARELSVGNLDGVYIPSTKAEALRTLIRLRRQIVNDQTRQKNRIKSLLLFLGYSVPEDVETKHWSQRYIKALRNLDIEHEESKATLNELLNNLNFIRSQLVQILEQIKGFIAKDQQADKTVRLLKTIPGIGPILAVILYSEIIDIYRFKKLDELANYVGLSPAIYSSADKEINLGLTKQKNKYIRNYLIESAWIAIRKDPALQMAYGLLCKKMSSNKAIIRISKNLLNRIRTVWINQQEYVIATVA

SEQ ID NO: 141803 - protein, 312 aa, unidentified
MAMLSFCGIDVSKDRLDVVVLPEGWFFSVSNDTAGWAELVVRLRPLTVSAIGLEPSGGYERGIIRALLAAGLSVRRINPNKLRQFARARGVLAKNDRLDARLIAEYVAIMPTRVVQRDAAVERLAEIVTMRRQLCDEHVAAENQAAHLEDAMLRRLSKRRQMRLEADIRLLDKRLAEMVAANVALAQRYELLTSMPGVGPVLAFTLIALLPELGKMSRKQIAALVGLAPYDFDSGKLKGHRSIYGGRMPVRNVLYMAALSASRYSPALKTFHKRLAAADKKSKVIIVAVMRKMITTLNAMLRDSAAWQPRSA

SEQ ID NO: 141804 - protein, 412 aa, unidentified
MIYCGIDWAEKTHDVALVDDSGQLLAKRHITDDAAGYKILLDLLAEYGDTEEHPIPVAIETSRGLLVAVLRSGKRQVFAINPMAAARYRDRHSVSRKKSDPGDALVLANVLRTDMHAHRPLPQDSDLARAVAVLARAQQDATWNRQQIANQLRSLLREYYPAALAAVESWKNGLCRPEAHQLLKLAPTPAKAARLTRTQLQAALKRAGRQRGIAADAERLREVLRTEWAHQPQLVEDALGKQMLALLIQLEAACTAADNLAEAVEEAFPQHPDAEIILSFPGLGTQLGARVLAELGDDRKRFADARGLKAYAGASPITRASGKKSSITRRWVKNDRLNAAGYLWAFSAITASPGAKAHYRRRRDNHADWHAAAQRNLFNRMIGQLYHCLQNRELFDEESAFPAPPDVAVSAA

SEQ ID NO: 141805 - protein, 366 aa, unidentified
MKKNSTVAVGRKQIFKQAKLTIGLDLGDRSSHYCMLDEAGNVILERSLPTTANGIRQAFSRIPRCRMALETGTHSPWVSRQLSELGHEVIVAHARNVRLIGESSRKDDRIDARTLARLARIDPGLLGPVRHRSAQAQIHLTVIRARAALVSTRTALVNAARGLTKSYGQRLNKCGTEQMTRDRAKGLSQELREALDPLLREIESLNERIAEYNRRIEQIAKEVHPEVARLKQVKGVGTLIALTYVLTLDDPQRFRRSRDAGCFLGLRPGRRNSGQSEPQLHISKEGDRYLRTLTVQGAHYILGPFGQDSDLRRWGLKLAERGGNNAKKRAVVAVARKLAVLLHKLWVSGKVYEPLRNNHEVESAVA

SEQ ID NO: 141806 - protein, 452 aa, unidentified
MAKKGKRRWDTLPVLHPDAAGIDVGANELYVAVSADRDPQPVRSFPTFTRDLHTLADWLEQCGIHSVAMDSTSVYWIPIYQILEARGLEVYLVNAQHVKNVPGRKTDVSDCQWLQYLHSVGLLRASFRPPGFICAIRSLWRHRASLIQMAAEHVLHMQKALDQMNLQIHRVLNDITGVSGLRILDAILAGERNPLTLARLCHGGVKNSEDTIAKSLEGDYRPEHLFALRQSLAAFRYYQQLVLEADREIQLQLAELKTAATAQPTTPARTKATAHYARHYEPRTFDLRGELYRAFGVDLTNVPGISALTAQTILCEIGTDVSRFRNASAFASWLGLCPEKKISGGKVLFTKSRRVRSRVATALRMGAQSLHHAKDYLGEFFRRITRKLGKPQAVTATAHKLARIVFHLLSTKDAYNECVFHKSEEETIRRAQYRLRRQAAQLGFQVIPVENG

SEQ ID NO: 141807 - protein, 431 aa, unidentified
MKYKLKQKQNQRITQINESTLVVGADIAKKVHVARAVDYRGIELGKECTFHNDASGLTMLVTWMEELKQAHDKTEIVFGIEPTGHYWFPLAAYLKERGFKIVVVNPYHVNKSKELEDNSQTKSDYKDAKVIANLIRNGKYAEPNLLTKEYADLRVIMNLREKLTVSFTQVKIRIGNWLDRYFPEYTSVYKEWESKTSLITLRRFPLPIDIVAKGPEAILACWKTEVKRGVGIKRATDLVATASTSIGLTEGTEAARIELAVLLQQYDLFSEQIETTMAKAEQILERIPGTAQMLTVPGVGVTTIAGFLSEVGDIRNYDHGQQIIRLAGLNLTENSSGSRKGKTGISKRGRSRLRALLFRTMMGMVSRNPEFKALHHYYTTRNQNPLKKKQSIVALCGKLIRILFTLGTKLKEYNVKDVIGPVRQSQMQEVA

SEQ ID NO: 141808 - protein, 415 aa, unidentified
MLAVVVSDVEIESEYQFERRMFSSNPEQLRSLAAWLVEQKAEEIVMESTAQYWKPVWGTLERYWKPLCEKREGARRRSGTLHLAQALSNRGRRGRKRDFVDAERLVKRLVARELTLSFVPDAEQRLWRTITRKKYQLRRDLVRIHNQLEALLEEAHIKLSSLVSDLLGVSARRMLKALADGETNPAALAALAHQRLRATPEQLCDALGACTELKPVYRRLLKMTLEHLQILEQQIGQLDQELATLLHPHQDAVERLAEVPGFAVDSAQQIIAEVGPAAATFPSEKCLSSWVGACPGEEESAGVNYSHRSPKGNRHMRRLLNQTANAAVKAKGSIFEIIYRRCVPRLGHNQAIGVIAHRQCRLIWLILHQGTRYEERGPAVTKRSRYQRTWRMIRQLRNLGYRIELPNPQASQAQA

SEQ ID NO: 141809 - protein, 405 aa, unidentified
MTDDKPPVVAGVDTHAESHWAAIITTTGQRVADEQFPATPDGYARLAGFVTGHGPLVRVGVEGTHSYGAGLARALASGGIDVAEVIRPARAQRRRGKSDPIDAYAAAGTALAGHGLPVPKTGQGDCEAIRVLLIARRSATKARTDAARQIKSILVTAPAPVRERFRSLPDARLFDTLAGLRPGPATSGATAATLTALRTLARRHQTLARETASLDADLDTLTSRANPALRAAFGVGPVTAAQLLTTAGDNPGRLHNEAAFAALTGTAPIPASSGKTTRHRLNRGGDRQANCAIHQIVLVRMAHDPATKAYAARRKTEGKTTKEIIRCLKRAVAREIHGHLTNPRPIPAINDLRPLRAAKRITLQQAAHHLDRHPADLSRIERGTRRDDHLATTYRAWLTNLPDPT

SEQ ID NO: 141810 - protein, 585 aa, unidentified
MMIQSDSNLSIGVGLDTARYGHHVTFLRQDLQLASEPFGFVESREGYDQLREAFQQLTQRHDNVHFHIRIDAAGQYSTNLQRFLYALDFPKTISVGDPKRNKDYRSVHFPKRKADPVESHACARFAIVEHPQETPDTPSEFLQLREVLSSLQAQTKRTTRLTNQLHNRLSRAFPELATLVDKLAIPSVLKLLSRYPTAQKIAAARLSSIQSIRHLKKGKAQQIHQAAQQSTASLHGPVIEGIIQQLTSELEHSLQAEKRLEKLLEKAYDGLPEGNHVHVESISGIGKLTAAALVAGIVSIDRFQTPDALVNFYGVFPEENTSGFDKRGKPVPAGTMHMCKKGSDLVRKLLYMACLSGIQSNPALRALYARKKADKKRGDVSVGHCMRKLLHLVFAVWKTGKPFDPHHYPWAKTAQVDCDQMSMCAAGSQQETVDRPTEETVAGRKEQSSKRQAVTATSSNVEPTPTTSKNTLVAPQTSAQAAALVDFAALREQITIEQALSQLGQFEQLKGNATQRRGPCPIHGSQRPASRSFSVNLQRNLFQCFSPTCQAHGNVLDLWAAIHNLTLYEAAKHLAATFGIEPPTK

SEQ ID NO: 141811 - protein, 394 aa, unidentified
MAFKIFRKNCCGLDVHKTWIYACMGITDTNGRTEYKQARFSSFTKGLQKLADWPAKYDCNDVCMESTGKFWIPVFNILEKTCWVTLAYPKYTKPQKGNKTDHKDAKWICDLYMCDMVNPSFIPPPDIRQLRDLMRYRSKLTNIMTSEKNRALNCLTVSNLKLDDVFSDVFGKSSRSVIRYILEHPGETFQVAPFIDRRCKHPVEEIQAVIDGTISHQQAVKLRECLQHLDELEVHKTNVEKEILCLVQQYPYQLELLQTVPGFSGNIMTAIALISEIGADMSVFPSAKHLVSWAGCCPRNDQSSKKVKSTRISRAGVYLKPLLVQVAIQPFTANADKLSAAGALEIRCQICDGRFLSMWAALFIFLGCPLPPCPKDLHVHNGRIVILASVAWIF

SEQ ID NO: 141812 - protein, 336 aa, unidentified
MSRYLGVDLHRNCFTVCTVVEGGRSYLREWRLKDLERFVSQLRGTDEVAVEVTGNTRLFYDAVVGKVSRVVVVNPSEFKVISQSVNKTDCNDARRLAVFLSKGLLPEVRMKDKGHAQLASVTQTRDKLVKLRTVLKNKINNITSAHGINLKKEELSSEKGLEKVLGMMFDPLVDLEVEVLVKQIRSLNKSISELEKAIKDEGSKLKGHGNLKSIKGIGDLGAGILLSVIGDVEDFANEGKLASYFGIVPRVSNSNGTERSGRITKRGSKLGRTTLVQCSLIAKRYSPYLNKYYERIKARRGGGKAIIALARKFLSIIYKTLKNDWVWEDFPNGVLA

SEQ ID NO: 141813 - protein, 410 aa, unidentified
MNLNVGIDVSKAKLDYCGLDSAKKVIFQDKTTNTPDGAGQIEKLILEWAKRQDDSLKIVIGMEATSVYNIHPTLYFEQSSALSALDATVVTLNPKMTHRYSQLFDDDKTDTIDAFHIADFLRIGRYQVPVTRDEKHIALQRLTRERYHIVKQITDGKNHFLNNLYFRLNTLEAELPTSVFGNTMMTVLSGEKYTLDEIAQMPLQTLTQDLNQLSHGRFGDPEAIAKALQKAIRSSYRLSKTVADSVDQVMAIYINQIRMLQKQLKALDKSITDLCAVIDGSQSTQSIPGVGPVYSAGLLAEIGQIERFPSEASLASYAGLVWRRSQSGNGERQLTPRTHNGDQYLRYYLIEAANSVRAHDPTFARFYDKKYREVPKYQHRRACVMTARKLVRVIYALLKNHELYKPAKAV

SEQ ID NO: 141814 - protein, 411 aa, unidentified
MSDSIFVGIDVSVKSNKVCILDSLGNRLAKMTVHNNSHGSSQVVDRVTDILCKTGCTKVSFGLEATSVYGEGLIFYLKQDKSLKNYDTKVYLLNPKQVHNFKKAYSDLPKTDDVDAWVIADCLRFGRINLSETYFDERHKALQRLTRARYHVVQNIVREKNRYLTNLFLKFSGLYQENLFSNKFGATAMEISNGAFSLDEIAHMPVDKLAQFINASGKGKFADPETLAANIQKAARSSYRLPKTIEDSVNRVLAVSTVSIKSYLEQLKSLDKSISALMETIPNTLTSIKGIGPVYAAGILSEIGSISRFKDQASLAKYAGLSWSRYQSGNFDSDNTHLINSGNRYLRYYLIEAANLVRRHDPEFKRFYELKYRETPKTPHKRALALTARKFVRLVYALLRDQRLYIPPRVE

SEQ ID NO: 141815 - protein, 338 aa, unidentified
MGYFVGIDLHGDNNYIGILDEEDRRVFKRKNRNDVKEITRVLEPYQEEIEGIVVESTFNWYWIVDGLMDAGYTVHLANTAAMQQYEGLKYVDDTRDSFWLAHMLRLEILPEGYIYPKETRSVRDLLRKRMMLVQQRTAHILSMQTMVNRNKGIPISSDTIKTMSGEEVEGLFGDEHLVMSAQCDHEVVGVLSGQIDKIEKAVHKEVKLKKPYKKLLTVPGIGEILAMTIMLETGDIERFREVGKYSSYCRCVSAKKVSNGKNKGKGNRKNGNKYLAWAYVEAAHFHVRYCEEARKWYQRKASKSNAILATKALSNKLARACYYIIKEQVPYDKKRMFG

SEQ ID NO: 141816 - protein, 337 aa, unidentified
MNYSGIDLHSNNSVVSVIDETDRVVAERRLPNDLAKILALLAPWRPELAGVVVESTYNWYWLVDGLQAAGFVVHLANTTAIKKYDGLKHSGDETDARYLAHLLRLGILPTGTILPAEHRQVRDLARKRMQLVRSRTSHILVVENITARQSGTRVTSNQVKQLDQTTVDQLHLPADVALAVRANVAVITTLSAQIAIVEKRLHEKVAPRPDYALLTTVPGIGQTLATVIVLETGTIERFASAGNFASYARCVDSQRMSNGKKKSEGNTRNGNPYLCWAFIEAANFAMHFSAEARQFYERKKARTNSVIARKALAHKLARACFHMLKERKPFDVNRCFA

SEQ ID NO: 141817 - protein, 364 aa, unidentified
MAISGLSPTELTKEAPIIMLHIGLDLSRKRLDFDLLCEDGSRLERGAVAPDADGLRGLARRVGVFGEPVCAAIESMNGARFVHDRLEELGWQVEIADAQKVKGLAPLACKTDAIDAGVLAELSRRDLVPAIWLADPAVRAERERARWRLHLVRHRTSLKNRVHATLLAFGVPCPVSDLFGARGRGLLERLELPDPWAQPVNASLALTEDLDEQVRSCERELRGLGADHEYVPLLMSAPGIAWVLGYTIAAEIGDINRFRSPSKLCGYTGLCPRVHQSGERDRRGSLAKNGPKYLRWAMIEAATHAVCSPVYRERYQRTAKRLGAQRGRKVARVDIARKLTEAIWYMLTRNQPFAPAGATTPLAA

SEQ ID NO: 141818 - protein, 373 aa, unidentified
MEERSKIHVGLDVHKDSISVAVAEPGRTPGRLIGKVPHDVHKLLKVLAKVGAAEQLHIVYEAGPTGFGLQRALQAKGYSCEIIAPSQIPRRPGDRIKTDSRDSVQLAECSRAGQLSAVWIPDPDDEAIRDLSRAREDAVNSRTQARHQLKGFLLRHDVRYTGKTSWCGAYYRWLGTLNFGAGAAQTAFTEYWQAVTAADDRVDRLTKALQASITSWRFEPVVGALQALRGVAAITAIGLVAEIGDLGRFAHPRKLMGYLGLVPCEHSSGERTSRGSITKTGNAHARRLLTEAAWNYRFKARIGKQAQIRQQELSEPIRRMGWTAQLRLTQRFAALNARGLQANKACVAVARELAGFVWAIGMQAQREKVEPTC

SEQ ID NO: 141819 - protein, 425 aa, unidentified
MQQSAPEDFGAYIGIDWADQTHFVSLREANSQEVKRYKLEQKPEVLSQWVNELQQRFAGQQVAVALEQTRGALIYALMSYEFFVLFPVNPKALARYREAFNVGGAKDDPTDSDLLLELVTLHRSKLRAWRPDDELTRTITLLVQYRRDLVDMRTALTHRLAALLKLYFPQALQWAGELDTFQACDFLQRWPTLAKVQKTPTAKLRQFYVSHNCRTVAVIEKRLQQIPTAQPLTTDGAVITTSVAMVQAIVSQLRPLMVSIKELDKQIAELFAKHEDYELFSSFPGAGEVLAPRLLSALGADRDRFESAEEIQQLSGIAPVTERSGKTCWVHHRFACPKFLRQSFHEFAAQSIGQSPWARTYYKRRRERGNSHQAAVRSLAFRWIRIIYRCWQMRVPYSEQTYQEALRRRGSPIAKLIPLLVDQTS

SEQ ID NO: 141820 - protein, 382 aa, unidentified
MAQDTRFVGLDVHAATIAVAVADQGLEMARSLGTIPHTPEAVARLMKKLGPAASLRVCYEAGPCGYALYWQLTALGIACTVVAPTLIPVRAGDRVKTDRRDAEKLARCFRQGDLTAVWVPTPATEALRDLVRARECAKLDQLRARHRLSKFLLRRGCRPPADVRAWTTRHLSWVRAQTFAYVAQDVAFRDYLHEVEHVADRLTHLEHAIAEAIATAEPTQRAVIAGLQALRGVSHLTAVTLVAEIGIFRRFARPKQLMGYAGMVSREDSSGPRVRRGAITKTGNAHVRRVVGEAAWTARYRPAVSPILKRRQAGLAPEITAIAWRAQQRLHDRYRRLLGRGKVKQQVITAVGRELLGFIWAIAVAVEEQQRGEGARQRDVAA

SEQ ID NO: 141821 - protein, 462 aa, unidentified
MGQVIERLEPTVPKVCRLLEEAEEDLLAFYAFPASHWPKLRSTNPLERVNREIGRRSDVVGIFPNDASVIRLAGALLLEQNDCHEGRPGRLVTSGLPRRISASVTSDSKEAQVQYLGIDWGTRRASWCALDEHGEVSEGTVPADENGLARLALRLGSDVRGCVEMMSGAVWVRDKLASCGWDMCIVDARKVKAVAPLACKTDRVDARVLAELVRRDLAPEVWVPSLEERAIREQLRRRSHLVRLRTSAINRTFGLQTQWGLRMNLTALRKPGSLEQLTEHGVPDVWRRSIAMLLAVIDDLERQLIPLERELRPLARADERVQLLMTIPGVAELLGLTLACEISDVSRVPSARKLVGYSGLTPTIKQSGQSSRTGRLSKAGPNTLRWAAVEAAQHAWRPSNPWHHLYSETKRRHGKSNPAKAAVARKVLIASWHVLSLQQPFKPSASSAPAPVPASSSTRLAA

SEQ ID NO: 141822 - protein, 368 aa, unidentified
MDNFITSFVGLDVHKDSIAMGVAPTGREPPRFVGTVTPQWAPLSKALGRLGKREALQIVYEAGPCGYTLARELRAHGYACEVIAPAKIARRPGDRIKTDRRDALLLARAARAGELVSVMIPDERDEALRDLSRAREDAVRARLKARQQLKALLLRHGHRYTGRSSWTQAHERYLATMSFAQPAQDIAFAEYRSAVRDAHDRVERLTESLRAQLEHWRMRPVVEALMSLRGVDLLAAMTLVAEIGDFTRFARPRELMGFLGLVPSEYSSGATRRQGAITKTGNSHARRVLVEAAWNYRFPARMSETLQRRQGSQPKAVREIAWRAQLRLARRYRHLSARKLALNKICVAIARELSAFVWDIARQVKPTA

SEQ ID NO: 141823 - protein, 402 aa, unidentified
MNAVGIDVSKGKSMVAIMRPFGEIVSAPFEIKHTASGINSLVELINSVEGESRIVMEHTGRYYEVLAHQLSEANLFVSAINPKLIKDFDNDSLRKVKSDKADAVKIARYALDKWQNLKQYNVMDELRNQLKTMNRQFGFYIKHKTAMKNNLIGILDQTYPGVNTYFDSPARSDGSQKWVDFASTYWHVDCVRKMSLNAFIDHYQNWCKRKKYNFSQSKAEEIYGKAKELVPVLSKDAITKLIIKQAVDQLNSASTTVESLRTLMNETASKLPEYPVVMAMKGVGTSLGPQLIAEIGDVSRFTHKSAITAFAGVDPGVNESGSYEQKSVPTSKRGSSDLRKTLFQVMDVLIKTHPEDDPVYQFLDKKRAQGKPYYVYMTAGANKFLRIYYGRVKEYLSSLPES

SEQ ID NO: 141824 - protein, 346 aa, unidentified
MLYAGLDLSRKRLDFHLLDAEGVTVAAGASAPDVDGLRGLSQRLERHGAPIRAAIESMTGARFVHDRLELAGWQVEIADAQKGKGLAPLACKTDRIDAWVLAELARRDLVPAIWLPDTLVRAERERARWRLHLVRHRSSLKQRVHAVLLTHGKPCPVSDLFGVRGRELLARLALPEPWRGTIEASLRLIDELDREIGDCERELRRLGADHRYVPLLLTVPGISWVLAYTIAAELGDITRFPTPRKLAGYSGLCPRVYQSGERDLRGPLAKQGPRYLRWALVEAATHACTAPAYRDRYQQTKTRIGKQRGAKVAQIDLARRLAEAIWHMLSRGEAFPPKGATDPLAA

SEQ ID NO: 141825 - protein, 347 aa, unidentified
MLYVGIDLHRKSSQLAVVNDAGELVRSRRVRSRPEEVWRVFGELPGEESVEAVFEATFGYGWLADLLADAGIRAHMAHPLATKAIAAGRVKNDKVDAAMLAQLLRANLLPEGWIAPLEAREARRLVRTRASLVRMRSRLKSQIHAVLADFALRPAARVGSAQVPALFSKEGLRWLSQQELPQASRQRVDINLRVIAGLDKEIQGVSKAMRERLACDERVRRLMPIPGIGLFSAATVVGEIWDVRRFASPRQLASWAGLTPKEHSSGEHHHLGHISKQGSRWVRWVLVEAATVHAMKDIGQRELFNRVRRGKQERAQLAHVAVAHRLLTLCFYALRDEGGCRAFPACR

SEQ ID NO: 141826 - protein, 379 aa, unidentified
MSDHSEAFVAFDASKLRNAVAIAQAGRSGEVRFLGEIDNAPAATAKLVRKLAGKYDRLAFCYEAGPTGYGLYRQITGLGQECVVVAPSLIPKKAGDRVKTNRRDALGLVKQFRAGELTAVWVPDPRHEAMRDLTRARGAAVADLRAKRQQISSFLLRLGLHYAGKKSWTKTHMNWLASQKLEHAEQRIAFEEMLLAVRQAQERIARLEEAIRVAVPDWSLAEVVEALIAMRGIDMVSATAFLAEIGDLSRFRTPRELMAYLGLVPSEHSTGDTVRRGPITKTGNRRARQTLVECAWSYRHPPRVGREKQHKVAAAPPAVREIAWKAQHRLYARYRALTRRGKLKTIAVTALARELSGFIWAINREIATTHAAARPQDIQ

SEQ ID NO: 141827 - protein, 392 aa, unidentified
MYIVGIDIGKNHHEASIVSPEGKQIGRSLRFATTHKGADSLMSFIFKNIGNSPCVFGMEATGHYWYPIYSFLKAKGYTIYVINPIQSDSLRKMYIRQTKNDSIDSFLIAEVIRFGQFGTTSMADENILAMRQLCRYRDSVISSRTEIKLRIGTIMEQIFPEYEKQFSSLWVSTSMGILEKYLTPENIENAPIDELFEIIKDKSHNRLTRAKAISIKEAAADTFGIKIAQDAFSFQLKQLIDRMNFLDKQIEALDCQILEYYEKFDCYLHTIPGIGMIGAATILAEIGDISRFKNSSALVAFAGIDPTVRQSGEFNSTHNHMSKRGSPYLRHAIFLAATTCSFHNSPLNAYYKKKRDQGKHHLTATGAVARKLTTVIYAVLRDSKPYEPKKFC

SEQ ID NO: 141828 - protein, 495 aa, unidentified
MPTLQGPFWSYKTYAYFVFGIVAFYKVVRMDGPIYYTRIFYMKLRNAIGVDPDSKGMVCCYVKIDSGTLEKKEFLATKDGLSKFTAWLGNKTDIIIAIEGHNGQSKPIEKLLRSEGIIFYSFKPCDVDKFRSAVLGQNKNNIKDAESVARYSMALEAQGKLENYKRVWFPDEELQILTRTHEEITKEITREINRMWKLIRMASVDLYLALGGKNPDISINSNKIKNKGVLTLFYKMPDIHLWKKLSENDILMLMGGCNYKGRTNLIYGLKKVSINFEPISKALSLLLKNTAFLINSLDSQKKDIENLLKSLTKDNQEVKILEQINGISTTTASKMIAEIINIRRFVKNDNLASYAGLCLKENKTGESEKMKHSFIFNHRLKDTLMVAARNYVMFNPDSHLSGYHRNLIKSGVKKNEARKRVARALVRVIFRKLNTISLDISPNIQQDRSENEMASGSYHEDHNNPGNISLSTPLYIQANNNNKGKEKNKILIEIF

SEQ ID NO: 141829 - protein, 414 aa, unidentified
MLKIIYPICCGIDVHKKFIVACIASTNKGVTNYKSSRFSTFTKGLRELSEWLHSNSCKDICMESTGKYWIPVFNILEATCKITLAHPKYVKAIRGKKTDKKDAKWIADLFKHDLVNGSFMPPLVIRQLRDLMRYRVKLTNFRSSEKNRTQNCLTVSNIQLANVVSDTFGKSSMAIIERILENPLDTNFDVTPLIHTSMRAKAPDLQLAIDGIITPEQALKLTIIRQHYDSLEFCKLNLEQVILSLTEPFQKELNLIATVPGIKAFSAIAIISEIGTDMSVFPTAKHLCSWAGLTPQNNESAGKKKSVRISRAGVYIKPLLVQCANAVVTSEKHPEIRNRYLSIRRRRGHKRAIIAITRMMLTAIYQILKKSEPYNAELYKKSDVLPVHREVTVEQAVFILQRQGYTISKAENSA

SEQ ID NO: 141830 - protein, 402 aa, unidentified
MNCVGIDVSKGKSTIAVMRPFGEVVVSPFEVCHTASELSELARLLKSLDGETRVVMESTGNYHAPVAWLLHGAGLYVSVVNAMLVHDYGNNSLRRGKTDKKDAVKLANYGLDHWLTLPRYVPEEDARLMLKTCYRQYQQYSKVQTMLKNNLISLLDTAFPDANRLFTSPPRADGSEKWVDFVAAFWHCECVCGLSKKAFTTKYQKWCRKHGYNFSEDKALDIYVSACGRFGVMPKTKTAKLLVEQAISQLQATSAALAALKQEMQSLAASLPEYPVVMGMFGVGPTLGPQLIAEIGDVRRFHSKKALVAFAGIDAPPYQSGQIDVRSRSISKRGSASLRRTLFLVMGVLLQCAPMDEPVYQFMNKKRSEGKPYRVYMMASANKFLRIYYASVKTYLDSLEHD

SEQ ID NO: 141831 - protein, 352 aa, unidentified
MIVLGTDMHKVSHTVAAIAATTGELVGEKTIQVGEAGFIAVFDWARSLGEDRVWALEDCRHVSGSFERFLIISGERVVRVATKLMADARRVARDRGKSDRIDALAVARAALREGVDAMPSAQLAGIELDIRLLVDHRERLVRSRVAINNDLLWHLHDLWPELKLPGSALVSKKWSTRIARRLARAEQTARVRIARDELRRLRELTIAARELEEEIAQLVAQVAPQLLQQPGFGPLTAAKLLGEVAGVQRFPTEAKLARAAGVAPIPVSSGKTNRHRLDRGGNRQLNTAIHRIALTRARCDPETQDYLARKRAEGKTGLEAMRCLKRHLARRIWHLLQPPHPVAETPPSPSIS

SEQ ID NO: 141832 - protein, 386 aa, unidentified
MKYIGVDVAKETPYGCVTSHNNKILTPPFAFENNISGFNLFISKFKKFPKSDIVIGLESTGVYGENLMAFLSEQGYAVALINPIETAGARRKRIRNAKTDKIDSKAICKYLYQNEYRLLEPRELTTLELRGICRFRQSLKRQNARLKIQLVSYLDVVFPEYHTLFSSVHGKGSCAVLSEFSSPAVIAKTNVAKLENLLKTGSRGHFGRAKAEELKALAKNSIGSKTNNKDFQIRHTIAQIRLLESQLDDTEIRLNELWSSIDTVIKSIPGIGTIDGSLIYSEIGDIARFQKPDQLIAFAGLDPATSQSGNFRAQSTKMSKRGSPYLRYALVNAAWNVSLNNVTFGEYYNLKLSEKGRHYKALGHVAGKLARVIFKMMKDNVNFDLP

SEQ ID NO: 141833 - protein, 340 aa, unidentified
MNITTLGIDIAKSVFHLHGTNKHGKLELKKRLRREQLLAFMQTLPPCLVAMEACGGAHYWARKFQSYGHTVKLIAPQYVKPYVKTNKNDYNDAEAINEAVGRPTMRFVGIKALWQQDTQSLHRARSRLMQLRNTLSSHTRGLLMEYGIVVPRQIGQLRRQLPLIVGDMDNELSPDMRALFAGLYEQLQSADKLISEKDKQILVIHRESELSQRLGEIEGVGPLTATAFISAVGDAKMFNRGRDCSAWLGLVPRQHSTGGKTRLGGISKRGDRYLRTNLIHGARSVIARASNKTDARSLWIQQLKARVGMNKACVALANKNARILWAVMASGERYRVSEQG

SEQ ID NO: 141834 - protein, 390 aa, unidentified
MSGLSVIRKLSTWTKCLNVKSEEERVVLQKAELNGNVDSENNHGGSSSNMYYIGLDVHKKTISYCVKDASGQVHREGTVGATRNELDCWIRTLPQPRIMAMEATIFTGWIYDHLLPHAEQVKVAHPLMLRAIAAAKKKNDRIDAGKIADCLRCDFLPECHMASTEIRDRRRTLRYRHLLVRQMVQMKNRISGLLMETGVSHNKQRLHKVGYFGELLSSNAEVQENIRPLLRLSRETIVRCQRTEYALVSSLQRDPLLAARLKRLRSVPGVGPITALTWAQEVGDVSRFRSVKQAISYCGLCGEEKSSADKVLRTPISKQRNKHIQSVLVEAAKLAPRQNHELALIHEREKQKGNRNRATLAVARKMVGYLLAVDRREREFVPAEGRGTAA

SEQ ID NO: 141835 - protein, 309 aa, unidentified
MTHSIVGVDVSKDWLDAYRRTDSKNRRFANTKQGRQSLTRWAEGARVAFEPSGPYHRALEQHLAVAGIGAVKINPLQVRRFAEAVGTRAKTDTVDARLIAVMAAQLELPATPPLDQITRDLKALQIARQGLVKDRTTAKNRAQSHECRFLKSQAAARLRHVKSQLAALDAEIATLIAGDEHLARRRDILLTIPGISAITAAALLAEAPELGALEGKAAASLAGLAPMTRQSGKWNGRAMIRGGRAHLRHALYMPALVAARFNPDLKALYDRLISAKKPPKVALTALMRKLLILANALLRDGRPSTEKPA

SEQ ID NO: 141836 - protein, 446 aa, unidentified
MKAMTNTPPPPKALPVINPHAAGIDVGSQKMFVSVAGGPPHVFGCCTADLRQLCDWLRQQGARTVALEATGVYWLCLYAELEAAGLEVYVVNGAHVKQVPGRKTDMADCQWLATLHAHGLLRRSFVPAAPTRQVRDVVRLRDDLITMAAAHLQHMHKALERLGLKIHTVLSDLSGFSGLQLVRAIVGGERRAEVLVELCDAQVRLAKRAALLKALEGNWQAEHLLALKLALEGWDFYQRQIGACDEHLQGLLGGQVSGCPAPDLGPKKELRHNAPKAMPELQTWMGQLFGTDLTRLPALNEYTLMKLYGEIGADLGRWPTEKHFTAWLGLAPAHQQSGRRRRRQWRPMGRGGRIFCLAAQSLANAKKTWLAGVYRRLRSLRGAKAALKAVARLLAVLFYRAATKGWQYVEQGLEQYEQKYRFQQQRRLERLARELGMVVAPQAPTS

SEQ ID NO: 141837 - protein, 357 aa, unidentified
MKYIGCDFHPSFQQIAMLDVETGELVERRLLHTEEARVFYEGMRGPVLVGIEASGNTHWFESLLARCRHQLWIGDAAAIARQNGRKQKHDRRAAELILKLMVENRFPQIWVPTVAERDLRQLLIHRQHLVRMRARIKNQLQHIALNQGWQKKHKLWSEAGLALLRSLPLEPWSQQRRDTLLAMLQELEEKIQPLDQAVEKEAWACEAARRLDTHPGVGAVIALATVLTMGDVRRFADSRSWVSYLGLNPSEASSGQRRRLGGISKEGNPFLRYLLVEGAVSATRRDKDLARMYARLKAKKHHGVAKVAVARKLAVRLYWMARTEKSYPEVVRTQGSQSHPVAERRAVQLNRPPASHQ

SEQ ID NO: 141838 - protein, 410 aa, unidentified
MENGTWERAPVHKVATNGSGFRDLTRWLEKSGFDRERIRIGIEPTGGWYAMTIASWLERHGYQVAWLQNWTLHERRQLAIGKQTKTDALDARLIARILYEHDHHGLQRTLMQRPPRSADGLRLLVRSRIRLVQQQTRYRLQLTVIEDALFPELKDFFKQSITCSSARRLLEVFPTPADVAAASAAELHEVVVRQARASALAARLSDLQRAAATSAGLVDKVEPIISVQRWLLGQLRNVDRELESVEEAIAAAIEAWPSREREILSSLPAMSVNRQAVLLATLGDISGFKSDRQLRKLCGWYAEVKESGSTVYKAHLGRSGNRMVRREIFLWSLQVLAPRHQPNAFRPYYERLRDRGMHGSVALGHLAGKLISVLYYCLRNDRLYDPIEHARALGILKPDPGSAANASQLT

SEQ ID NO: 141839 - protein, 315 aa, unidentified
MDARYVGIDVSKDRLDVHVRPSGDAFAVARDGEGLAALVARLQPLAPHLVAVEATGGFEMTVAAALGAAALPLAVVNPAQVRHYAQALGRRAKTDRIDAEMIARFAEAARPEPRSLPDEAMQTLSDLVTRRRQIIAMMVAERQRATRLPKRLKRSCERVVRVLEAELSALDQDIDTTVRGSPAWRAKEDLLASVPSVGDITARTLIADLPELGTLDRRKIAALVGVAPFTRQSGRWQGKAFIGGGRPNVRAALFVATMSAVRHNPTIRAFRQRLLAKGSPKWSSWSPACASCSPSSTPSCETKSHGNTLDPQHSR

SEQ ID NO: 141840 - protein, 341 aa, unidentified
MDQIIRIGMDTSKHVFQLHGVNVAEVPVLRKKLRRKDMVAFFKKLAPTVIAIEACGASHHWARLLQSFGHTVKLIPPQLVKPYVKRGKNDAADAEALCEAMSRPTMRFVPVKTADQQAALMLVGVRDRLIRNRTQLANTIRGHAAEFGHTAAKGIAHLVPLLDRIQADESLPALARELFALQAKEYIQLQAQIKEIDAKLTAWHRADECSQRLAKIPGVGPIGAVLLTMKTPDPELFQSGRQFAAWIGLTPKDHSTAGKVRPGLITRAGDEGLRSVLVVGATAVIQQAQRSGKASPWLAALLKRKSPKLAAVALANKMARIAWKLMRTGEAYAATSVVTTA

SEQ ID NO: 141841 - protein, 469 aa, unidentified
MTGQGHFIAQCLNQICNAKMHSLETRLVRVFTHCVCLYRLKEPAGLKPGFLYLAISAGNAIFRNLNPSLKMNITHSIGLDVHKSSARFHIVDETAHRVARGPLKAATPAVQQLLKNLRTDPATVLVVAEATGMLHLDFCEAFEKSGCQVVAINPLYGRNRSARNAIRDNKTDRLDAESLAELGLSDHEELLKRFAYHCPVERFELQRYVSSSKILRKSLTNIIKHTATTVHTLFPELDELGLSINQVRVRRLLREHPSPVRIAALDLDELRAYVGNKAGELKQAATHSFAIRAMGVTCEDGLLGKLIDTIEHLTEQLKQMNQKIDQLLIPCAGKETIRLARSIPGFGAKTTPAILAFISAEHLKWGNKRTITRKLQALFGTDPRVKQSGRWKGTTKLSKRGIEIARTALFQAAFCGMKFDPQLRQYYDALKARGKHHKVAIVDLMRKQLARLVSVLVNQKSFTPIIPRL

SEQ ID NO: 141842 - protein, 424 aa, unidentified
MDRVADDDVIIDRVAAIDVGKAEVVCCARTPGPPDGRGRRGRVQEVRKSSTMTRSLIELGDWLASLGVTRVVMEATSDYWKPVFYVLEAAGFETWLVNARDVKHLPGRPKTDTLDAVWLCKVAERQMLRASFVAPPPIRRLRDLTRYRVDLVADRRRVKQRVEKLLEDAGIKLSVVASDIFGVSGRSMMQALVAGERDPGVLAQLALRGLRTKIPDLQEAFTGRFGDHHAFLLGGMLRQVDTLDADIAAAEVRIEELVNPFADQIARLTAIPGIGVTAARAIIAEIGVDMSRFPTAAHLASWARFAPGVNSSAGKTKGSSATGHGNKYLAGVLGEAAISASRTKTFLGERYRRIARRRGKQRALVAVGRSILIIIWHLLSESDAVFHDLGPDHYTNHIGSQHAIRNHIRGLNALGYTVTLNPAA

SEQ ID NO: 141843 - protein, 345 aa, unidentified
MEQRHYVGLDVSQDLTTICGIDDAGTRVWRGTCASDPDAIAAAIRTHAPAVVRIGLETGLLSNFLTRTLRQRQLPVVCLDARHAKAALRVQINKTDANDAFGLAQVVRTGWFREVAVKSMDAQTLRMLLIARAQLVGQRQTLANTIRGLLKTFGHVVARGGNGPFAVRVRTLIAGTPELGAVIEPLLDAWQALRAQIAVLDRHAQSRAKTDRVVRRLMSVPGVGVVVALAYTAVIDDPARFKRSSSVGACLGLTPRRYQSGEVDVAGRISKCGDALLRSYLFEAANALLTRIPRTCKLSTWGLALAARIGKRRATVAVARKLAVILHRIWKDDRDFAWDEAPAAA

SEQ ID NO: 141844 - protein, 309 aa, unidentified
MLTAEADKHKTKVVVNTAAGVQALLAWCAKHGAQPAQLHAILEPTGLYHEQAATALPQVRVSLVNPAQARDFAKALALRSKNDALDSYVLARYGQTLSPALWHPAPLHARQLRALLTRREALSKDLLRELNRKEKSQFSPSAPLVDGSIDKAIAFLREQIKQIERAIDQHIDNHPDLKQDCELLNSIPAIGPQAGNAILAVMHNRHIDSAQSLAAYLGVVPVQRQSGSSLNSCARLSKAGPSQVRATLYMAALVGTRHNPHIRALYQRLLKAGKSKKAALGAAMRKQVHLCFGVLKNRIPYQPNYAMNG

SEQ ID NO: 141845 - protein, 343 aa, unidentified
MQAVKTIGLDIAKSVFQVHGVDADGQVVIGRKLKRRYVLAFFQKVPSCLVGMEACATSHHWSRELQALGHRVRLMPPAYVRPYVKRQKNDATDAEAICEAVSRANMRFVETKTTEQQSCLVLHRTRHLFIRQQTSVINAIRAHLAEFGMVAPVGRKGLEQLLEAVANARDQRIPVLARACIAALGAQLRALKAQILEFDRQIMLWHRSHETSKRLDGIPGVGPALATALVASIADPKAFRSGRDFSAWIGLVPRQHSSGGKEKLGSISKQGDRYLRSLFMTGALAVIRYAKIYGSRHRPWLTALLARRPTKVAAIALANKLARMVWAMMSRGERYKEPVALAA

SEQ ID NO: 141846 - protein, 456 aa, unidentified
MPKQAKTKKRRQAKWDEGLPTLNRNAAGIDVGNAEHFVAVPAGRDPEPVRTFGSFTSDLHRMAQWLKACGIETVVMQATGVYWVALFQMLESYGFQVNVVNARHTKTLPGRKTDVLECQWLQKLHTFGLLNNSFRPVEEIQVLRTYLRQRENLVAAAGTCIQHMQKTLTLMNVQLANVISDISGVTGMAILRAIVAGERDPHRLSTLKHNRVRASREEIAQSLEGNWREELLFVLEQSLELYDLYVRKIAVCDQRIERHLKTMTSKRELGQRSDPDVTPAPKHEPRFNLKDHLCRITGVDLTKVAGLEVQTVQTIISEVGVDMSRWNTEKQFASWLGLCPDNRISGGKVLKRGTRQVVNRAATALRLAAWSLLRSQSALGANFRRLRSRLGAPKAITAMAHKLARLIYRMMRFGTEYVEKGMEAYESRYRIQQMKWLVKQAASLNMQLIPSSEVTN

SEQ ID NO: 141847 - protein, 389 aa, unidentified
MKIYVGIDIAKLNHFAAAISSDGEIILEPFKFTNDADGFQLLVSKLESFDKNSIIIGLESTAHYGDNLVRYLVTELYQVCVLNPIKTCQMRKNNVRKTKTDKVDTYVIAKTLMMQDNLRFVSFFDLDMMDLKALGRFRQKTIKQRTRLKIQLTTYVDQVFPEIQYFFKSGLHQHAVYALLKEAPSPKEIASMHMTHLANLLKVNSHGHFTKEQAKELRVLAQKSVGANDSAISIQITQTIQQIELLDSQLEKIEAEMTDIMKFNDSVIMTIPGIGYINGGMILGEIGDIHRFSNPNKLLAFAGLDPSVYQSGNFQAKTTRMSKRGSRVLRYALVNAAWNVVRNNATFKAYYDAKRAEGRSHYNALGHCAGKLVRVIWKMLTDEVEFNLE

SEQ ID NO: 141848 - protein, 410 aa, unidentified
MHLYCGIDWATEHHDVAVVDDGGRVVARCRVSNDAAGFAQLLTVLAEAGDSADDPIPVGIETDRGLWVAALRETGRVIYPINPLAASRYRSRYAVSGAKSDATDAVLLANIVRTDAAAHRPLPADTELAGAIRVLARAQQDAVWARQQIGNQIRDLLKDFYPAAIVAFDELPSGGLARPDARTILAAAPTPAQAAKLTPARLRRLLTKAGRRRDLDRDIERLRQMFTDTYLHQPPRIENAMGIQLTTLLRQLDAACAAADELAEAASAHFEQHPDAAIITSFPGLGNLTGARVLAEIGDDRARFADARGLKAFAGSAPITRASGKKTVVLHRHIKNRRLAAVGSMWALTSLRASPGARRHFDARRTAGDWNRQAQRHLFNKFLGQLHHCLQTGQLYNEHRAFPPPLPLAA

SEQ ID NO: 141849 - protein, 428 aa, unidentified
MQQPKGYPMKTWKELTHYAGLDWAKDHHCVLVLDRQGTIVADFEFEHSLEGWKSFSDKIAAWPQLAVAIETNQGAVVDQLLQRELTIFPVHAVAAKSYRQRKAPSGNKTDHLDAWALADALRTDGHAWKGLDPLDALTQQLRLLCRDEVVLIQQRTALVNQLQQALLEYYPAALEAFDDWTRPSSWEFVLGFPTPDALVTAGKRKWEKFLHSHRLWRPDTAQTRLEIFAKADKFKASKPVTLAKSQLAVSLCKLLSTLDKQLALYRSQIEELFDKHPDKDLFGGLPGAKKVLGPRLLAAIGSDAKRYGSHDVLQCLAGTAPISFQTGQMNRVMVRRGCDKFLRHTVHLWADCFRRASVWGQTYYRQKRSKGMSHACALRCLGQRLLKIVFKIIETKKPYDAELHARNQQKHGSWVLKLVPAGAPEPCE

SEQ ID NO: 141850 - protein, 411 aa, unidentified
MEKVYDKCCGIDVHKKLIVACLKSGNRQEIREFGATTRELLEMADWLKERGCMMVAMESTASYWKPLYNILESCGLDSIVVNARHMKAVPGRKTDVKDAEWIADLLQHGLLQASYIPDKDQRELRELVRYRKSLVGERNRELNRLQKMLEGANIKISGTITDINGKSARNILEYILTGRPFGTAEYDLLYEKRIIAHNLKATKEQIIDDLNGVMSDLQRKMMRILLNHLDELNRHIQELDDDIDHFMKPEEKQAAAAIQDIPGIGETSAQAIISVIGTDMGRFPTDGHIAAWAGLCPGNNESANRRRTGKTRKGNAFLRETLVVCAHSAVKNKSTYFSAQFARISAHRGKKRAYVAVAHSMLIAIYHIIKDGVVFKDLGADYYNQFNKERKINAYLKKLKALGWEAPVVAA

SEQ ID NO: 141851 - protein, 362 aa, unidentified
MKQYIGCDAHARYSVFVSVDEMGRVGAPVRVEHGSRDLRDYLNGLEKETAVAVEASGGWYWFMDELEAAGLDARLVNPLEAKRRIGGRNKTDKLDARGLAILLRNGTLPEVWIPPAELRDLRGLMRGRLAMRSHTTVLKNRIHAALKRYGTLDGGVVSDLFAKKQRLKLSLAIGRMPEETRRTTLHEWELLDEVERHIGELEARIRFRIGRLGWVRLWKSLPGVGEILGATIHLEIGDVHRFATAAHLASYAGLVPTVHASGGKSYAGPTSKQANHYLRWAFVEAADCILMHRHRFTGHHALQLYDRVKAKKCHGKAAVAVARHLAESSWWILCKREKYRQPHAAAVSSSKERVSAEVSLAH

SEQ ID NO: 141852 - protein, 398 aa, unidentified
MLSIGIDVSKGKSTVCGMKPRGEIVYTPFEVQHTREGMSELVSLLRGSGEEVRVVLESTGSYHCPVVAALLENGIFVSVVNSLRMKRFCSQSIRRVKTDQIDAMQIALYGLAYWPELQPTRLPENTYRELQLLARQYYQMTSILIKAKVDFNALCNQVLPGMQELMNDHAGRHKLSDFVLRYRHTAHILKMGETRFRKDYCKWAEKKGYRNHERMAALIFATAQNGIPVLPDAPSTQIVITEAIRVLHTVEASRDAILTQMQALAKTLPEYSLVREMPCIGDTLAPRLIAEIGDVRRFHSKRALIAYAGIDAPPYQSGKFSANNRHISKRGNRYLRKTGYEVMQSYVMHKPANDPIFTFIEKKRSEGKSGKLAMVAGLNKFLRVYYGKVTELYRSLPQ

SEQ ID NO: 141853 - protein, 346 aa, unidentified
MLYAGLDLSRQKLDVHVLDETGQTVELLAVHPDVDALRTLAARIARYGQPVEAAIESMNGARFVHDTLERLGWDVEIADAAKARGLAPLAAKTDKIDARVLAELARRELVPAIWLPDPSIRAERERARYRLYLVRYRTSLKNRIHATLIAFGQSVPVSDLFGMRGRELLAAMPIPEPWATTLTTSLRLVDDLETEIDKIEAELRATGARHRYIPLLKTVPGVGWVLAYTIAAEIGDIGRFAGPKQLTGYTGLCPRVYQSGLSDRRGPLSKTGPKYLRWALIEAATTAARNPIYHDRYERTKRRLGKQRGSKVARVELARELASAIWYILTRQEPFRAGGPTFGLVA

SEQ ID NO: 141854 - protein, 399 aa, unidentified
MDDITYVGLDVHKATVCVAIAEGGRGGEVRQVGVFENRPDILCKLAARLDKGNRRLSFCYEAGPCGYGLQRLLTSRGHDCIVVAPSLIPMKSGDRVKTDRRDAMMLAKLHRAGELTAVWVPDAAHEAMRDLVRARATAGRVLAKARQHLQGFLLRHERIYRGPRAWTLAYRRWLTTVRFDHPAQQIVLQDYIHAVEDAEARRDRLTRQIEELLPSWSMAPVVEALQAMRGVGLVVAVTVAAEVGDFRRFANARQLMAYLGLVPSEHSSGAAIRRGGITKAGNALARRVLIEGAWTYRMKARVSRKLHDRLEPLSTEIRDIAWKAQVRLCARYRRLAALGKPSVVATTAIAREMVGFIWAIARRVQSAVEDQRTHSAHAEAPMLTAAAKPCGFAAALGRR

SEQ ID NO: 141855 - protein, 350 aa, unidentified
MQIIGCDYHPGFQQIAFVDTETGELQERRVQHREEAEKFYRDLAAQGMKVRVGMEASGHARWFERLLSELQFELWIGDAAEISARRVRKQKTDRQDAQLILKLMLKDDFPQIWVPSWENRDLRQLLWHRHRMVQARTRMMNQLQAVALNEGLRCKKRLWREAGREQLEAFQLAPWASQRRRDLLELLDQLNPTIAKLTQAIEEEVKKCPAARRLKTHPGVGPLTALAFVLMIGKADRFQCGKQIASYLGLVPLEKSSGNQRRLGHITKQGNSLLRFLLVEAAQVTARSLPEWRSKYCHLTLRRGRKIAKVAMARKLAVRLYWMLRKEWDYEQLRKFGSHAGKPGTGDGVK

SEQ ID NO: 141856 - protein, 444 aa, unidentified
MKKNSTTAQSPKRAAARQAGPNTIGMDLGDKTSRYCMLGAGGEKVSEGTVATTRKAMAQKFSGMRRCRVAIEVGTHSPWLSRLLSSLGFEVFVANARQVRLISESSRKNDRLDAQLLARLARVDPQLLRPIRHRSEQAQGDLMRIRVRAALVEARTGLVNAARGFAKALGERLPVCDTDSMGVEKLEGLPAALREGLRPLVEQVKSMTEEIHELDSTIEQIARTKYPETELLRQVSGVGTLIALTFVLTVEDRDRFQKSRDVGCYVGLRPKQSESGQSQPQLRISKEGDMYLRKMLVQAAHCILSRRGPDTDLKRWGLKLAERGGKNAKKRAIVAVVAPVVGGRGSVRAVAQQPGGVFEEKGSLRHVVGFVTNRRVRVTARSRRNGRLGNGAIQFDAEMAAPVLRLRTPTGTGARQLHQECEWKQGESAMGRKTFLRKEDGGER

SEQ ID NO: 141857 - protein, 322 aa, unidentified
MIVGIDTSKDFFDATAIEGDRVIFQKQFDNNVKGFNLFLKAIKNNPIELVCIEATGPYHLRFALFLNENNFNISVVNPLVIKRYAQMKMSRAKTDKKDSYLIAFYAKEQKPELWTAPSEASLEIRQLDTHLELLMKHKRALANQLHAFKSRGAVVRGLEKQMEEQINQLNENIKKIERKIEVLVQSSYKEIAGQLKSIPGIGKKSAYMMIVSTNGFSTFDNYKQVISYFGLAPRHYQSGTSVKGKTRICKMGMSRVRKTLYMAAVTAIKYNKTCKDLYERLRTKGKSHDLATIAVINKLIKQSFAIAKNNTYYQVDHILQSA

SEQ ID NO: 141858 - protein, 344 aa, unidentified
MNHYAGIDVSLELSSVCIVDATGKVVRETKVETRPEALVKFFKGFDLPLTRIGLEAGPLSHWLYAGLTDAGFETTLMETRHVKAALSALTVKTDRRDARGMAQLLRMGWFRPVHAKSAGSQEVRALLVARKQLQHKLTDIELSIRGILRGFGLKVGKVTDKSFEVRIRKLITGHPMLEQIAEAMLVARATLLEQFNKLHKAVLKIARHDDICRRFMTTPSVGAIVAITYKSALDNPHRIKKSRNAGPLFGLTPKRYQSGETDVTGGISRVGDEMVRTALYEAANVLLSRVTRFSALKHWGLEVAKRRGSKRAKVAVARKLAVILHRMWIDGSTFRWSKTKSAHS

SEQ ID NO: 141859 - protein, 315 aa, unidentified
MTASTEWFVGIDVSQNVLDVHVRPDATACQFDNTPEGIAALLAWLRPLGLTLIVLEASGGYESAVLTTLSLGALPVCLVNPKRVRDFAKARGRLAKTEALDAAILADFAQTFRPPVRPVPDADAQQLQALLTRRTQLVGMRTMEVNRLKTLTVSRVRRSVPNVIRTLDREIRQADKDLGEAIRACPVWAAKDELLQSIPGIGPTVSRTLLAEMPELGTLSREQAAALAGVAPINRESGQYRGKRMIAGGRSSVRSMLYLAGHAARRGNATLRAFADRLKAAGKAPKVIRIALARKLLLIANAVLRDKTAWTLKTA

SEQ ID NO: 141860 - protein, 343 aa, unidentified
MTISILGIDIAKNTFQLHGADHSGKTVYKKRLARRELAAHVTNLPPCTIVMEACGGSNYWARVFQSSGHSVKLIGAQFVKPFVKTNKNDANDAQAIVEAASRPSMHFVPFKQVEQQDIQTIHRIRTRVVKNRTALINEIRGLCLEYGVVLTPGAARVKSSLCVAIADGDNELTPLSRESMQDLYDELVDVECRLKKLDNKIRQLCRQNENCQRILKIPGVGELTATAIVAAVPDPKEFRNGRHLSAWLGLVPRQSSSGDKRTLLGISKRGDRYLRTLLIHGARAVLSHYKHKDNDYTHWVGRKKATLSHNKAAVALANKNARIIWSMLNSGEEFSYGASATAA

SEQ ID NO: 141861 - protein, 347 aa, unidentified
MRFYTQPHQFYCGIDLHARTMYVCILNQDGEIVLHRNMKTSPETLLRNIAPYRADMVVAVECMFTWYWLADLCAQERIPFVLGHALYMKAIHGGKAKNDKIDAHKIAVLLRGGMLPQAYVYPAAMRATRDLLRRRMHLMRKRAELLTHIQNTNSQYNLPEIGQKIAYKANRAGVAERFADPAGQKSIAVTLALISHSDSRLRDMELSVLTTAKEHHTNTLYLLRTVPGIGEILSLVLLYEIHDIHRFPRVQDFVSYCRVVKCAKESAGKRYGTAGSKIGNAYLKWAFSEAAVLFLRDNPSGQKYLTRLEKKHGRGKALTILAHHLARAVYCMLKRHTAFEMNKFLNG

SEQ ID NO: 141862 - protein, 429 aa, unidentified
MNDVTDSLALFRKMKASVRGSEKYLLVGIDVAKNKHHAFFGTPNGRTLRKNMVFDNNLKGFENLRGLAGDLKSQHGLAEIVYGLEPTASYHKPLAEYLLRQKEQVVYVSNVAVVKNRGLLDGRWDKNDKKDAANVADLLSQSRCLFYELPQEDLRELRSLIGFRIKLKKEEHALKMRLRNNVFAQFFPELDQLYIKAGQPDDLILSIAEHCLDPREIAAMEFDAFLKLITQRKIRIEQEKRLRELWEIAGKSVGCLVHDAARWEAKSLVTQLKSVRETVKGNEQLMAKTAKQFAEYECLLSIPGFGPIVSAMVLAAIGNPCRFQNQGQVVRLAGLDLSAERSGKKSNSVKPVISKQGKSALRYALVQAAMVASTANPVIRNYFSKLIKGRELERGINLKMKVKLAAKLLVVAWTLMKKREHFKSSCFTG

SEQ ID NO: 141863 - protein, 412 aa, unidentified
MDVLYERCCGVDVHKKMVVACLITPDATGTPTKETRTYGTMTADLLEMMDWLVGAGCTHVAMESTGVFWKPLYNLMEGTLEVLVVNAAHMKNVPGRKTDVKDAEWIADLLRLGLLRPSFIPDRPQRELRELTRYRTSLLQERSAEVNRLQKTLEGANIKLAAVATDIMGKSGRDMLAALVAGRTDAAAMAQLARGKMREKLPQLEKALHGQFAAHQRFLVAQQLAHIDGLDDIIERVSAEIAERVRPFAQEIEQVDTVTGIGRRTAEVLVAEIGTTLTRFPTHRHLTSWAGLCPGNNESGGKHHSGKTRKGSPWLRAALVEAAKAAGRSKKTYLGAQYRRLKARRGAKRAAVAVAHSILVIVYHILTRHEPYHDLGVTYFDERDRQAVERRLVRRLQALGYDVSLQPTAPAA

SEQ ID NO: 141864 - protein, 420 aa, unidentified
MKVYNVDNFAVLIGIDWADKKHDICEHPTHSEKYHYSVIEHKPKVLHEWAMDLKKRYPNQKIAVVCELQKGPLIYALTKYDHLTLFTVNPSTVAKYRKAFTPSGAKDDPSDALIEVEILSLHMDKLSVIEPESVAMRTLAQLVEYRRSLVQDGVDLSNKITTALKNYYPYVLELFEEKDTMIFCDFIEKWPSLSKLKRARKQTLLDFFNSHNSHYTDINNARITGIRDAMPLTEDEGVIVPNQMLVEVFIAEFRVLLKGIKQLDKAIKSIYKTQSDKVIFDSLPGAGPQLAPRLLVAFGNNRDRYHDASELQKYAGIAPVIERSGKQMWTHWRYSCPTFLRQTFVEWAGFSIRYSFWAKAYYEQQKSKGKPHNSIIRALAFKWIRIVFRCWKTNTPYDESKYLEALKRRGSPLLKFAINS

SEQ ID NO: 141865 - protein, 349 aa, unidentified
MSIVAEQYTHIVGVDTHARTHTYAVMSSITGQITDTATFPTSPPGVARALTWMGRRSTAGRTLVAVEGASSYGAGLTRALEAAGVDVCDVKPPRRASRAGSGKSDEIDASAAARAVAGIDTSLLLRPRTGGNRNALRILLNARRSMDRQRTADRNALTALARTMDLGIDARKALTVAQIRTIGSWRDHPSDTLETAVARTEARRLARAVVGITVDLEENRTAMARIVDTMAPGLLEVPGVGPVTAAILLVAYSHHGRVRSEAAFAALAGVSPIPASSGNTVRHRLNRHGDRQLNQALDTIARSRMTFDPATRDYIARRTQEGRTGREIRRCLKRTIARQLYRRIRALMP

SEQ ID NO: 141866 - protein, 412 aa, unidentified
MQTLVERGCGLDVHQATVVACLLIVRKDGRVQKQLRTFGTTTRELLSLREWLLSEGCTHVALESTGVYWKPVYAILEGAFQIVVANAQHVKKVPGRKTDVKDAEWIADLLCHGLLRSSFVPPQPIRELRDFTRYRRKLVESRSAERNRLLKVLETANIKLASVATDVFGTSGRLMLRALIEGKSTPQEMAELAQKRLRSKIPQLELALEGKLEEHHRFLLKLQLDRLERVESDLAALEQRIQEKLQPYAAQLALLQGIPGVERTLAAVIIAELGVDMSVFQSVSQLASWAGVCPGNNESAGKRKSSRIPKGNVYLKTALVEAANSAARAKGTYLRDKFYRVKARRGYKRAAVAIAHKILVSIYHMLSQNVSYNDLGDRYLDNLNKHHLTRNLVHRLERLGYSVTLTLQQEVA

SEQ ID NO: 141867 - protein, 386 aa, unidentified
MDHPTTLSVPDPTGICGDCATLFVSLELSRSTWVATSLALGSRKMSKHTLVGGDARMLLDLLARLKSKAEQRTATPIKIVAIQEVGLDGFWIHRLLEANGVESHVVDPASIAVPRRHRRAKTDAIDGETLLRTLMAWQRGEPRVCAMTVPPSPSEEDRRRVSRERAMLLRERIRHTNRIRGLLFGQGITNYNPLHKNRRKGLEELRTGDGRPVPAHLKAEILREIDRLELVLRQINEVEAERDEMLRLAQASSPVALLMRLKGIGPEFAAVLYLEGLFRHFENRRQLAAYAGLAPSPWKSGSVDHEQGISKAGNPRLRTTMVELAWMWVRYQPASALSCWFRQRVGSERGRIRRISIVALARKLLIALSRYINHGEIPAGAVVKPV

SEQ ID NO: 141868 - protein, 391 aa, unidentified
MIYIGIDVAKDKHDCFITNSDSEVLFKAFTIFNNLDVFNDLYQKIESVMDDVTKVKVGLESTGHYSYNLLGYLIDKGLPTYVINPLHTNLYRKSLSLRQTKTDKVDARTIASMLMSDVNLKSYSDTSYHNEELKSLTRYRFDKVKERAKLKTSVSRLVCILFPELEKLVPTLHMASVYALLSEFPSAKHVATAHLTRLTNLLSKSSKGRYGKDTAITFRDSARASIGSNMPAKSLELKHTIKLIQELDSEIDEIENEIKIIMDEINSPILSIPGINYRMGAMIIAEIGDFNRFDSPDKILAYAGFSPSTYQSEQLNGAYAHMEKRGSRYLRYALYNATKYVCHWNPTFAAYLAKKRAEGKHYNVAISHAVKKLVRVIYHLEKTKQQYIKAT

SEQ ID NO: 141869 - protein, 346 aa, unidentified
MTILDRTRPVTGGVDTHLDLNVAAALDSIGGLLGVAEFRTTRIGHGLLVDWLGGFGPVARVGVEGTGSYGAGLARFLRGAGIEVVEVDRPNRQARRRTGKSDPADAIEAARAALSGRAQGAGKTRDGNVEAIRALVVAKRSARSSKIKALNQIRHLGFTASDELRERLSGISRQHLGAAAARLRPRAGSDAITFATKTALSTLGRRVLALDEEKERLNVLLAELVGKTAPSLLELHGVGVDTAATLLVAAGDNPGRLRCEAAWAHLCGVAPIQASSGKVTRYRLNRGGDRQANSALWGIVITRLRSDPRTQMYMERRLKEGRSKPEIIRVLKRYVAREVYPHLPRG
